United States Patent Application Publication US 2006/0134663 A1 - sequence listing, part 82

SEQ ID NO: 227121 - DNA, 1335 bp, Homo Sapiens
ttggtgcttagcttggggtctcctggccccttgacgcgtcaggttgctgtacccctgcatcggatgcgctgtaccctgcgctggctccgtgaaccttagggacaacaccgggacacccgcgaggccggaaaatggactcagtggcttttgaggatgtgtctgtgagcttcagccaggaggagtgggctctgctggctccttcacagaagaaactctacagagatgtgatgcaggaaacattcaagaacctggcatctataggggaaaaatgggaagacccgaatgttgaagatcaacacaaaaaccaaggacgaaatctaagaagccatacgggagagagactctgtgaaggtaaagaaggtagtcaatgtgcagaaaacttcagtcccaatctcagtgtgacgaagaagactgccggagtaaaaccatatgagtgtactatctgtggaaaagccttcatgcgtctctcatcccttactagacacatgaggtctcacactggatacgagctatttgagaagccatataaatgtaaggagtgtgagaaagcctttagttatctcaaatcctttcaaagacatgaaaggagtcacactggagaaaaaccctataaatgtaaacaatgtggaaaaaccttcatatatcaccagccctttcaaagacatgagcggactcacattggagaaaaaccctatgaatgtaagcaatgtggaaaagctcttagttgttccagttcgcttcgagttcatgaaaggattcacactggagaaaagccctatgaatgtaaacaatgtgggaaagccttcagttgttccagttctattcgagtacacgaaagaactcacactggagagaaaccctatgcatgtaaggaatgtgggaaagccttcatttcccacacaagtgttctaacacacatgataacacacaacggagatagaccttataaatgcaaagaatgtggaaaggcattcatttttcccagttttttacgagtacatgaaagaattcacactggagagaaaccctataaatgtaaacaatgtggtaaagccttcagatgttccacctccattcaaattcatgaaagaattcatactggagagaagccctataaatgtaaagaatgtgggaaatctttcagtgcacgcccagcctttcgagtacacgtgagagtgcatactggagagaaaccctataagtgtaaagaatgtgggaaagcctttagtagaatcagttactttcgaatacatgaaagactcacactggagagaaaccctacgaatgtaaaaatgtgggaaaactttcaattatcctctagatttgaaaatccac

SEQ ID NO: 227122 - DNA, 1150 bp, Homo Sapiens
tggtgctactctgcggccgcggcgagcctcgagctgtctagaccccacggcgacaccaccaagaagcccatcatcggaatattaatgcaaaaatgccgtaataaagtcatgaaaaactatggaagatactatattgctgcgtcctatgtaaagtacttggagtctgcaggtgcgagagttgtaccagtaaggctggatcttacagagaaagactatgaaatacttttcaaatctattaatggaatccttttccctggaggaagtgttgacctcagacgctcagattatgctaaagtggccaaaatattttataacttgtccatacagagttttgatgatggagactattttcctgtgtggggcacatgccttggatttgaagagctttcactgctgattagtggagagtgcttattaactgccacagatactgttgacgtggcaatgccgctgaacttcactggaggtcaattgcacagcagaatgttccagaattttcctactgagttgttgctgtcattagcagtagaacctctgactgccaatttccataagtggagcctctccgtgaagaattttacaatgaatgaaaagttaaagaagtttttcaatgtcttaactacaaatacagatggcaagattgagtttatttcaacaatggaaggatataagtatccagtatatggtgtccagtggcatccagagaaagcaccttatgagtggaagaatttggatggcatttcccatgcacctaatgctgtgaaaaccgcattttatttagcagagttttttgttaatgaagctcggaaaaacaaccatcattttaaatctgaatctgaagaggagaaagcattgatttatcagttcagtccaatttatactggaaatatttcttcatttcagcaatgttacatatttgattgaaagtcttcaatttgttaacagagcaaatttgaataattccatgattaaactgttagaataacttgctactcatggcaagattaggaagtcacagattcttttctataatgtgcctggctctgattcttcattctgtatgtgactatttatataacattagataattaaatagtgagacataaatagagtgtttttcatggaaaagccttcttatatctgaagattg

SEQ ID NO: 227123 - DNA, 796 bp, Homo Sapiens
  misc_feature (578)..(606): n is a, c, g, or t
ctttgtacaaaaaagttgggtagttaagctcgtgtaacggcggcggtgtcggcagctgctgtagcgaagagagtttggcgcgatgtctcacaccattttgctggtacagcctaccaagaggccagaaggcagaacttatgctgactacgaatctgtgaatgaatgcatggaaggtgtttgtaaaatgtatgaagaacatctgaaaagaatgaatcccaacagtccctctatcacatatgacatcagtcagttgtttgatttcatcgatgatctggcagacctcagctgcctggtttaccgagctgatacccagacataccagccttataacaaagactggattaaagagaagatctacgtgctccttcgtcggcaggcccaacaggctgggaaataattgtgttggaagcactgggggggttggggtgggcttggaacacaggtgtgtacagcgtgctgtagtggaagttttgtatcatagtaatcctgtttccactttgttatactctagccaagattgactgtattagatgaaatgtgaggatcttgttcaatcggaaacccccgttacctcctcnnnnnnnnnnnnnnnnnnnnnnnnnnnnnacttaaacatttttatgatgatttagatggaagttgttcttcgtcacttaatgttggttccagtccttcaactgttcatatctactttataacattcacatactaaccccttcttcaagatggggtggggggtggaaatgcagttttagccatgtcctcaagataaagtcttggtaaaaataaataaatg

SEQ ID NO: 227124 - DNA, 748 bp, Homo Sapiens; identical to SEQ ID NO: 193544
  misc_feature (518)..(546): n is a, c, g, or t

SEQ ID NO: 227125 - DNA, 705 bp, Homo Sapiens; identical to SEQ ID NO: 193545
  misc_feature (558)..(586): n is a, c, g, or t

SEQ ID NO: 227126 - DNA, 690 bp, Homo Sapiens; identical to SEQ ID NO: 193546
  misc_feature (87)..(115): n is a, c, g, or t

SEQ ID NO: 227127 - DNA, 1462 bp, Homo Sapiens
  misc_feature (402)..(443): n is a, c, g, or t
ttgggagaaggatttgtaaaccccggagcgaggttctgcttacccgaggccgctgctgtgcggagacccccgggtgaagccaccgtcatcatgtctgaccaggaggcaaaaccttcaactgaggacttgggggataagaaggaaggtgaatatattaaactcaaagtcattggacaggatagcagtgagattcacttcaaagtgaaaatgacaacacatctcaagaaactcaaagaatcatactgtcaaagacagggtgttccaatgaattcactcaggtttctctttgagggtcagagaattgctgataatcatactccaaaagaactgggaatggaggaagaagatgtgattgaagtttatcaggaacaaacggggggtcattcaacagtttagatattnnnnnnnnnnnnnnnnnnnnnnnnnnnnnnnnnnnnnnnnnnaaaaatagttcttttgtaatgtggtgttcaaaacggaattgaaaactggcaccccatctctttgaaacatctggtaatttgaattctagtgctcattattcattattgtttgttttcattgtgctgatttttggtgatcaagcctcagtccccttcatattaccctctcctttttaaaaattacgtgtgcacagagaggtcacctttttcaggacattgcattttcaggcttgtggtgataaataagatcgaccaatgcaagtgttcataatgactttccaattggccctgatgttctagcatgtgattacttcactcctggactgtgactttcagtgggagatggaagtttttcagagaactgaactgtggaaaaatgacctttccttaacttgaagctacttttaaaatttgagggtctggaccaaaagaagaggaatatcaggttgaagtcaagatgacagataaggtgagagtaatgactaactccaaagatggcttcactgaagaaaaggcattttaagattttttaaaaatcttgtcagaagatcccagaaaagttctaattttcattagcaattaataaagctatacatgcagaaatgaatacaacagaacactgctctttttgattttatttgtactttttggcctgggatatgggttttaaatggacattgtctgtaccagcttcattaaaataaacaatatttgtaaaaatcatactaatgcttattttattttaattgtatagaaagaaaaaaatgcctaatataatgttttcttgcataaatactggaaattgcacatggtacaaattttttcttcattactgtacagtgatgatgttaatgactttgaagcactgaaagttactgaagtgccttctgaatcaaggatttaattaaggccacaatacctttttaatactcagtgttctgtttttttaaaaacttgatattcctgtatggtgcatatatgatacagttacctaatcatgttgaataaatgggcatgcc

SEQ ID NO: 227128 - DNA, 1195 bp, Homo Sapiens
caatgctttacatataaaaagaccaactttgtacaaaaaagttggcctgaggctgccgcgcggcggtcactgcgccggggtagtgggccccagtgttgcgctctctggccgttccttacactttgcttcaggctccagtgcaggggcgtagtgggatatggccaactcgggctgcaaggacgtcacgggtccagatgaggagagttttctgtactttgcctacggcagcaacctgctgacagagaggatccacctccgaaacccctcggcggcgttcttctgtgtggcccgcctgcaggattttaagcttgactttggcaattcccaaggcaaaacaagtcaaacttggcatggagggatagccaccatttttcagagtcctggcgatgaagtgtggggagtagtatggaaaatgaacaaaagcaatttaaattctctggatgagcaagaaggggttaaaagtggaatgtatgttgtaatagaagttaaagttgcaactcaagaaggaaaagaaataacctgtcgaagttatctgatgacaaattacgaaagtgctcccccatccccacagtataaaaagattatttgcatgggtgcaaaagaaaatggtttgccgctggagtatcaagagaagttaaaagcaatagaaccaaatgactatacaggaaaggtctcagaagaaattgaagacatcatcaaaaagggggaaacacaaactctttagaacataacagaatatatctaagggtattctatgtgctaatataaaatatttttaacacttgagaacagggatctgggggatctccacgtttgatccattttcagcagtgctctgaaggagtatcttacttgggtgattccttgtttttagactataaaaagaaactgggataggagttagacaatttaaaaggggtgtatgagggcctgaaatatgtgacaaatgaatgtgagtaccccttctgtgaacactgaaagctattctcttgaattgatcttaagtgtctccttgctctggtaaaagatagatttgtagctcacttgatgatggtgctggtgaattgctctgctctgtctgagatttttaaaaatcagcttaatgagagtaatctgcagacaattgataataacattttgaaaattggaaagatggtatactgtttttagaggaataaacgtatttgtggtttaa

SEQ ID NO: 227129 - DNA, 1442 bp, Homo Sapiens
ttggggctgcccgggctgcgcggcgtctgcaggcgccaccgctgcctctttccggctgtgaccctcctcgccgccgccgcttcgctgcgtcctccgactccccgcgccgccgagaccaggctcccgctccggttgcggccgcaccgccctccgcggccgccccctggggatccagcgagcgcggtcgtccttggtggaaggaaccatgaactggcatctccccctcttcctcttggcctctgtgacgctgccttccatctgctcccacttcaatcctctgtctctcgaggaactaggctccaacacggggatccaggttttcaatcagattgtgaagtcgaggcctcatgacaacatcgtgatctctccccatgggattgcgtcggtcctggggatgcttcagctgggggcggacggcaggaccaagaagcagctcgccatggtgatgagatacggcgtaaatggagttggtaaaatattaaagaagatcaacaaggccatcgtctccaagaagaataaagacattgtgacagtggctaacgccgtgtttgttaagaatgcctctgaaattgaagtgccttttgttacaaggaacaaagatgtgttccagtgtgaggtccggaatgtgaactttgaggatccagcctctgcctgtgattccatcaatgcatgggttaaaaatgaaaccagggatatgattgacaatctgctgtccccagatcttattgatggtgtgctcaccagactggtcctcgtcaacgcagtgtatttcaagggtctgtggaaatcacggttccaacccgagaacacaaagaaacgcactttcgtggcagccgacgggaaatcctatcaagtgccaatgctggcccagctctccgtgttccggtgtgggtcgacaagtgcccccaatgatttatggtacaacttcattgaactgccctaccacggggaaagcatcagcatgctgattgcactgccgactgagagctccactccgctgtctgccatcatcccacacatcagcaccaagaccatagacagctggatgagcatcatggtgcccaagagggtgcaggtgatcctgcccaagttcacagctgtagcacaaacagatttgaaggagccgctgaaagttcttggcattactgacatgtttgattcatcaaaggcaaattttgcaaaaataacaaggtcagaaaacctccatgtttctcatatcttgcaaaagcaaaaattgaagtcagtgaagatggaaccaaagcttcagcagcaacaactgcaattctcattgcaagatcatcgcctccctggtttatagtagacagaccttttctgtttttcatccgacataatcctacaggtgctgtgttattcatggggcagataaacaaaccctgagagtatacaaaagaaaccatgcaaagcaacgactactttgctac

SEQ ID NO: 227130 - DNA, 926 bp, Homo Sapiens; identical to SEQ ID NO: 193549

SEQ ID NO: 227131 - DNA, 941 bp, Homo Sapiens; identical to SEQ ID NO: 193555

SEQ ID NO: 227132 - DNA, 1308 bp, Homo Sapiens
ttggctccggggtgtgtggacgccgctttgttgcctgagatgaagttggagcccttgtttttgacattggatcctatactgtgagagctggttatgctggtgaggactgccccaaggtggattttcctacagctattggtatggtggtagaaagagatgacggaagcacattaatggaaatagatggcgataaaggcaaacaaggcggtcccacctactacatagatactaatgctctgcgtgttccgagggagaatatggaggccatttcacctctaaaaaatgggatggttgaagactgggatagtttccaagctattttggatcatacctacaaaatgcatgtcaaatcagaagccagtctccatcctgttctcatgtcagaggcaccgtggaatactagagcaaagagagagaaactgacagagttaatgtttgaacactacaacatccctgccttcttcctttgcaaaactgcagttttgacagcatttgctaatggtcgttctactgggctgattttggacagtggagccactcataccactgcaattccagtccacgatggctatgtccttcaacaaggcattgtgaaatcccctcttgctggagactttattactatgcagtgcagagaactcttccaagaaatgaatattgaattggttcctccatatatgattgcatcaaaagaagctgttcgtgaaggatctccagcaaactggaaaagaaaagagaagttgcctcaggttacgaggtcttggcacaattatatgtgtaattgtgttatccaggattttcaagcttcggtacttcaagtgtcagattcaacttatgatgaacaagtggctgcacagatgccaactgttcattatgaattccccaatggctacaattgtgattttggtgcagagcggctaaagattccagaaggattatttgacccttccaatgtaaaggggttatcaggaaacacaatgttaggagtcagtcatgttgtcaccacaagtgttgggatgtgtgatattgatatcagaccaggtctctatggcagtgtaatagtggcaggaggaaacacactaatacagagttttactgacaggttgaatagagagctgtctcagaaaactcctccaagtatgcggttgaaattgattgcaaataatacaacagtggaacggagtttagctcatggattggcggctccattctagcctctttggggtacctttcaacagatgtggatttccaagcaagaatatgaagaagaaggaaagcagtgtgtaaaaagaaaatgcccttgagaaa

SEQ ID NO: 227133 - DNA, 1048 bp, Homo Sapiens; identical to SEQ ID NO: 193556

SEQ ID NO: 227134 - DNA, 737 bp, Homo Sapiens; identical to SEQ ID NO: 193557

SEQ ID NO: 227135 - DNA, 956 bp, Homo Sapiens; identical to SEQ ID NO: 193558

SEQ ID NO: 227136 - DNA, 849 bp, Homo Sapiens
ctttgtacaaaaaagttggaaatggctgcccgagggagacgggcggagcctcagggccgggaggctccgggccccgcgggcggtggcggtggcgggagccgttgggctgagtcgggatcggggacgtcgcccgagagcggggacgaggaggtgtcgggcgcgggttcgagcccggtgtcgggcggcgtgaacttgttcgccaacgacggcagcttcctggagctgttcaagcggaagatggaggaggagcagcggcagcggcaggaggagccgcccccgggtccgcagcgacccgaccagtcggccgccgccgctggccccggggatccgaagaggaagggcggtccgggctccacacttagcttcgtgggcaaacgcagaggcgggaacaaactagccctcaagacgggaatagtagccaagaagcagaagacggaggatgaggtattaacaagtaaaggtgacgcgtgggccaagtacatggcagaagtgaaaaagtacaaagctcaccagtgcggtgacgatgataaaactcggcccctggtgaaatgacgcccctcccccacctgcccatggcctgggactctctgcgatgtacataactatttaatgcagcggcagcggcgacagccttccctgagaggacttaaaagcagaaggaaaccgagatgcttcccgcagccgtggacgattctccaggactctttttttaccttgagcacttgcctcgtgagacttcatagaacagtggtttactgtcccccccttctcacctcctcattctctctggctctttctgtcttcctcttctcaccctcctccctccccctaaccaatcacttctgggga

SEQ ID NO: 227137 - DNA, 924 bp, Homo Sapiens
ttgggtctcgctgcccctgggaccccgtgtcatcgcccaggccgagcacgatgccccctaaaaagggaggtgatggaattaaaccacccccaatcattggaagatttggaacctcactgaaaattggtattgttggattgccaaatgttgggaaatctactttcttcaatgtgttaaccaatagtcaggcttcagcagaaaacttcccgttctgcactattgatcctaatgagagcagagtacctgtgccagatgaaaggtttgactttctttgtcaataccacaaaccagcaagcaaaattcctgcctttctaaatgtggtggatattgctggccttgtgaaaggagctcacaatgggcagggcctggggaatgcttttttatctcatattagtgcctgtgatggcatctttcatctaacacgtgcttttgaagatgatgatatcacgcacgttgaaggaagtgtagatcctattcgagatatagaaataatacatgaagagcttcagcttaaagatgaggaaatgattgggcccattatagataaactagaaaaggtggctgtgagaggaggagataaaaaactaaaacctgaatatgatataatgtgcaaagtaaaatcctgggttatagatcaaaagaaacctgttcgcttctatcatgattggaatgacaaagagattgaagtgttgaataaacacttatttttgacttcaaaccaatggtctacttggttaatctttctgaaaaagactacattagaaagaaaaacaaatggttgataaaaattaaagagtgggtggacaagtatgacccacgtgctttggtcattccttttagtggggccttggaactcaagttgcaagaattgagtgctgaggagagacagaagtatctggaagcgaacatgacacaagtgctttg

SEQ ID NO: 227138 - DNA, 378 bp, Homo Sapiens
actttgtacaaaaaagttggctctggtctgtgttagggacagaggaaaacttggtgtgcctcctggtgtcacagaactggatcctctgcataccccagcttctccacatgccactgctaggggtaccccagctgctgccactcctgctggagggtgaactggggaccctgcaccctccgggaagccatggagtctgctggaggcaccatatcagcctgcgggactagggtggggagcaaacaggccagcggtggaggtctggacagttcaagtgtgatgcatctgtggcaaggagaaatccttccgcctctgggcctcaagctgcctgtccataaaatggggacatggccagctgaccgacaactgagtctccggccc

SEQ ID NO: 227139 - DNA, 1193 bp, Homo Sapiens
tgtacaaaaatggtggtgttcgggtatgaggctgggactaagccaagggattcaggtgtggtgccggtgggaactgaggaagcgcccaagcttttttgttctgaactcccactgcgttgtggattcctgaggatgggatgactgtatcttgattacccggaggtctggcatataccacgtgctccctaaattatgagcgaatgttgaataaaattttaaaggaaatgaaacacgatttccaaaatgaatttaattttttatgagaaattgaggatagagatgttaataagtagccgctgtttcatctctccacctgaagagttaggaggacaactacaaagagcctgactgccttctcggaatgaggagagaggaaaacagcaacagtatcagttttcaagatggcagcatctatgcatggtcagcccagtccttctctagaagatgcaaaactcagaagaccaatggtcatagaaatcatagaaaaaaattttgactatcttagaaaagaaatgacacaaaatatatatcaaatggcgacatttggaacaacaggctggtttctctggaatattctcaaacttcctgttcagacgctgctcaaggttaaacatgatgctttgaagacatatgcatcattggctacacttccatttttgtctactgttgttactgacaagctttttgtaattgatgctttgtattcagataatataagcaaggaaaactgtgttttcagaagctcactgattggcatagtttgtggtgttttctatcccagttctttggcttttactaaaaatggacgcctggcaaccaagtatcataccgttccactgccaccaaaaggaagggttttaatccattggatgacgctttgtcaaacacaaatgaaattaatggcgattcctctagtctttcagattatgtttggaatattaaatggtctataccattatgcagtatttgaagagacacttgaaaaaactatacatgaagagtaaccaaaaaaatgaatggttgctaacttagcaaaatgaagtttctataaaaaggactcacgcattgatgaaagagttaaaagtaactgtgaacaaataatttgttctgtgccttttgcctggtatatagcaaatactcaaaaagtattcaataattcaatcaataaatataagtttcatacttacacgtaa

SEQ ID NO: 227140 - DNA, 1103 bp, Homo Sapiens
gccaactttgtacaaaaaagttggctccaggattccaggagtaagcctgtagaagagatttattttaaaagagattgctctgaaatttatcttaaaagagcttgctctgtctaccttgacagaaattggagttttaaaattatgtgttaatatttttatttgcagatttcgtttccgtcaacttaaacattgttgcccttcaacaaggctcttgaattaataaaattatagtctctaagaattccacattttatggaaagttagagcaaaatcattttgagttaagccagttcttagcctaatgcaaactgcagcgcctttaagcataaagtaacacaacagcattgcacggggccggcactgccgctgccttcactgaaggctgcagtgctgttctgagagcttggaggaggcaccagcgaggatgacgtttagtggagctctttctgttgaaaagagctcacgttatcaacaccttgtaaggaaaatacagtgtctgagttttcatcggtcttcacatgctgctatatattccacagagttccttgcatgtactgagcttttgttttagatggaatagcacaaggagaaaaatctttaaacttagtgctttgtctattctttatttctctcagggtggccagtattttgacttatttatcctgcttgaaagctacttgagatgtgtactgctattctaaacacgtgatctagtttctttcatctctggcataagattatataacttaatgttaagtgtcttgaggcataaaagacaaaatgtggcttattttaggatctgttttttcatcgaggtctcgggtatcctttcaaagatagtgagaagcagacactgctccttgtgcagctctggtacctcctgcccactgctgtcacttcaagccactgggcaatgcttcttgtcctcgtgtcttggaggaaaatcacctgggggggaggggacttcttgtggtaagagcaagtgcaggtatgaaatgcgaagattgccccagctaaaagtggacaagtccgctttgtgagatgaatacttcctgagaaacttgacagtatctctccattttaccattatgaaaactatcatt

SEQ ID NO: 227141 - DNA, 1024 bp, Homo Sapiens; identical to SEQ ID NO: 193566

SEQ ID NO: 227142 - DNA, 901 bp, Homo Sapiens
  misc_feature (560)..(568): n is a, c, g, or t
ctttgtacaaaaaagttgggaaaaagcttgtggtgaaggggggcaaaaaaaagaagcaagttctgaagttcactcttgattgcacccaccctgtagaagatggaatcatggatgctgccaattttgagcagtttttgcaagaaaggatcaaagtgaacggaaaagctgggaaccttggtggaggggtggtgaccatcgaaaggagcaagagcaagatcaccgtgacatccgaggtgcctttctccaaaaggtatttgaaatatctcaccaaaaaatatttgaagaagaataatctacgtgactggttgcgcgtagttgctaacagcaaagagagttacgaattacgttacttccagattaaccaggacgaagaagaggaggaagacgaggattaaatttcatttatctggaaaattttgtatgagttcttgaataaaacttgggaaccaaaatggtggtttatccttgtatctctgcagtgtggattgaacagaaaattggaaatcatagtcaaagggcttcccttggttcgccactcatttatttgtaacttgacttcnnnnnnnnnctgcttaaaaatttcaattctcgtggtaataccagagtagaaggagagggtgactttaccgaactgacagccattggggaggcagatgcgggtgtggaggtgtgggctgaaggtagtgactgtttgattttaaaaagtgtgactgtcagttgtatctgttgcttttctcaatgattcagggatacaaatgggcttctctcattcattaaaagaaaacgcgacatctttctaagattctctgtgggaaaatgactgtcaataaaatgcgggtttctgggccattcgtcttactttcattttttgattacaaatttctcttgacgcacacaatta

SEQ ID NO: 227143 - DNA, 977 bp, Homo Sapiens; identical to SEQ ID NO: 193567
  misc_feature (579)..(587): n is a, c, g, or t

SEQ ID NO: 227144 - DNA, 903 bp, Homo Sapiens; identical to SEQ ID NO: 193568
  misc_feature (588)..(596): n is a, c, g, or t

SEQ ID NO: 227145 - DNA, 1541 bp, Homo Sapiens; identical to SEQ ID NO: 193569
  misc_feature (200)..(208): n is a, c, g, or t

SEQ ID NO: 227146 - DNA, 979 bp, Homo Sapiens; identical to SEQ ID NO: 193570

SEQ ID NO: 227147 - DNA, 1122 bp, Homo Sapiens
aagccaactttgtacaaaaaagttggcttcagcagggctgtggctaccatgttctctcgcgcgggtgtcgctgggctgtcggcctggaccttgcagccgcaatggattcaagttcgaaatatggcaactttgaaagatatcaccaggagactaaagtccatcaaaaacatccagaaaattaccaagtctatgaaaatggtagcggcagcaaaatatgcccgagctgagagagagctgaaaccagctcgaatatatggattgggatctttagctctgtatgaaaaagctgatatcaaggggcctgaagacaagaagaaacacctccttattggtgtgtcctcagatcgaggactgtgtggtgctattcattcctccattgctaaacagatgaaaagcgaggttgctacactaacagcagctgggaaagaagttatgcttgttggaattggtgacaaaatcagaggcatactttataggactcattctgaccagtttctggtggcattcaaagaagtgggaagaaagccccccacttttggagatgcgtcagtcattgcccttgaattactaaattctggatatgaatttgatgaaggctccatcatctttaataaattcaggtctgtcatctcctataagacagaagaaaagcccatcttttcccttaataccgttgcaagtgctgacagcatgagtatctatgacgatattgatgctgacgtgctgcaaaattaccaagaatacaatctggccaacatcatctactactctctgaaggagtccaccactagtgagcagagtgccaggatgacagccatggacaatgccagcaagaatgcttctgagatgattgacaaattgacattgacattcaaccgtacccgccaagctgtcatcacaaaagagttgattgaaattatctctggtgctgcagctctggattaatgaaaatcaagttccatcctcagacaagaggtaaagaaggaaaattcagccagttgattttgtttttagcttactgctgcctttgtccgaagaaaccgttcctccattatttgaattactgaagacagcaagatatttgtaaattatcttaaaataaacaacttaaaataaaagaga

SEQ ID NO: 227148 - DNA, 872 bp, Homo Sapiens; identical to SEQ ID NO: 193577
  misc_feature (442)..(450): n is a, c, g, or t

SEQ ID NO: 227149 - DNA, 631 bp, Homo Sapiens; identical to SEQ ID NO: 193579
  misc_feature (207)..(215): n is a, c, g, or t

SEQ ID NO: 227150 - DNA, 910 bp, Homo Sapiens; identical to SEQ ID NO: 193583
  misc_feature (161)..(174): n is a, c, g, or t
  misc_feature (752)..(760): n is a, c, g, or t

SEQ ID NO: 227151 - DNA, 1213 bp, Homo Sapiens
ccttataaaagccaactttgtacaaaaaagttggggaacaactggtgctgatggctcccttggcgaaggagtctgtttttcaacccaggaagggtgtgctggagtatctgtctgccttcgatgaagaaaccacgggagtttgttctctggacactccttctagacctcttgctctccctctggtagaagaggaggaagcagtgtctgaaccagagcctgaggggttgccagaggcctgtgatgacttggagttagcagatgacaatcttaaagaggggaccatttgcactgagtccagccagcaggaacccatcaccaagtcaggcttcacacgcctcagcagctctccttgttactacttttaccaagcggaagatggacagcatatgttcctgcaccctgtgaatgtgcgctgcctcgtgcgggagtacggcagcctggagaggagccccgagaagatctcagcaactgtggtggagattgctggctactccatgtctgaggatgttcgacagcgtcacagatatctctctcacttgccactcacctgtgagttcagcatctgtgaactggctttgcaacctcctgtggtctctaaggaaaccctagagatgttctcagatgacattgagaagaggaaacgtcagcgccaaaagaaggctcgggaggaacgccgccgagagcgcaggattgagatagaggagaacaagaaacagggcaagtacccagaagtccacattcccctcgagaatctacagcagtttcctgccttcaattcttatacctgctcctctgattctgctttgggtcccaccagcaccgagggccatggggccctctccatttctcctctcagcagaagtccaggttcccatgcagactttctgctgacccctctgtcacccactgccagtcagggcagtccctcattctgcgttgggagtctggaagaagactctcccttcccttcctttgcccagatgctgagggttggaaaagcaaaagcagatgtgtggcccaaaactgctccaaagaaagatgagaacagcttagttcctcctgcccctgtggacagcgacggggagagtgataattcagaccgtgttcctgtgcccagttttcaaattccttcagccaagctattgaagcagccttcatgaaactggacacaccagctacttcagatcccctctctgaagagaaaggaggaaag

SEQ ID NO: 227152 - DNA, 1335 bp, Homo Sapiens; identical to SEQ ID NO: 193590

SEQ ID NO: 227153 - DNA, 1078 bp, Homo Sapiens
ttggcggccgggagcggacttaccttaccttctctgccttcggcgcgcttctcagccgggccgccgacccaaaggagccgtccgactatgtctaacatggagaaacacctgttcaacctgaagttcgcggccaaagaactgagtaggagtgccaaaaaatgcgataaggaggaaaaggccgaaaaggccaaaattaaaaaggccattcagaagggcaacatggaagttgcgaggatacacgccgaaaatgccatccgccagaagaaccaggcggtgaatttcttgagaatgagtgcgcgagtcgatgcagtggctgccagggtccagacggcggtgacgatgggcaaggtgaccaagtcgatggctggtgtggttaagtcgatggatgcgacattgaagaccatgaatctggagaagatttctgctttgatggacaaattcgagcaccagtttgagactctggacgtccagacgcagcaaatggaagacacgatgagcagcacgacgacgctcaccactccccagaaccaagtggatatgctgctccaggaaatggcagatgaggcgggcctcgacctcaacatggagctgccgcagggccagaccggctccgtgggcacgagcgtggcttcggcggagcaggatgaactgtctcagagactggcccgccttcgggatcaagtgtgacggcagaacccgctctgaggtttcctggccatagccaccctttgaaatgctctctgtgtgttagagagatattataccctagaaactctgaacacgccagaatgctgaaatgcccttctacctttgggtttacagccccctccacataaattaagaaattcagtatttctgcactcttagctggattctaaagttctgtatagctcgtaatgatggtatttttatagcagccttttaacagaactagttaatttcgtgtatatgaatctttctcgaagatctggtcaaaactgtattcagtttcctgcccagaatgatcagattgaaagtggttgggttttattattatttagtgtgattgatagtatctagaatggcagtggtgcataaa

SEQ ID NO: 227154 - DNA, 713 bp, Homo Sapiens
actttgtacaaaaaagttggatttattttaaaggatctgtactatctagtgtctaaaacactattctccagaaaaatcaatcattttctagccctctccctcagtcctttattgtccattccaatacattgaacacatttcctttaccctccacacacttcttccaaaaggaagcacccgttgagtccttttgagggtgatttgtcttacaactgactgacttagcaggaatttaattaggtcatatttggtgatgagacttatggagtgtgcctctctctcccaactgctgcttaaaatgcaaggacaagcaattagaagccatcctaaggtgcttacctcacacgccacccatgaggcttgtggccacagtggcacttgggtgtggctcctctgttatttgtcctcatgtgagaaagcagatcatctccaaatcttgccatttgtatacttttggtggagacttggatgtcatatcttctttgttttgggttttcttccctagcttattttgtggcttttaaagaagtggattgtattgtgagatcctgtgattcctggtggccagtatcctggattcctctaagatcttgcctctttcctcctcatgaaagcagcacacttgtgttaacttatgtctcttgttaaatgagcttaatgtctttgtgttctgtccaaaactgtattgaaaaaatattgtttaatgcaaatga

SEQ ID NO: 227155 - DNA, 893 bp, Homo Sapiens
  misc_feature (454)..(463): n is a, c, g, or t
  misc_feature (715)..(740): n is a, c, g, or t
ttgggaatttcataacatgggaccaccaccaccttggcaaggaatgcccccttacccaggaatggaacaacctccacaccatccttactatcagcaccatgctccacctcctcaagctcatcccccttactcaggacatcatccagtaccacatgaagcaagatacagagataaacgagtacatgattatgatatgagggtggatgatttccttcgtcgcacacaagctgttgtcagtggccggagaagtagaccccgtgaaagagaccgggaacgagagcgagaccgccctagagataacagacgagacagagagcgagatagaggacgtgatagagaaagagaaagagagcgattatgtgatcgagacagagaccgaggggagagaggtcgatatagaagataatgggcttttggaagcactgattgtttaaagatacaaaaaatcttgtannnnnnnnnngtgtgtgtttacaagtagtaaatttattttcagctgtctgcctatgaagttcattgtgtagaaggatttattatgaccccctttgttccaagcatgcagtatcataagaactggaaaaactcaaatccgccaaaaatccacagctgacagttgaattgacacttttattggggcagaatggaacagtccaagaatgtagatactgattctttctccataaatgttcttatagtgtgttcatcctagagttannnnnnnnnnnnnnnnnnnnnnnnnnggatcttgattgataactgccatgatattttgctttgatgtgtttctacatgtagttgcacacgggttcagtaaaaataatgctgctatcgagtatgcaaatattgaagtatgatgggtttgactgtatggcagtgttgtagcagccctcttg

SEQ ID NO: 227156 - DNA, 1131 bp, Homo Sapiens; identical to SEQ ID NO: 193594

SEQ ID NO: 227157 - DNA, 787 bp, Homo Sapiens; identical to SEQ ID NO: 193595

SEQ ID NO: 227158 - DNA, 962 bp, Homo Sapiens
  misc_feature (123)..(182): n is a, c, g, or t
ttggatcagtgatgggttctttttgtagtgagacatacaaatctgatgttaatgtttgctcttagaagtcatactccatggtcttcaaagaccaaaaaatgaggttttgcttttgtaatcagnnnnnnnnnnnnnnnnnnnnnnnnnnnnnnnnnnnnnnnnnnnnnnnnnnnnnnnnnnnngtggtttcacacctcttgttattccttagagtcacttcaaggcctgtttgaatgtggcaggttagaaagagagagaatgtctttcatttgaagagtgttggacttgtgtgaaaggagatgtgcgtgttggaatctgcttttccaagccgccagggtcctgacggcagcaggacgaagcctgttgtggcgtcttctgggaaagcctgaccgtgtgttcggacggcactggctcctttacgaagttctcagtaactgagcccagagtaactgcacgcctttgtgcagctctggagctccaccaactctcggcctgccagttctcaagcgagctaatcttgtcattaatcgatagaagctaacttccgaagttaggacctagttactttgctctcaacatttaaaataatgcagttgctctagtgaatggggcgttaggggcctgtctctgcacctgtctgtccatctgcatgcagtattctcacccatgttgaatgcctgctgcttgtttaccctttggaaaccctggggtgaccaaggtttggaaagccacctgagaccacttcatagcaagggaaggctttaagcagttactagaaagagatggggatttggcccctggctcctccagcctgaatgagctatttaatccactgtccatgttcctcatcagtcaaatccaaagtcaaaggatttgaacctgcatctggaaacgtaaccactcacagcacctggtcccgccaaggttgggaggattgtacactactttcatttaaaagggaa

SEQ ID NO: 227159 - DNA, 409 bp, Homo Sapiens; identical to SEQ ID NO: 193597

SEQ ID NO: 227160 - DNA, 1379 bp, Homo Sapiens
  misc_feature (1220)..(1247): n is a, c, g, or t
ctttgtacaaaaaagttggggtagagagtagggggcggtagtcgggggtgggggagaaggaggaggcggcgaatcacttataaatggcgccgaagcaggacccgaagcctaaattccaggagggtgagcgagtgctgtgctttcatgggcctcttctttatgaagcaaagtgtgtaaaggttgccataaaggacaaacaagtgaaatacttcatacattacagtggttggaataaaaattgggatgaatgggttccggagagcagagtactcaaatacgtggacaccaatttgcagaaacagcgagaacttcaaaaagccaatcaggagcagtatgcagaggggaagatgagaggggctgccccaggaaagaagacatctggtctgcaacagaaaaatgttgaagtgaaaacgaaaaagaacaaacagaaaacacctggaaatggagatggtggcagtaccagtgagacccctcagcctcctcggaagaaaagggcccgggtagatcctactgttgaaaatgaggaaacattcatgaacagagttgaagttaaagtaaagattcctgaagagctaaaaccgtggcttgttgatgactgggacttaattaccaggcaaaaacagctcttttatcttcctgccaagaagaatgtggattccattcttgaggattatgcaaattacaagaaatctcgtggaaacacagataataaggagtatgcggttaatgaagttgtggcagggataaaagaatacttcaacgtaatgttgggtacccagctactctataaatttgagagaccacagtatgctgaaattcttgcagatcatcccgatgcacccatgtcccaggtgtatggagcgccacatctcctgagattatttgtacgaattggagcaatgttggcttatacacctctggatgagaagagccttgctttattactcaattatcttcacgatttcctaaagtacctggcaaagaattctgcaactttgttcagtgccagcgattatgaagtggctcctcctgagtaccatcggaaagctgtgtgagaggcactctcactcacttatgtttggatctccgtaaacacatttttgttcttagtctatctcttgtacaaacgatgtgctttgaagatgttagtgtataacaattgatgtttgttttctgtttgattttaaacagagaaaaaataaaagggggtaatagctccnnnnnnnnnnnnnnnnnnnnnnnnnnnncatttcaaaatttgctgccagtgttttcaatgatggacaacagagggatatgctgtagagtgttttattgcctagttgacaaagctgcttttgaatgctggtggttctattcctttgacactacgcactttt

SEQ ID NO: 227161 - DNA, 491 bp, Homo Sapiens; identical to SEQ ID NO: 193605
  misc_feature (153)..(180): n is a, c, g, or t

SEQ ID NO: 227162 - DNA, 957 bp, Homo Sapiens; identical to SEQ ID NO: 193608

SEQ ID NO: 227163 - DNA, 967 bp, Homo Sapiens
ggcagctccttgccgcctcccggcctgggcccgcccagccgttctcggcctgccatcaggcgatctcggcggccagcccagccgcaatgtgacgccgcgcgccccggggtcctcggcgcctgcgccctctcctataaagcagacgccgcgccgcgctgcgacgctgtagtggcttcgtcttcggtttttctcttccttcgctaacgcctcccggctctcgtcagcctcccgccggccgtctccttaacaccgaacaccatgccttcaattaagttgcagagttctgatggagagatatttgaagttgatgtggaaattgccaaacaatctgtgactattaagaccatgttggaagatttgggaatggatgatgaaggagatgatgacccagttcctctaccaaatgtgaatgcagcaatattaaaaaaggtcattcagtggtgcacccaccacaaggatgaccctcctcctcctgaagatgatgagaacaaagaaaagcgaacagatgatatccctgtttgggaccaagaattcctgaaagttgaccaaggaacactttttgaactcattctggctgcaaactacttagacatcaaaggtttgcttgatgttacatgcaagactgttgccaatatgatcaaggggaaaactcctgaggagattcgcaagaccttcaatatcaaaaatgactttactgaagaggaggaagcccaggtacgcaaagagaaccagtggtgtgaagagaagtgaaatgttgtgcctgacactgtaacactgtaaggattgttccaaatactagttgcactgctctgtttataattgttaatattagacaaacagtagacaaatgcagcagcaagtcaattgtattagcagaatattgtccctcattgcatgtgtagtttgagcaccgatcccaaccttacggccaattttcttctagtatgatgggaaagtttcttttttc

SEQ ID NO: 227164 - DNA, 1093 bp, Homo Sapiens; identical to SEQ ID NO: 193609

SEQ ID NO: 227165 - DNA, 1042 bp, Homo Sapiens; identical to SEQ ID NO: 193610

SEQ ID NO: 227166 - DNA, 912 bp, Homo Sapiens
ttggctcttcagaacagaagcatggatctcggaatccctgacctgctggacgcgtggctggagcccccagaggatatcttctcgacaggatccgtcctggagctgggactccactgcccccctccagaggttccggtaactaggctacaggaacagggactgcaaggctggaagtccggtggggaccgtggctgtggccttcaagagagtgagcctgaagatttcttgaagcttttcattgatcccaatgaggtgtactgctcagaagcatctcctggcagtgacagtggcatctctgaggacccctgccatccagacagtccccctgcccccagggcaaccagttctcctatgctctatgaggttgtctatgaggcaggggccctggagaggatgcagggggaaactgggccaaatgtaggccttatctccatccagctagatcagtggagcccagcatttatggtgcctgattcctgcatggtcagtgagctgccctttgatgctcatgcccacatcctgcccagagcaggcaccgtagccccagtgccctgtacaaccctgctgccctgtcaaaccctgttcctgaccgatgaggagaagcgtctgctggggcaggaaggggtttccctgccctctcacctgcccctcaccaaggcagaggagagggtcctcaagaaggtcaggaggaaaatccgtaacaagcagtcagctcagacagtcggcggcggaagaaggagtacattgatgggctggagagcaggtggcagcctgttctgcacagaaccaaaattacagaaaaaagtccaggagctggagaggcacaacatctccttggtagctcagctcgccagctgcagacgctaattgctcaaacttccacaaagctgcccagaccagcacttgtgtttt

SEQ ID NO: 227167 - DNA, 985 bp, Homo Sapiens; identical to SEQ ID NO: 193613

SEQ ID NO: 227168 - DNA, 1053 bp, Homo Sapiens; identical to SEQ ID NO: 193614

SEQ ID NO: 227169 - DNA, 1049 bp, Homo Sapiens; identical to SEQ ID NO: 193615

SEQ ID NO: 227170 - DNA, 982 bp, Homo Sapiens; identical to SEQ ID NO: 193618

SEQ ID NO: 227171 - DNA, 991 bp, Homo Sapiens
ttgggaattattgattgaccgtctttattctgtgggctctgattctccaatgggaataccaagggatggttttccatactggaacccaaaggtaaagacactcaaggacagacatttttggttgagcatagatgaaaatggcaagttccctggctttccttctgctcaactttcatgtctccctcctcttggtccagctgctcactccttgctcagctcagttttctgtgcttggaccctctgggcccatcctggccatggtgggtgaagacgctgatctgccctgtcacctgttcccgaccatgagtgcagagaccatggagctgaagtgggtaagttccagcctaaggcaggtggtgaacgtgtatgcagatggaaaggaagtggaagacaggcagagtgcaccgtatcgagggagaacttcgattctgcgggatggcatcactgcagggaaggctgctctccgaatacacaacgtcacagcctctgacagtggaaagtacttgtgttatttccaagatggtgacttctatgaaaaagccctggtggagctgaaggttgcagcactgggttctaatcttcacgtcgaagtgaagggttatgaggatggagggatccatctggagtgcaggtccaccggctggtacccccaaccccaaatacagtggagcaacgccaagggagagaacatcccagctgtggaagcacctgtggttgcagatggagtgggcctatatgaagtagcagcatctgtgatcatgagaggcggctccggggagggtgtatcctgcatcatcagaaattccctcctcggcctggaaaagacagccagcatttccatcgcagaccccttcttcaggagcgcccagccctggatcgcagccctggcagggaccctgcctatcttgctgctgcttctcgccggagccagttacttcttgtggagacaacagaaggaaataactgctctgtccagtgagatagaaagtga

SEQ ID NO: 227172 - DNA, 1053 bp, Homo Sapiens; identical to SEQ ID NO: 193622

SEQ ID NO: 227173 - DNA, 1603 bp, Homo Sapiens
caaccatggtgcgtgatgaccccgcagagctggctctcaactcactcgccaatttcagagtacagtggtggggtgcggtgtgtgcatcggtgcacggacagacagaaccacgagcagcaactaccatgggtgagaggatctttgagggggtgtgacccttgaggtcagaagaggcctcgagaggccaggcctaacagggttggcagctgcactaaagcctggggcagctccctttccaaaaggacactgcccagcaacagcaagggcacggcctggccaccatcccaggtcatcggggaagggaaaagtgtgctcccaggtaagcagggtcaaaccacccccaagagcctcacttttccctggtggctctgccactgaactgactcttagaaaccggaaacggatgagctttctagccagaaaaccggagggaatcttgacaggcacacagcatccaaaccaacagcacttctgcagccggggcccggctggcagaggggtgctgcctgctgcctgcaaatcctgccagagtcaagggtttgctttcctactggtcttcctttggctagaaaagtgacaaaactgagctgggtggggtataagttacaggggcgagagcttcagtggcctgtttatcgggaggagttggagctggagcggctcctgtggcggcggcggcccggggaccgtgatctccggcgcacgggggacctgcgcctcggggagcgggaccttctcctcatccgtgggggagacctgcgccacataggcggtggtggcaacattctcctgggagggctgaatctcctggggggtggcctaggccagggggccagcacggcggtggcagtgatctcctggccatcaatttgtcctccatccatgtgcttcagcgccttctcggcttcatctggattctcaaactctacgtacgcatagcctttggacagatggggatgcatcctttccacgggcatgtcaatcattttaattttcccataggtggaaaatatctccatgatgtgatcctttgtcacattccgggtgagtctcccaatgtgcactttggtgggcttaggagatgggctccgccttttcctctccttttcatctcttttaggtggtttggatttggagcgggagcgcctcctgttgtcgtgtctgcgccgagaaggacttggagagccagaagagctgctagagctggagctgcgggaggtgctggagcttcctgagcggctggatgctgaggaagagctggagccactgcttgagccagtgctggtgctggagcctgagctggaagtcgagctggaccgagacctggtactgctgctaccactggaagcgctgcgcctctttcgggttttgtcccggccgcgatccttctcactcgactccttggtggcccctttatcttttgagcgatccttggacttctcatctgagcggtctttgcgtttggtaggtgaaggagccctagtgctggactttttattattttctttgactcctagcaagctcttctttttcactcctgataaatccattctccccttctgaggtgttcaaagcagcaatggcggcctcacttatctgccaa

SEQ ID NO: 227174 - DNA, 964 bp, Homo Sapiens
tacaaaaaagttggggggcgggggcgctgcggcacagctggtttgagcaactgaactggaaacaagatgcaggaccccaacgcagacactgaatggaatgacatcttacgcaaaaagggtatcttaccccccaaggaaagtctgaaagaattggaagaggaggcagaagaggagcagcgcatcctccagcagtcagtggtgaaaacatatgaagatatgactttggaagagctggaggatcatgaagacgagtttaatgaggaggatgaacgtgctattgaaatgtacagacggcggagactggctgagtggaaagcaactaaactgaagaataaatttggagaagttttggagatctcagggaaggattatgttcaagaagttaccaaagctggcgagggcttgtgggtcatcttgcacctttacaaacaaggaattcccctctgtgccctgataaatcagcacctcagtggacttgccaggaagtttcctgatgtcaaatttatcaaagccatttcaacaacctgcatacccaattatcctgataggaatctgcccacgatatttgtttacctggaaggagatatcaaggctcagtttattggtcctctggtgtttggcggcatgaacctgacaagagatgagttggaatggaaactgtctgaatctggagcaattatgacagacctggaggaaaaccctaagaagccgattgaagacgtgttgctgtcctcagtgcggcgctctgtcctcatgaagagggacagcgattccgagggtgactgaggctacagcttctatcacatgccgaactttcttgtgacaaattgtctggattttttaaaaaaggaaaaagcaagaatgaatccttgtggtttttagttttgtataaaatattgtttcaaatctttacattttggaaataatcattgctggagattctgttaaatatttttggaactcc

SEQ ID NO: 227175 - DNA, 922 bp, Homo Sapiens
gagggagctcgggcgggacaagctgcgagtgagcgccctctcgctcagcaccagtttctggtcctcaatgtagctgtcctgctgcagcaccacaccctgcagagcgctgaggagctcgtagagatgaacaacgctctggacaacctgctcactgtttcttttaagcataaataccaggttagcatttccacccttttttaggccactatctgattccgttctcctaagatcttggccatcatctccctcttccttctcgcctccttttgaagcattcatctgatggctgtcaaatcctccaaaggtctctgctctccggggcagggaaacgggaccgaccacatcttgctcaatggggctgctgacagtcggcccaagtgtgcctcccagatttccactcaccaaaccctgaaggatctccacctcatttattgcacttttcattaaaggtcctcctttgagagcctcttctgtgttggagcggaagagaactctagggctatgtgttggggagcaatcctctgggagaggggtgctgcactcagccatgtcccggaaaatcatctccttctcttccaacaagagtaggattttttggtccttctggtgaagttgttcttttaattctcgggctctggtgtccaacattttcttttcttcctcattctcactaggaattccttcatcttcatctctgttcagggtgttgattgtgtcctgaatgatctgaatccagctgtttcgttcctctttggagctggcatggacttctaccatctctggatctgtcatccccatgctgatcaggaataaacctttctcctcatgtgccacttctctcacaatcagcttctttaaagagatcactgttgacttctggtccaatgatgcaaagatgtacttctggtctttttcttgccaa

SEQ ID NO: 227176 - DNA, 971 bp, Homo Sapiens
ccccctttgtacaaaaaagttggccctggacttgtcttggttccagaacctgacgacccggcgacggcgacgtctcttttgactaaaagacagtgtccagtgctccagcctaggagtctacggggaccgcctcccgcgccgccaccatgcccaacttctctggcaactggaaaatcatccgatcggaaaacttcgaggaattgctcaaagtgctgggggtgaatgtgatgctgaggaagattgctgtggctgcagcgtccaagccagcagtggagatcaaacaggagggagacactttctacatcaaaacctccaccaccgtgcgcaccacagagattaacttcaaggttggggaggagtttgaggagcagactgtggatgggaggccctgtaagagcctggtgaaatgggagagtgagaataaaatggtctgtgagcagaagctcctgaagggagagggccccaagacctcgtggaccagagaactgaccaacgatggggaactgatcctgaccatgacggcggatgacgttgtgtgcaccagggtctacgtccgagagtgagtggccacaggtagaaccgcggccgaagcccaccactggccatgctcaccgccctgcttcactgccccctccgtcccaccccctccttctaggatagcgctccccttaccccagtcacttctgggggtcactgggatgcctcttgcagggtcttgctttctttgacctcttctctcctcccctacaccaacaaagaggaatggctgcaagagcccagatcacccattccgggttcactccccgcctccccaagtcagcagtcctagccccaaaccagcccagagcagggtctctctaaaggggacttgagggcctgagcaggaaagactggccctctagcttctaccctttgtccctgtagcctatacagtttagaatatttatttgttaattttattaaaatgcttt

SEQ ID NO: 227177 - DNA, 1140 bp, Homo Sapiens
cacacacattaactactaaatatttatatggtcattttcatagactttacttcctatagggaaataagtaattgaaccatgcaggatcttttgacccacttaatcaaacctaagtggatccctccttttcagaccacaaagttatagcccaggaaccaacgtcatatagataggttgcatgaaatcaggcatggtcctgggaagaggcagttccttgggagctgcctcacaaaccatagaatagccacaaatatcacacagccatactgatcagacgtttgcactgtgattcttctttcctagtttcagcacccatttggctttcacaatcagagatggcagcggtaaaggcatcaacatcgaaagctaccaggccttggtattctcatccggtatatgcaagatactggcaacattatcatcaagcaatggcttggatgcaaagccatcacaatgcctacaggaaggccgtggaatcctgtttcaatcttccatggtacttaccttctgcgcttcttccccaaagctcttacgataatgaggctgcgtatcctcagtccttctatgaccatcatgtggcctggcaggactacccctgcagttcttcacatttcagaagatctgggcagcatccacgttacagcagtaggatccaggcatccacaaaagaagaccaagctttgtccaaagaggaagagatggagactgagtcagatgcagaggtagaatgtgacctgagcaatatggaaatcactgaagagctccgccagtactttgcagagaccgagaggcatagagaagaacgacggcggcagcagcagctggatgcagagcgcctggacagctatgtgaacgctgaccacgacctgtactgcaacacccgccggtcggtagaagccccaactgagaggcctggtgagcggcgccaggccgagatgaagcgtttgtacggggacagtgctgccaagatccaagccatggaggccgcggtgcagctgagctttgacaagcactgtgaccgaaagcagcccaagtactggccggtcatctccctgaagttctgagctcagggcacagggtacccagcctctccttcttccctttgggtacacgctctttatctctccttctgtacatttc

SEQ ID NO: 227178 - DNA, 892 bp, Homo Sapiens; identical to SEQ ID NO: 193635

SEQ ID NO: 227179 - DNA, 1615 bp, Homo Sapiens
ccttataagggccaactttgtacaaaaaagttggggttgtaggaccggcgaggaataggaatcatggcggctgcgctgttcgtgctgctgggattcgcgctgctgggcacccacggagcctccggggctgccggcacagtcttcactaccgtagaagaccttggctccaagatactcctcacctgctccttgaatgacagcgccacagaggtcacagggcaccgctggctgaaggggggcgtggtgctgaaggaggacgcgctgcccggccagaaaacggagttcaaggtggactccgacgaccagtggggagagtactcctgcgtcttcctccccgagcccatgggcacggccaacatccagctccacgggcctcccagagtgaaggctgtgaagtcgtcagaacacatcaacgagggggagacggccatgctggtctgcaagtcagagtccgtgccacctgtcactgactgggcctggtacaagatcactgactctgaggacaaggccctcatgaacggctccgagagcaggttcttcgtgagttcctcgcagggccggtcagagctacacattgagaacctgaacatggaggccgaccccggccagtaccggtgcaacggcaccagctccaagggctccgaccaggccatcatcacgctccgcgtgcgcagccacctggccgccctctggcccttcctgggcatcgtggctgaggtgctggtgctggtcaccatcatcttcatctacgagaagcgccggaagcccgaggacgtcctggatgatgacgacgccggctctgcacccctgaagagcagcgggcagcaccagaatgacaaaggcaagaacgtccgccagaggaactcttcctgaggcaggtggcccgaggacgctccctgctccgcgtctgcgccgccgccggagtccactcccagtgcttgcaagattccaagttctcacctcttaaagaaaacccaccccgtagattcccatcatacacttccttcttttttaaaaaagttgggttttctccattcaggattctgttccttaggtttttttccttctgaagtgtttcacgagagcccgggagctgctgccctgcggccccgtctgtggctttcagcctctgggtctgagtcatggccgggtgggcggcacagccttctccactggccggagtcagtgccaggtccttgccctttgtggaaagtcacaggtcacacgaggggccccgtgtcctgcctgtctgaagccaatgctgtctggttgcgccatttttgtgcttttatgtttaattttatgagggccacgggtctgtgttcgactcagcctcagggacgactctgacctcttggccacagaggactcacttgcccacaccgagggcgaccccatcacagcctcaagtcactcccaagccccctccttgtctgtgcatccgggggcagctctggagggggtttgctggggaactggcgccatcgccgggactccagaaccgcagaagcctccccagctcacccctggaggacggccggctctctatagcaccagggctcacgtgggaacccccctctcacccaccgccacaataaagatcgcccccccctcc

SEQ ID NO: 227180 - DNA, 1456 bp, Homo Sapiens; identical to SEQ ID NO: 193637

SEQ ID NO: 227181 - DNA, 1065 bp, Homo Sapiens
ttggcgaagccccggcgtcccacaggtcccggaggccgctgcgtcgcggggagctgggctcgggccgccggcggttgcgccggggcagccccgcggggagagcaccatgaggactgactcgggggctcggctggaggagggccacctgcgtcctccacgagctcttccacctgtgccaagtcaagatgatattccacttagtcgtcctaagaaaaagaagcccagaacaaaaaacacaccagcaagtgcttctttggaaggccttgctcagactgctggtcgaaggccctctgagggcaatgagccatcaactaaagaactcaaagagcacccagaggctcctgttcaaagaagacagaaaaagacaaggctacctcttgaattggagacttcctccacccaaaagaagtcatctagttcatctttattacgaaatgaaaatggtattgatgcggagccagctgaggaggcagttattcaaaaacctcggaggaagacaaagaaaacccagccagcagaattacagtatgccaatgagctaggagtagaagatgaagacataatcactgatgagcaaactactgtggaacagcagtctgtattcactgcacccactggcattagccagcctgtaggcaaagtatttgtgaaaaaaagccggagattccaggctgctgatcgttcagagttgataaagaccacagaaaacatagatgtgtcaatggacgtgaagccttcctggaccaccagagatgtggcacttacagtgcaccgggctttcaggatgattggtctcttttctcatggattcttggctggctgtgctgtgtggaatattgttgtgatatatgttctagcaggagatcagctatccaacctctcaaaccttctgcaacaatacaagaccctagcgtatccattccagagtcttctgtacttgcttttggctctgagtacaatttcagcttttgacaggattgactttgctaaaatatcagtagcaatccgaaattttttggccctggatcctacagctttagcatctttcttgtactttactgctct

SEQ ID NO: 227182 - DNA, 965 bp, Homo Sapiens
ttggcttaacgcacgcaagcggctccagggtacgtccccgccacgcgcgctcgcaggatcggtgcgtggtgacgtttcgccggcgcgggcgccatcccggaagcgcgagcaaggccgccagatgtgcaggcagcggaggaggagaaagagatggacctcccggactcggcctcgagggtcttctgcggccgcatcctgagcatggtgaacacagatgatgtcaacgccatcatcctggcccagaagaacatgctggaccgctttgagaagaccaatgagatgctgctcaacttcaacaacctgtccagtgcccgcctgcagcagatgagcgaacgcttcctgcaccacacgaggaccctagtagagatgaaacgggacctggacagcatcttccgccgtatcaggacgctgaaagggaaactggccaggcagcacccagaggccttcagccatatcccagaggcatccttcctggaggaagaggatgaagaccccatcccacccagcaccacgaccaccattgccacctcagaacagagcacgggctcatgtgacaccagccccgacaccgtctcgccctccctgagccccggcttcgaggacctgtcccatgtccaggctggctccccagccatcaacggccgcagccagacagatgacgaggagatgacgggcgaatagccctgctgcccggtgccttgagggggtctcagggcagcagcatacaaggtggcagcgggtaaccctgccttgttctgtcatccagggctcctttgctgccccgttctgtcacccagggctcctaggggacaaggctctctcccgaggggtgtggaattctggggggggtctttaattctggctccttccttcctcagaacatctctattctgcaagacccctctgccatgccagggcacgcccattccagctggagtcgtggggctgggcacaggggaattttt

SEQ ID NO: 227183 - DNA, 1373 bp, Homo Sapiens; identical to SEQ ID NO: 193640
  misc_feature (929)..(982): n is a, c, g, or t

SEQ ID NO: 227184 - DNA, 902 bp, Homo Sapiens
tttgtacaaaaaagttggggctgctcgcagagctctgcacttcgtattcaaagtgggaaaccgcttccagacggcgcgtttctatcgggacgtcctggggatgaaggttctgcggcatgaggaatttgaagaaggctgcaaagctgcctgtaatgggccttatgatgggaaatggagtaaaacaatggtgggatttgggcctgaggatgatcattttgtcgcagaactgacttacaattatggcgtcggagactacaagcttggcaatgactttatgggaatcacgctcgcttctagccaggctgtcagcaacgccaggaagctggagtggccactgacggaagttgcagaaggtgtttttgaaaccgaggccccgggaggatataagttctatttgcagaatcgcagtctgcctcagtcagatcctgtattaaaagtaactctagcagtgtctgatcttcaaaagtccttgaactactggtgtaatctactgggaatgaaaatttatgaaaaagatgaagaaaagcaaagggctttgctgggctatgctgataaccagtgtaagctggagctacagggcgtcaagggtggggtggaccatgcagcagcttttggaagaattgccttctcttgcccccagaaagagttgccagacttagaagacttgatgaaaagggagaaccagaagattctgactcccctggtgagcctggacaccccagggaaagcaacagtacaggtggtcattctggccgaccctgacggacatgaaatttgctttgtcggggatgaagcatttcgagaactttctaagatggatccagagggaagcaaattgttggatgatgcaatggcagcagataaaagtgacgagtggtttgccaaacacaataaacccaaag

SEQ ID NO: 227185 - DNA, 920 bp, Homo Sapiens
ttgggtccctgagtgagtctctggcgtcccaaattgcctgtttttctcgcaggctctattccgttcgctggttcgccacctcaggggaacgatggccatggagtccacagccactgccgccgtcgccgcggagctggtttctgccgacaaaattgaagatgttcctgctccttctacatctgcagataaagtggagagtctggatgtggatagtgaagctaagaaactattgggtttaggacagaaacatctggtgatgggggatattccagcagctgtcaatgcattccaggaagcagctagtcttttaggtaagaagtatggagagacagctaatgagtgtggagaagccttctttttctatgggaaatcacttctggagttggcaagaatggagaatggtgtgttgggaaacgccttggaaggtgtgcatgtggaagaggaagaaggagaaaaaacagaagatgaatctctggtagaaaataatgataacatagatgaggaagcaagggaagagttgagagaacaggtttatgacgccatgggagaaaaagaagaagccaaaaaaacagaagacaagtctttggcaaagcctgaaactgataaagaacaggacagtgaaatggagaagggtggaagagaagatatggatataagtaaatctgcagaggagccacaggaaaaagttgacttgactctagattggttaactgaaacctctgaagaggcaaaaggaggagcagcaccagaaggaccgaatgaagctgaggtcacttctgggaagccagaacaggaagtaccagatgctgaggaagaaaaatcagtttctggaactgatgtccaagaagagtgcagagaaaaaggaggtcacgagaagcagggagaggtaattgtgagcatagaggagaagctcaaaagaa

SEQ ID NO: 227186 - DNA, 1020 bp, Homo Sapiens; identical to SEQ ID NO: 193643

SEQ ID NO: 227187 - DNA, 893 bp, Homo Sapiens; identical to SEQ ID NO: 193647

SEQ ID NO: 227188 - DNA, 925 bp, Homo Sapiens; identical to SEQ ID NO: 193648

SEQ ID NO: 227189 - DNA, 929 bp, Homo Sapiens; identical to SEQ ID NO: 193649

SEQ ID NO: 227190 - DNA, 1117 bp, Homo Sapiens; identical to SEQ ID NO: 193651

SEQ ID NO: 227191 - DNA, 805 bp, Homo Sapiens
aagtttcttaaatacagaaaggctatgctgatacagtgttttttgccctttaattgttattatttcttaatttaaaaagaaacctagggcttagatagtcctatcttctatttggatgtcagcaaggttaaaaagtgcaatgccaggagtatgtagctataggtggcctgtggcatttgcttacagaaacaggcagaaggatgccgcaggcaccaggaggcacttgtctaagaacaacaacaacaataacaaaaagctgctgagaaaggagggcaggggaacaaaacaacacaagacatttcctttttctccctctagccaccccccgccacatcccctgatcatgggtctcagagaacacatccttatttgcatttagataaaagcagatcacccacattcactcatttctctatttttaaaagtgcccagattgctcaaagatagcagaagtaggagattaaaaaaaatctggaaccacaaagttagtagtttcagatgatctggggtttggctgtgtgaggggtggcagaatgcaggtaggcgcctcagtcgtatctttctgcagcttccgttctcagctcctcacatgggggaggtagcgcactccgaggtcaactccatgtcaaaggtgagggactcaaactgccctcctgctgagggttcagcaccttcaccattatttccaaactgcatcaatgaatctaaagtgcggggggacatcggcaggtcaatggtattgctgcaggtcgttggtgtcacacagataaacttggtcttcaggtatggggcagcgctaccccaa

SEQ ID NO: 227192 - DNA, 984 bp, Homo Sapiens; identical to SEQ ID NO: 193657

SEQ ID NO: 227193 - DNA, 786 bp, Homo Sapiens
ctttgtacaaaaaagttggcaaagaggacctttattcttgatcagtgtaatgtgtacaattctggccaacggcggaagctattgctgttcaagaccttctctcggaaagtggtggtggttgtccctaatgaggaagattggaagaagaggctggagttgaggaaggaagtagagggagatgatgtgcctgaatctataatgctggagatgaaagccaacttctctttgcctgaaaaatgcgactatatggatgaggtgacatatggggagctggagaaggaggaagctcagcccattgtcactaagtacaaggaggaggcaaggaagcttctgcccccctccgagaagcggacaaatcgccgaaacaaccgaaacaagcgtaaccggcagaaccgaagccggggccaaggctatgtgggcgggcagcgccgaggctacgacaaccgggcctacgggcagcagtactgggggcagcctggaaacagagggggttaccgtaatttctatgatcgatacaggggagactatgatcgattttacgggcgagattatgagtacaacagatacagagactattacagacaatacaatcgggattggcagagttactactaccaccacccccaggacagagaccgatactacaggaattactacgggtaccaagggtatcggtgaagcccctgccatggtcacctgtcagccatgaagctgaatctctgggggtgccaggcacccccggcaaaacacaactaaggaaaacatgggctgtcggggtggggctga

SEQ ID NO: 227194 - DNA, 989 bp, Homo Sapiens
tacatccaaaatattattgcaacatgtaaacaatataagaaattacaggcgtgagccaccgcgcccggcggcgaaacacgatattgtactaacatcttaattttgttataaaatctcacaaaccccctgacatagtctcagagatctgtagggccgaggttacatttggagaacccgtactctagggccaaatccattcttcttgccctggctcacttgtcccccccaccgccccgcgctggagccactgcctagttcttcagccctagatggtgctcgccagacctcctctcaatgctcatcacacacagggctattcctttcctccaatgaaccaaacgcctcccgcccacctccaggtcccagtcctctgttccctttgcctggtccacccttgccctccctgggtcgcagacgaggtcggcctcgtcattccccgcagaccgccgcgcgtccctcttgtgcggttcaccacagttgtatttaagtgatcgtgtgagtcgtcgttaaatgcctgtctccccgcggatcatgggctcctcgaggacagggaccggcctgtctgtccactgctgtaaccccgcgccggcatagggacctaaggcccactggagggcgctcatcaagtagctgctggatgttgacgaaggaagcggcggcgcagctcagggatctccgagtcaggacggtcggccagacccacgggtgaccctgaaccgctcagagaacgccccgtcgacaccgttcggggcgggcgccactactggcgcatgagatgcgctcaagcagagggtactccaccagcgaggatacaccgagccgacggggatctcggtctcggcgccggaagcctctgagagccgaatctggaaccggatgtggctgcttcctgccccgccccctgccgagggggcgggaatcgagggcccttcagaaaacccggccgggatttcggggctggagactggaatctttattccagttcattg

SEQ ID NO: 227195 - DNA, 306 bp, Homo Sapiens; identical to SEQ ID NO: 193660
  misc_feature (23)..(33): n is a, c, g, or t

SEQ ID NO: 227196 - DNA, 1011 bp, Homo Sapiens; identical to SEQ ID NO: 193665

SEQ ID NO: 227197 - DNA, 835 bp, Homo Sapiens
tcttgccccctgttgcccgcatgtgatgctggtcagccagccagtgcttatcctgggggtcagctgcatacttaaagaggtgtgggtgcttgatgtagattcttcctctggtgccccccatccccagggctttgttggctcgagatcccaacacaaaggtggtagattcattcaggcgagctgggtcccacttggggccttcccggcgaattggttcacaggattttggtttccataccatgccggcggctgcccggtcgcttgacaggatgtgtccaggaggccgtcctttcctctttttaggaagggggcttcctcgatgggcacattcttcttctgcctgacggccacgctttattcctggaagctcatgggtcaatctgggtattactttttctccatctgaaaagagcagtttagcctgctccaggcagctccgacaggcttcctggatcagctgctctgcgtccacctcctccccaacattgtctcgcacgttcagtgctgccttctggaagaacttcatgtacttgttgaagacagtctggatctcctcgttgatgctgggctgcaggacagctcggaggagatccatggagatggcaggatctgtgaaacttgttgtcatctgtgagcggcggcccctccgctgcacctgccggtgctttatcattatgttccaagggttcgtaagaaccagctgccccgctgcgcccgcatcccccagctccaagccgcccctctcggccccgctgggtccccgcggctgctcggcgtcgccagtggctcccatggcgcctccggcccccacaactccgcgggactctgtcaccaa

SEQ ID NO: 227198 - DNA, 647 bp, Homo Sapiens
ctttgtacaaaaaagttggattagagttatcgtgaaatcctagctaaagaaaaggacactataagaaaggaatattggagatacattggaagatcccttcaaagcaaacacagcacagaaaatgactcaccaacaaatgtacagcaataacaccatccagaagaacttgatggaatgcttttattttttattaagggaccctgcaggagtttcacacgagagtggtccttccctttgcctgtggtgtaaaagtgcatcacacaggtattgctttttaacaagaactgatgctccttgggtgctgctgctactcagactagctctaagtaatgtgattcttctaaagcaaagtcattggatgggaggaggaagaaaaagtcccataaaggaacttttgtagtcttatcaacatataatctaatcccttagcatcagctcctccctcagtggtacatgcgtcaagatttgtagcagtaataactgcaggtcacttgtatgtaatggatgtgaggtacccgaagtttggttcagtaagcagggaataccgtcgttccatcagagctggtctgcacactcacattatcttgctatcactgtaaccaactaatgccaaaagaacggttttgtaataaaattatagctgtatc

SEQ ID NO: 227199 - DNA, 1268 bp, Homo Sapiens
ttggggctctgcgcgtccccgccccgcgccgcgtcaccgacgtcccgctaggctgagaccggtgcgccgcgcgctagtggccgctcttccgcgggctagcgggcggtgggggcgccagcagcgcggaaggcgggcacgcgggccatggctccctgggcggaggccgagcactcggcgctgaacccgctgcgcgcggtgtggctcacgctgaccgccgccttcctgctgaccctactgctgcagctcctgccgcccggcctgctcccgggctgcgcgatcttccaggacctgatccgctatgggaaaaccaagtgtggggagccgtcgcgccccgccgcctgccgagcctttgatgtccccaagagatatttttcccacttttatatcatctcagtgctgtggaatggcttcctgctttggtgccttactcaatctctgttcctgggagcaccttttccaagctggcttcatggtttgctcagaattctcggggcggcacagttccagggaggggagctggcactgtctgcattcttagtgctagtatttctgtggctgcacagcttacgaagactcttcgagtgcctctacgtcagtgtcttctccaatgtcatgattcacgtcgtgcagtactgttttggacttgtctattatgtccttgttggcctaactgtgctgagccaagtgccaatggatggcaggaatgcctacataacagggaaaaatctattgatgcaagcacggtggttccatattcttgggatgatgatgttcatctggtcatctgcccatcagtataagtgccatgttattctcggcaatctcaggaaaaataaagcaggagtggtcattcactgtaaccacaggatcccatttggagactggtttgaatatgtttcttcccctaactacttagcagagctgatgatctacgtttccatggccgtcacctttgggttccacaacttaacttggtggctagtggtgacaaatgtcttctttaatcaggccctgtctgcctttctcagccaccaattctacaaaagcaaatttgtctcttacccgaagcataggaaagctttcctaccatttttgttttaatttaacctcagtcatgaagaatgcaaaccaggtgatggttttcaatgcctaaggacagtgaagtctggagcccaaagtacagtttcagcaaagctgttttgaaaactctcccattcccatttctataccccacaagttttcactgaatgagcatggcagtgccactc

SEQ ID NO: 227200 - DNA, 1190 bp, Homo Sapiens
ttttaaaacgttacaaaacaaaaagatttttgatgcataggccagtcctaatgcatcccataatggggaccaaaggccaaaacacacacacacaactacaaaatattccctagaaaaatgcaagatcctccgaaaatcaagatgtaccaaactacataccaagtcatcacagaagaggtgaagatgcatatcacaagacatgagccacagaaatagagcttgcaatactgaacacgatttctcgaagatccttctcaccaccccaagagaagcgcaatgttctggtgagggaagaggaggcaaaggagaagagagaagtttccttccatatggatccgggcggatgccaacctgacgtgcagggcagagcaccaggctgcaggaactggatgctaattgcaatcgctttttgctttggaacatttgccaggaacttgtgaactgataaggggatgaccaggaaactggatccatctctgtggctggggatgttttgaatgattctcgcgggctccctgtctgcttggtgaccctgttggtcctatgcgtatctgcgccagggaattaaactagccagtctgacgttctcaagcaccgccctggacacccccactgccagttcatggtctacagccacagtgaccccagcttttcacacaggtcctgaatgttatctggaatgcagacacaagtgctctgagctacactgcttggggaataattccacatggaaaggtacaacgtggccaagatctccgcagggacacggccctcagatgacagactccaggaagaaagagcatgagacactggtctctgtttaggtttgcccagagctcacggccgtctgcactgcaggcaacgcatcctcctgcggctcacggggggccaggaaccccagggcttctgatggagagttatgcaccgtcccctcggctgggttgtacattcactgattgtcagaagtttctgatactgctgtgggggccggggaaggagtcaccaacagtctggtcctgtcctttggactctacacatcatagcggttcaaactgtacgagtttgggtagctctgccggctgtattggaagtggtctgttaagatgttgttgcggccgtactgatagtccccgtgctgggggaagaggaggccgttgtggggcttctccagtgggctccggtgacgccaa

SEQ ID NO: 227201 - DNA, 1227 bp, Homo Sapiens
gaaacagactgtggctcctgtaaacaagcagtgtgaagtcattcaggtacccacatccaaaagtctcttcccaaactgtggaggcgggcgtgtgtgtactgtaggaagactcctgtgtcccccgcgactctggaaaacacgatcccagctgaactgtagtcagataagagtaaacctttgaagtcctgaataatgagtgctgcgagcccgaccctctctgcagtctcttgtgggttcttgagttctttagttgtcttaattgaagccatgttctgtagcatccttaattgaatctcatttaaaacatcttccaggaaagtgacatctcctcttcgagtcttcattccctgtactactccaaagggcacgtgctggcacctttctgcccagtcatatcccatgatcttcagcatttggaatacttgctgaaaatgctttttttgtcctttatctgtcacatatatcattgtatcaaaattatacttgtccattcgatctatagcagctgcaagatctctggttgcatagagagaagtcccatcacttcgcattacagtacaaattgaggaggggtcgccattcccagagagatctactacagccgttccttttattgttttcagtaggagtcctttactctccagcaactttaagacctcttgagatttttcacgataaaatgattctcctgaatattcatcaaaatatactcccagacgcttgtaaacccgaatgtactcttcaatgctcaagtcccgaaatttttgccacagtgaaagtgcttgcacatcgcccagttccaatcgttggaagaactcctgtgctgcttttgctacacttttatcatctgctgcttctttattaacttgtacataaacttcaaagagatgctgtagaggattggactgcagtttttcctcatagccaaacagctggaagccagttcccagaagaccaaactgcatgccccaatcgccaaggtaatttattcttattacttgatgtcctaaagcttctttgagatttgctataaaatttcctatgatggtagaacgcaaatgtccaacatgaaattttttggcaacattaggtgaactgaattcaaccacaatcttcttctggggaagtccagagaaaagttcactttttaatccatattttgagccatcttcaattacttgttgtagcactgtctttgttaagagctctctgtttattttgaaccaa

SEQ ID NO: 227202 - DNA, 1353 bp, Homo Sapiens
tacaaaaaagttgggaagaagttggtgtttcgctgggccctggtactgaagacgcggtccgggtcgcccctagctgtttcctactcacccaaagccccgcacccgccttttctctctctcctctggcaggatgaggcgtgcaggcctgggtgaaggagtacctcctggcaactatgggaactatggctatgctaatagtgggtatagtgcctgtgaagaagaaaatgagaggctcactgaaagtctgagaagcaaagtaactgctataaaatctctttccattgaaataggccatgaagttaaaacccagaataaattattagctgaaatggattcacaatttgattccacaactggatttctaggtaaaactatgggcaaactgaagattttatccagagggagccaaacaaagctgctgtgctatatgatgctgttttctttatttgtcttttttatcatttattggattattaaactgaggtgatgcatgtaattgtgaatttggaatttgttccaacttaatggcttgcagtaccactttgataaaaatcagcatcaaaacattcccagtgttcaaatactgtggcattttccattgaaaattgctgaattttgcttattttataaatcacattagttaatacagtggtctttgaatactgtttcttaatgactcattttagcccctattttcaggggtagtgagagggtgtggctccactaatttccagtttgtttttctattgtttgccaactgtcagattaaatagcattataatattttgttgtaatcataaatgcaggtttatgtcccatgtaaggaaacttagtgggagagtaacagaatgcctggagagcctgactctgagctcttgaagtagtcagccagtttgtggtaaaatggtaattgaattttcctaactgcatcaactgtaatgatatactcccttctcctcctttatttagttaaaattgtaggctgatttctttttacctacaatcttcctaataatttttgatgataatgacccctcatttctttctgcccaaagacctcattctttaaataaaacttgttattttggcatatttctggtagggcccattgcacatgtgtatcagtatagttattatttcatattaactttatgaattctcttgacttggcttataatagttttatgatttttactacataggtagcacatttatcatttgtgacagaataatgtgaagttaagtaattactgaactttaaatggaaatagtatgcaagaaactcacgcattgaacttgaaaataacagtataattgctttaatccagtgtatttgtttatggaaagaaaaac

SEQ ID NO: 227203 - DNA, 1135 bp, Homo Sapiens; identical to SEQ ID NO: 193673

SEQ ID NO: 227204 - DNA, 993 bp, Homo Sapiens
ttgggtgagactttggatccttcctgaggacgtggagaaaacttgctgctgagaaggacattttgaaggttttgttggctgaaaaagctgtttctggaatcacccctagatctttcttgaagacttgaattagattacagcgatggggacacagaaggtcaccccagctctgatatttgccatcacagttgctacaatcggctctttccaatttggctacaacactggggtcatcaatgctcctgagaagatcataaaggaatttatcaataaaactttgacggacaagggaaatgccccaccctctgaggtgctgctcacgtctctctggtccttgtctgtggccatattttccgtcgggggtatgatcggctccttttccgtcggactcttcgtcaaccgctttggcaggcgcaattcaatgctgattgtcaacctgttggctgtcactggtggctgctttatgggactgtgtaaagtagctaagtcggttgaaatgctgatcctgggtcgcttggttattggcctcttctgcggactctgcacaggttttgtgcccatgtacattggagagatctcgcctactgccctgcggggtgcctttggcactctcaaccagctgggcatcgttgttggaattctggtggcccagatctttggtctggaattcatccttgggtctgaagagctatggccgctgctactgggttttaccatccttcctgctatcctacaaagtgcagcccttccattttgccctgaaagtcccagatttttgctcattaacagaaaagaagaggagaatgctaagcagatcctccagcggttgtggggcacccaggatgtatcccaagacatccaggagatgaaagatgagagtgcaaggatgtcacaagaaaagcaagtcaccgtgctggagctctttagagtgtccagctaccgacagcccatcatcatttccattgtgctccagctctctcagcagctctctgg

SEQ ID NO: 227205 - DNA, 1352 bp, Homo Sapiens; identical to SEQ ID NO: 193677
  misc_feature (164)..(173): n is a, c, g, or t
  misc_feature (406)..(415): n is a, c, g, or t

SEQ ID NO: 227206 - DNA, 667 bp, Homo Sapiens; identical to SEQ ID NO: 193678
  misc_feature (107)..(161): n is a, c, g, or t

SEQ ID NO: 227207 - DNA, 642 bp, Homo Sapiens
ctttgtacaaaaaagttggaaattgccttttaaattccttcaagcttggttcattgaggtggttaagtataaatgctattaactaggaattagctgtatagttaagttatgcctgtgcaaagaagaggctcaaatgctgtccccggcagctttcctgggggactagagctccttctggccatgttatatgaaatgtaattcttattttataaataatgtgatgtagatgtaaccggtgccccctccccgttgtgactgagggcgagtgttatacctggctgcgtgtgcagctgaggagggagtgaacctcaagcctaaatacctgttaggattggagggtctgggtgggcctgggcctagcaatcaatcaagcttctacctgtaccttatgtaaggtagaccctcctagtgtcagtacctgagcttgtttacctcagttccgcaggcaggacagccggtccgggaaccctgagtgagagtgagtgtggatgtgtacagtacacacactggacggcagcgggaggctgggactttccattacaaatagagacttcattcctgttgagtctagttggaatttttagtatgaatgtgagatttttctcctgcttgtgacattaagaataaaaaactgtgatctat

SEQ ID NO: 227208 - DNA, 564 bp, Homo Sapiens; identical to SEQ ID NO: 193680

SEQ ID NO: 227209 - DNA, 1666 bp, Homo Sapiens
  misc_feature (220)..(244): n is a, c, g, or t
ttggcacaaagtgctgggactacaggcataaacattgacgatcttgaggatgaccctgtggtgaacggggagaggtctggctgtgcgctcacagacgctgtggcaccagggaacaaaggaaggggtcagcgtggaaacacagagagcaagacggatggagatgacaccgagacagtgccctcagagcagtctcatgcaagtggcaaactccggaagaagnnnnnnnnnnnnnnnnnnnnnnnnngcagcacgggagaagcatcggaaaacggactagaagatatcgatcgcatcctagagaggattgaggacagcactgggttgaaccgtcccggcccagctcccctgagctccaggaagcacgttctctacgtggagcacagacacttgaatccagacacagaactgaaaaggtattttggtgcccgggcaatcctgggggagcaaaggccacggcagagacaacgtgtgtaccccaagtgcacatggctgaccacccctaaaagcacctggccccgctacagcaaaccaggtctgtccatgcggctgctggaatcaaaaaaaggcctctccttctttgcgtttgagcacagtgaggagtaccagcaggctcagcacaagttcctggtggccggggagtctatggagccgaacaacatcgtggttctgctccagacgagcccttaccacgttgactcactcctgcagctcagcgatgcctgccgctttcaagaggatcaggagatggctcgagacctcgtagagagagcgctgtacagcatggaatgtgcgttccaccccctgttcagtctcaccagtggggcctgccggctggattaccgcagacccgagaacaggagcttctacctggccctctacaagcagatgagcttcctggagaagcgaggctgcccgcgcacggcgctggagtactgcaagctcatcctgagtctcgagccggatgaggaccccctctgcatgctgctgctcatcgaccacctggccttgcgggcccggaactacgagtacctgatccgcctcttccaggagtgggaggctcatcggaacctgtcccagctccctaattttgccttctctgttccactggcgtatttcctgctgagccagcagacagacctccctgagtgtgagcagagctctgccaggcagaaggcctctctcctgatacagcaggcgctcaccatgttccctggagtcctcctgcccctgctcgagtcttgcagtgtgcggcccgacgccagcgtttccagtcaccgcttctttggacccaatgctgaaataagccagccccctgccctgagccagctggtgaacctgtaccttgggaggtcacactttctctggaaagagcccgccaccatgagctggctggaggagaacgtccacgaggttctgcaagcagtggacgccggggacccagccgtggaagcctgtgagaaccggcggaaggtgctctaccagcgtgcacccaggaatatccaccgccatgtgatcctctctgagatcaaggaagccgtcgctgccctgcccccggacgtgaccacgcagtctgtgatggggtttgatcctctgccttcttcggacacaatctactcctacgtcaagccagagaggctaagtcctatcaaccatggaaacaccattg

SEQ ID NO: 227210 - DNA, 1119 bp, Homo Sapiens
gtacaaaaaagttggatcagattaaaccattgaagttggaagttcatgaggctaagcctgtgccagaaaatcacccacagtgggatacagcaatagagggggatgaagaccaggaggacagtgagggctttgaagatagctttgaggaagaagaggaggaagaagaagatgatgactaagcagtactctgaatggaccacagtgtttgcacatatttgcaattttttgctgttttggaagtgtatcataaaccagaaacagtacagaactgatgttgagggaggtgtagtttttttactctagaaatgggtgcataatataactaggcagtggcggtgccttggtacaacctgaaaaatgttaaggcttattgaaacctttcaagtaggggatggtacatttatttcatctgcaaatgataataaatcctttgttattataactgtccagaagtgtgggctatgtattatctgatcagtctatggtcccagtaaaagtaaagatgcaggaaacacagtctgtaaatgagcgacttttctttgttcagctttagttttagcaaacaccacaaatatgttttaagtaacatcgctcaagtttaagtaacatcgctcaagttgataatctcttgataagctctgttgttgacattttgcagtgatacaacagctccactcatagatttaaacttttatttttacttatcttggtcataagttggcattctctcacattccacatgatatagagggctacgttttggaattttccttttcttaattgcccagagttatcagacagattataaaaatggcttttaatggcttaaaccatttctaaacctctatcttagcagatcaatgcaggatctaattcttttgataagttctagctctaaaagtgatagtgggactgtatgttttctgatactggtggcttatgttattaaaccttttttaaaaaaggttcactctaaaagctgaactacatccttagttttcagtctacttgactctatcaggagctttttaaggaaagtaagtataacatgcaaaggaagctttttttgtattcattttggactcctgtcaataaaaatagaagtttgttgactcgtcc

SEQ ID NO: 227211 - DNA, 781 bp, Homo Sapiens; identical to SEQ ID NO: 193685
  misc_feature (319)..(377): n is a, c, g, or t

SEQ ID NO: 227212 - DNA, 952 bp, Homo Sapiens
ttggctggaatttgaagtgccttttagggacttgggatttaacggagctccctataggagtacctgcctccttcagcccactagtagtgcgctggtaaatgctacggaatggccaccttttgtggtgacattggatgaggtagagctgatccactttgagcgggtccagtttcacctgaagaactttgatatggtaatcgtctacaaggactacagcaagaaagtgaccatgatcaacgccattcctgtagcctctcttgaccccatcaaggaatggttgaattcctgcgacctgaaatacacagaaggagtacagtccctcaactggactaaaatcatgaagaccattgttgatgaccctgagggcttcttcgaacaaggtggctggtctttcctggagcctgagggtgaggggagtgatgctgaagaaggggattcagagtctgaaattgaagatgagacttttaatccttcagaagatgactatgaagaggaagaggaggacagtgatgaagattattcatcagaagcagaagagtcagactattctaaggagtcattgggtagtgaagaagagagtggaaaggattgggatgaactggaggaagaagcccgaaaagcggaccgagaaagtcgttacgaggaagaagaagaacaaagtcgaagtatgagccggaagaggaaggcatctgtgcacagttcgggccgtggctctaaccgtggttccagacacagctctgcaccccccaagaaaaagaggaagtaacttctgaactttggccctgagctccattcttcctccagccaacccctgaaaattttacatgacatagaaactgtatttttcctttcgttttcatttgaagttttgccatttgtgtttatgggtttagggggccatttgtgtggaccaatctactcggggaattccaggcccaccaggacacgtgcc

SEQ ID NO: 227213 - DNA, 970 bp, Homo Sapiens; identical to SEQ ID NO: 193686

SEQ ID NO: 227214 - DNA, 1323 bp, Homo Sapiens; identical to SEQ ID NO: 193693
  misc_feature (1239)..(1250): n is a, c, g, or t

SEQ ID NO: 227215 - DNA, 1249 bp, Homo Sapiens; identical to SEQ ID NO: 193694

SEQ ID NO: 227216 - DNA, 1184 bp, Homo Sapiens; identical to SEQ ID NO: 193698
  misc_feature (176)..(187): n is a, c, g, or t

SEQ ID NO: 227217 - DNA, 807 bp, Homo Sapiens
  misc_feature (444)..(462): n is a, c, g, or t
tgtgtgggtctatgtaaatgcatctgtcctcatgtgttgatgtaaccgattcatctctcagaagggaggctggggttcattttcgagtagtattttatactttagtgaacgtggactccagactctctgtgaaccctatgagagcgcgtctgggcccggccatgtccttagcacaggggggccgccggtttgagtgagggtttctgagctgctctgaattagtccttgcttggctgcttggccttgggcttcattcaagtctatgatgctgttgcccacgtttcccgggatatatattctctcccctccgttgggccccagccttctttgcttgcctctctgtttgtaaccttgtcgacaaagaggtagaaaagattgggtctaggatatggtgggtggacaggggccccgggacttggagggttggtcctcttgcctcctggnnnnnnnnnnnnnnnnnnnctgcagtgaaagacaagctgcaaatcagccatgtgctgcgtgcctgtggaatctggagtgaggggtaaaagctgatctggtttgactccgctggaggtggggcctggagcaggccttgcgctgttgcgtaactggctgtgttctggtgaggccttgctcccaaccccacacgctcctccctctgaactgtatgactcgcagtcaggggcagctgaccatggaagattgagagcccaacgtttaaacttctctgaagggaggtggggatgagacgagaggtttttttgtactttgtacaaagaccacacatttgtgtaatcatggttttgggattaaaattatttt

SEQ ID NO: 227218 - DNA, 810 bp, Homo Sapiens; identical to SEQ ID NO: 193704

SEQ ID NO: 227219 - DNA, 925 bp, Homo Sapiens; identical to SEQ ID NO: 193705

SEQ ID NO: 227220 - DNA, 949 bp, Homo Sapiens; identical to SEQ ID NO: 193706

SEQ ID NO: 227221 - DNA, 1561 bp, Homo Sapiens; identical to SEQ ID NO: 193708
  misc_feature (192)..(242): n is a, c, g, or t

SEQ ID NO: 227222 - DNA, 810 bp, Homo Sapiens
actttgtacaaaaaagttgggcaaaggtgtcgtattatgatgaaagctgcaatagcgataatctgaaccatgcggttttggcagtgggatatggaatccagaagggaaacaagcactggataattaaaaacagctggggagaaaactggggaaacaaaggatatatcctcatggctcgaaataagaacaacgcctgtggcattgccaacctggccagcttccccaagatgtgactccagccagccaaatccatcctgctcttccatttcttccacgatggtgcagtgtaacgatgcactttggaagggagttggtgtgctatttttgaagcagatgtggtgatactgagattgtctgttcagtttccccatttgtttgtgcttcaaatgatccttcctactttgcttctctccacccatgacctttttcactgtggccatcaggactttccctgacagctgtgtactcttaggctaagagatgtgactacagcctgcccctgactgtgttgtcccagggctgatgctgtacaggtacaggctggagattttcacataggttagattctcattcacgggactagttagctttaagcaccctagaggactagggtaatctgacttctcacttcctaagttcccttctatatcctcaaggtagaaatgtctatgttttctactccaattcataaatctattcataagtctttggtacaagtttacatgataaaaagaaatgtgatttgtcttcccttctttgcacttttgaaataaagtatttatctcctgtctacagtttaataatagcatc

SEQ ID NO: 227223 - DNA, 771 bp, Homo Sapiens
ttggggaccagtgggccagagatgaccctgctttcttggtcctgttaagtatctggctctgtgtgtccactataggatttggctttgtgctggacatgggattctttgagacaataaagcttctcctttgggttgtactcatagattgtgtaggcgttggtcttctgatagcaactttaatgtggttcatctctaacaagtatttagtgaaacgacagagcagagactatgatgtggaatggggctatgcttttgatgtgcatctcaatgctttttatccactcctggtcattttgcattttatccagctttttttcatcaaccatgttatcctgacagacacatttattggatatttagttggaaataccttatggttggttgcagttggctattatatctatgtaactttcctgggatacagtgcattgccatttttgaaaaatacagtaattcttctgtatccatttgcacctctgattctgctctacgggctttccctggcactgggatggaacttcacccatactctctgttctttctataagtacagagtgaaataaaaagtgagaagaagattcaatcgtaactgtgtcaacagtattgtgaagtgatcatttcttgtaaaacttgtaaataaactatcatctttgtagatatcttaaaggtgtaaagtttgcaaatttgaagaaatatatattaacactgtggtcaggtacattccttaaaactaattaaatgtacatttctataataaatattttttaaact

SEQ ID NO: 227224 - DNA, 1011 bp, Homo Sapiens
ttggagcggatccaacttccgggtagtggagccgcaagccaccggcatcttgctttttcttccccctcctcctgtgtgccccgcgccgctccctctttcccttttattcccggccccacccgccaaaatgaacagctcggacgaagagaagcagctgcagctcattaccagtctgaaggagcaagcaataggcgaatatgaagaccttagagcagagaaccagaaaacaaaggagaagtgtgacaaaattaggcaagaacgagatgaagccgttaaaaaactggaagaatttcagaaaatttctcacatggtcatagaggaagttaatttcatgcagaaccatcttgaaatagagaagacttgtcgagaaagtgctgaagctttggcaacaaagctaaataaagaaaataaaacgttgaaaagaatcagcatgttgtacatggccaagctgggaccagatgtaataactgaagagataaacattgatgatgaagattcgactacagacacagacggtgccgccgagacttgtgtctcagtacagtgtcagaagcaaattaaagaacttcgagatcaaattgtatctgttcaggaggaaaagaagattttagccattgagctggaaaatctcaagagcaaactcgtagaagtaattgaagaagtaaataaagttaaacaagaaaagactgttttaaattcagaagttcttgaacagagaaaagtcttagaaaaatgcaatagagtgtccatgttagctgtagaagagtatgaggagatgcaagtaaacctggagctggagaaggaccttcgaaagaaagcagagtcatttgcacaagagatgttcattgagcaaaacaagctaaagagacaaagccaccttctgctgcagagctccatccctgatcagcagcttttgaaagctttagacgaaaatgcaaaactcacccagcaacttgaagaagagagaattcagcatcaacaaagtcaagaattagagagcaactaggaaaa

SEQ ID NO: 227225 - DNA, 1146 bp, Homo Sapiens
ctttgtacaaaaaagttgggtaaggccgaggttgcggcggaagcggagaccatgttccgagcggcggctccggggcagctccggcgggcggcctcattgctacgatttcagagtaccctggtaatagctgagcatgcaaatgattccctagcacccattactttaaataccattactgcagccacacgccttggaggtgaagtgtcctgcttagtagctggaaccaaatgtgacaagaaccttttgcccagagtagcagccaaacttgaggttgccccgatttctgacatcattgcaatcaagtcacctgacacatttgtgagaactatttatgcaggaaatgctctatgtacagtgaagtgtgatgagaaagtgaaagtgttttctgtccgtggaacatcctttgatgctgcagcaacaagtggcggtagtgccagttcagaaaaggcatcaagtacttcaccagtggaaatatcagagtggcttgaccagaaattaacaaaaagtgatcgaccagagctaacaggtgccaaagtggtggtatctggtggtcgaggcttgaagagtggagagaactttaagttgttatatgacttggcagatcaactacatgctgcagttggtgcttcccgtgctgctgttgatgctggctttgttcccaatgacatgcaagttggacagacgggaaaaatagtagcaccagaactttatattgctgttggaatatctggagccatccaacatttagctgggatgaaagacagcaagacaattgtggcaattaataaagacccagaagctccaattttccaagtggcagattatggaatagttgcagatttatttaaggtagttcctgaaatgactgagatattgaagaaaaaatgaatcaggatcatgccttaaaaagaaaacttttgttaaagtattccactgaaatcacagatatttgtgggtattataacaatcattggaaagcatggagagctacatttcataatttgagggaaaatttctaacagatgccagaatgcttgtttatgggattgctgtgtttccttttaattatttgtggttccaaacaattattgtttgaacttttttaattctgtactaaaatctataataaagcttttccacagcttt

SEQ ID NO: 227226 - DNA, 1030 bp, Homo Sapiens; identical to SEQ ID NO: 193711

SEQ ID NO: 227227 - DNA, 1010 bp, Homo Sapiens
gagcaatgcttttttctatatagaaacaactttgtacaaaaaagttggctttcctgtcttactaaatctgggcagcatttgacatggctgatcaccccttgcttcttggatggcacttccctggcacctctgtggctagttgtcctacctccctggctgttcctttcaggcttccgtgcaggcttctccacttgcccatgcacagtagggtctttcagggttctgctgtgggctccctagggaagcccatccatctggatggtttcaaggatggtgaggaatttagagttgacctccagccccaacatccttcctgatcacctgaaccacagttttgctgccctctaggtgcacagacaattcaggtccatggcccagatggtacttgctgtcttctgcaaacctgccccttctgggtacttcccttgaccccgagatcactcaggagccagacaggaaacttattctattcctgttttctctttctgcccaccacatccaatctctcaaaacggtcaggtctaccttaacatctcttgatttgagccactcccactgtcatcagctttcacctggattatcgtgacagcctcctactgcttctctatcatgtggccagagctatcttcctaaaatgcattgcatagttgatcaagtcactctctggcctaaaaccttccttggctccctgctgccctcaggataaagtctggacccctcagcatggcttgtgagactcatggtgtccttgtccctgctcacctctctggtctcatcacttgccttcttgcattctgggtcccagcctcctgtatccagagatgcagtggctctccattgccactctgattcctcctttcttttggtcacagagaaagggtactttctctgtcaaatctcaacttagacttgacttcctccaaggagctttggctatactctctcctcccgacccccaccctggcatactacacagatcactctgggctcacttgcctgcctaatggtca

SEQ ID NO: 227228 - DNA, 831 bp, Homo Sapiens; identical to SEQ ID NO: 193713

SEQ ID NO: 227229 - DNA, 510 bp, Homo Sapiens; identical to SEQ ID NO: 193714

SEQ ID NO: 227230 - DNA, 687 bp, Homo Sapiens; identical to SEQ ID NO: 193715

SEQ ID NO: 227231 - DNA, 1579 bp, Homo Sapiens
  misc_feature (1399)..(1417): n is a, c, g, or t
ttggcaacttagtcaacatcagaaaatccatactggcgagaaaccttatgaatgtaaagaatgtaagaaggccttccgttggggcaatcagcttactcaacatcaaaaaattcatactggggagaagccctacgaatgtaaagactgtgggaaggcttttcgatggggctcaagcctcgttattcataagaggattcatactggtgaaaaaccctatgaatgtaaagactgtggaaaggcctttcggcgtggtgatgagctcactcagcaccagagattccacactggggagaaagactacgaatgcaaagactgtgggaagacctttagccgtgtgtataaacttattcagcacaagagaattcatagtggggagaagccttacgagtgtaaagactgtgggaaggcttttatttgtggttcaagcctcattcagcataaaagaattcacacaggtgagaaaccctatgaatgtcaagaatgtgggaaggcctttactcgagtcaattaccttactcagcatcagaagatccacactggtgagaagcctcacgaatgtaaggagtgtgggaaggcctttcgctggggttcgagcctcgttaagcacgagaggatacatacgggcgagaagccgtacaagtgcacagaatgtgggaaggccttcaattgtggctatcacctcactcagcacgagagaatccacacaggcgaaaccccgtataaatgtaaggagtgtgggaaggctttcatttatggatcgagcctcgtgaaacatgagagaattcataccggggtgaaaccctatgggtgtacagaatgtgggaagagctttagtcacggccatcagcttacacaacatcagaaaacgcacagtggggcgaaatcctacgaatgtaaggagtgcgggaaggcatgtaaccacctaaaccatctccgagaacatcagaggatccacaacagttgaagagccttttgaacgcagtagcccgctcgtatctatggtttcgctttccacagtttgttacctgcagtcaactgcagttcaaaaatattaaatggaaaattccagaaataaagaattttaagtctcaaatggtgtgcccttctgagtagcgtgatgaaatctctcgctgtccggctccagccggccggggatgtgagtcatcccttggtccagcacatccacgctgtatacgccacccaccctgctagtgacttagtagccgtcttggtgatcagatcaactatcccagcatcacagtgcctgtgcccaagcagtcctcactttgcttaacagtggccccagagagcaggagtagtgatgctggtgattcggatatgccaaagagaagccacaaagtgcttccttttaaatgaaaaggtgaaagttctcaacttnnnnnnnnnnnnnnnnnnntcatatactgaggttgctaagatctacatgacaataagatattttgggagagagatacgttcacataattttattacatatattgttacaattgttctattttgttagttactgttggtaatctcttactgtgcctaatttataaattaaactttagatatg

SEQ ID NO: 227232 - DNA, 1289 bp, Homo Sapiens; identical to SEQ ID NO: 193717

SEQ ID NO: 227233 - DNA, 934 bp, Homo Sapiens
  misc_feature (836)..(852): n is a, c, g, or t
ttggctagtgtctgagcggcacagacgagatctcgatcgaaggcgagatggcggacgtgctagatcttcacgaggctgggggcgaagatttcgccatggatgaggatggggacgagagcattcacaaactgaaagaaaaagcgaagaaacggaagggtcgcggctttggctccgaagaggggtcccgagcgcggatgcgtgaggattatgacagcgtggagcaggatggcgatgaacccggaccacaacgctctgttgaaggctggattctctttgtaactggagtccatgaggaagccaccgaagaagacatacacgacaaattcgcagaatatggggaaattaaaaacattcatctcaacctcgacaggcgaacaggatatctgaaggggtatactctagttgaatatgaaacatacaaggaagcccaggctgctatggagggactcaatggccaggatttgatgggacagcccatcagcgttgactggtgttttgttcggggtccaccaaaaggcaagaggagaggtggccgaagacgcagcagaagtccagaccggagacgtcgctgacaggtcctctgttgtccaggtgttctcttcaagattccatttgaccatgcagccttggacaaataggactggggtggaacttgctgtgtttatatttaatctcttaccgtatatgcgtagtatttgagttgcgaataaatgttccatttttgttttctacatttaatgttactttcctgtcctaaaattgaaagttctaaagcatagcaaggctgtatggatcattgtgaagatacttctagggactgaactctatgtatttcnnnnnnnnnnnnnnnnngagatagagtcttgctgtgttacccagggtggattgcagctgatcatagctcactgcagcttcaaactcttgggctcaagcc

SEQ ID NO: 227234 - DNA, 664 bp, Homo Sapiens; identical to SEQ ID NO: 193720

SEQ ID NO: 227235 - DNA, 703 bp, Homo Sapiens; identical to SEQ ID NO: 193721

SEQ ID NO: 227236 - DNA, 795 bp, Homo Sapiens
  misc_feature (723)..(732): n is a, c, g, or t
ctttgtacaaaaaagttggccgcgatgcgtttcctggcagctacattcctgctcctggcgctcagcaccgctgcccaggccgaaccggtgcagttcaaggactgcggttctgtggatggagttataaaggaagtgaatgtgagcccatgccccacccaaccctgccagctgagcaaaggacagtcttacagcgtcaatgtcaccttcaccagcaatattcagtctaaaagcagcaaggccgtggtgcatggcatcctgatgggcgtcccagttccctttcccattcctgagcctgatggttgtaagagtggaattaactgccctatccaaaaagacaagacctatagctacctgaataaactaccagtgaaaagcgaatatccctctataaaactggtggtggagtggcaacttcaggatgacaaaaaccaaagtctcttctgctgggaaatcccagtacagatcgtttctcatctctaagtgcctcattgagttcggtgcatctggccaatgagtctgctgagactcttgacagcacctccagctctgctgcttcaacaacagtgacttgctctccaatggtatccagtgattcgttgaagaggaggtgctctgtagcagaaactgagctccgggtggctggttctcagtggttgtctcatgtctctttttctgtcttaggtggtttcattaaatgcagcacttggttagcagatgtttaannnnnnnnnnaacaacattaacttgtggcctctttctacacctggaaatttactcttgaataaataaaaactc

SEQ ID NO: 227237 - DNA, 809 bp, Homo Sapiens; identical to SEQ ID NO: 193722
  misc_feature (726)..(735): n is a, c, g, or t

SEQ ID NO: 227238 - DNA, 831 bp, Homo Sapiens; identical to SEQ ID NO: 193723
  misc_feature (739)..(748): n is a, c, g, or t

SEQ ID NO: 227239 - DNA, 877 bp, Homo Sapiens
  misc_feature (148)..(157): n is a, c, g, or t
  misc_feature (392)..(400): n is a, c, g, or t
  misc_feature (403)..(512): n is a, c, g, or t
  misc_feature (610)..(628): n is a, c, g, or t
ttggcagcctttagtgcctaccattatcttatccgtctcttcccgtccctgatgacaaagatcttgccttacagactttacaggcttggctttgagattctgtaactgcagacttcattagcacacagattcactttaatttcttaannnnnnnnnnaaatacaaggagggggctattaacacccagtacagacatatccacaaggtcgtaaatgcatgctagaaaaatagggctggatcttatcactgccctgtctccccttgtttctctgtgccagatcttcagtgcccctttccatacagggatttttttctcatagagtaattatatgaacagtttttatgacctccttttggtctgaaatactttcgaacagaatttcttttttttnnnnnnnnncannnnnnnnnnnnnnnnnnnnnnnnnnnnnnnnnnnnnnnnnnnnnnnnnnnnnnnnnnnnnnnnnnnnnnnnnnnnnnnnnnnnnnnnnnnnnnnnnnnnnnnnnnnnnntgggcctgaacataatttcaagaggaggatttataaaaccattttctgtaatcaaatgattggtgtcattttcccatttgccaatgtagtctcacttnnnnnnnnnnnnnnnnnnngaaatggataatttcatctactgcctttacttggggttaatgtgattcttaaacaccttcatcatggaactctcagagtggggtccgttttggtttcctggtggtgggttttgaaagataagggaaagcacattttgagcatgtctgggtaccatggtgcggatgcttgggaaccagaactgtttcagaggaatctaaagtctgattttagttttcagagacacagcttgttgtaaaacatgagaagac

SEQ ID NO: 227240 - DNA, 701 bp, Homo Sapiens; identical to SEQ ID NO: 193728
  misc_feature (98)..(117): n is a, c, g, or t

SEQ ID NO: 227241 - DNA, 969 bp, Homo Sapiens
ctttgtacaaaaaagttgggaagatcgtgtctccgcgctggaatatgagtctagtttttccaatgaggaagcacagaaagcacaggcccttcgactggcctctcacctcaacctggccatgtgtcatctgaaactacaggccttctctgctgccattgaaagctgtaacaaggccctagaactggacagcaacaacgagaagggcctcttccgccggggagaggcccacctggccgtgaatgactttgaactggcacgggctgatttccagaaggtcctgcagctctaccccaacaacaaagccgccaagacccagctggctgtgtgccagcagcggatccgaaggcagcttgcccgggagaagaagctctatgccaatatgtttgagaggctggctgaggaggagaacaaggccaaggcagaggcttcctcaggagaccatcccactgacacagagatgaaggaggagcagaagagcaacacggcagggagccagtctcaggtggagacagaagcatagcccctctccaccagccctactcctgcggctgcctgccccccagtctccccactccaccctgttagttttgtaaaaactgaagaattttgagtgaattagacctttatttttctatctggttggatggtggctttaggggaagggggaaaggtgtaggctgggggattgaggtggggaatcattttagctggtgtcagcccctcttcccttcctccattgcacatgaacatatgtccatccatatatattcatcagaatgttaatttattttgctccctctgttaggtccattttctaagggtagaaaaggcaagtggtagggatgaggtctgataagaacccagggtggagagggagactcctgggcagccgttttcctcatcctttccctctcccagtccatttccaaatgtgggcctccatggtggggtgctagggacatgggaaaa

SEQ ID NO: 227242 - DNA, 851 bp, Homo Sapiens; identical to SEQ ID NO: 193730

SEQ ID NO: 227243 - DNA, 746 bp, Homo Sapiens; identical to SEQ ID NO: 193731

SEQ ID NO: 227244 - DNA, 490 bp, Homo Sapiens; identical to SEQ ID NO: 193732

SEQ ID NO: 227245 - DNA, 895 bp, Homo Sapiens
ttgggaaagctttctgtcagaattcaaacctcagtaaacatctgagaattcacacaaaagagaaaccttgtgataacaatggctgtgggagatcttacaagtcacccctcataggacaccagaaaacagatgcagagatggaactctgtggtggcagtgaatatgggaagacatcacatctcaaaggacatcagagaattctcatgggggagaaaccctatgaatgtattgaatgtgggaaaactttctccaagacatcacatctcagagcacatcagagaattcacacaggtgaaaaaccctatgaatgtgttgaatgtgagaaaactttctctcacaagacacacctcagtgtacatcagagagttcacacaggggagaaaccctatgaatgtaatgactgtgggaaatcttttacctataactcagccctgagagcacatcaaagaattcacacaggtgagaagccctatgaatgcagtgactgtgagaaaacttttgcccataattcagccctcagagcacatcatagaattcacacgggggagaaaccttatgaatgtaatgaatgtggaaggtcttttgcccatatttctgttctcaaagcacatcaaagaattcacacaggggagaaaccctatgaatgtaatgaatgtgggagatctttcacctacaattcagccctgagagcacatcagagaattcacacaggtagaaaaccctatgaatgtagtgactgtgagaaaacttttgcccataattcagccctcaaaatacatcagagaattcacacgggggagaaaccctatgaatgtaatgaatgtgagaaaacatttgcccataattcagcccttagagcacatcagaatatccacacaggggagaactctatgaa

SEQ ID NO: 227246 - DNA, 1347 bp, Homo Sapiens; identical to SEQ ID NO: 193734

SEQ ID NO: 227247 - DNA, 648 bp, Homo Sapiens
tttgtacaaaaaagttggctggtttcatctgccatctaaactcttttcacctgtattgtttattgaaaatccaagacactatgccaatgcaaccgtgactactttgggagattggtagtctcttttgatggtgatagtgatggggtgcactatcataatcacatcaggtctgctttttgcttttaatgttaactaatgaagttccagagatgggccttagaaatgtgttttaagaattaacaaggagtctcaaaaagaaatgagagggatgcttcctttcccttgcatctacaaaacaagagagagactgttctgttgtaaaactctttcaatatttctgatatggtaaggtacttgagacccttcaccagaatgtcaatctttttttctgtgtaacatggaaacttgtgtgaccattagcattgttatcagcttgtactggtctcataactctggttttggaagaataatttggaaattgttgctgtgttctgtgaaaataacctccccaaaataattagtaactggttgttctacttggtaatttgacaccctgttaataacgcaattatttctgtgttcttaaacagtataaatagttgtaagtttgcatgcatgatggaaaaataaaaacctgtatctctgtta

SEQ ID NO: 227248 - DNA, 974 bp, Homo Sapiens
ctttgtacaaaaaagttggctcaaagtggtgttaaaagaggatagcttgtggtcctccacaggctaaactgaatggacagcaggctgctctcgcttcccagtatagagctatgatgcctccttatatgttccaacagtatccgaggatgacatatcctcctctacatggtcccatgagattcccaccttctttatctgaaacaaacaaaggccttcgaggaagaggcccacctccttcatgggcctctgagcctgaacgcccatccattcttagtgcatcagaactgaaggagcttgataaatttgataacctagatgctgaagctgatgaaggttgggcaggtgctcagatggaagtagattatacagagcaactgaatttcagtgatgatgatgaacaaggaagtaacagtcctaaagagaataacagtgaggatcaaggttcaaaagcctctgaaaacaacgaaaacaaaaaagaaacagatgaagtttccaacactaaatcatcttcccaaatacctgcccaaccatcagtagcaaaagttccctatgggaaaggaccttcatttaatcaggaacgtggaacatcttcacatctgccaccacctccaaagttgcttgcacagcagcatccacctccagatcgacaggcagtacctggaagaccaggcccctttccctccaagcagcaagtagctgatgaagatgaaatatggaagcaaagacgaagacaacaatcagaaatttctgcagcagtagaacgtgctcgtaaacggcgtgaagaggaagagcgaagaatggaagaacaaaggaaggcagcttgtgcggagaaactgaaacgattggatgagaagcttggcatcctggaaaaacaaccatctccagaggaaattagggaaagggagcgagaaaaagaacgggagcgtgagaaagaacttgaaaaagaacaagaacaggagcgagagaaggagagg

SEQ ID NO: 227249 - DNA, 1296 bp, Homo Sapiens
ttggctgaacttggccctgcccacagatgatagccaagagaggtcactatggcgcctttctgcaggacgagtgggacctgctccaaagaatgattttgctggcccacgagaaactctctgttcctgtcacgtgcaaaatccgtgtcttcccggagattgacaagaccgtgaggtacgcccagatgctggagaaggccggctgccagttgctgacggtgcacggacgcaccaaggagcagaaggggcccctgtcgggtgcagcgtcctgggagcatatcaaggctgtgcggaaggctgtggccatccctgtgtttgctaacgggaacatccagtgcctgcaggacgtggagcgctgcctccgggacacgggtgtgcagggcgtcatgagcgcagagggcaacctgcacaaccccgccctgttcgagggccggagccctgccgtgtgggagctggccgaggagtatctggacatcgtgcgggagcacccctgccccctgtcctacgtccgggcccacctcttcaagctgtggcaccacacgctgcaggtgcaccaggagctgcgagaggagctggccaaggtgaagaccctggagggcatcgctgctgtgagccaggagctgaagctgcggtgtcaggaggagatatccaggcaggagggagcgaagcccaccggcgacttgcccttccactggatctgccagccctacatccggccggggcccagggaggggagcaaggagaaggcaggtgcgcgcagcaagcgggccctggaggaagaggagggtggcacggaggtcctgtccaagaacaagcaaaagaagcagctgaggaacccccacaagaccttcgacccctctctgaagccaaaatatgcaaagtgtgaccagtgtggaaacccaaagggcaacagatgtgtgttcagcctgtgccgcggctgctgcaagaagcgagcctccaaagagactgcagactgcccaggtcacggattgctttttaaaaccaaattggagaagtctctggcctggaaagaggcccagcctgagctgcaggagcctcagccagcagcacctggaacaccaggtggcttctccgaagtcatgggcagtgccctggcctgaaggcccacaacccccacccccaggactgcttctggagcctggacacgtcctacttaagaaaatgccttttactcccggaatctcctgctacttaatgtggaaagacacgcccatgtcccccttcggcccactctgggggcctggaaatgctgcagtggggagcaggccccaggctgga

SEQ ID NO: 227250 - DNA, 1390 bp, Homo Sapiens
cttaaaaaagccaactttgtacaaaaaagttggagtacgtccccctacgggattggccatgagtttagtggccgctttttccatgacagaagagagaggcgtctgggcggtcttgcttctcaggagcctggcgccatcattgagctgtttaacagtgtgctgcagttcctggcttctgtggtgtcctctgaacagctgtgtgacctgtcctggcctgtcactgagtttgctgaggcagggggcagccggctgcttcctcacctgcactggaatgccccagagcacctggcctggctgaagcaggctgtgctcgggttccagcttccgcagatggaccttccacccctgggggccccctggctccccgtgtgctccatggttgtccagtacgcctcccagatccccagctcacgccagacacagcctgtcctccagtcccaggtggagaacctgctccacagaacctactgtaggtggaagagcaagagtccctccccagtccatggggcaggcccctcggtcatggagatcccatgggatgatcttatcgccttgtgtatcaaccacaagctgagagactggacgcccccccggcttcctgttacatcagaggcgctgagtgaagatggtcagatatgtgtgtatttttttaaaaacgatttgaaaaaatatgatgttcctttgtcgtgggaacaagccaggttgcagacgcagaaggagctacagctgagagagggacgtttggcaataaagccttttcatccttctgcaaacaattttcccataccattgcttcacatgcaccgtaactggaagaggagcacagagtgtgctcaagaggggaggattcccagcacagaggatctgatgcgaggagcttctgctgaggagctcttggcgcagtgtttgtcgagcagtctgctgctggagaaagaagagaacaagaggtttgaagatcagcttcagcaatggttgtctgaagactcaggagcatttacggatttaacttcccttcccctctatcttcctcagactctagtgtctctttctcacactattgaacctgtgatgaaaacatctgtaactactagcccacagagtgacatgatgagggagcaactgcagctgtcagaggcgacaggaacgtgtctaggcgaacgactaaagcacctggaaaggctgatccggagttcaagggaagaggaagttgcctctgagctccatctctctgcgctgctagacatggtggacatttgagcagcctgacctgtggggagggggtctctcccgaagagtttctgtttttactcaaataatgttattctcagatgcttgatgcactggtgggaaatgtgattaatttaatcatgcagataaccatttaaatgtc

SEQ ID NO: 227251 - DNA, 777 bp, Homo Sapiens
ttggcacctttaggtcctgtgagggacggcccaggtggcaggatgtcctggtctggccttctccatggcctcaacacgtccctaacttgtggcccagctctggttccccggctctgggctacctgctccatggctaccctgaaccagatgcaccgcctggggccccccaagcggccgcctcggaagctgggccccacggaaggccggccgcagctgaagggtgtggtcctgtgcacgtttacccgcaagccgaagaagcccaactcagccaatcgcaagtgctgtcgagtgcggctcagcactggccgcgaggccgtctgcttcatccctggggagggccacaccctgcaggagcaccagattgtccttgtggagggcggccgcacccaggacctgccaggcgtcaagctcaccgttgtgcgtggcaagtacgactgtggccacgtgcagaagaagtgacggctgggggcacagtgggctgggcgcccctgcagaacatgaaccttccgctcctggctgccacagggtcctccgatgctggcctttgcgcctctagaggcagccactcatggattcaagtcctggctccgcctcttccatcaggaccactattaagccataggagtcctgggggtgcaaagggtgcccctctgtcaacacccttggctcctgtgtttagaggggtggcctgaaggaccttttctgctgggacaagacactgtactgccctctgctgggaaggggttttaatatactttaccctggagcttgtgatgt

SEQ ID NO: 227252 - DNA, 1316 bp, Homo Sapiens
ttggcgcagctaacagacggcggcagtgcgagaaagccgaagatggcggtccccgcggcgctgatcctacgggagagccccagcatgtggaaagcagtgtcactgataaatgcaatagatacaggaagatttccacggttgctcactcggattcttcaaaaacttcacctgaaggctgagagcagtttcagtgaagaagaggaagaaaaacttcaagcggcattttctctagagaaacaagatcttcacctagttcttgaaacaatatcatttattttagaacaggcagtgtatcacaatgtgaagccagcagctttgcagcagcaattagagaacattcatcttagacaagacaaagctgaagcatttgtcaatacgtggtcttctatgggtcaagaaacagttgaaaagttccggcagagaagtctggctccctgtaagctagagaccgttggatggcagcttaaccttcagatggctcactctgctcaagcaaaactaaaatctcctcaagctgtgttacaactcggagtgaacaatgaagattcaaagagcctggagaaagttcttgtggaattcagtcacaaggagttgtttgatttctataacaagctagagactatacaagcacagctggattcccttacatgatgttttcgaagactgtttttttcatcacgctcctgccacctcattattttgcattgaagatacattgccaggttgtgttttctgaaggattcagtgacttgctttctgtaaattatatggcttatcacttcttagacaaataacaaccaatagagatcattgttaagaatactgaggttctaatatactttctttagttctgtgagccaacagtaattattaagaacactttccctttaaaggaaacaaaagtgaataccatattgtttttactgtcatagtgttgctttcttgcctgtcctgcttagtttttacttgctggatgataccataatgtatcaaggagcgtccatggatacaagataagatgtgtaccttagtagaatacagagctttggtaattacatgaataaaattaagaaaatagccatatacaatcaaatacactatggcatttttatttgaatatgatgagtatattttgcttcggaaataatatatgaaggaaatgtaaaatagtgagtagtatggtatcagttaattccagtctgagcttctctgtcaacttcagtttctctctcagtttaatgatttaataatagtccaggtttttgtgtgtttttctttatactgcaattaataatgattcactttatagtttggga

SEQ ID NO: 227253 - DNA, 964 bp, Homo Sapiens
ttgggactccgaaagctgtggacctgttgaattacacccagtggttcccaattgtgatttttttcaacccagactccagacaaggtgtcaaaaccatgagacaaaggttaaatccaacgtccaacaaaagttctcgaaagttatttgatcaagccaacaagcttaaaaaaacgtgtgcacacctttttacagctacaatcaacctaaattcagccaatgatagctggtttggcagcttaaaggacactattcagcatcagcaaggagaagcggtttgggtctctgaaggaaagatggaagggatggatgatgaccccgaagaccgcatgtcctacttaaccgccatgggcgcggactatctgagttgcgacagccgcctcatcagtgactttgaagacacggacggtgaaggaggcgcctacactgacaatgagctggatgagccagccgaggagccgctggtgtcgtccatcacccgctcctcggagccggtgcagcacgaggagagcataaggaaacccagcccagagccacgagctcagatgaggagggctgctagcagcgatcaacttagggacaatagcccgcccccagcattcaagccagagccgcccaaggccaaaacccagaacaaagaagaatcctatgacttcttcaaatcctatgaatataagtcaaacccctctgccgttgctggtaatgaaactcctggggcatctaccaaaggttatcctcctcctgttgcagcaaaacctacctttgggcggtctatactgaagccctccactcccatccctcctcaagagggtgaggaggtgggagagagcagtgaggagcaagataatgctcccaaatcagtcctgggcaaagtcaaaatatttgagaagatggatcacaaggccaggttacagagaatgcacgagctccaggaagcacagaatgcaaggatcgaaattgctcagaa

SEQ ID NO: 227254 - DNA, 922 bp, Homo Sapiens
ttggctcggttccgtgcaactttcaagtgagttgcgaactccgccctgtaggccggtgctggtggcccggcgcgctggaaccgcggcgacccgctccagcgcgggaccagcagcaagggccgagcgccaggttctccgcggcagaaagggcgggtgggagctgtaactgccccggccgcggggcgcgcccgctcccaagtcggcttcctccccgccggggccgctttgcctcgggtctccccattctccaggtcccctgaactgcacagtcggaggccgtgggcggcgggctctgcctccgccgagggacagccggatcgcccctctgcttcccgcaactgccctgatcaccccccgtcccagcccttgagtgaacgtccttctgagcggcttcctggggtcctccccacgtcccaaaggccggcaagatggtgtcctggatgatctgtcgcctggtggtgctggtgtttgggatgctgtgtccagcttatgcttcctataaggctgtgaagaccaagaacattcgtgaatatgtgcggtggatgatgtactggattgtttttgcactcttcatggcagcagagatcgttacagacatttttatctcctggttccctttctactatgagatcaagatggccttcgtgctgtggctgctctcaccctacaccaagggcgccagcctgctttaccgcaagtttgtccacccgtccctgtcccgccatgagaagagatcgacgcgtacatcgtgcaggccaaggagcgcagctacgagaccgtgctcagcttcgggaagcggggcctcaacattgccgcctccgctgctgtgcaggctgccaccaagagtcaggggcgctggccggcaggctgcggagcttctccatgcaggacctgcgctccatctctgacgcacctgcccctg

SEQ ID NO: 227255 - DNA, 1072 bp, Homo Sapiens
catgacttcacccagggcctccaacacctcccgcttgtagtcttcaaagtcaccatcgatttggctaacactctgctcctccaccacccacagctggcaattggtttctgtgatgagtcgggcatcatggctgacaacgatcacagcacccttgtattcattgatggcctcccctagagcatcaatagactctatgtccaggttattggttggctcgtccaagatgaggacatcaggttcccgacaggccagctcagcaaacacaactcgcgccttctgaccaccagagagtttgcagatctggatggtgtgggcgtgactctccaggccgaagcggcccaggcacttgcgggcatcctggtagggcaggttgaagccccgctgcaggtactcagtgggcgtctcctccatgcgcagctgctctgcatactgctggttgaagaagccaattttcagccggtggttctttctcatttccccatgggtcggtgtcagcttgccagtcagcagcaggagtagcgtactcttccccacaccattagggcccacaatgcaaatccttgaatccatgtcgatgccaaaatccaagttcttaaagagtggtttctgtccctggtagccgaatgtcacaccatgcagacccagcactggagggctgagtggtggggggtctggaaaagtgaagcgcacagtgtactccttagggcgcttcaggagctcaggggcctcctgggattcctcatcttggtttttccgtcggcatttctgctgcttccgagtcagggcttccttcgtttgtttttccgcctgcttggtggacttcccgcctgccttcagctccttcagctttttctcttgcttctcatactgtttcagcagttctttctgcttctttggtacatctttttgaaggtcatgtaattgcccctatagtagtggagccgctgggcatcgaggtggatgatatcagtgcagacatcatccaagaagccctggtcatgggagacgatcagcaaggtcttccgccagccctggaggtagttattagggccagatgacccaacttttttgt

SEQ ID NO: 227256 - DNA, 1111 bp, Homo Sapiens
ttggggcggagagaggcgagcaccgggaaggggagcgtggggccgctggaatgggtgaatttaaggtccatcgagtacgtttctttaattatgttccatcaggaatccgctgtgtggcttacaataaccagtcaaacagattggctgtttcacgaacagatggcactgtggaaatttataacttgtcagcaaactactttcaggagaaatttttcccaggtcatgagtctcgggctacagaagctttgtgctgggcagaaggacagcgactctttagtgctgggctcaatggcgagattatggagtatgatttacaggcgttaaacatcaagtatgctatggatgcctttggaggacctatttggagcatggctgccagccccagtggctctcaacttttggttggttgtgaagatggatctgtgaaactatttcaaattaccccagacaaaatccagtttgaaagaaattttgatcggcagaaaagtcgcatcctgagtctcagctggcatccctctggtacccacattgcagctggttccatagactacattagtgtgtttgatgtcaaatcaggcagcgctgttcataagatgattgtggacaggcagtatatgggcgtgtctaagcggaagtgcatcgtgtggggtgtcgccttcttgtccgatggcactatcataagtgtggactctgctgggaaggtgcagttctgggactcagccactgggacgcttgtgaagagccatctcatcgctaatgctgacgtgcagtccattgctgtagctgaccaagaagacagtttcgtggtgggcacagccgagggaacagtcttccattttcagctggtccctgtgacatctaacagcagtgagaagcagtgggtgcggacaaaaccgttccagcatcacactcatgacgtgcgcactgtggcccacagcccaacagcgctgatatctggaggcactgacacccacttagtctttcgtcctctcatggagaagtggaagtaaagaattacgatgccgctctccgaaaatcacctttccccaccgatgtctcatctcttgttctaaaagaggcagcttctcctcttccagtttgctcatcactt

SEQ ID NO: 227257 - DNA, 1086 bp, Homo Sapiens
  misc_feature (953)..(965): n is a, c, g, or t
ttggcagcctgctgagaagcgtggtgcagctgggtctgggacttcactagagcttactctggagcacctattttctgtgcacatgggagtgctccactccctagcagagcagagggaagtctctgccaggtacccacgccacaggcctcaggatggctttttgtctgagggcctcattaggcccagactgctgctgctggtaccagtctcctgagacactgcctccctggagcccatgcatgcccagctgttcttactgcttagtagccttgaagcagcacatctccactgtccctggcaggattgtgggaggcttcacaacccctgctttcctgacttcctcttctgcccaacactgggtgccccttcccagtttcccagcaggggcttcatgggccaccgtcagtgggtctgggcctgccagagtcgtcttgctcttcctcttgcttctaggcaaccacacttggcaagttaaatgtcccaagcaccttgtctcccttcccaagaacaaaccatttctgtgcacatccttggaggcgagatgagctccttgcagagggccagagtaagtgcaagtcatggagtgcaggcagaggggtccatggcttccccagcccagggagggtatcagtatcattcattctctctcccctcactggtatgggttcagagcaatgcctagggcccctctctgctcccctgcctagtggggtggtagtggctacctctcagccccaatagtccctgctcctcttagaatcttcaccaagtggcaggccacctctgggcaggaccacctgcgtctggcacccaggaggtgaggcagacaccatggttaggtgatagggtctgaacccagttggggagacagaggggttcagacttgggaagaatctgtcagtgtgcatggagtgaggtgtgtgtgtgtggatggatgtgcacgtgtgcatgcnnnnnnnnnnnnngccctgaggacagttgaatttgggggcattttttctacaagaagcagtcagccttctctccccccataaggactgggctgtaacccttaagcccatcaagttacttccagcctggagagaa

SEQ ID NO: 227258 - DNA, 807 bp, Homo Sapiens
ttggcatgacctgtgtgaaggaagagatctttgggcctgggttatgtccattttatcatttgacactgaagctgaggttctagaaagagccaatgataccacttttggactagcagctggcgtctttaccagggacatccaacgggctcatagagtggtagctgagcttcaggctgggacgtgcttcattaacaactataacgtcagcccagtggagttgccctttggtggatataagaagtcaggatttggcagagagaacggccgtgtgacaatcgaatattattcacagctgaagactgtgtgtgtggagatgggtgatgtggaatctgctttttgaaaacctgcagtgaaacctattgacatggccacgctgtggaatgatgtgaattggccctgtttacagaggcagtacaactgaatgttattttacatccagaattttggcgttcagtataagagaatggttcatgttactctttctctctccatcagcttcctcactgaaaatgtgcattaagtgccttgtagatactaatcaagaaagctgtgattctcctcaaagcgtatttttgtgaaatcttttaagagccagtaacatacttctagagaacaggaaaagagactaggataatacatcttccacacatttggcccactgataatgttaattctctggcgtatttcaaagaacttgttcctggctgatccaagtgcagtggtatttacaactaattgatcacaaccagtttgtagatttctttgttccttctccattcccactgcttcacttgcctagtcttgaag

SEQ ID NO: 227259 - DNA, 1094 bp, Homo Sapiens; identical to SEQ ID NO: 193744
  misc_feature (735)..(759): n is a, c, g, or t

SEQ ID NO: 227260 - DNA, 860 bp, Homo Sapiens
ttggttcttgaagtgagagcggctaatcataggcaaaaaatccccatgaagccaggagatctggggcagagagtggagtgaactcacttttcacaatgacccagcaacatgggagagggtgggggctggatttcagcccagccactgtgctgatggtgcacagccctttaatgctgtgtatcatctcttttcttcacagtgccatctctgtggagctgtactacatctttgccacagtatggggtcgggagcagtacactttgtacggcatcctcttctttgtcttcgccatcctgctgagtgtgggggcttgcatctccattgcactcacctacttccagttgtctggggaggattaccgctggtggtggcgatctgtgctgagtgttggctccaccggcctcttcatcttcctctactcagttttctattatgcccggcgctccaacatgtctggggcagtacagacagtagagttcttcggctactccttactcactggttatgtcttcttcctcatgctgggcaccatctcctttttttcttccctaaagttcatccggtatatctatgttaacctcaagatggactgagttctgtatggcagaactattgctgttctctccctttcttcatgccctgttgaactctcctaccagcttctcttctgattgactgaattgtgtgatggcattgttgccttcccttttgccctttgggcattccttccccagagagggcctggaaattataaatctctatcacataaggattatatatttgaactttttaagttgcctttagttttggtcctgatttttctttttacaattaccaaaataaaatttatttaataaaaa

SEQ ID NO: 227261 - DNA, 1532 bp, Homo Sapiens
ttggaagccgctgccggttcaggtgtttaacttgcagcagtaggtcagacctcgtcctgcccggcacggccggggacttcagcctgagcgccagcctgtcggcctgtacgctgctctacgagggggccgtggagcccatgcagatcgacgtggacccccaggaagacccgcagaatgcacctgacgtcaactacgtggtggagaaccccagcctggatctggaacagtacgcggccagctacagcggcctgatgcgcatcgaacggctgcagttcattgctgatcactgccccacgctgcgggtggaggccctgaagatggccctctccttcgtgcagagaacctttaacgtggacatgtacgaggagatccaccgcaagctctcagaggccaccagggagctgcagaacgcacccgacgccatccctgagagcggcgtggagcccccagccctggacacggcctgggtggaggccacgcggaagaaggcgctgctgaagctggagaagctggacacagacctgaagaactacaagggcaactccatcaaagagagcatccggcgcggccacgacgacctgggcgaccactacctggactgtggggacctcagcaacgccctcaagtgctattcccgggcccgggactactgcaccagcgccaaacacgtcatcaacatgtgcctcaatgtcatcaaggtcagcgtctacttgcagaattggtctcatgtgctcagctacgtcagcaaggctgagtccaccccagagattgccgagcagcgaggagagcgtgacagccagacccaggccatcctcaccaagctcaagtgtgccgcaggcttggcagagctggccgccaggaagtacaagcaggctgccaagtgcctcctgctggcttcctttgatcactgtgacttccctgagctgctgtcccccagcaacgtggccatctacggtggcctgtgcgccttggctacctttgaccggcaggagctgcagcgcaatgtcatctccagcagctccttcaagttgttcttggagctggagccacaggtccgagacatcatcttcaaattctacgagtccaagtacgcctcatgtctcaagatgctggacgagatgaaggacaacctgctcctggacatgtatctggccccccatgtcaggaccctgtacacccagattcgcaaccgtgccctcatccagtatttcagcccctacgtgtcagccgacatgcataggatggcggcagccttcaataccacggtggccgccctggaggacgagctgacgcagctaatcctggaggggctgatcagtgcccgtgtggactcacacagcaagatcctatacgcccgggacgtggatcagcgcagcaccacctttgagaagtctctgttgatgggcaaggagttccagcgccgcgccaaggccatgatgctgcgggcagctgtgctccgcaaccagatccatgtcaagtccccgcccagagaaaggagccagggggagctgactccagccacagccagtccc

SEQ ID NO: 227262 - DNA, 1052 bp, Homo Sapiens; identical to SEQ ID NO: 193747

SEQ ID NO: 227263 - DNA, 1046 bp, Homo Sapiens
  misc_feature (799)..(859): n is a, c, g, or t
tcaataggcgcgcgagagaagggatggggtaaaacaacaggaccaggtgagtgggctccaaggtgactaaacgtgacattttccacagcgaaatatactataatacaacaaaccagaggccctggaggacacaggctgctgcgtctccaggcagaggtcggtaggggagggctggaaagattggctgctcggttcaaatccttctgacttgctggcaagccttgctcctcgacagaagtttggggtggggggcagaaaactccaagcagatcccccagcctcggagcctggcctgagttccatgctgcacagctgctgctggtggcctgctccattgccctagcctcccttgtgggtgacactacacagtcaccctcccaagctgcctccaaggacgcctggttcccctccattctccaccctttccatgacgatttgggggaggtggagcagtggctgcggaaaccagcagccctgtttgggaggcggtgccggtggtgctcagggagggggcatggggagagctggaaatccaggacaaggaggccccagccctccctcaagctcccctaggctcgaccctatagatgcggagtgatcgcccatgaggaatgagctgtccttcctttgttccagcggcctgaggacaggcaaaagggcagagggcaggggccagcaacaggaagttgggctgggtggcaaacagcaggcccctcgtggcagatttcacacctctcctgccctggctggccccagcttttcctccagaaagatccctgccaagaattagccaagaagnnnnnnnnnnnnnnnnnnnnnnnnnnnnnnnnnnnnnnnnnnnnnnnnnnnnnnnnnnnnnttacacattctgtacacagctaacaacaacaaaaaaagggacaaaaccccacacgctaaaattacaatgaaagtgtgaacttcaccaattgcaacctaaaaaacacaacaaatgcagcagttggcagtgcggcctgcagggaggtctgcacaggcgctgcccaggccgccgcggggctccttgcccc

SEQ ID NO: 227264 - DNA, 904 bp, Homo Sapiens
  misc_feature (277)..(333): n is a, c, g, or t
cacacagagccccttcccttcctcctcgggaacagccccggaatggggccttcccttggtgcctctaggtctgccctccagcccatgtccccagaaggtggtctttccttggaggggtcagagactatagcccagggctctggggtcactgtgggaacatctgcctcagctcggcacgcacttctcctggcctgtttcttccactgggaactgggaccctaacccctcaaagggggatccctgagcgagggtcatgggcagggagctggtatggacnnnnnnnnnnnnnnnnnnnnnnnnnnnnnnnnnnnnnnnnnnnnnnnnnnnnnnnnncctagtcgtctttatccttggcgccatgtttgaggatgcgggtgaactccacgtagttgaagttgcctttcttatcaatgggtgcctcccggtacatctcgtccacttcctcatctgtgaagcggtcacccatggtggtgagcagctcccggaggtggtcctcatggatgaaacctgaggcttcctcgtcgaagcaggcaaaggcgttgcgaatcacatcctcggggtccgtgccgttcagcttctccccaaacatggtgaggaacatggtgaagttgatgggccccggggcctcgctcatcatgccctccaggtattcgtctgtggggttcttccccagcgaggccagcatgtcgtgcaggtcctccttgtcaatgaagccatcacggttctggtcaatcatgttgaaagcctccttaaactcctggatctgggactggtcaaacattgcgaagacattggatgtggcccgctgtggccgcttcttggtggtcttggctttggcccgcttgctggacatcttggcttctggtgggtggggcttccctggtgcggagaaggcgcttgccaa

SEQ ID NO: 227265 - DNA, 915 bp, Homo Sapiens; identical to SEQ ID NO: 193749

SEQ ID NO: 227266 - DNA, 498 bp, Homo Sapiens; identical to SEQ ID NO: 193750

SEQ ID NO: 227267 - DNA, 1108 bp, Homo Sapiens
ccaactttgtacaaaaaagttggctattctttcccattcaagaaaccagattctgaaaatgtcctaggagaagatgagtcttctgatgaccaggacatggaagtcaacgagtctgcccagaacaatctgacaaaggcagtagatgcttttaaaaagtcttttaagttatgtgtcaccaaggagatgctccttcttagtattacaactgcttatacaggtctggaattaactttcttctctggtgtatatggaacctgtattggtgctacaaataaatttggagcagaagagaaaagccttattggactttctggcattttcatcggcattggagaaattttaggtggaagcctcttcggcctgctgagcaagaacaatcgttttggtagaaatccagttgtgctgttgggcatcctggtgcacttcatagctttttatctaatatttctcaacatgcctggagatgccccgattgctcctgttaaaggaactgacagcagtgcttacatcaaatccagcaaagaagttgccattctctgcagttttctgttgggccttggagacagctgctttaatacccagctgcttagtatcttgggctttctgtattctgaagacagcgccccagcatttgccatcttcaagtttgttcagtctatttgcgcagccgtggcatttttctacagcaactaccttctccttcactggcaactcctggtcatggtgatatttgggttttttggaacaatttctttcttcactgtggaatgggaagctgccgcctttgtagcccgcggctctgactaccgaagtatctgatctggtgtccgtgagggacacgtatgacctcagaaacacagctggacacagagcttggtggaagaagtcgcctttgatcttcactatatattgggtgatgttcagtatggaaaatcaagggattaagactgttaaatcagccagagttggtgttcaagtttacagatatgagttatttaaagcaagtagaataagggaaagctgttctgtcaactgtaattgttcaaagatgttgtttttcatttcatctatctcaattcttataatcatgttataaatgtaaatgttt

SEQ ID NO: 227268 - DNA, 926 bp, Homo Sapiens; identical to SEQ ID NO: 193757

SEQ ID NO: 227269 - DNA, 695 bp, Homo Sapiens
  misc_feature (124)..(143): n is a, c, g, or t
ttggagctctttgaatccagggacttgaagaaagactaggtgtgtcccatccaagttgagcacgcgccttccccagcttgcagcagcacaccccaagcgctgcttttcacctgtacctttgttnnnnnnnnnnnnnnnnnnnngctgttgttgtcatcgttaactgtgggcatggaatgcgtgaggctggcttctgggttgtccacaccactctctgctgtgttgacttcctgttgtcttcatcaaagcttttttccgtggtattctaaaattaggccagcagtgggggctgggagggcatctgtgttagtcctttcctggctgtgacccgccacactcactgtcagtattaaggcccagcagcctgttgataagctaccctgtctcaccatgtgctggtgtggaaacggggcccagccagcacgcctcaaggtagatggaatccccactggtcagagaaaaagctatgcggacactccagcttggcctgggtcacagcactgactcctcacccgctagtctggctgttaagaggagaaagtgcactgccttccagcccaggaggaggacagcattttgtatttgttccactgatgcagcttagaaccacacccctgagagtcgtggcaaacctttcacaacctggaaaatgttgaaagcaaccattcctatttttgtttgttttttattaaatc

SEQ ID NO: 227270 - DNA, 903 bp, Homo Sapiens
ttggctctaggtgatgtttgcagacagaaaaagtaaactgtcaaggaattcagagcattgggtacttgttatttggaccagtttgaagcatctttgatttattggaccaactggcaacagaaaatgaaaagtagtgtggcacagataaaaccttcttctggtcatgacagaagggaaaaccttaattcatatcagaggaactcctctccagaagacagatatgaagaacaagaacgatccccccgggatagagattactttgattacagcagatcagactatgagcattcaagaagaggacgttcttatgatagtagcatggagtcacgaaacagggaccgagaaaaacgcagagaaagagaaagagatacggatcggaaaaggtctcggaaatccccatctcctgggaggagaaacccagaaacatcagtaactcagagttcctctgctcaggatgaacctgctacaaagaaaaagaaagatgagctggatcctcttcttactcgcactggtggagcatatattccccctgcaaagctcaggatgatgcaggaacagattacagataaaaacagcttagcataccagaggatgagttgggaggccctgaagaagtcaattaatggccttatcaacaaagtcaacatttccaacataagtattattattcaagagcttcttcaagaaaatatagttagaggaagaggactgctgtccaggtctgttttgcaagcacagagtgcttctccaatcttcacccatgtttatgcagcattagtggcaattatcaactcaaaatttccacaaattggagaattaatcctcaaaggttaattcttaattttcgaaaaggctatcgaagaaatgacaagcaactttgcctgactgcttcaaatttgtggc

SEQ ID NO: 227271 - DNA, 1158 bp, Homo Sapiens
  misc_feature (939)..(1022): n is a, c, g, or t
ttggagatgaggagctccgccggcggcagctgacctgtaccgaggagatggcccagcgagggctcccacccgcccacgacccctgggagccgaagccagactgggcacacaccggcagccacagctccgaagctggcaagaaggatgtcagtgggcccctgagggagctgcgccctcggctctgccacctgcgaaagggacctcagggctatgggttcaacctgcatagtgacaagtcccggcccggccagtacatccgctctgtggacccgggctcacctgccgcccgctctggcctccgcgcccaggaccggctcattgaggtgaacgggcagaatgtggagggactgcgccatgctgaggtggtggccagcatcaaggcacgggaggacgaggcccggctgctggtcgtggaccccgagacagatgaacacttcaagcggcttcgggtcacacccaccgaggagcacgtggaaggtcctctgccgtcacccgtcaccaatggaaccagccctgcccagctcaatggtggctctgcgtgctcgtcccgaagtgacctgcctggttccgacaaggacactgaggatggcagtgcctggaagcaagatcccttccaggagagcggcctccacctgagccccacggcggccgaggccaaggagaaggctcgagccatgcgagtcaacaagcgcgcgccacagatggactggaacaggaagcgtgaaatcttcagcaacttctgagccccttcctgcctgtctcgggaccctgggacccctcccgcacggaccttgggcctcagcctgccccgagctcccccagcctcagtggactggagggtggtcctgccattgcccagaaatcagccccagccccggtgagcccccatcctgcccctgcccaccaggtactgggggcctgtggcagcaagataggggnnnnnnnnnnnnnnnnnnnnnnnnnnnnnnnnnnnnnnnnnnnnnnnnnnnnnnnnnnnnnnnnnnnnnnnnnnnnnnnnnnnncgagcgagcgcgcggcagccgcggggcgagggcctttgctgctctgctggggcctgctgactgaaaggaatttgtgtttttgctttttttccaaaaagatctccagctccacacatgtttccacttaataccagag

SEQ ID NO: 227272 - DNA, 950 bp, Homo Sapiens
  misc_feature (418)..(428): n is a, c, g, or t
ttggctacaagtttagtggcttcacgcagaagttggcaggagcatgggcttcggaggcctatagcccgcagggattaaagcctgtggtttccacagaagcaccacctatcatatttgccacaccaactaaactgacctccgattccacagtgtatgattatgctgggaaaaacaaagttccagagctacaaaagtttttccagaaagctgatggtgtgcccgtctacctgaaacgaggcctgcctgaccaaatgctttaccggaccaccatggcgctgactgtgggagggaccatctactgcctgatcgccctctacatggcttcgcagcccaaaaacaaatgagttaggctgcagaggactggtttgttttttggcataaaccctttgaagttcctttttcattgttaaattaaaannnnnnnnnnnacttggtgccgcttaacatttttgcaagaaaaataggaagatatgaagatgatgttttggtttgtttatgaaatgcatatggcttgtcagagctcattcgacagttaaagccattgtttaaagaaacggtgctttgctctgtgtttgtgctcctgatttccctggaggttctggatgaaggctgaacacaggcttgttaatgtcagtctgtgctgaggacctcagggacttgaggttgcatttttgagcatggggtgcaggagcctttctggatttggatgtggctatggaaagaacacagaagccaaggtcatgtgcatgaaatgaggagtttgagttagtcacctcggggattttttccattttgcagtaaaatgttaaattaatgtaacctgcctctatttgttgggcaggtaatttcaaagggttatttgcctcatctcctatctttagtgaaatcttatgtgtaattgtgtgtatttattccaccgtgggtattttattctatctgtataatgttgc

SEQ ID NO: 227273 - DNA, 928 bp, Homo Sapiens
cataatagccaactttgtacaaaaaagttggcttgcttttgggagccagcggtatggcgtcgggctgcaagattggcccgtccatcctcaacagcgacctggccaatttaggggccgagtgcctccggatgctagactctggggccgattatctgcacctggacgtaatggacgggcattttgttcccaacatcacctttggtcaccctgtggtagaaagccttcgaaagcagctaggccaggaccctttctttgacatgcacatgatggtgtccaagccagaacagtgggtaaagccaatggctgtagcaggagccaatcagtacacctttcatctcgaggctactgagaacccaggggctttgattaaagacattcgggagaatgggatgaaggttggccttgccatcaaaccaggaacctcagttgagtatttggcaccatgggctaatcagatagatatggccttggttatgacagtggaaccggggtttggagggcagaaattcatggaagatatgatgccaaaggttcactggttgaggacccagttcccatctttggatatagaggtcgatggtggagtaggtcctgacactgtccataaatgtgcagaggcaggagctaacatgattgtgtctggcagtgctattatgaggagtgaagaccccagatctgtgatcaatctattaagaaatgtttgctcagaagctgctcagaaacgttctcttgatcggtgaaaccataaggagcccagtgttcctgttcatgaaatctcccttttactggaaaacaggaatattgactaccaaatcacaatgcaattgaagccgtactgcttttttgagcagttattcattccagtgattaaaactgattgtgcagaatattctaagaggtcagaaatggtgtgtataactacattttt

SEQ ID NO: 227274 - DNA, 760 bp, Homo Sapiens
tttgtacaaaaaagttgggttggaaacatgcggctgtcggtcgctgcagcgatctcccatggccgcgtatttcgccgtatgggcctcggtcccgagtcccgcatccatctgttgcggaacttgctcacagggctggtgcggcacgaacgcatcgaggcaccatgggcgcgtgtggacgaaatgaggggctacgcggagaagctcatcgactatgggaagctgggagacactaacgaacgagccatgcgcatggctgacttctggctcacagagaaggatttgatcccaaagctgtttcaagtactggcccctcggtacaaagatcaaactgggggctacacaagaatgctgcagatcccaaatcggagtttggatcgggccaagatggcagtgatcgagtataaagggaattgcctcccacccctgcctctgcctcgcagagacagccaccttacactcctaaaccagctgctgcagggtttgcggcaggacctcaggcaaagccaggaagcaagcaaccacagctcccacacagctcaaacaccagggatttaactggatctgaagagtctgcagcccttaatcagtacccatgatcacaggcctttggagcacttttactctctgagaagaactggagctagagatgtaaaatggacagtcttgatggggttgagaaccttctggggagccagatgaccctctctttgcacaatagataaaagtctttatatgaatatatataaatttatttattttt

SEQ ID NO: 227275 - DNA, 1042 bp, Homo Sapiens
ttggctctttcctgtcccggcctgcgtggtgtgggcttgtgggtctttgagacccgaaaattgagagcgttttcgcactccagcggctgctcctggcggctctgcggccgtcaccatgccacagaatgaatatattgaattacaccgtaaacgctatggataccgtttggattaccatgagaaaaagagaaagaaggaaagtcgagaggctcatgaacgttcaaagaaggcaaagaaaatgattggtctgaaggctaagctttaccataaacagcgtcatgctgagaaaatacaaatgaaaaagactatcaagatgcatgaaaagagaaacaccaaacaaaagaatgatgaaaagacaccacagggagcagtacctgcctatctgctggacagagagggacaatctcgagctaaagtactttccaatatgattaaacagaaaagaaaagagaaggcgggaaaatgggaagtccctctgcctaaagtacgtgcccagggagaaacagaagtattaaaagttattcgaacaggaaagagaaagaagaaggcatggaagagaatggttactaaagtgtgctttgttggagatggctttacaagaaaaccacctaaatatgaaagattcatcaggccaatgggcttgcgtttcaagaaagcccatgtaacacatcctgaactgaaagccaccttttgcctaccaatacttggtgtaaagaagaatccctcatccccactgtatacaactttgggtgttattaccaaaggtactgtcattgaagtaaatgtgagcgaattgggccttgtgacacaaggaggcaaagttatttggggaaaatatgcccaggttaccaacaatcctgaaaatgatggatgtataaatgcagtcttactggtttgacagcaatttcatatataattattgaaggactacacaccaattgaaagaaactgcccattactgtgatgtttctgaatactaccaaaacaggccatacatgtctgcaatgaagagatttattaaaattgtaaacattaaaagtgg

SEQ ID NO: 227276 - DNA, 813 bp, Homo Sapiens; identical to SEQ ID NO: 193768

SEQ ID NO: 227277 - DNA, 1295 bp, Homo Sapiens
  misc_feature (630)..(646): n is a, c, g, or t
ttgggtcaaagtcagccccatcttggctgatcagggtgttcagccttaaccccacctgtgttctgaagtctcttaccctacctgctcaggactgagacagttattcactgaacatatttattaagcacttgctgtaggccaacagttaagaatccaataatgaaatggacagattcatggaacttagagtccaataggaaagtgagacccagacaatgacaatgagataaatgttaggaagggggaggtatggggtgacttccctgcagtcctgggggcctagatgggcccaagactgggtgagagtcttggcagagcctttgcaacaccttaagtggacaggactgggaggtcttggtggttggagccaacgtgggttccctgcggctccttagtcacctctgatagcagattgagggaggaaaacaggtaaggcatgaggaaatggccaggttgggttaacccactggtttcaaccagttcaggaatgaggttatttggccatgactggctgatcttgagctcaaggatctgcttcaaatgcacacaggcctagttgaagtttaaaccccagcaaaacattcctccctgtaaatggaaaatcctacttctacccccaccctgccctgnnnnnnnnnnnnnnnnnccccaagatcattagatgtcctcacccctcctcactgcctctcctctctgggacaggctgggacctttgaggaagataaagccttccttgactacccatcatattcagtgtccctgttcctcactcagagaggaaggcagaaccagtcaggcttatttcagtaagttccacagttctacaagactgcaggaattctccttaagggaggagagcaagcaggtgtggccccagcttctggaaatggcagaagagagggttttctcattgaatgggggtgggggctcgtgtgtcctgggaaaccccatcagtcccttcatttcttgagactcaactcctgggaggagagggtctcaagagttgtccctggaaggagggcgggggcagtctgcatctatttcatgttgtggctcttggttctaggactcttacttctctggctaagggctcagcttcttgggacttcaaccatcttctttctgaaagaccaaatctaatgtaaccagtaacgtgaggactgccaagtatggctttgtccctatgactcagaggagggtttgtcgggcaaattcaggtggatgaagtatgtgtgtgcgtgtgcatgggagtgtgcgtggactgggatatcatctctacagcctgcaaataaacc

SEQ ID NO: 227278 - DNA, 909 bp, Homo Sapiens
ttggccgctttctttctgcagcaggaaccgcggctgctggacaagaggggtgcggtggatactgacctttgctccggcctcgtgtagcgtgaagacacagcgcatctccccgctgtaggcttcctcccacagaacccgtttcgggcctcagagcgtctggtgagatgctgttgccgctgctgctgctgctacccatgtgctgggccgtggaggtcaagaggccccggggcgtctccctcaccaatcatcacttctacgatgagtccaagcctttcacctgcctggacggttcggccaccatcccatttgatcaggtcaacgatgactattgcgactgcaaagatggctctgacgagccaggcacggctgcctgtcctaatggcagcttccactgcaccaacactggctataagcccctgtatatcccctccaaccgggtcaacgatggtgtttgtgactgctgcgatggaacagacgagtacaacagcggcgtcatctgtgagaacacctgcaaagagaagggccgtaaggagagagagtccctgcagcagatggccgaggtcacccgcgaagggttccgtctgaagaagatccttattgaggactggaagaaggcacgggaggagaagcagaaaaagctcattgagctacaggctgggaagaagtctctggaagaccaggtggagatgctgcggacagtgaaggaggaagctgagaagccagagagagaggccaaagagcagcaccagaagctgtgggaagagcagctggctgctgccaaggcccaacaggagcaggagctggcggctgatgccttcaaggagctggatgatgacatggacgggacggtctcggtgactgagctgcagactcacccggagctggacacagatggggatggggcgttgt

SEQ ID NO: 227279 - DNA, 1068 bp, Homo Sapiens; identical to SEQ ID NO: 193769

SEQ ID NO: 227280 - DNA, 1136 bp, Homo Sapiens
  misc_feature (1055)..(1063): n is a, c, g, or t
tttcaggggtgcaaacagcaaatacaaaggcatcatggtttttcttttaaaaacaacataaaggcaatagatgaatggacccccgattgccataattttttgttgattaaactagtgcttcaacaagcagggctctgtagattggtatctttctcctttttttcataaagtgagatgctaagacataatgtgacaatgaaaataagaagagaaacacctatcacattgcatttctattgcaagcaagaaaagaaaactaatttctacatagaaaaaaaactttgtattactactgaatgttactcttaaaccaacaaaacaactctatactattttacatgaaaacaataagagaaatatctacatcttagtgaaaattataaccttaaatggataatacctttttggggctgatttttgagatctcattagtctcaaattttaaataaaaagtgcctccttttggcaaatacttggcaatgcctttggttcctttaaagcaagtttgcattactattggttacttgaggtcaagtacttttggtagatactaaaccctttcctaaatgcttcctcttcctaccaaattagcaagattccttacagcatcacgtagagaggtaattgttacgagtttcagtattctataaactttgttaaagctttgtcttagtagttggcataaagctctgttaaacactatagatgtgatgatatctctgataacatattttatttgattcccgacagcaccttgtagatccgagattgccatcttattgtcacaaagctgtgacaccacagagcaaagtgtttgcatggagggtaagagctcttctgtaaacatgtgcagcttttcgaattgtaggccttccatgaaagatttcaggtagaaaccctttgtaatgatgtgtttccctggatactgcaagaaagggcgaatgtggaaaaaacacgcacctgctcattgccatgcagacagagtcactttacaaataaaaatgtagctcagagagactgctgaatgagcaagttattgaaggtttgaaccaggnnnnnnnnnttactacatcttagttgttttccagttttgactgaaatcacttaaaagatgagttgaaatgcagttaggccaa

SEQ ID NO: 227281 - DNA, 1129 bp, Homo Sapiens
ggactgctgtgtaggccagaatataaatctccttaggaagaagtttggttaggcaaaaccactgagaaatgacagtggctgctacattgttcgacgtatatcagagcagacatgcacaagaagcagcattatggttcatgtgtagtaagtagtcacctattgataaacaggggcatttgtgcaaatgctctggcaacctaggcactgggggaagagaaaagaagcatcctattaaaatgtacttccatctctaactcacccaagatgccaggcctcctaagcttcatgacttgcaaagccaaaatgaatttagcattacatgtcattctatgtcatctagaagctggttcactggggccatctcagaagagctgctcaagagggtagcaagtctacccagaagggtatgccttaatgatcttcacgtcgtccacagggcggtcctgggagtttgtttctaccattcccacgcgattcaccattcctatgccctgacacactcggccaaaaatggtgtgtttgccgtcaagccactgggtgggggcgagggtcacaaagaactggctgccattggtatctggccccgcattggccattgcgagaattccagcccccgtgaatttcaagtctggatgaagttcatcttcaaactgtttgccatagatagatgcaccacctcgacctgtccctgttgggtcacctccttggatcatgaagtctttgataattctgtggaattttgtgccattgtagtaacctcgacgagccaactcagcaaagttcttacaggtctttggagcatgcttccagtacagctccagcacaatgattcccatgctggtctccaagtaaacgttgggtggctgccaggaatctgggggaattgccgccatagcgaagccggcggcggaatgcttgtctagtaattgctacttccggcgtcgattagctggggacccgtcgctgctgcacacttccggtccgttcaaccctttcgataccaggatttgggtggccaagacaaggaagaggacggtcccttcttccaatgccgggaagctggggtgggagacgagaagaagctgggctcaagaacagaggaaaatgcaaacttcattcgcggtgccaa

SEQ ID NO: 227282 - DNA, 881 bp, Homo Sapiens
agcacgcgaagcactgtgggtggggcaggcaccagctggcacagggagatgctgccgtcgagtgagcagcaggccaggcggtgtcggtcatcattggcgaagcgcacccttgggactgcctcatccacgtgctggtcaaaaacatgatacatgcccgcaaaggcatagttctcgctcagtgacgtgtccccggccatggcccgacttgcctctgctgctgacgtgggcaccacgctgccagggggcctgtcctcatagacggcacggttcatctgcgcctgcagctggtaggagcctctgctgacagaacgacggtgcccacgggcccccagggcccgaggatcatcctcaaagtcctccatgcggtcaagagtagtgcggctactgcggacgatgctgttgctataggcacgagcactgcctggctcggagaggggcccgtagcgctggcccagcagctgcccccgaagcctcaggtactgccgacgcagcgctggggggtgcccagccttggcattctcccgcagcagctggctgcgccggcggatatactgcgtccgaaactgtggaaacgttggtgtgcggtacgcgttgtacctcgcgtccactgctaagacttgctgccacaccgcggccattccccggcctcctcctctggcgtgtccgcccgcggcagcctgcaggacaagggcctggaatgtgagcgtcccgagcgaagggatctagttccgtcccttccaccaggcgaccattgccatagacatcgagtccctccgcgccggagatgtcacgaactcccacccgggtgttaccatggtcatcaccccagccctgcccttcctgggcagcgcccgggtgacacacagcgattcagaacccaa

SEQ ID NO: 227283 - DNA, 1525 bp, Homo Sapiens; identical to SEQ ID NO: 193771
  misc_feature (1371)..(1396): n is a, c, g, or t

SEQ ID NO: 227284 - DNA, 795 bp, Homo Sapiens; identical to SEQ ID NO: 193774

SEQ ID NO: 227285 - DNA, 988 bp, Homo Sapiens
ttggggcggctgcggctgctacggcggcgcatgctaggggattctgccgggtagaagagctgggcctggaacccagccctgaggacatcctgcggcccaggggcaagtgacacctgctgagagaggcccaggatggtggaggctgaggaactggcacagctgcggctgctcaatctggagctcctgaggcagctgtgggtggggcaggatgctgtgcggcggtcagtggccagggcagcctcggagtcaagcctggaatccagcagcagctacaactcagagactccatcgaccccagagacgtcctcaacttccttgagcacctcctgcccacggggccggtcctccgtgtggggcccaccagatgcctgtcgaggggacctccgtgatgtggccagatcgggggtggcctctctcccacctgccaattgccagcaccaggagtccctgggccgaccgagaccccactcagcaccctcgctgggcacctcaagcctgagggacccagagccctcagggaggctgggtgatccaggaccccaggaggcacagacctcgaggtccatcctggctcaacagagcaagctgtccaagcccagggtgaccttctctgaggagtctgcagttcctgagaggagctggcgcctcaggccatacctgggctatgactggattgcagggtctctggacaccagctcttccatcaccagccagcctgaggccttcttctccaagctgcaggagtttcgggaaaccaacaaggaggagtgtatctgcagccatcctgaaccccagttgccaggcctgcgtgagagcagtggcagcggcgtggaggaagaccatgaatgcgtgtactgttaccgtgtcaaccggcgcctgttcccggtgcctgtggatcccggtaccccctgccgcctgtgcaggacaccgcgagactatcagggccctgggaccctggcgcagcccagcgcacgtcagggtgagcatc

SEQ ID NO: 227286 - DNA, 1063 bp, Homo Sapiens; identical to SEQ ID NO: 193775

SEQ ID NO: 227287 - DNA, 982 bp, Homo Sapiens; identical to SEQ ID NO: 193776

SEQ ID NO: 227288 - DNA, 1106 bp, Homo Sapiens; identical to SEQ ID NO: 193777

SEQ ID NO: 227289 - DNA, 788 bp, Homo Sapiens
tagagactgcagagggaccaggggctttagctgttggcagctatggtgtcgataatccagtccacatagttgtagacattggtgtagactccaggcctgttcttctgggcacagccatagccccaggagacaattccttggagctctccattggagaccacacggccaccagaatcaccctggcaggaatccttgcctccctcgaggaagcccacacagaacatgttgttggtaatctttccagggtaggaggcttcacactcagcctggctcagcacaggagcatccaggcactgcagctcgtctgggtagtcggcaccagaactcagagtgttgccccagccggagatgagggactcggtgccagcagctggaggggcagtgggcagagagatggcggacacgcgggaattgatgacggcaggtgaggagagcttgatcagcaggatgtcattgtccagagtccggctgttgtatttggggtggcggatgatcttggctgcattgatgaactgttcattcccctccaggacttcgatgttgtgctctcccagtctcacctggatgcgggacttgtagcagtgacctgctgacaccacccactgttcgctgatgagggagccaccgcagaagtggtagccagaattcaaggacacctggtaggggacagaattctcctcacagatgtagcccccaacgatcttgtcatcatcatcaaagggggcagcaacagcagctgcaacaaaggtaaggatcagaagtagattcccaacttttttgtacaaagt

SEQ ID NO: 227290 - DNA, 1182 bp, Homo Sapiens
  misc_feature (992)..(1004): n is a, c, g, or t
tccctgaagtaaatctgggtttcaagttgggaagccatgggtgagggagttccccagtgcaatggccgatgacgagtatcttgccactgccagttaacagggctgggatgagctcctgtagacagcagcctcacatccatcagctagggtagccctaggttctcactctgttggctacgctgtgaaaatgatggggctctgcagtggagcaaatccccatgacagagaaaatcacacctggaatatcaaagtgctttggtccaggttcagtgaccagagaagaggaagaggggcatctagctcatttaaaaacctggaggtttgccctgcttcccagacagggcagtaagaaacaactataacgtttttcccattagggaaaaacatcacaaaaccaaacccatagaagggcttttaacacagcttcctgatgcttagctgggcaatgtctcttccttctgtggggggacaagggagttaatgggactgggcaacagcctcaacatgagaccacccaatcttccacgaaagagacgacattcccacaagcagataaaaagagcagtttaaaaggtgaggagttttagtgctcttgtagccagcccaccttaaacctaaattagaagctttttacaacatacaaaatagactgataactatgcagatcacattcccatcttcaatagtaaatatacatagtaataaatctattattaacagtgggaccaaataacatataaggcagacatttaaacaggtgttgtatcatcaacatgctctaaaaaaaactcatctgactagatctagacccaggcctttttgcatgaggccaagacaacaagtatacaatcaatacccatgtgacacagtccaagtgctggggaatatgagggggcagtgggccatggggaggaagatatcagccccagtgaaaagctggggtttggctttactcgtgatattttgatgctctatgtctgagtaaaggaggnnnnnnnnnnnnncactttgataacgtacaaaaggcatcgactcccatttcaaaaataaatgggaagacttcacagtcaaagttcagtcacttgtcagtatctgccctggaactctgatgcagtatcaactcttgtactctctccttttccctccactagcatgccctctctcagttgtttggtttgtttg

SEQ ID NO: 227291 - DNA, 1138 bp, Homo Sapiens
ttggcactgctacttttcccattttgcagggacatttttctgctgttcttcaaaaagaggaaaaaatctcaccaatttatggtaaagaggaggcaagagaagtacctgttattagtgcatcaactcaaataatgcttaaaggactttttatggtacttgactatctttttaggcaaaatagcagatttgcagatgattataaaattgcgattcaacagacttactcctggacaaatcagattgatatttcagacaaaaatgggttgttggttctaccaaaaaataagaaacgttcacgacagaaaactgcagttcatgtgctaaacttttggtgcttaaatccagctgtggccttttcagatattaatggcaaagttcagaccattgttttgacatctggtacattatcaccaatgaaatccttttcgtcagaacttggtgttacatttactatccagctggaggctaatcatatcattaaaaattcacaggtttgggttggtaccattgggtcaggccccaagggtcggaatctctgtgctaccttccagaatactgaaacatttgagttccaagatgaagtgggagcacttttgttatctgtgtgccagactgtgagccaaggaattttgtgtttcttgccatcttacaagttattagaaaaattaaaagaacgttggctctctactggtttatggcataatctggagttggtgaagacagtcattgtagaaccacagggaggagaaaaaacaaattttgatgaattactgcaggtgtactatgacgcaatcaaatacaaaggagagaaagatggagctctcctggtagcagtttgtcgtggtaaagtgagtgagggtctggatttctcagatgacaatgcccgtgctgtcataacaataggaattccttttccaaatgtgaaagatctacaggttgaactaaaacgacaatacaatgaccaccattcaaaattgagaggtcttctacctggccgtcagtggtatgaaattcaagcatacagggccttaaaccaggcccttggtagatgtattagacacagaaatgattggggagctcttattctagtggatgatcgctttacgaataacccaagtcgctatatatctggactttc

SEQ ID NO: 227292 - DNA, 1213 bp, Homo Sapiens
ttggcccgcttcttcgcagtcttcggccctctcctgtcgccgccatgagcactggcaccttcgtcgtgtcgcagccgctcaattaccgcggcggggcccgcgtggagccggcggacgcctccggccgagtgatagctactttcacatgttcaggagaaaaggaagtaaatttggctgttcaaaatgcaaaggctgcttttaaaatatggagtcaaaaatctggcatggagcgttgccgaatccttttggaggctgccaggataataagggaacgggaggatgaaattgctactatggagtgcatcaacaatggcaagtccatctttgaggcccgcttggacatcgacatttcctggcagtgcctggagtattatgcgggcttggctgcatccatggctggtgaacacatccagctcccaggtggatcgtttggttataccagaagagaaccacttggggtatgtgtgggaataggagcatggaactacccctttcagattgcctcttggaagtcggctccagcattagcctgtggtaatgccatggtctttaaaccttctccctttacacctgtttctgcattgctactggctgaaatctacagtgaggctggtgtacctcctgggctcttcaatgtggtgcagggaggggctgccacaggccagtttctgtgtcagcatcccgatgtggccaaagtctccttcactggaagtgtgcccactggcatgaagatcatggagatgtcagctaaaggaatcaaacctgttaccttggaacttggaggcaaatctccactcatcatcttctcagactgtgatatgaacaatgctgtaaagggggcgctgatggccaacttcctcacacaaggccaggtttgctgtaatggcacaagagtatttgtgcagaaagaaattcttgataaatttacagaggaagtggtgaaacagacccaaaggattaaaattggagatccccttctggaagatacaaggatgggtccactcatcaaccgaccacacctggagcgagtccttgggtttgtcaaagtggcaaaggagcagggtgctaaagtgttatgtggtggagatatatatgtacctgaagatcccaaattaaaggatggatattacatgagaccttgtgtattaactaattgcagagacgacatgacctgtgtgaaggaagagatctttgggcctgttatgtccatttt

SEQ ID NO: 227293 - DNA, 941 bp, Homo Sapiens; identical to SEQ ID NO: 193778

SEQ ID NO: 227294 - DNA, 396 bp, Homo Sapiens
ctttgtacaaaaaagttggaggggagacctcaaggcgcagggaaggacggccagggtgacacggaagcatgcgacggctgctgatccctctggccctgtggctgggtgcggtgggcgtgggcgtcgccgagctcacggaagcccagcgccggggcctgcaggtggccctggaggaatttcacaagcacccgcccgtgcagtgggccttccaggagaccagtgtggagagcgccgtggacacgcccttcccagctggaatatttgtgaggctggaatttaagctgcagcaaacaagctgccggaagaaggactggaagaaatcttttttgcaaagtcaggcccaatgggaggaaaatgaaatgcctggcctgcctctaactgggctctgatgacaaa

SEQ ID NO: 227295 - DNA, 792 bp, Homo Sapiens
caagctcttttttccaagagggtattagaaagaggttgattccagaggatgagtggtctctgaggctatagcccccccactgggtgggcagccagctctgtgagaatgccagggtgcagctgacagcgctggaggcctggggactggactgtgagaggagcttgggcagacacagcagcctccggccccaacactgccctgggttggcaggcccagccctggtcctgacaggcaggtccttgagctcctcgggagggcgtgacgacccttagtgtttcatgggaccactcggtgggccctcctccgtgccaggcctgtcagaggacaaccctccggtccaggtggtccccacgcccgctccgctggtgccgcacttccaggtgcttgttctggaccttctcaaagtgctgcagcagctctgcgtagtcgatgctaggggagtcagctttctgggacttgggggctgcctttagactgtcttcggtctgcagcagctcagggttgggcacgcactggagccggtgcgagagcagctggaaggcgctgctctgcggcaggagcatgagcaggccgtagagggccttgatcaggtaggggttgttcttcacgtccagcagctgcaggcgcagatatgtgaagatggggcactcaatcagctgcaccagcttgtccacctctgcgaggaagtccacggtgacctccaggtccccaaacttctggatgaggtcataggcgtgccggtagttcagggtcttcaggtccttcagctggttcattagctggaagagccaa

SEQ ID NO: 227296 - DNA, 1430 bp, Homo Sapiens
tacaaaaaagttggcgcaaccttgacctggcatccgtggagtgcgcctgcgcagctacgaccgcagcaggaaagcgccgccggccaggcccagctgtggccggacagggactggaagagaggacgcggtcgagtaggttttaaaacatgaatcctacactcatccttgctgccttttgcctgggaattgcctcagctactctaacatttgatcacagtttagaggcacagtggaccaagtggaaggcgatgcacaacagattatacggcatgaatgaagaaggatggaggagagcagtgtgggagaagaacatgaagatgattgaactgcacaatcaggaatacagggaagggaaacacagcttcacaatggccatgaacgcctttggagacatgaccagtgaagaattcaggcaggtgatgaatggctttcaaaaccgtaagcccaggaaggggaaagtgttccaggaacctctgttttatgaggcccccaaatctgtggattggagagagaaaggctacgtgactcctgtgaagaatcagggtcagtgtggttcttgttgggcttttagtgctactggtgctcttgaaggacagatgttccggaaaactgggaggcttatctcactgagtgagcagaatctggtagactgctctgggcctcaaggcaatgaaggctgcaatggtggcctaatggattatgctttccagtatgttcaggataatggaggcctggactctgaggaatcctatccatatgaggcaacagaagaatcctgtaagtacaatcccaagtattctgttgctaatgacaccggctttgtggacatccctaagcaggagaaggccctgatgaaggcagttgcaactgtggggcccatttctgttgctattgatgcaggtcatgagtccttcctgttctataaagaaggcatttattttgagccagactgtagcagtgaagacatggatcatggtgtgctggtggttggctacggatttgaaagcacagaatcagataacaataaatattggctggtgaagaacagctggggtgaagaatggggcatgggtggctacgtaaagatggccaaagaccggagaaaccattgtggaattgcctcagcagccagctaccccactgtgtgagctggtggacggtgatgaggaaggacttgactggggatggcgcatgcatgggaggaattcatcttcagtctaccagcccccgctgtgtcggatacacactcgaatcattgaagatccgagtgtgatttgaattctgtgatattttcacactggtaaatgttacctctattttaattactgctataaataggtttatattattgattcacttactgactttgcattttcgtttttaaaggatgtataaatttttacctgtttaaataaatttaatttcaaatg

SEQ ID NO: 227297 - DNA, 913 bp, Homo Sapiens
ttggagaggtagcaacagcgagcgtgccggtcgctagtcgcgggtccccgagtgagcacgccagggagcaggagaccaaacgacgggggtcggagtcagagtcgcagtgggagtccccggaccggagcacgagcctgagcgggagagcgccgctcgcacgcccgtcgccacccgcgtacccggcgcagccagagccaccagcgcagcgctgccatggagcccagcagcaagaagctgacgggtcgcctcatgctggccgtgggaggagcagtgcttggctccctgcagtttggctacaacactggagtcatcaatgccccccagaaggtgatcgaggagttctacaaccagacatgggtccaccgctatggggagagcatcctgcccaccacgctcaccacgctctggtccctctcagtggccatcttttctgttgggggcatgattggctccttctctgtgggccttttcgttaaccgctttggccggcggaattcaatgctgatgatgaacctgctggccttcgtgtccgccgtgctcatgggcttctcgaaactgggcaagtcctttgagatgctgatcctgggccgcttcatcatcggtgtgtactgcggcctgaccacaggcttcgtgcccatgtatgtgggtgaagtgtcacccacagcccttcgtggggccctgggcaccctgcaccagctgggcatcgtcgtcggcatcctcatcgcccaggtgttcggcctggactccatcatgggcaacaaggacctgtggcccctgctgctgagcatcatcttcatcccggccctgctgcagtgcatcgtgctgcccttctgccccgagagtccccgcttcctgctcatcaaccgcaacgaggagaaccgggccaagagtgtgctaaagaagctgcgcggga

SEQ ID NO: 227298 - DNA, 824 bp, Homo Sapiens; identical to SEQ ID NO: 193782
  misc_feature (50)..(61): n is a, c, g, or t
  misc_feature (137)..(190): n is a, c, g, or t
  misc_feature (719)..(731): n is a, c, g, or t

SEQ ID NO: 227299 - DNA, 1252 bp, Homo Sapiens
ttggttaggttggtctcagccttgtgatgtttggagcataggttgcattcttattgaatattaccttggtttcacagtctttcagactcatgatagtaaagagcacctggcaatgatggaacgaatattaggacccataccacaacacatgattcagaaaacaagaaaacgcaagtattttcaccataaccagctagattgggatgaacacagttctgctggtagatatgttaggagacgctgcaaaccgttgaaggaatttatgctttgtcatgatgaagaacatgagaaactgtttgacctggttcgaagaatgttagaatatgatccaactcaaagaattaccttggatgaagcattgcagcatcctttctttgacttattaaaaaagaaatgaaatgggaatcagtggtcttactatatacttctctagaagagattacttaagactgtgtcagtcaactaaacattctaatatttttgtaaacattaaattattttgtacagttaagtgtaaatattgtatgttttgtatcaatagcataattaacttgttaagcaagtatggtcttgataatgcattagaaaaattaaaattaatttttctttttgaaattaccatttttaaatacctttgaaatatcctttgtgtccagtgataaatgtgattgatcttgccttttgtacatggaggtcacctctgaagtgattttttttgagtaaaaggaaatcttgactactttatattcttaaaggaatattctttatatacttcaaatttagaacttaactttaaaagtttttcttctgtaattgttgaacgggtgattattattaactctagataagcaggtactagaaaccaaaactcagaaaatgtttactgttagaattctattaaattttaagtgttgtattctttttcattgggtgatgtcagggtgataaccagacattcatggaaaggcatgcagtttgtccattgtgacagtttgtttaataaaaccacatacacactttatttaagattaaaatctaactggaaagtcagcttggaaaatggacatttccaagtatgtttggtgagtcacagatataaaaatagaaattctgatgagaggtttcagtttttaataccaagtccttaggagtcttaacattggtgagcatctgtttatcaaatgacataaatacgtaaacctataataattaagtttattaattaggcaatttatgtctgtgatgattctta

SEQ ID NO: 227300 - DNA, 1096 bp, Homo Sapiens
ttggagaatcaaggcccgcagatgctaagagagcctattgtcaggggaaggtccccgctcctgcacactctctgtggatacttgggttgtgggggctctcttggagagtaagtttgtggtttgtttctggtttacagtggtggctgacaccccttgtaagaaagcattcctgggaagtcttctgtgggtccaaacatgttgctccgatcatcacaggagagcaaaaggccctagataccccctttggaatgtgagagtcttgttgtctgatatttgccactgagctggtgaagcccctctaaagagatctcgaccctggggagcagaattcttgtcatctatgaggggtcctgagaaagacttgtcattttttttcctggagttcttcccattgaggtcctaggatttgcacaccactgtcccacaagagctttcctgcctaatgaaaggaggtcttgtggtgtgtgtctcctctcttctctatagttcccgagttggcccccattgcagcccccaccctgtgggtagtcttccagaagtgatgcagtggtgtgagatgccctacaccttgttatttgggagactttgagagtcattcacttccatggtgactagtgtttgttttgcctgattttatattctgtgttgcatttctccccactccctgccctgctttaataaacagcaaaccaatatctaggaagaatgactgagggatagtattgggtattggccccatggcaggaacagccacttgcatctggtcccggtgccacactgcggtgcttggtgtggttgtggagcctgtccctgcgcgccttgctcccgttgagccacgctgtctggtgggtgattctctgccctgagccaccaccctggactggcccagtctccagagctggcacaccctgcctgttttctctttttagacacaacagccgcagtttggccagccactaagtcccaccagctgagggtccgaggaaagcggggtgactcatttcccttgtccagggcccgaggagagtgaggtgtccagcctgcaaagctattccagctcctttggtgttggtttgcaataaattgggtatttaaa

SEQ ID NO: 227301 - DNA, 1313 bp, Homo Sapiens; identical to SEQ ID NO: 193785
  misc_feature (1070)..(1124): n is a, c, g, or t

SEQ ID NO: 227302 - DNA, 751 bp, Homo Sapiens
ttggagcagctgctggaggtggaactctacgcagactatagagagaactcgtacgtgccgaccactggagcgatcattgagatccacagcaagcgcatccagctgtatggagcctacctccgcatccacgcgcacttcactgggctcagatacctgctatacaacttcccgatgacctgcgccttcataggtgttgccagcaacttcaccttcctcagcgtcatcgtgctcttcagctacatgcagtgggtgtgggggggcatctggccccgacaccgcttctctttgcaggttaacatccgaaaaagagacaattcccggaaggaagtccaacgaaggatctctgctcatcagccagggcctgaaggccaggaggagtcaactccgcaatcagatgttacagaggatggtgagagccctgaagatccctcagggacagagggtcagctgtccgaggaggagaaaccagatcagcagcccctgagcggagaagaggagctagagcctgaggccagtgatggttcaggctcctgggaagatgcagctttgctgacggaggccaacctggctgctcctgctcctgcttctgcttctgcccctgtcctagagactctgggcagctctgaacctgctgggggtgctctccgacagcgccccacctgctctagttcctgaagaaaaggggcagactcctcacattccagcactttcccacctgactcgctctcccctcgtttttccttcaataaac

SEQ ID NO: 227303 - DNA, 1423 bp, Homo Sapiens; identical to SEQ ID NO: 193787

SEQ ID NO: 227304 - DNA, 883 bp, Homo Sapiens; identical to SEQ ID NO: 193788

SEQ ID NO: 227305 - DNA, 1412 bp, Homo Sapiens; identical to SEQ ID NO: 193789

SEQ ID NO: 227306 - DNA, 1343 bp, Homo Sapiens
gtcagggggcagaaccaatgtgatatccggcgttgtcagggcaacagcggtgcggacagagggtgcggggcagaggcacggctggtccaggagggagctcggtgcagatgcagctgcttacacactggacccccaggcagcagaggtggaggcctcccctctggggagtggctgctggggctcatcggcacagcggtcacatcttgctgctggaggctcttccagtgcggggcctgggcagcacgggcactctggatggactctagggcactctgacatggcgccattggccctgacaggggtggggccgggtcacccagcagcgtctgtactgtcatgcacactgactccgccagtgactccaggtggtagccgccctccagcacggcacagacccggccgccggccagcacctgcagcagctgtgtgaggtgggcgaagcactctggcgtggcctgcatttgcccctcagggtccccgatggctgagtcaaatcctgccgagaccagcaccagctcagggtcaaactcaaaggccagtgggagcagcaggtgcaggaaggcagccacgtagtcagcgtttcccatcccaacctggttccagggcaggttgacagtgaagccgaggccctgtccccgccccactgcgtctgcatctgactctcgcaggaaaggccagaagcgcccatgctcatagcggtgccaggagaagtaaaggacgctggggtcatcctcaaagagatactggatcccctggccatggtgcacatcccagtccacgacgaggatcctgtgtagcccgtgtttctgcttggcatgtgcagctgctatggccacgttgttgaacacgcagaacccgttggcagccgccctctggccatggtgcccgggaggcctcaccagggcaagcccattttgcacagctccagtgagcacagcgtccaccagctgcagtccagcccctgcggccagccgcgcgcagtgaaaggtactcgggtggaagtagatggcgtcgaactgtccggacagcgcctgcagctcctccttgcctaggacctgggtctccctgaccagggatacatactctgggctgtgcaccaggcccagctcctcttccgaggcctcgcgggctgacaaccgcagacacctctgttccaggccgcgctgccgcaggcgatccagggctgcggtcaggcgctcaggacgctcgatctcgcactcggggctggggcgcaggcgggcggcgggcaccggcctgggcgggagcgcacagaacctaggcaggctccgggatcccaggcgcgcagaaggcacggagcgaggctgcagtggaagggggaccaa

SEQ ID NO: 227307 - DNA, 910 bp, Homo Sapiens
ttgggaaagactgaccgactgactctgacaggatccggggctgagggaaggaggcggcggccatggagttgggcgagctgctctacaacaagtctgagtacatcgagacggcatctgggaacaaagtcagtcgccagtcagtgttgtgtggaagccagaacatcgttctcaatggcaagaccattgtgatgaatgactgtattatccgaggggatctggcaaatgtaagagttggacgtcattgtgttgtgaaaagtcgtagtgtcataaggccaccattcaagaagttcagcaaaggtgttgcattctttcctttacatattggagaccatgtctttattgaggaagattgtgtggtcaacgcagcacagattggttcctatgttcatgttgggaagaactgtgtgattgggcgccgatgtgtgttgaaagactgctgcaaaattcttgacaacacagtattacctccagaaactgtggttccaccattcactgtcttctcaggctgcccaggactcttctcaggggagctcccggagtgcactcaggagctgatgattgacgtcaccaagagctactaccagaagtttttgcccctgacgcaagtctagcatctctgcctcatgtcttgaatctgcttgagctctaagatgaacctggggacaaagtgagccagtcagcacctacaaagagcttttgtgtctttgacatctaccaccctcctccttttaaaaaatttctttagaatttctcaatcttcaaggctctaagtgcttaagaattcactaacagacagaccatctggaggagctgtcttcaaatgctgtgcttacaccttatctatgaacagtcactttgtaccattatctgtggaacacagaatcatctgttcccaacactccagcccctt

SEQ ID NO: 227308 - DNA, 1172 bp, Homo Sapiens
  misc_feature (108)..(161): n is a, c, g, or t
  misc_feature (195)..(203): n is a, c, g, or t
actttgtacaaaaaagttggcaattcacaaaatatagggaaatttttattgaagtaaatttgaaatgatggagaaatttcagaagcataataaagttcacaataaggnnnnnnnnnnnnnnnnnnnnnnnnnnnnnnnnnnnnnnnnnnnnnnnnnnnnnnaactgcacattatattcaaacttaaaattgagcnnnnnnnnnaaaggcccaaaattgtacagtgatacaaggagctatttctaaaatttggcttatgtataatatatttaaatggggaatttcatctaaaacaatgatgtagtatttttaatattctgattggtaaaattaaagaggaaattaatccttatatattatttcttgcagaaacattcattattttattaatattgccctaagtacaactaggcaagtgattgccacctaaatcagaagacgttctaaagtcagtaagaaagtgtgaaatgctagtataaaggttattttttttctttcctaaataactaaagtgaggtgtagattgagccttgatattatttagttaatgttttttattaattaattttggctggactttatttagcttgattaggttattatctgtcaaaccttttaagttgacaacatgactcatatatatacatgtgtataagatgagcatgtgtcgaagacttattcgactcattaatgaggaaaccagcagatagtaaacctggttcaaagtacaattcaagaaactgagtatttatgggcattgaagaaaaaatgttgagataaaattgctgtgcagaaaaaagtgttaatgaagccgacctgactacttaaccttagagacctgctttacaaggttggcccttgattggcatctgggaacttggagttcagggggcttccaccattcccagaactgatcaaagtagcttactatatctaaactgtaaaacaatatagtttctcctgaacacctgctttccttctgggagtctggaattatggtatgtgccaggcacagactacctttgtgaccagctcccagtaaaaaccccaggcactcagtctctaacaagcttttcaggtagacagtgttacacaagtgctgttactactggttgctgagagaattaatctcatcctctgtgattctactggcggaggattcttggaagcttg

SEQ ID NO: 227309 - DNA, 1019 bp, Homo Sapiens; identical to SEQ ID NO: 193790

SEQ ID NO: 227310 - DNA, 786 bp, Homo Sapiens; identical to SEQ ID NO: 193791

SEQ ID NO: 227311 - DNA, 1195 bp, Homo Sapiens
ttgggtttgttgcagctacctgcacttctagattcatcttcttgtgagccctgggcttaggagtcaccatggcaactgaagagttcatcatccgcatccccccataccactatatccatgtgctggaccagaacagcaacgtgtcccgtgtggaggtcgggccaaagacctacatccggcaggacaatgagagggtactgtttgcccccatgcgcatggtgaccgtccccccacgtcactactgcacagtggccaaccctgtgtctcgggatgcccagggcttggtgctgtttgatgtcacagggcaagttcggcttcgccacgctgacctcgagatccggctggcccaggaccccttccccctgtacccaggggaggtgctggaaaaggacatcacacccctgcaggtggttctgcccaacactgccctccatctaaaggcgctgcttgattttgaggataaagatggagacaaggtggtggcaggagatgagtggcttttcgagggacctggcacgtacatcccccggaaggaagtggaggtcgtggagatcattcaggccaccatcatcaggcagaaccaggctctgcggctcagggcccgcaaggagtgctgggaccgggacggcaaggagagggtgacaggggaagaatggctggtcaccacagtaggggcgtacctcccagcggtgtttgaggaggttctggatttggtggacgccgtcatccttacggaaaagacagccctgcacctccgggctcggcggaacttccgggacttcaggggagtgtcccgccgcactggggaggagtggctggtaacagtgcaggacacagaggcccacgtgccagatgtccacgaggaggtgctgggggttgtgcccatcaccaccctgggcccccacaactactgcgtgattctcgaccctgtcggaccggatggcaagaatcagctggggcagaagcgcgtggtcaagggagagaagtcttttttcctccagccaggagagcagctggaacaaggcatccaggatgtgtatgtgctgtcggagcagcaggggctgctgctgagggccctgcagcccctggaggagggggaggatgaggagaaggtctcacaccaggctggggaccactggctcatccgcggactctggagtatgtgccatctgccaaagtggaggtggtggaagga

SEQ ID NO: 227312 - DNA, 1266 bp, Homo Sapiens; identical to SEQ ID NO: 193795
  misc_feature (122)..(184): n is a, c, g, or t
  misc_feature (836)..(853): n is a, c, g, or t

SEQ ID NO: 227313 - DNA, 940 bp, Homo Sapiens
ttggctttctttctccctgtctcccccactgtcagcacctcttctgtgtggtgagtggaccgcttaccccactaggtgaagatgtcagcccaggagagctgcctcagcctcatcaagtacttcctcttcgttttcaacctcttcttcttcgtcctcggcagcctgatcttctgcttcggcatctggatcctcatcgacaagaccagcttcgtgtcctttgtgggcttggccttcgtgcctctgcagatctggtccaaagtcctggccatctcaggaatcttcaccatgggcatcgccctcctgggttgtgtgggggccctcaaggagctccgctgcctcctgggcctgtattttgggatgctgctgctcctgtttgccacacagatcaccctgggaatcctcatctccactcagcgggcccagctggagcgaagcttgcgggacgtcgtagagaaaaccatccaaaagtacggcaccaaccccgaggagaccgcggccgaggagagctgggactatgtgcagttccagctgcgctgctgcggctggcactacccgcaggactggttccaagtcctcatcctgagaggtaacgggtcggaggcgcaccgcgtgccctgctcctgctacaacttgtcggcgaccaacgactccacaatcctagataaggtgatcttgccccagctcagcaggcttggacacctggcgcggtccagacacagtgcagacatctgcgctgtccctgcagagagccacatctaccgcgagggctgcgcgcagggcctccagaagtggctgcacaacaaccttatttccatagtgggcatttgcctgggcgtcggcctactcgagctcgggttcatgacgctctcgatattcctgtgcagaaacctggaccacgtctacaaccagctcgctcgataccgttaggcccgccctcccc

SEQ ID NO: 227314 - DNA, 865 bp, Homo Sapiens
ttggcgcacaccgcctccgcggcagcatggcggacgcagctcctcaactaggcaagaggaagcgcgaattggacgtggaggaggcccacgccgccagcacagaggaaaaggaggcaggagttggaaatggtacctgtgctcctgtccgcttaccgttctccggcttcagactgcagaaggtgctgagggagtctgcgcgggacaaaatcattttcctacacgggaaggtgaatgaggcctctggggatggggatggagaggatgccgttgtgatcctggagaagacgccatttcaggtggaacaggtggctcagctcctgacgggcagccctgagctccaattgcagttctccaatgatatctacagcacctatcacttgttccctccaagacaactgaatgatgtaaagacgaccgtggtttaccctgccacagagaaacacctgcagaagtacctgcgccaggacctccgcctgatccgagagacgggagatgactacaggaatattactttaccccacctggagtcccagagcctcagcatccagtgggtgtataacattctcgacaagaaggctgaagcggaccggattgttttcgagaacccagatccctctgatggttttgtcctcatccctgacctcaagtggaaccaacagcagctcgatgacttgtacttgatcgccatctgccatcgccggggcatcagatccctacgcgaccttactccggagcacttgccgctgctcagaacatcctccaccaggggcaggaggccatcctgcagcgctaccggatgaaggagaccatctgcgagtatacctgcactaccctgccctcctactaccacctgcatgtgcacttc

SEQ ID NO: 227315 - DNA, 1219 bp, Homo Sapiens
  misc_feature (1144)..(1166): n is a, c, g, or t
ggtttaggcttgtcataaaaaagtagtttgcacaatcaatcagtttgttcattttcccaattgttatacccacccaacagtgtaacaacaaaaagagaacatgatgggtctctgagtatctttcctatgagcagatgatgagcagatattttaggttcctgctgtcctattaccttgaagctcaaaagcagcattaaaaggaaatccttcattaaatcaacaatcaagatacatgattttaaaagaaagctcaagctactttttatttcaaaaaaagactgttaataggagtttcatatcaagtaaagtttgttctaatgaagtttttctatacatggaacactggggtacaactgaattagaaggtcctcagagatcaccaagcagtacaagctaagacaacctggtcaccctcctttcctgaggtgccggtaaaatgcacaggtaggtaggagtccagaaagatcccccaaatgttatatccacacaactgtgaaaaggtggctaattgagatttctcccataaacttgaatttttggaacaaaaactagtggagatcttctgaaaaggctgtatctatcttctgcataatatactgacatactcttcttccctctcttggatgtacaatgttattttagcaaattatcggggattggaaactgaacagagaagaactgtctctggtgtgagagggttctggaaagttcaaaatagtactcagccaagaacttcttcctttccccaaaacacatgagtctaaagagatggctaccacacaatgtggaatgtatgacatttgtcaccttgcagaatgtgattaaaatcatggctcccagagccagcaaaaagtctgccaatgtgttataaccatgaaaggagtaggtgaaaagtgttttttaaattatttggatagaaagtagctctcctgaagtttgctacttgctgcttctactatttgagtgtttttttctccttatgactaaagggtagtatgaaagagtcttaacacaactgcacttttaatttctatctgagattcactttataactgaggactaatgtgtatgtaacatgattacctcattattgaaaatgtgaaaggactagctgaaaatcacatcaccctcctttatgtctctnnnnnnnnnnnnnnnnnnnnnnnaaataattcctttggaagataattaggaaggatccaacttttttgtacaaagt

SEQ ID NO: 227316 - DNA, 1061 bp, Homo Sapiens
ccagcgtctggtgcttgagcatgctgtgcacatttaggccaacagcggagatcaagttgaaggtcttaagcatagaggtggcctccacgatgctctgtggcatctcctcgtgtgttaagtccacgaggagtacggagtccccccagcggcggtagtgcgccagctctgtcaggtactgtgggtctccggtgggcagctctagggagtccatgatgtgcaggtcgtcctgggccagcttgacggtcagtgccactttgagacccagcgcccgcaccttcatgggcagcatgtagtagtaacttgtggggccccgggggccatgggcaacacctcctcctcgccagagcggagagcggatgctgccatgccgggcccgcccagtgcctttctgcggccaaggcttccggccaccgccccgcacctcggctctcgtcttggtcttggcatagctaattctcttgaagttcttctgccacatagcaacctggtgcagtatgtccagcctgggcgcggtggcgaaaacatcggggtgcaggtcggccaggcccacgcgctcctgctcgaagccccgcaaggactcgacccaggcctgcactgggcgtcgatgagtgggtaccgggagctcgactttgcgcagcacgggctccgggagaccctcgctcgccacctgctccgggttctcggtcgcacgcgctgcctcttccgccagggaactcaggccctggctgccggtaggccgaagccaggcccgcgccccggcccggacgaactgcagcatcgccgcgcagcctcccacgccgcgggaggtcaaggccactggagcctcgcgaggcgccgctggatgacgtcacgcacgcgacgccgccctacccgccgcgactccgcgctggaaagcggggtgtgcaaaaccgaagatggagggggtccgacccggcgtgcccagacctccaccccaggactaacccccagacccaattttcactcctgcctcaaggaccctccgtaacactggggaacgcgacctcacagcaagaagacccagcttccgtaggcctagccaa

SEQ ID NO: 227317 - DNA, 1179 bp, Homo Sapiens
  misc_feature (842)..(853): n is a, c, g, or t
tttgtacaaaaaagttggctcttcaacactcccctgcgtaccccggttctagcaaacaccaattgattgactgagaatctgataaagcaacaaaagatttgtcccaagctgcatgattgctctttctccttcttccctgagtctctctccatgcccctcatctcttccttttgccctcgcctcttccatccacgtcttccaaggcctgatgcattcataagttgaagccctccccagatccccttggggagcctctgccctcctccagcccggatggctctccttcattttggtttgtttcctcttgtttgtcatcttattttgggtgctggggtggctgccagccctgtcccgggacctgctgggagggacaagaggccctcccccaggcagaagagcatgccctttgccgttgcatgcaaccagccctgtgattccacgtgcagatcccagcagcctgttggggcaggggtgccaagagaggcattccagaaggactgagggggcgttgaggaattgtggcgttgactggatgtggcccaggagggggtcgagggggccaactcacagaaggggactgacagtgggcaacactcacatcccactggctgctgttctgaaaccatctgattggctttctgaggtttggctgggtggggactgctcatttggccactctgcaaattggacttgcccgcgttcctgaagcgctctcgagctgttctgtaaatacctggtgctaacatcccatgccgctccctcctcacgatgcacccaccgccctgagggcccgtcctaggaatggatgtggggatggtcgctttgtaatgtgctggttctcnnnnnnnnnnnnctttcccctctatggcccttaagactttcattttgttcagaaccatgctgggctagctaaagggtggggagagggaagatgggccccaccacgctctcaagagaacgcacctgcaataaaacagtcttgtcggccagctgcccaggggacggcagctacagcagcctctgcgtcctggtccgccagcacctcccgcttctccgtggtgacttggcgccgcttcctcccatctgtgctccgtgccctcttccctgcctcttccctcgcccacctgcctgcccccatactccccaagcggagagcatgatccgtgcccttgcttctga

SEQ ID NO: 227318 - DNA, 886 bp, Homo Sapiens; identical to SEQ ID NO: 193797

SEQ ID NO: 227319 - DNA, 1520 bp, Homo Sapiens
tacaaaaaagttggcttggaacggggggcggagcagagtcgactgggagcgaccgagcgggccgccgccgccgccatgaaccccgaatatgactacctgtttaagctgcttttgattggcgactcaggcgtgggcaagtcatgcctgctcctgcggtttgctgatgacacgtacacagagagctacatcagcaccatcggggtggacttcaagatccgaaccatcgagctggatggcaaaactatcaaacttcagatctgggacacagcgggccaggaacggttccggaccatcacttccagctactaccggggggctcatggcatcatcgtggtgtatgacgtcactgaccaggaatcctacgccaacgtgaagcagtggctgcaggagattgaccgctatgccagcgagaacgtcaataagctcctggtgggcaacaagagcgacctcaccaccaagaaggtggtggacaacaccacagccaaggagtttgcagactctctgggcatccccttcttggagacgagcgccaagaatgccaccaatgtcgagcaggcgttcatgaccatggctgctgaaatcaaaaagcggatggggcctggagcagcctctgggggcgagcggcccaatctcaagatcgacagcacccctgtaaagccggctggcggtggctgttgctaggaggggcacatggagtgggacaggagggggcaccttctccagatgatgtccctggagggggcaggaggtacctccctctccctctcctggggcatttgagtctgtggctttggggtgtcctgggctccccatctccttctggcccatctgcctgctgccctgagccccggttctgtcagggtccctaaaggaggacactcagggcctgtggccaggcagggcggaggcctgctgtgctgttgcctctaggtgactttccaagatgcccccctacacacctttctttggaacgagggctcttctgtcggtgtccctcccacccccatgtatgctgcactgggttctctccttcttcttcctgctgtcctgcccaagaactgagggtctccccggcctctactgccctggctgcagtcagtgcccagggcgaggaatgtggccaggggatccaggacctgggatccagggccctgggctggacctcaggacaggcatggaggccacaggggcccagcagcccaccctttcctctccccactgcctcctctcccttcctacactcccagctcgagccgtccagctgcggtgggatctgagtatatctagggcgggtgggcgggtagcagtgctgggcctgtgtcttgagcctggagggagtctgctcctgccgccctctgccctgccagagacagacccatgcgctgcctgcccaccgtgccccctttgtccccatgtcaggcggaggcggaaggcccaccgtgccagaggctgggcaccagctcttaaccctcactctgctagcacctccctccctttccccaaggtagcacatctggctc

SEQ ID NO: 227320 - DNA, 695 bp, Homo Sapiens; identical to SEQ ID NO: 193798

SEQ ID NO: 227321 - DNA, 729 bp, Homo Sapiens; identical to SEQ ID NO: 193799

SEQ ID NO: 227322 - DNA, 833 bp, Homo Sapiens
ttggcgcaccgccatcctgtttctggcctggtgctgaccatcttcgctaacctcttccccgcggcctgcaccggcgcacacgaacgcaccttcctggccgtgaagccggacggcgtgcagcggcggctggtgggcgagattgtgcggcgcttcgagaggaagggcttcaagttggtggcgctgaagctggtgcaggcctccgaggagctgctgcgtgagcactacgccgagctgcgtgaacgcccgttctacggccgccttgtcaagtatatggcctccgggccggtggtggccatggtttggcaggggctggacgtggtgcgcacctcgcgggcgctcatcggagccacgaacccggccgacgccccgcccggcaccatccgcggggatttctgcatcgaggttggcaagaacctgattcacggcagcgactcggtggagagtgcccgccgcgagatcgctctctggttccgcgcagacgagctcctctgctgggaggacagcgctgggcactggctgtatgagtagcccggcagatgcgcgtcacagaggctctcacactccagcctcctccagggcccaagtgggcgggcttctggccccaccccacagcgcttggagcatcccttttggacgggctgctgaacatccacctgtctggacgttgcatggagggtggcgcaggcctctccaatccctggcgtacaggggtttcctgcccgacgaactgctccaggagcctgcgcggctcgcctggaaacgtgccaggacactgtcctggtgcccacccaaacgtggttcaacgttttttttataataaagtccctcgtttt

SEQ ID NO: 227323 - DNA, 1656 bp, Homo Sapiens
aattgatgagcaatgctttcctctataatagccaactttgtacaaaaaagttgggaagcagctcctgcatctggcggaggagaagcaaaccaagagtttcactgttgacatccgcgccaagccagaataccacaaattcctcatcggcaaggggggcggcaaaattcgcaaggtgcgcgacagcactggagcacgtgtcatcttccctgcggctgaggacaaggaccaggacctgatcaccatcattggaaaggaggacgccgtccgagaggcacagaaggagctggaggccttgatccaaaacctggataatgtggtggaagactccatgctggtggaccccaagcaccaccgccacttcgtcatccgcagaggccaggtcttgcgggagattgctgaagagtatggcggggtgatggtcagcttcccacgctctggcacacagagcgacaaagtcaccctcaagggcgccaaggactgtgtggaggcagccaagaaacgcattcaggagatcattgaggacctggaagctcaggtgacattagaatgtgctataccccagaaattccatcgatctgtcatgggccccaaaggttccagaatccagcagattactcgggatttcagtgttcaaattaaattcccagacagagaggagaacgcagttcacagtacagagccagttgtccaggagaatggggacgaagctggggaggggagagaggctaaagattgtgaccccggctctccaaggaggtgtgacatcatcatcatctctggccggaaagaaaagtgtgaggctgccaaggaagctctggaggcattggttcctgtcaccattgaagtagaggtgccctttgaccttcaccgttacgttattgggcagaaaggaagtgggatccgcaagatgatggatgagtttgaggtgaacatacatgtcccggcacctgagctgcagtctgacatcatcgccatcacgggcctcgctgcaaatttggaccgggccaaggctggactgctggagcgtgtgaaggagctacaggccgagcaggaggaccgggctttaaggagttttaagctgagtgtcactgtagaccccaaataccatcccaagattatcgggagaaagggggcagtaattacccaaatccggttggagcatgacgtgaacatccagtttcctgataaggacgatgggaaccagccccaggaccaaattaccatcacagggtacgaaaagaacacagaagctgccagggatgctatactgagaattgtgggtgaacttgagcagatggtttctgaggacgtcccgctggaccaccgcgttcacgcccgcatcattggtgcccgcggcaaagccattcgcaaaatcatggacgaattcaagggggacattcgcttcccacagagcggagccccagaccccaactgcgtcactgtgacggggctcccagagaatgtggaggaagccatcgaccacatcctcaatctggaggaggaatacctagctgacgtggtggacagtgaggcgctgcacgtatacatgaaacccccagcacacgaaagaggccaaggcaccttccagaggctttgtggtgcgagacgcaccctgtaccgccagcagcagtgagaagctcctgacatgagcagctc

SEQ ID NO: 227324 - DNA, 1139 bp, Homo Sapiens; identical to SEQ ID NO: 193801

SEQ ID NO: 227325 - DNA, 913 bp, Homo Sapiens; identical to SEQ ID NO: 193802

SEQ ID NO: 227326 - DNA, 1219 bp, Homo Sapiens
ggacggaagtgggtgttggaggctttaaggtagctttaaattcgtgttgtcctgggagctcgcccttttcggctggagtcgggctttacggcgccggatggctctggacgtgaagtctcgggcaaagcgttatgagaagctggacttccttggggagggacagtttgccaccgtttacaaggccagagataagaataccaaccaaattgtcgccattaagaaaatcaaacttggacatagatcagaagctaaagatggtataaatagaaccgccttaagagagataaaattattacaggagctaagtcatccaaatataattggtctccttgatgcttttggacataaatctaatattagccttgtctttgattttatggaaactgatctagaggttataataaaggataatagtcttgtgctgacaccatcacacatcaaagcctacatgttgatgactcttcaaggattagaatatttacatcaacattggatcctacatagggatctgaaaccaaacaacttgttgctagatgaaaatggagttctaaaactggcagattttggcctggccaaatcttttgggagccccaatagagcttatacacatcaggttgtaaccaggtggtatcgggcccccgagttactatttggagctaggatgtatggtgtaggtgtggacatgtgggctgttggctgtatattagcagagttacttctaagggttccttttttgccaggagattcagaccttgatcagctaacaagaatatttgaaactttgggcacaccaactgaggaacagtggccggacatgtgtagtcttccagattatgtgacatttaagagtttccctggaatacctttgcatcacatcttcagtgcagcaggagacgacttactagatctcatacaaggcttattcttatttaatccatgtgctcgaattacggccacacaggcactgaaaatgaagtatttcagtaatcggccagggccaacacctggatgtcagctgccaagaccaaactgtccagtggaaaccttaaaggagcaatcaaatccagctttggcaataaaaaaggaaaagaacagaggccttagaacaaggaggattgcccaagaaactaattttttaaagagaacactggacaacattttactactgagggaaatagccaaaaaggcaaataatggaaaatagtaaacattaagtaaa

SEQ ID NO: 227327 - DNA, 1466 bp, Homo Sapiens
ttggcccttccttcgtcccttccttccttccttggcgccgggcgcgatggagccggggcgccggggggccgcggcgctgctagcgctgctgtgcgtggcctgcgcgctgcgcgccgggcgcgcccaatacgaacgctacagcttccgcagcttcccacgggacgagctgatgccgctcgagtcggcctaccggcacgcgctggacaagtacagcggcgagcactgggccgagagcgtgggctacctggagatcagcctgcggctgcaccgcttgctgcgcgacagcgaggccttctgccaccgcaactgcagcgccgcgccgcagcccgagcccgccgccggcctcgccagctatcccgagctgcgcctcttcgggggcctgctgcgccgcgcgcactgcctcaagcgctgcaagcagggcctgccagccttccgccagtcccagcccagccgcgaggtgctggcggacttccagcgccgcgagccctacaagttcctgcagttcgcttacttcaaggcaaataatctccccaaagccatcgccgctgctcacacctttctactgaagcatcctgatgacgaaatgatgaagaggaacatggcatattataagagcctgcctggtgccgaggactacattaaagacctggaaaccaagtcatatgaaagcctgttcatccgagcagtgcgggcatacaacggtgagaactggagaacatccatcacagacatggagctggcccttcccgacttcttcaaagccttttacgagtgtctcgcagcctgcgagggttccagggagatcaaggacttcaaggatttctacctttccatagcagatcattatgtagaagttctggaatgcaaaatacagtgtgaagagaacctcaccccagttataggaggctatccggttgagaaatttgtggctaccatgtatcattacttgcagtttgcctattataagttgaacgacctgaagaatgcagccccctgtgcagtcagctatctgctctttgatcagaatgacaaggtcatgcagcagaacctggtgtattaccagtaccacagggacacttggggcctctcggatgagcacttccagcccagacctgaagcagttcagttctttaatgtgaccacactccagaaggagctgtatgactttgctaaggaaaatataatggatgatgatgagggagaagttgtggaatatgtggatgacctcttggaactggaggagactagctagcccacagcaacccaagagacttcctcttggcgttcaggaacacagattctttgtccttttcccaacagcccaggctgttgatacctcagagccttctctttactctccaaagtgaaagggaagcccccgtctctctaactgcatgtcatcaggggtgagcctgcctttcctatcttcacacctgccacctcatgttcacacctatctttctcac

SEQ ID NO: 227328 - DNA, 552 bp, Homo Sapiens
  misc_feature (33)..(46): n is a, c, g, or t
ctttgtacaaaaaagttggaactgcccaggccnnnnnnnnnnnnnnaagcattgatttaaaagatgcacggaaagttatcttacagcaaactgtagtttgcctccaagacaccattgtctccctttaatcttctcttttgtatacatttgttacccatggtgttctttgttccttttcataagctaataccactgtagggattttgttttgaacgcatattgacagcacgctttacttagtagccggttcccatttgccatacaatgtaggttctgcttaatgtaacttcttttttgcttaagcatttgcatgactattagtgcttcaaagtcaatttttaaaaatgcacaagttataaatacagaagaaagagcaacccaccaaacctaacaaggacccccgaacactttcatactaagactgtaagtagatctcagttctgcgtttattgtaagttgataaaaacatctggaagaaaatgactaaaactgtttgcatctttgtatgtatttattacttgatgtaataaagcttattttcattaacaatta

SEQ ID NO: 227329 - DNA, 728 bp, Homo Sapiens; identical to SEQ ID NO: 193809
  misc_feature (213)..(227): n is a, c, g, or t

SEQ ID NO: 227330 - DNA, 736 bp, Homo Sapiens; identical to SEQ ID NO: 193810

SEQ ID NO: 227331 - DNA, 1325 bp, Homo Sapiens
agcaatgctttttctattaatagccaactttgtacaaaaaagttgcgcgagaacattgggagatcttgtgcggaagttaggggagaaaatcctccccgagatcatccccatccttgaggaaggcctgaggtctcagaagagcgatgagaggcagggtgtgtgcattggcctaagtgagatcatgaagtccaccagccgggatgccgtgctgtatttctctgaatccctcgtgcccacggcaaggaaggctttgtgtgacccactggaggaggtcagagaggcggcagccaagactttcgagcagctgcattccaccatcggccaccaggctctggaggacattctcccatttttactaaagcagctggatgacgaggaggtgtcagagtttgccttggatggtctgaagcaagtcatggctattaagagtcgtgtggtgctgccctaccttgtgcccaagctgacaacgccacctgtcaacacccgggtgctggctttcctttcgtcagtggctggtgatgccctcacccgtcatcttggcgtgatcctcccagcggtcatgctggccctgaaggaaaagcttgggaccccagatgagcagctggagatggccaattgtcaggctgtgatcctctccgtagaggatgacacagggcaccggatcatcatcgaggatctgctggaggccacccgcagccctgaggtgggcatgaggcaagctgctgccatcatcctcaacatctactgttcccgctcaaaggctgactacaccagccacctgcggagcctggtctcgggcctgatccgcctcttcaatgactccagccctgtggttctggaggagagctgggatgccctaaatgccatcactaagaagctggatgctggcaaccagttggcactcattgaagagctgcacaaggaaatccggctcatagggaacgagagcaaaggcgagcatgtgccaggattctgcctcccgaagaagggagtgacctccatccttccagtgttgcgggaaggagtcctgactggcagccctgagcagaaggaggaggcagccaaagccttaggcttggtaatccgcctgacctcggctgacgccctgaggccctccgtggtcagcatcactggccctctgatccgcatcctgggggacaggttcagctggaatgtgaagcggctctgctcgagacactcagcctcttgttggctaagttgggattgccctgaagcccttcctgccccagctgcagaccactttcaccaaagctctgcagactccaaccggggggtgcgcctgaagccgcagatgctctggggaa

SEQ ID NO: 227332 - DNA, 898 bp, Homo Sapiens
cccccaaaggttaagtaggtagccgaggtggtgttgccatagtggcctgtgggtgcgcagcgcctgccccacagcggccaccacgtgagcacccgtgcgacctggaagcctggggatgcagcagagcgaggccataactggccagggagacgcactcaagagagaggaacagccagggccgccagccgcggtctaggtagaggcaccaggccacgggccatgcaaagatgggcagtgtgagccactggtccagcaccgcggcacggcgccactgcgtccacaggcgcagccactgcacggggccatagagcagggccatggctgcgaacacgtccttcaggtagcggggacccagccccatcgcgccgcccctgtgcagccacgacagccccagcagcgtgtaggccatgttcacgagtgagttgaacggcatggccaggaaggcagggaggccggccacgggcgcctcggcgtagtgctcatagcccacttgcacggaaacactgtcgaaaatgcccgtgaacacagccacggcacagaggccaccggccacggccacgtgcacgaaggcctgcccccactctggattcatctggaaccggcggcgtgacctggggcagggagcttcagagagcagccttcaatacgcagcctctgcagaacactctgggcctcccggctgagccagcagaaagaagccccgtgatttcgtgatttccgaggcagatgctgcgaccttgccccgaaggaaggcaggagtcctgctgattggctggcgccagcggaggaacgttctgcctttttcagtattggcgcgaaaaggccagctatcaccatacgggtatttcgcctcactcgcctcgctgggggaaattcaaatctccgaaaagggagccaa

SEQ ID NO: 227333 - DNA, 761 bp, Homo Sapiens
ttgggaagagagagagaggtgcatttagaaaatatgcaataaattgaagtgagtgttcaaagtattgtagaaggaatattgtactcagtctttaggattagattaagtggctgttggtaacaaagattagtggagaagctgtataatcgtacactggttttcacttttgaaaggaatccctgtcaaatggtttagtgcttaatgctgttatgtcatattgccctaatctctatttttgataaaattggataaggagtgaaagagtatgctgaccacctatgttagaggaagtacagaagatgcaggggtgtggtatccctgggtccagtccctcacctggtacctttgtgcatgttgccttcattcctgagcaggtatcatcctcagggaaccagcatggcacctaccaggccaggctctgttcttaggagcaaggagcttcttgcgctaacagttctggcctgagacctggattgagccttggcagacttcttgtctaaatgttggccattcagtctcaggccctctgttccatggaattgggaatctccaggtgacctaatcctcattggtggcttgatgtttgctggtatcttccaaactcagttcccagactagattgatacctggagcccagctgcctactcagcatttccacttgggtgcttcataggcatttcaaacctgatgtgtttaaaacacttgattaggctccggttttcctttggcttctgcttttcagtgaatggcatgactgccta

SEQ ID NO: 227334 - DNA, 1527 bp, Homo Sapiens
gaaacacttgtgaagggtccattgaagagacagagagggggcagctctggcctctctgctgccacttccctccattcgatgcacagcggtggggctcacaccattttccactcagcctcttccgcacaacttgcacatctatcgtttcttcaggggctggagctggttccacgatgcctagccaaaatcaggagggggtcctggggccagcgactaccactgtgaccagattattataaagatgggggaatgtggctttaaaaaagtggggaaaggacccaattttccaaaatgcaaattttttcttctattgccccccctcatttgcacctatttttgtcaagtccaaacataatttgaagtgaggtaggtagtttctctctacttctgccgttgtccttggggtgatgtcggggcctgtgccctaaatgcacttgtctcctgtgcaggggcagtgccagggctggcatcagtggctggtggagcttctcagttggctattttctcaatctcgtccaaatcatctgtgtccaatctttctatcttcttattaaaatgctcctggattctgttcaggatgttcatgctgtgcttgctgtccaccatgttcactgccaggcccctcttgccaaagcggcccgtgcgcccgatccggtgcaggtaggtctcattgtcaggattcccgtccttgtccacgggaagatcaaagttgatgacgacagacacttgttcaacatcaatgccgcgggcacacacgttggtggtcaccaaaaccttctctttgccctctcggaagcgctcaatcactgcagccctctgctccaccatcatctccccactcagcagagccacctggtggccttcttttgagagctctgctgccagccaactagctgttttgcgagtatggcagaagatcatggcttgagcaatggtgatggccccgtagaggttacacaaggcctggaacttctcgtctctgctgctgcacaggacatagtactgcttgatggtgtccagggtctcttcctcacgcttcagtttgataacgtttgggtctgggaccactttctgggcaaacttccacacagagtcttcaaaggtggcggagaaaagcagcatctggcagttcctgggcagcatcctctggatgcggatgctctgatcttggtggccctgagtggctatcatgacatcagcctcatccagaacaaacaccttgattttcttgggatcaatgaacttgagcttggagcaccagtccagcacagtcccaggggtgccaatgacaatctgctcactgatcttctggcctctttccaatttattgcctcgaacagcataagctagcttcagttcagggtaaaatttgcccatttgttcaatcacttttcctgtttggagggcgagctcatacgttggggagagacatagacactgggggtatttgtttgcaggttctacttggctaagcatggccagcacgaaggcagctgttttaccagtaccagactgagattgggccaa

SEQ ID NO: 227335 - DNA, 864 bp, Homo Sapiens
ccgcgaaagaagtttgctttggccacgcctcaaggcggccgcctcctcctgccccctcctccgcccctccgcgcacacctctcggtgcatattgcaaagcgccttccgttgcgagagctgcagattttgcaagagccaggctcgcccaccttgtagaaggagcgccttgagtcccctctcaccctcggttgcaaagagccgaccgcttgatctggacaccccctcgcccagattgcatgatctcccgggaccctcttgagttgcacgtttctgcaccgaggacctcaaatccccgtcgctcctaggatttgcagcgttctggatactggagggttgcaggctacactcgcccgcccctgggcagacactcgtccaaaccactggagtgtgctggtgactggcaggccagcccttcgcctctccatgaacccgtgagcctgggggcaggtgccaggcgatggcgcggcctgtgagcgacaggaccccggcccctctgctgctgggcggcccggccgggacaccccctggcgggggagcgctgcttgggttgcggagccttctgcaggggaccagcaagcccaaagagccggccagctgtctcctgaaggaaaaggagcgcaaggcggccctgcctgcagccacaacccctgggccaggcctggagactgcgggcccggcggatgccccggctggggcagtggtgggcggagggtccccgcgggggcgcccggggccggtgcccgccccgggtctgttggcgccactgctgtgggagcgcacgctgccgttcggcgatgtggagtacgtagacctggacgccttcctgctggagcacgggctcccgccagcccggccgccccccgg

SEQ ID NO: 227336 - DNA, 968 bp, Homo Sapiens
  misc_feature (56)..(80): n is a, c, g, or t
ttggggcagtgatgagtcctaggaggcgctggctctttggcggctcggaggagcgnnnnnnnnnnnnnnnnnnnnnnnnngtggcccctttgcagatgtattgctgtccttgaatattagcccatttgaaaacgcctgggaagttcagccatcagtatgtccaagtacaaacttattatgttaagacatggagagggtgcttggaataaggagaaccgtttttgtagctgggtggatcagaaactcaacagcgaaggaatggaggaagctcggaactgtgggaagcaactcaaagcgttaaactttgagtttgatcttgtattcacatctgtccttaatcggtccattcacacagcctggctgatcctggaagagctaggccaggaatgggtgcctgtggaaagctcctggcgtctaaatgagcgtcactatggggccttgatcggtctcaacagggagcagatggctttgaatcatggtgaagaacaagtgaggctctggagaagaagctacaatgtaaccccgcctcccattgaggagtctcatccttactaccaagaaatctacaacgaccggaggtataaagtatgcgatgtgcccttggatcaactgccacggtcggaaagcttaaaggatgttctggagagactccttccctattggaatgaaaggattgctcccgaagtattacgtggcaaaaccattctgatatctgctcatggaaatagcagtagggcactcctaaaacacctggaaggtatctcagatgaagacatcatcaacattactcttcctactggagtccccattcttctggaattggatgaaaacctgcgtgctgttgggcctcatcagttcctgggtgaccaaaggcgatcccagcagccattaagaaagtagaagatcaaggaaaagtgaaacaagctaaaaatattctttctcaactgttggcttaaaagaaatgcaaa

SEQ ID NO: 227337 - DNA, 1263 bp, Homo Sapiens
ttggcgaggagtccagagagccatggccgccctgcgtgtcctgctgtcctgcgcccgcggcccgctgaggcccccggttcgctgtcccgcctggcgtcccttcgcctcgggtgctaactttgagtacatcatcgcagaaaaaagagggaagaataacaccgtggggttgatccaactgaaccgccccaaggccctcaatgcactttgcgatggcctgattgacgagctcaaccaggccctgaagatcttcgaggaggacccggccgtgggggccattgtcctcaccggcggggataaggcctttgcagctggagctgatatcaaggaaatgcagaacctgagtttccaggactgttactccagcaagttcttgaagcactgggaccacctcacccaggtcaagaagccagtcatcgctgctgtcaatggctatgcctttggcgggggctgtgagcttgccatgatgtgtgatatcatctatgccggtgagaaggcccagtttgcacagccggagatcttaataggaaccatcccaggtgcgggcggcacccagagactcacccgtgctgttgggaagtcgctggcgatggagatggtcctcaccggtgaccggatctcagcccaggacgccaagcaagcaggtcttgtcagcaagatttgtcctgttgagacactggtggaagaagccatccagtgtgcagaaaaaattgccagcaattctaaaattgtagtagcgatggccaaagaatcagtgaatgcagcttttgaaatgacattaacagaaggaagtaagttggagaagaaactcttttattcaacctttgccactgatgaccggaaagaagggatgaccgcgtttgtggaaaagagaaaggccaacttcaaagaccagtgagaaccagctgcccctgcttcacacctctgcttggagaggacaagtgcagcctgtcagttttagaagcaagtaaatcatcctcttttcaagagcagtgtccgtggtgtgcagttcctctccaattgctgcgtggtcgtggcccgacctctcacggcatgacagccttcgtcacccagcctgtgagggtcctgactggagcaccttctaaatctaagattctgctgaggagcccccgctggtccctctgggcatgctgtgctcggacggaaagcggggcctgtgggtccttgtgtccctgccgctgaagaatggggctgctctgaaggaaacgctgtctgctgccttcatacagatgctgattaaagtga

SEQ ID NO: 227338 - DNA, 1293 bp, Homo Sapiens
ttggctgactcttgattgcatttagcaccaggttaggaggttatgaacaaaggatggacttcacctatataagtcttcagtctaattggtgtgttgatatttcatactttgatattagaggtcccatcaagaaatggagttacatccctgtcttcacccaatctccccaattttcagggtgagcaagtactttatctagagatggaagtttgtggttcaagctcagcacttggtttagagccctgttgctcttttgtcagcatagtgaagtggatactctggaagtggggagaaaaccgcttccagctatttaaacatagaaattgtttgagaattacactgagctcttcaaaaatatctcaatgatttgatttgttatttgactatcagggtcttccttgtagagtggttatttttactgggaattgaggaggtttccagaatcattaccctcatgactgaaacacctacacactcaaattcccttcaaaccccttggaataattacccttggaggtgaacatttttatgagaatgaatggtacaactgtctctgaagccacgttgattgaggttgtatcattactctgtattgatcattttcactgccaccttcacaggctaagcctgctccttcaaaaacccaggccagacctgttggagtcaaaatccccacttgtaagatcactcttaaggaaaccttcctgacgtcaccagaggagctctatagagtgtttaccacccaagagctggtgcaggcctttacccatgctcctgcaacattagaagcagacagaggtggaaagttccacatggtagatggcaacgtctctggggaatttactgatctggtccctgagaaacatattgtgatgaagtggaggtttaaatcttggccagagggacactttgccaccatcaccttgaccttcatcgacaagaacggagagactgagctgtgcatggaaggtcgaggcatccctgctcctgaggaagagcggacacgacagggctggcagcggtactactttgagggcattaaacagacctttggctatggcgcacgcttattttagggccagcggcaggggactccagcctgctggacacttcagtccagctctctcctgactggggcttgcgactcacaggattgcatcgtcccagctgctaacttggggccggggcccctcccttccacatataccttgggtttgtgcatgttttctgctgggtgggttcagagggcaatttctctttttatgtgtacatatgctaaaataaacataattt

SEQ ID NO: 227339 - DNA, 914 bp, Homo Sapiens
ttggctggagatcaatgaagccgagtgaatgggggctgaatgtgcgagtccatagctgaagaggagcgccagatggtggaggaatacacttatttatgaaactgtcttgagttcttcttgaattgccagttttcagcctcctcatgcctccgtctcctttagacgacagggtagtagtggcactatctaggcccgtccgacctcaggatctcaacctttgtttagactctagttaccttggctctgccaacccaggcagtaacagccaccctcctgtcatcgccaccaccgttgtgtccctcaaggctgcgaatctgacgtatatgccctcatccagcggctctgcccgctcgctgaattgtggatgcagcagtgccagctgctgcactgtggcaacctacgacaaggacaatcaggcccagacccaagccattgccgctggcaccaccaccactgccatcggaacctctaccacctgccctgctaaccagatggtcaacaataatgagaatacaggctctctaagtccatcaagtggggtgggcagccctgtgtcagggacccccaagcagctagccagcatcaaaataatctaccccaatgacttggcaaagaagatgaccaaatgcagcaagagtcacctgccgagtcagggccctgtcatcattgactgcaggcccttcatggagtacaacaagagtcacatccaaggagctgtccacattaactgtgccgataagatcagccggcggagactgcagcagggcaagatcactgtcctagacttgatttcctgtagggaagcaaggactctttcaagaggatcttttccaaagaaattatagtttatgatgagaataccaatgagccaagccgagtgatgccctcccagccacttcacatagtcctcgagt

SEQ ID NO: 227340 - DNA, 1035 bp, Homo Sapiens
ttggggaagcgcccggagctgcgagtgtccagacacttccctctgtgaccatgaaactctgggtgtctgcattgctgatggcctggtttggtgtcctgagctgtgtgcaggccgaattcttcacctctattgggcacatgactgacctgatttatgcagagaaagagctggtgcagtctctgaaagagtacatccttgtggaggaagccaagctttccaagattaagagctgggccaacaaaatggaagccttgactagcaagtcagctgctgatgctgagggctacctggctcaccctgtgaatgcctacaaactggtgaagcggctaaacacagactggcctgcgctggaggaccttgtcctgcaggactcagctgcaggttttatcgccaacctctctgtgcagcggcagttcttccccactgatgaggacgagataggagctgccaaagccctgatgagacttcaggacacatacaggctggacccaggcacaatttccagaggggaacttccaggaaccaagtaccaggcaatgctgagtgtggatgactgctttgggatgggccgctcggcctacaatgaaggggactattatcatacggtgttgtggatggagcaggtgctaaagcagcttgatgccggggaggaggccaccacaaccaagtcacaggtgctggactacctcagctatgctgtcttccagttgggtgatctgcaccgtgccctggagctcacccgccgcctgctctcccttgacccaagccacgaacgagctggagggaatctgcggtactttgagcagttattggaggaagagagagaaaaaacgttaacaaatcagacagaagctgagctagcaaccccagaaggcatctatgaaaggcctgtggactacctgcctgagagggatgtttacgagagcctctgtcgtggggagggtgtcaaactgacaccccgtagacagaagaggcttttctgtaagtaccaccatggcacagggccccacagctgctcattggccccttcaagag

SEQ ID NO: 227341 - DNA, 720 bp, Homo Sapiens
actttgtacaaaaaagttggcgcggcgtgagaagccatgagcagcaaagtctctcgcgacaccctgtacgaggcggtgcgggaagtcctgcacgggaaccagcgcaagcgccgcaagttcctggagacggtggagttgcagatcagcttgaagaactatgatccccagaaggacaagcgcttctcgggcaccgtcaggcttaagtccactccccgccctaagttctctgtgtgtgtcctgggggaccagcagcactgtgacgaggctaaggccgtggatatcccccacatggacatcgaggcgctgaaaaaactcaacaagaataaaaaactggtcaagaagctggccaagaagtatgatgcgtttttggcctcagagtctctgatcaagcagattccacgaatcctcggcccaggtttaaataaggcaggaaagttcccttccctgctcacacacaacgaaaacatggtggccaaagtggatgaggtgaagtccacaatcaagttccaaatgaagaaggtgttatgtctggctgtagctgttggtcacgtgaagatgacagacgatgagcttgtgtataacattcacctggctgtcaacttcttggtgtcattgctcaagaaaaactggcagaatgtccgggccttatatatcaagagcaccatgggcaagccccagcgcctatattaaggcacatttgaataaattctattaccagtt

SEQ ID NO: 227342 - DNA, 867 bp, Homo Sapiens; identical to SEQ ID NO: 193822

SEQ ID NO: 227343 - DNA, 1065 bp, Homo Sapiens; identical to SEQ ID NO: 193823

SEQ ID NO: 227344 - DNA, 1132 bp, Homo Sapiens; identical to SEQ ID NO: 193824

SEQ ID NO: 227345 - DNA, 840 bp, Homo Sapiens
aaaaagttggagaaaatgatgcccaggttgggctccccggcccaccggccgaggagaggcctgcgctgcacacgcgcagaccgagcatccgcgtcaagaggcgaagagagcgcgcgctccccacgtcctgcgctcctggctgccgggcattcgtctcagccgtgactctcgccaggccggggctggcgcgcccacgtctgaagagcgatgccccgggagatcatcaccctgcagctgggccagtgcggcaaccagattgggttcgagttctggaaacagctgtgcgccgagcatggtatcagccccgagggcatcgtggaggaattcgccaccgagggcactgaccgcaaggacgtctttttctaccaggcagacgatgagcactacatcccccgggccgtgctgctggacttggaaccccgggtgatccactccatcctcaactccccctatgccaagctctacaacccagagaacatctacctgtcggaacatggaggaggagctggcaacaactgggccagcggattctcccagggtgagaaaattcatgaagacatctttgacatcatagaccgagaagcagatggaagtgacagtttggagctccagaacagctccagagtgataaagggcttcgtgctgtgtcactccatcgctgggggtacgggttctggcctgagctcctacctcctggagcgactgaatgacaggtaccccaagaagctagtgcagacttattcagtgtttctctaccagggacgagatgagcgacgtagtggttcagccctacaattcactccctgacactcaagaggctgacgcagaacgcagattgtg

SEQ ID NO: 227346 - DNA, 1037 bp, Homo Sapiens
ttggatttctatttacatcggcataaatttcattttttttcttcatatgcaatgtggttatataaagcttaatgcagctcatttgctaccatttggatacttagacactttgagcaagattgtggcagtttttgcacaactttgaaatagaaatacctggtactctatcttgtttattgttgatgccatcttagaggaaaaaatgtaaaggtaagtaattaagcatatgacagcaacaaataagatacataaaactacaaaataaagtcccattaggttataagtattacaaaaaatccacctttctctaaggggaagtttgtaccccattgattcttggtgcctttgggatcgactgggttttaatggcctagttatttgaggattttgctgtgttgttttccatgtcttctctggtcaccttggattatatataaaaatacaggaaatagataaacatgaatgtgattaataatgctgaaaaagtattagcctaccaaagacacactcaggctttagtgaataactttacataacctcagtttttaacacatgcatatcttctccaaccatgaaatcaaagcacggtgcagaacttgtaccaagtacaaaaggtccatgtatgattagcattattttcttttgcttttgtttatggacaatgttcagctgacataagcagaagttggccaaaatactgcctgtactgttaatttcctgtataattcacttaaataaaagcaggttaacctcaatgatagcagttaaaatgttctatcttatgtatttcttttaagtattaccattatggtgctactgagcgttttcttttggtaaaaagaaaaatgccatgggctgcagtcttcttccatcacttttccctaccaggtccattaatatgcttataacactagtgccagttattttatttgataatgcttatggtatttgtatatttgtttgcattccaattttgtttaataatgagtgtgtaaactgcatacgttaaataaatgtaaatactaatgtactgctgc

SEQ ID NO: 227347 - DNA, 970 bp, Homo Sapiens
  misc_feature (168)..(176): n is a, c, g, or t
ttgggtttttcttctatctgtagttagtacaggatgaatttaaatgtgtttttcctgagagacaaggaagacttgggtatttcccaaaacaggtaaaaatcttaaatgtgcaccaagagcaaaggatcaacttttagtcatgatgttctgtaaagacaacaaatcccnnnnnnnnnctcaattgacttaactgcatgatttctgttttatctacctctaaagcaaatctgcagtgttccaaagactttggtatggattaagcgctgtccagtaacaaaatgaaatctcaaaacagagctcagctgcaaaaaagcatattttctgtgtttctggactgcactgttgtccttgccctcacatagacactcagacaccctcacaaacacagtagtctatagttaggattaaaataggatctgaacattcaaaagaaagctttggaaaaaaagagctggctggcctaaaaacctaaatatatgatgaagattgtaggactgtcttcccaagccccatgttcatggtggggcaatggttatttggttattttactcaattggttactctcatttgaaatgagggagggacatacagaataggaacaggtgtttgctctcctaagagccttcatgcacacccctgaaccacgaggaaacagtacagtcgctagtcaagtggtttttaaagtaaagtatattcataaggtaacagttattctgttgttataaaactatacccactgcaaaagtagtaatcaagtgtctaggtctttgatattgctcttttggttaacactaagcttaagtagactatacagttgtatgaatttgtaaaagtatatgaacacctagtgagatttcaaacttgtaattgtgggtaaatagtcattgtattttcttgtgaactgtgttttatgatttacctcaatcagaaaacaaatgatgtgctttggtcagttaataaaaatggtttt

SEQ ID NO: 227348 - DNA, 983 bp, Homo Sapiens
ctttgtacaaaaaagttggagaagatggcgctcaccagctttttacctgcacctactcagctatctcaggaccagcttgaggctgaagaaaaggcaagatcccagagatcacggcagacctcactggtctcctcccgaagagaacctcccccgtacggataccggaaaggctggatacctcggttattagaggattttggagatggaggtgcttttccagagatccatgtggcccagtatccactggatatgggacgaaagaaaaaaatgtcgaatgcgctggccattcaggtggattctgaaggaaaaattaaatatgatgcaattgctcgacaaggacagtcaaaagacaaggtcatttatagcaaatacactgacctggttccaaaggaggttatgaatgcagatgatccagacctgcaaaggcccgatgaagaagctattaaagagataacagaaaagacaagagtagccttagaaaaatctgtatcacagaaggtcgccgcagccatgccagttcgagcagctgacaaattggctcctgctcagtatatccgatacacaccatctcagcaaggagtggcattcaactctggagctaaacagagggttattcggatggtagaaatgcagaaagatccaatggagcctccaaggttcaagattaataagaaaattccccggggaccaccttctcctcctgcgcctgtcatgcattctcctagccgaaagatgactgtaaaggaacaacaagagtggaagattcctccttgtatttctaactggaaaaatgcaaagggttatacaattccattagacaaacgtctggctgctgatggaagaggactacagacagtacacataaatgaaaatttcgccaaattggcagaagccctctacattgctgatcggaagctcgtgaagctgtggaaatgcgtgcccaagtagagagaaaaatggctcagaaagaaaggaaaaacatg

SEQ ID NO: 227349 - DNA, 950 bp, Homo Sapiens
ttggcacgcataaaatggagagtggattaatcgccaaagattcttctgatctgacattttgaaattgtgagagaaactagatgactgtaaacttggtcacaggcctggttctggcagttctttgcggacttttttctagcattatgccaaataaacatgcagtctcagtgtgctctcgcatgtatgaatatctagtcctttctgtggttctcagccaagacataaaaactaggactcagagcacatacaaaaccagttatgtttcggaaagagggaaaagagtccccgagcccggatcttgtgctgcttttctcactgacgtgttgccttttttctttacaaaatctgctttgatacttaggacctctctggactaatttctcttcctagacagctcagcacagctattgatatgttagaggcagtatccttaatattcattctaaatgagttaacgacttaacttgaaattgggcctaaggagtgagaactacaaaaatacaaaatgcttgtccaggactcagccatgcacaccttgagcagcgccggcaggaggcacggaaggaactgtgctccgttctcctcactgtcatggtgccaccagtgtctgatgaagggcagagtgacccagactgcaggcagtaactgacttcacacagtccctggcatttagtcatctgtgattgttttatcactctggactgtgcagagccacctgccaccgagatctgcattccgactgcctatgaacgggtgtgggggccgggggctggcttgctgaagtcttcaacttgcactcggagctcctttgatacctcagagctggctgtcagtggcagctcacacccagactcactggccacacctcagcacgggggggagtcgagtgtcagtctctttctgtgaaggctttttttttcctttggcctgggaatttttcccctttttta

SEQ ID NO: 227350 - DNA, 1018 bp, Homo Sapiens
ttggcaaagtgttgggattacaggcatgagccaccatgcccagctgctcctttattttaatccctaaatataatccctaaatatagttatatttcatacttagtttgtttttaaaaagttttctctgtagaaaattttaatcattcataccctttacctttaggtttttctttctatacattcagtcaggcactgggatcatctgtttacaggcattatatttatttggcactcctggaacaagtatatctaacccattcttgatttttggactattcaggtgaactatttgaggggtatggggtctagaagttaaaagatacgcatgtcttctgttcttttcccgtatcaattcattccttcatctctttgccaagttgttttcctttcagggcctgtccttccagtttagaacagtaccatgaatcccacttgtgtcaatattaaagatagctgagaagcacctttcaaatggcacagtccctcttcaagatgtctaaaagaatggttatgtctgtccagttagggatttcacatccacatgtaatcatgtctgctgctgttgctacccaaattttcatttctccacattttgggtacttaagctaaaacgtaatggccacagtctgtaatccattcacattcctcagtttcaccacctccctcttccagactgcactctctgtcatcagtcccctcctttctaacagaaatggggttatgattttgaaggctgtgggttcagggagtctttgccaatcctgttggccctaaactatcaaggaggctccatttcaccatttgattttttgcatttcagaggcaactgattgtttcgatatgtacatattactcacgtataccccatttccttccagtcagcccaacattttccaccagtctgtccccatctctgaaatccttccttctctttccccctaagtcttttgagtgtcatcatgtactggtggtttctcggttccatctcatccatttccttttcaatggagactacagc

SEQ ID NO: 227351 - DNA, 1226 bp, Homo Sapiens; identical to SEQ ID NO: 193829

SEQ ID NO: 227352 - DNA, 530 bp, Homo Sapiens; identical to SEQ ID NO: 193830

SEQ ID NO: 227353 - DNA, 797 bp, Homo Sapiens
ttggcgaagagaagtacagtagtaagagtaacactgtagccgccaccggcaaggggtgcgcgctggggagcggacgctgcatcccctttctgctgcaggaacctctcatcagaccgcctgagggaagcggcgcccggagacccgccccggcccggtccacattctccccaggaagccggactctatggggcgggaccctgggggagcctgagccgagcccggagccagccccgaacccctgaacctccagccaggggcgccccgggagcagccagcccgtgggcgagccgcccgcccgccgagcagccatgagcgagacggtcatctgttccagccgggccactgtgatgctttatgatgatggcaacaagcgatggctccctgctggcacgggtccccaggccttcagccgcgtccagatctaccacaaccccacggccaattcctttcgcgtcgtgggccggaagatgcagcccgaccagcaggtggtcatcaactgtgccatcgtccggggtgtcaagtataaccaggccacccccaacttccatcagtggcgcgacgctcgccaggtctggggcctcaacttcggcagcaaggaggatgcggcccagtttgccgccggcatggccagtgccctagaggcgttggaaggaggtgggccccctccacccccagcacttcccacctggtcggtcccgaacggcccctccccggaggaggtggagcagcagaaaaggcagcagcccggcccgtccgagcacatagagcgccgggtctccaatgcaggaggcccacct

SEQ ID NO: 227354 - DNA, 936 bp, Homo Sapiens
ttgggtccgcgcgcccgcacaataggcggctctgaagagttggctgtcgcgcagcgtaacttcattcttcaggtacagacagtgtttgtgtgttcctgttgtggctaactttaagaagcggtgtttctcagaattgataagaccatggcacaaaactgtgacgattggctttggagtaaccctgtgtgcggttcctattgcacagaaatcagagcctcattcccttagtagtgaagcattgatgaggagagcagtgtctttggtaacagatagcacctctacctttctctctcagaccacatatgcgttgattgaagctattactgaatatactaaggctgtttataccttaacttctctttaccgacaatatacaagtttacttgggaaaatgaattcagaggaggaagatgaagtgtggcaggtgatcataggagccagagctgagatgacttcaaaacaccaagagtacttgaagctggaaaccacttggatgactgcagttggtctttcagagatggcagcagaagctgcatatcaaactggcgcagatcaggcctctataaccgccaggaatcacattcagctggtgaaactgcaggtggaagaggtgcaccagctctcccggaaagcagaaaccaagctggcagaagcacagatagaagagctccgtcagaaaacacaggaggaagggaggagcgggctgagtcggagcaggaggcctacctgcgtgaggattgagggcctgagcacactgccctgtctccccactcagtggggaaagcagggcagatgccaccctgcccagggttggcatgactgtctgtgcaccgagaagaggcggcagatcctgcgctggccaatcacgcgagacgcctttagctgtgagtgcctcctgtggtctcacgcttgcgctggacctgggttcttagccct

SEQ ID NO: 227355 - DNA, 830 bp, Homo Sapiens
tttgtacaaaaaagttggctcgggttctgacaagatggccgggctgccccgcaggatcatcaaggaaacccagcgtttgctggcagaaccagttcctggcatcaaagccgaaccagatgagagcaacgcccgttattttcatgtggtcattgctggccctcaggattccccctttgagggagggacttttaaacttgaactattccttccagaagaatacccaatggcagcccctaaagtacgtttcatgaccaaaatttatcatcctaatgtagacaagttgggaagaatatgtttagatattttgaaagataagtggtccccagcactgcagatccgcacagttctgctatcgatccaggccttgttaagtgctcccaatccagatgatccattagcaaatgatgtagcggagcagtggaagaccaacgaagcccaagccatagaaacagctagagcatggactaggctatatgccatgaataatatttaaattgatacgatcatcaagtgtgcatcacttctcctgttctgccaagacttcctcctctttgtttgcatttaatggacacagtcttagaaacattacagaataaaaaagcccagacatcttcagtcctttggtgattaaatgcacattagcaaatctatgtcttgtcctgattcactgtcataaagcatgagcagaggctagaagtatcatctggattgttgtgaaacgtttaaaagcagtggcccctccctgcttttattcatttcccccatcctggtttaagtataaagcactgtgaatgaaagtagttgtcacgttagctgcaggggtgtgggtg

SEQ ID NO: 227356 - DNA, 925 bp, Homo Sapiens; identical to SEQ ID NO: 193834

SEQ ID NO: 227357 - DNA, 1300 bp, Homo Sapiens; identical to SEQ ID NO: 193835

SEQ ID NO: 227358 - DNA, 860 bp, Homo Sapiens
agcaatgcttttcctataatagccaactttgtacaaaaaagttggctccggaaaggcgtttgggatgccaacgatgaggctgctgtcatttgtggtgttggctctatttgctgtcactcaagcagaggaaggagccaggcttttggcttccaaatcactgctgaacagatacgccgtggagggacgagacctgaccttgcagtacaacatctacaatgttggctcaagtgctgcattagacgtggaactatctgatgattccttccctccagaagactttggcattgtgtctggaatgctcaatgtcaaatgggaccggattgcccctgctagcaatgtctcccacactgtggtcctgcgccctctcaaggctggttatttcaacttcacctcggcaacaattacttacctggcccaggaggatgggcccgttgtgattggctctaccagtgcacctggacagggaggaatcctggctcagcgggagtttgacaggcgattctcccctcattttctggactgggcagcctttggggtcatgacccttccctccatcggcatccccctgctattgtggtactccagcaagaggaaatatgacactcccaaaacgaagaagaactgattggggcttccacagccctcctctcccaagaaatccaggctcctctccaaagaaatccaggtgctttccagactccaaaagggtatcttaaatgcaatctcttctctcttagcccttggccactttctcctgggatcctgccctgctctcagccatagtgaagaccagccctaagagtctgcgagagcctccttggttccatcgtgaaccctaaacaggaatgcctttggcaata

SEQ ID NO: 227359 - DNA, 1095 bp, Homo Sapiens; identical to SEQ ID NO: 193836

SEQ ID NO: 227360 - DNA, 758 bp, Homo Sapiens
actttgtacaaaaaagttggctagcagtcaacatgaaggctctcattgttctggggcttgtcctcctttctgttacggtccagggcaaggtctttgaaaggtgtgagttggccagaactctgaaaagattgggaatggatggctacaggggaatcagcctagcaaactggatgtgtttggccaaatgggagagtggttacaacacacgagctacaaactacaatgctggagacagaagcactgattatgggatatttcagatcaatagccgctactggtgtaatgatggcaaaaccccaggagcagttaatgcctgtcatttatcctgcagtgctttgctgcaagataacatcgctgatgctgtagcttgtgcaaagagggttgtccgtgatccacaaggcattagagcatgggtggcatggagaaatcgttgtcaaaacagagatgtccgtcagtatgttcaaggttgtggagtgtaactccagaattttccttcttcagctcattttgtctctctcacattaagggagtaggaattaagtgaaaggtcacactaccattatttccccttcaaacaaataatatttttacagaagcaggagcaaaatatggcctttcttctaagagatataatgttcactaatgtggttattttatattaagcctacaacatttttcagtttgcaaatagaactaatactggtgaaaatttacctaaaaccttggttatcaaatacatctccagtacattccgttct

SEQ ID NO: 227361 - DNA, 1578 bp, Homo Sapiens
  misc_feature (884)..(921): n is a, c, g, or t
  misc_feature (939)..(1049): n is a, c, g, or t
  misc_feature (1060)..(1068): n is a, c, g, or t
actttgtacaaaaaagttggctcagttagcggtggagaggcagtatgtccggttcaatggcgactgcggaagctagcggcagcgatgggaaagggcaggaagtcgagacctcagtcacctattaccggttggaggaggtggcaaagcgcaactccttgaaggaactgtggcttgtgatccatgggcgagtctacgatgtcacccgcttcctcaacgagcaccctggaggagaagaggttctgctggaacaagctggtgtagatgcaagtgaaagctttgaagatgtaggacactcttctgatgccagagaaatgctaaagcagtactacattggtgatatccatccgagtgaccttaaacctgaaagtggtagcaaggacccttcaaaaaatgatacatgcaaaagttgctgggcatattggattttacccatcataggcgctgttctcttaggtttcctgtaccgctactacacatcggaaagcaaatcctcctgaggaggccttgctgaagttagaaagtgcatccactttggggcgaaaactagagacttgcttgggggctgcagaagtgccctctcctcgaatcctgccagttgcattcttcccccttggagccaagacgattggccagacatcacctcagatctgagaccagcgtcttccatctctcagagccttactcccaaagtacctgctcactgttccgtgttgaacaattgccggtgtttcctctcttcactggtttccatgagtacccttatatttcacaactttctgttcataagttatagtgacattgctctttggtaaaaatgcctgctttccaatactttgattgcatattagacattcttaacagggcggcagtctagtgttgaaagnnnnnnnnnnnnnnnnnnnnnnnnnnnnnnnnnnnnnnaaaaaattctgatttagnnnnnnnnnnnnnnnnnnnnnnnnnnnnnnnnnnnnnnnnnnnnnnnnnnnnnnnnnnnnnnnnnnnnnnnnnnnnnnnnnnnnnnnnnnnnnnnnnnnnnnnnnnnnnnntatctgtattnnnnnnnnntctgatttaattcttttatttatcataaggggtttaattcctgaagtaaaggtttgcacctattaaacttaaaactgccaaatgatttttgttcttttatgtgcgtgataaaaatacaaagaatggtgtggccacctcctccctttcaagctagggcagcaggtagctcttcccagcccctgagcccagccccttcccaagtggtgccggacaaaaaactacatggccctttcgtgtcttgggggtggaaagggagggatgaattggggtgatagaaccctggtgaactcagagtaatctttctttagaaaactggtgttttctaaagaaacaggataggagtttagagaaggcaccaaagctttcactttggtttggcaccagtttctaaccatctgttttttctaccctagctatcttttattggtaaatataaatgtataattatgtttgtagagctttaccaaggagtttccctccttttttgtttgttgattagcaatttttgat

SEQ ID NO: 227362 - DNA, 1565 bp, Homo Sapiens; identical to SEQ ID NO: 193839
  misc_feature (895)..(928): n is a, c, g, or t
  misc_feature (946)..(1056): n is a, c, g, or t
  misc_feature (1067)..(1075): n is a, c, g, or t

SEQ ID NO: 227363 - DNA, 830 bp, Homo Sapiens
ttggcgcagaaacacttacttttccccctaccctgctcctcctcctccacagccgtctttctctttgcctcagccacttccttccttcgcctcaccctccccagtgcactgaagaaggtaaccgggtccagacccacgcggcgccagttctccggcgggaaggaaaaccgcgcagagaggcagcaatgaatgtggatcacgaggttaacctcttagtggaggaaattcatcgtttgggttcaaaaaatgctgatggaaagttaagcgtgaaatttggggtcctcttccgtgatgataaatgtgccaacctctttgaagcattggtaggaactcttaaagctgcaaaacgaaggaagattgtaacatatccaggagagctgcttctgcaaggtgttcatgatgatgttgacattatattactgcaagattaatgtggtttacatatctttatgtactgccattttttgtttctggtaaactggaatataaagtgaaagaacaaacatttgaacatacttaatgtatttttatagaactttgtaaacgaaaggagattcatgttttagaagtctgtccttttttatatcttgaaagaaaatctatgtatgatgctataaaataaatcctattatttttctcaggaatctggttaggaattgcaggcaatgagattttttgcggggcagggatgggaatgtttgttcataaataattagacattttctatagatatttgacattctgcgaaagcaacaagcaaactgaagaccaactcctatgagaaatattatgatgtttatgtaataaagacatgtaactgtcttaaattt

SEQ ID NO: 227364 - DNA, 940 bp, Homo Sapiens
aattgatgagcaatgcttttcctttaaaaggcaactttgtacaaaaaagttggctcctttcagccccaaaagggagatctggatggcatctacttcgtatgactattgcagagtgcccatggaagacggggataagcgctgtaagcttctgctggggataggaattctggtgctcctgatcatcgtgattctgggggtgcccttgattatcttcaccatcaaggccaacagcgaggcctgccgggacggccttcgggcagtgatggagtgtcgcaatgtcacccatctcctgcaacaagagctgaccgaggcccagaagggctttcaggatgtggaggcccaggccgccacctgcaaccacactgtgatggccctaatggcttccctggatgcagagaaggcccaaggacaaaagaaagtggaggagcttgagggagagatcactacattaaaccataagcttcaggacgcgtctgcagaggtggagcgactgagaagagaaaaccaggtcttaagcgtgagaatcgcggacaagaagtactaccccagctcccaggactccagctccgctgcggcgccccagctgctgattgtgctgctgggcctcagcgctctgctgcagtgagatcccaggaagctggcacatcttggaaggtccgtcctgctcggcttttcgcttgaacattcccttgatctcatcagttctgagcgggtcatggggcaacacggttagcggggagagcacggggtagccggagaagggcctctggagcaggtctggaggggccatggggcagtcctgggtgtggggacacagtcgggttgacccagggctgtctccctccagagcctccctccggacaatgagtcccccctcttgtctcccaccctgagattgggcatggggtgcggtgtggggggcatgtgctgcctgttgtta

SEQ ID NO: 227365 - DNA, 683 bp, Homo Sapiens; identical to SEQ ID NO: 193847

SEQ ID NO: 227366 - DNA, 980 bp, Homo Sapiens; identical to SEQ ID NO: 193848
  misc_feature (642)..(652): n is a, c, g, or t

SEQ ID NO: 227367 - DNA, 924 bp, Homo Sapiens
ttggcctcgcccagattcaggcgtgtaaaccagccggagcggcgcggcagcggcaggaccgccgtggcgcctagagtagcgacccggggggagcgcggggcgacgctggctgcagggacccggtgacagcgtgagaggttcgcagagtactaggttttgacaagcttgcatcatgcgtgagtataagctagtcgttcttggctcaggaggcgttggaaagtctgctttgactgtacaatttgttcaaggaatttttgtagaaaaatacgatcctacgatagaagattcttatagaaagcaagttgaagtagatgcacaacagtgtatgcttgaaatcttggatactgcaggaacggagcaatttacagcaatgagggatttatacatgaaaaatggacaaggatttgcattagtttattccatcacagcacagtccacatttaacgatttacaagacctgagagaacagattcttcgagttaaagacactgatgatgttccaatgattcttgttggtaataagtgtgacttggaagatgaaagagttgtagggaaggaacaaggtcaaaatctagcaagacaatggaacaactgtgcattcttagaatcttctgcaaaatcaaaaataaatgttaatgagatcttttatgacctagtgcggcaaattaacagaaaaactccagtgcctgggaaggctcgcaaaaagtcatcatgtcagctgctttaatatactaaatgcattgtagctctgagccaggtctgaagaactgttgcccaattcaacagtgccagcattccaactttgttaaacctaccaacatcttaaatggactttcctgtggtggtaccctttaagaggcggatgaaagctactatatcagtttgcacattctaatcactttccagtatcacaagagagatttt

SEQ ID NO: 227368 - DNA, 864 bp, Homo Sapiens; identical to SEQ ID NO: 193855
  misc_feature (438)..(448): n is a, c, g, or t

SEQ ID NO: 227369 - DNA, 922 bp, Homo Sapiens
ttggctcgctgttggccttgggcggcctggtgctgcttcgggattccgtggagtgggaggggcgcagtctcttgaaggcgcttgtcaagaaatctgcactgtgtggggagcaagtgcatatcctgggctgtgaagtgagcgaggaagagtttcgtgaaggttttgactctgatatcaacaatcggctggtttaccatgacttcttcagagaccctctcaactggtcaaaaactgaggaggcctttcctggggggccgctgggagccttgagagccatgtgcaagaggacagatcctgttcctgtcaccattgctctcgattcactcagctggctgctacttcgccttccctgcaccacactctgccaggtcctgcatgctgtgagccatcaggactcttgtcctggtgacagctcctcagtggggaaagtgagtgtgctgggcttgctacatgaagagcttcatggaccaggccctgtgggagctctcagcagccttgctcagactgaggtgaccctgggcggtaccatgggccaggcctcggcccacatcctgtgtcggaggccccgacagcgcccaactgaccagactcagtggttctccatccttccggacttcagcctggatctccaagaggggccctctgtagagtcccagccctactccgatcctcatatacccccggtggatcccacaactcatttgacctttaaccttcacctgtccaagaaagagagagaagccagagatagcctgatcctgcccttccagttcagttctgaaaaacagcaggctctcctgcggcctaggccagggcaggcttctatcttcatcttctatgagccagatgcttatgatgacctggacccacaagacccagatgacgacctggatatttgactggccagatttgattagattgt

SEQ ID NO: 227370 - DNA, 1297 bp, Homo Sapiens
gagcaatgctttttccatttatagccaactttgtacaaaaaagttggagcagagtggtcgttgtctttctaggtctcagccggtcgtcgcgacgttcgcccgctcgctctgaggctcctgaagccgaaaccagctagactttcctccttcccgcctgcctgtagcggcgttgttgccactccgccaccatgttcgaggcgcgcctggtccagggctccatcctcaagaaggtgttggaggcactcaaggacctcatcaacgaggcctgctgggatattagctccagcggtgtaaacctgcagagcatggactcgtcccacgtctctttggtgcagctcaccctgcggtctgagggcttcgacacctaccgctgcgaccgcaacctggccatgggcgtgaacctcaccagtatgtccaaaatactaaaatgcgccggcaatgaagatatcattacactaagggccgaagataacgcggataccttggcgctagtatttgaagcaccaaaccaggagaaagtttcagactatgaaatgaagttgatggatttagatgttgaacaacttggaattccagaacaggagtacagctgtgtagtaaagatgccttctggtgaatttgcacgtatatgccgagatctcagccatattggagatgctgttgtaatttcctgtgcaaaagacggagtgaaattttctgcaagtggagaacttggaaatggaaacattaaattgtcacagacaagtaatgtcgataaagaggaggaagctgttaccatagagatgaatgaaccagttcaactaacttttgcactgaggtacctgaacttctttacaaaagccactccactctcttcaacggtgacactcagtatgtctgcagatgtaccccttgttgtagagtataaaattgcggatatgggacacttaaaatactacttggctcccaagatcgaggatgaagaaggatcttaggcattcttaaaattcaagaaaataaaactaagctctttgagaactgcttctaagatgccagcatatactgaagtcttttctgtcaccaaatttgtacctctaagtacatatgtagatattgttttctgtaaataacctatttttttctctattctctgcaatttgtttaaagaataaagtccaaagtcagatctggtctagttaacctagaagtatttttgtctcttagaaatacttgtgatttttataatacaaaagggtcttgactctaaatgcagttttaagaattgtttttgaatttaaataaagtttacttgaatttc

SEQ ID NO: 227371 - DNA, 899 bp, Homo Sapiens; identical to SEQ ID NO: 193865

SEQ ID NO: 227372 - DNA, 949 bp, Homo Sapiens; identical to SEQ ID NO: 193866

SEQ ID NO: 227373 - DNA, 738 bp, Homo Sapiens
ttggcaaagccgtgcctttctctggctccagaatatgcataatcagcgccctggagtcccctgggcctggaccgcttcccagaggccaggaatctgccattactctgcggtggtgccagaggttttaggaaacctggcatggtgctttcaggtctggggcttttagagccccccgtgtggcttacaaattctacagcatacagagcaggccacgctcaggcccggcatgcgggccaccaagttctggaaaccacgtggtgtccctgcgaatggggcgatcaagtccagagccggggcactttcagagtttgaaggtaactgagagcagatggtcctccatttcaactccagaagtggggctctgggagggatgttctagccctccctggcatgtcagagccaggctctgcctggaggatccctccatccggctcctgtcatcccctacactttggccaagcaagaggtggtagaaccacttggctgctcattccttctggaggacacacagtctcagtccagatgccttcctgtctttctggccctttctggaccaaatcctactcttcctttctaaatctgagatctccctccagggaatccgcctgcagaggacagagctggctgtcttcccccacccctaacctggcttattcccaactgctctgcccactgtgaaaccactggttctaagtcctggcttctacatctggaaccttaccacgttactgcatactg

SEQ ID NO: 227374 - DNA, 803 bp, Homo Sapiens
ctatgaaaggcaactttgtacaaaaaagttggcggacttctgcaaccgcgagaagcctctgagcaccaagtccaagaagaacaagaagagcgcgtggcaggccaccacccagcaggcgggcctggactgccgtgtgtgccccacctgccagcaggtgctcgcgcatggcgatgccagcagccaccaggcgctgcatgctgcccgggacgacgacttcccctccctgcaagccatcgccaggatcatcacgtagctcccgccagcgtggccagagctgtcgcaccgtgagcgtccttcctccttcctctccgggctgccaggcagccaggtaaggcctggtgaggccacttggcctcttggttggccaggcccaccaggaagtcaccaggacagtccacccgccctgttggcacactcaagcgggagtccacccctgcctcagtggtgggccagtctcggtttgcattcttgtgcttttgggaggtgccaggggagggaagggctgggatgctgggacctgttgttgctggcaaagccagaggtcacagtggcctgatctgggccctcccaaagctgagggctgcagcccgtggggcctcagagctgaaagctgcggcgccactggtgccagagtcagatgtcacagatgtgttgtgtaaacagttggctgtttcgtgcttcaagaatgttcaggattaaaagcagacaagaaattgtgctacttgaagttgaatctttttatgagacaaactgaatctgggatctcaaattgcctctgaccttttatagacagtttatcttca

SEQ ID NO: 227375 - DNA, 900 bp, Homo Sapiens
  misc_feature (526)..(547): n is a, c, g, or t
caccagtctgagggtttaattaaccaggaagggaactgttgagaggggcacccctgtaaaaatgtacaaaaggtcttggggctatgtgaaaggggtgataaatatgtacatggaaccccccttcctttagcccctcctcccccagccctcggagggcatgaggacttgggtggtaggtgaacgggagggggcactttggcctctggcttagtgagcccttggggaggcaggcccagggcctagaggcccttacaggggcaaaggtgtacctcaggaggccccatggcccccgagatgagccacactcccatgcacacgcccctctcccttctctagaggctgtgacctctgctctcccagtgaccctacactccatgtgatgcttggtcttgtgggggttgaggcttctgttcccaggttccatgacctcagaggtggctggtgaggttatgacctttgccctccagccctggcttaaaacctcagccctaggacctggttaaaggaaggggagatggagctttgnnnnnnnnnnnnnnnnnnnnnntcacctgtcagcccgagctgggccagggcccctaggtggggaactgggccggggggcgggcacaagcggaggtggtgcccccaaaagggctcccggtggggtcttgctgagaaggtgaggggttcccggggccgcagcaggtggtggtggaggagccaagcggctgtagagcaaggggtgagcaggttccagaccgtagaggcgggcagcggccacggccccgggtccagttagctcctcacccgcctcatagaagcggggtggccttgccaggcgtgggggtgctgccaaccaggttggctccaggaagccagcacagcgatctggtgggctagggcccagaaacgggccaa

SEQ ID NO: 227376 - DNA, 1077 bp, Homo Sapiens; identical to SEQ ID NO: 193868

SEQ ID NO: 227377 - DNA, 633 bp, Homo Sapiens; identical to SEQ ID NO: 193869

SEQ ID NO: 227378 - DNA, 480 bp, Homo Sapiens
  misc_feature (207)..(276): n is a, c, g, or t
gtacaaaaaagttggggcagctctgctggtgcgggggcggcgagcccgggatcgagctaccgcggccgagcgcgccggccaccgcctgcaccgcccttccgcccgccctccggacggccgcagccctgcgggtctccgctccagacccacccccgccccaccccgcgcgcctctgccgcctcttccagagacccagcttgccgagcnnnnnnnnnnnnnnnnnnnnnnnnnnnnnnnnnnnnnnnnnnnnnnnnnnnnnnnnnnnnnnnnnnnnnntccagggcccctccgtctcggccccgggaccccggctccccgccagccccggtcccggccccggcaccatgtcggagaaaagcgtggaggcagcggccgagttgagcgccaaggacctgaaggagaataaggagaatgtggatgagaaggcaagccggaaagagcgaaagaaagaattggtggaggaggaggagaacggggctg

SEQ ID NO: 227379 - DNA, 1433 bp, Homo Sapiens
ttggtgcagctggaagatggcggcgtccgtggtctgtcgggccgctaccgccggggcacaagtgctattgcgcgcccgccgctcgccggccctgctgcggacgccagccttgcggagtacggcaaccttcgctcaggcgctccagttcgtgccggagacgcaggttagcctgctggacaacggcctgcgtgtggcctccgagcagtcctctcagcccacttgcacggtgggagtgtggattgatgttggcagccgttttgagactgagaagaataatggggcaggctactttttggagcatctggctttcaagggaacaaagaatcggcctggcagtgccctggagaaggaggtggagagcatgggggcccatcttaatgcctacagcacccgggagcacacagcttactacatcaaggcgctgtccaaggatctgccgaaagctgtggagctcctgggtgacattgtgcagaactgtagtctggaagactcacagattgagaaggaacgtgatgtgatcctgcgggagatgcaggagaatgatgcatctatgcgagatgtggtctttaactacctgcatgccacagcattccagggcacacctctagcccaggctgtggaggggcccagtgagaatgtcaggaagctgtctcgtgcagacttgaccgagtacctcagcacacattacaaggcccctcgaatggtgctggcagcagctggaggagtggagcaccagcaactgttagacctcgcccagaagcacctcggtggcatcccatggacatatgcagaggacgctgtgcccactcttactccatgccgcttcactggcagtgagatccgccaccgtgatgatgctctaccttttgcccacgtggccattgcagtagagggtcctggctgggccagcccggacaatgtggccttgcaagtggccaatgccatcatcggccactatgactgcacttatggtggtggcgtgcacctgtccagcccactggcttcaggtgctgtggccaacaagctatgccagagtttccagaccttcagcatctgctatgcagagacgggcttgctgggtgcacactttgtctgtgaccgaatgaaaatcgatgacatgatgttcgtcctgcaagggcagtggatgcgcctgtgtaccagtgccacggagagtgaggtggcccggggcaaaaacatcctcagaaatgccctggtatctcatctagatggcactactcctgtgtgtgaggacatcggacgcagcctcctgacctatggccgccgcatccccctggctgaatgggaaagccggattgcggaggtggatgccagtgtggtacgtgagatctgctccaagtacatctatgaccagtgcccagcagtggctggatatggccccattgagcagctcccagactacaaccggatccgta

SEQ ID NO: 227380 - DNA, 920 bp, Homo Sapiens
ttccccaagttacaactgagtgctctttgcaggcttttcgaagcatctttaaagtttccccaccaagtcctgtaattgttccatgctgcaactaaaactaatctctggataggatggggaatcagtgttctgtacacttaaggtcaccaaatatgcaggtctgtacatcctatgaagttgattggtctttatctgatattccaagcgccaagaaacatccgttatatgagggagagatctgcctatactgaaagatgcaatgataacttcgtacatagtctcctcagaagaacttttcagttatttatatttactaagaatggctctactttccacccccaactccattttaatccattctgaatttaaaccattgttaaactttatttttaaattatgaatggtaaaggagcatttcaaaatcatctcaataaacgatctttaaaaacatgagcttaacttcaattgcttgacatgccctttggctccttttctttgggtcaagatcccgaagatcttgtttcacaccaacactctccattcatacctgcaagtgaaaagtgcctcagcttgacaccttatacagtacctaccttcccagtaggatttctagggaattcttattattctgatattccgtgcaaaacagttctattcgctctctgtcaaatttacagtcttctagataagtgcttagagttgacttgtcagctcggtgctttcctgcctctagtatgtaagttgcagctgctgcatgacaatgttttaaaaccactgggtcgatatgtttcaagtctggatgatctaacacggcctcgtccgcctgggcgtccagcagactctggaatgccgcccggaggagaagcgtgaaggcgttggagtcgaaggagcggggatccgccagcatctggaagccccaa

SEQ ID NO: 227381 - DNA, 881 bp, Homo Sapiens; identical to SEQ ID NO: 193875

SEQ ID NO: 227382 - DNA, 845 bp, Homo Sapiens; identical to SEQ ID NO: 193876

SEQ ID NO: 227383 - DNA, 781 bp, Homo Sapiens
ttggctcactcgtggctttccgaaggctgctggtcaagctgaactagcagaaattccagaaggctatgtcccagaacactgggaatattataagcatcccatatcaagatggattgcccgtaatttctatgatagtcctgaaaagatatatgaaagaacaatggccgtccttcagattgaagctgaaaaggctgaattacgggtaaaggagctggaagtgcgaaaattgatgcatgtgagaggagatggaccctggtattactatgagacaattgacaaggaacttattgatcattctccgaaagcaactcctgacaattaagcatttttttctccaaatacaaagtatattctctttattggaaaataaattaataaatatattctgtatttttgctctccgtgaaaaacaaaagagcctctgacattactgtctctcagtgttggttcagattgaggcttttgtttgaggagtttggcttccagtccccaaagaaggtttaaaatgtactaataaaaactggagaaataggaatttgtgaactcctaaaattgtagcaactttgaaaggttagtgttttatttacctgacaaatggaagttatagaagtctaataatgttaagcaccagtaattatagtattttgtacaaatgcctgtactgtagatgtctgtattattgaggggcaactcaggattttaagttccataaagtattgaaccaactctaaaatgttaactccttaataaacagattctcagtaaacaaattttaaagttt

SEQ ID NO: 227384 - DNA, 1041 bp, Homo Sapiens; identical to SEQ ID NO: 193877

SEQ ID NO: 227385 - DNA, 922 bp, Homo Sapiens
  misc_feature (665)..(723): n is a, c, g, or t
ttggctctttctaaacacagagtgttgggcctggtttgtttctgacaaagttacagtcctgggcctgtaatgaatgtcggcggcgctggggttgcagggaaaagacaaatcctcaaagcgtggacgtgtgtccccatggcttgtggatcagctaagctcgggatcatttccataagtctgcttttcagggattctctgctggtgctggtgcaaggacttctgttccaaaggctgggaaaaactaagctgtcccagcccctcccatttcttgggcagggctcttttcctgttgtgtcttcccccagggcctgtcctgtaccgagctctgtctgttccagccttcatccttcctggctgttgcttttcctcttaagggcctcagaactcttgctcttcctgggctgagggggaatgagtgttcttgccatttgccagcctaatgcgcatgctttctgcctctggtaacaggagtgagtgagcccctcagacctgcactctgggtgtctcctgctttcaaaggttcttaatagtgaatgctttaaaattaaagtcatcacgaaatggaagttttcccagggtggaaaataagaggaagtgctgctgtaattgggagcacaaggggcctcccaaaaaggagccccacctcagcatcactgccttaatcnnnnnnnnnnnnnnnnnnnnnnnnnnnnnnnnnnnnnnnnnnnnnnnnnnnnnnnnnnnagggcgctcctgttcccatctctgtgttccctggaggcaggtatcacaaagcatttgtgaattgctttagtgcagggacaccacccactcggactcttccccatcatcccttccattgccacaccctagatcccagcctcagaactaacaagttttgagaaaagcacgtggtagagcagcagcttcgtgctctcagcgg

SEQ ID NO: 227386 - DNA, 956 bp, Homo Sapiens; identical to SEQ ID NO: 193878
  misc_feature (525)..(538): n is a, c, g, or t
  misc_feature (583)..(610): n is a, c, g, or t
  misc_feature (824)..(881): n is a, c, g, or t

SEQ ID NO: 227387 - DNA, 1346 bp, Homo Sapiens
  misc_feature (87)..(125): n is a, c, g, or t
  misc_feature (197)..(216): n is a, c, g, or t
ttgggacggaagaagagagtgagccgcaattgttctgaaaatgtcaaacgaggcttctgttttgcacctgcagatcaccgagttggnnnnnnnnnnnnnnnnnnnnnnnnnnnnnnnnnnnnnnngaaatttgccgagcagtggagccctctgacaatttgcaaggccctctgagaaaggaagctgcttaaagccannnnnnnnnnnnnnnnnnnnagcgagtgctgtttttgagatcattatctgaactcaggcagcctagtagaggcagtggtgggattccaatgggtcttggtgggtgggaggtggggcatgtgcaaggcaagcaaggaacatttggggtaagaaaacaaacatgaggcaaaagaaaaaatacatgtttttaagaaaacattgagcagaaaactgcagccaggatgcgctcagcagacattcactctggctgctgggacatcagaaaacaaagtcttcatctctctctccagtttcacccaccccaccctttgctttcatttcaggtgtgttggtctatatgacagggaggagagtaaaggagagcaggagcaattggctgcctgcaaagccagctggaggtgaagtgcaggaaaggaaaggtcaccccattctactccatggcctctctgctcccagctgtggtaggctcacatagccagtgtgatcggttttttagaggcagtgcttttcagcttttctccctgatatatccattttgcttcccagcactttttaggagtagtgagagcacttcctgcccttgttggaagccccagggtggacactcagcacgaaggtctctcccttaactgctgcccttccaagacttgctcccgagatggagtgggcgtggtcttccaggctggccctttccttctcctcaccgccaccttccctgccccagccccagcagccatgggtacatgggtccccagctcacctatggattcccgccagtctgcccagctgcagtactcacgccccatgggggatcttggtctgtttttcttgtgggagcctagtggagagcagacgtggctttttatgtgtcttgttggggaggtgacttgcatggtggggacaaggctgtcgtggcaaccttgggatcgagtttgagactaaaggatgtcatgagatccctggcttctccccatgttgttcccggacaagggcagaaggaggcatggcaagggacctctgctgtccttactcaacagtggtcctcatccctccccaactcccactgcttcctgcaagggcaccagttgtatgagaaagttggccttttggacttaggatttccttattgtaactaagagccatctgaagca

SEQ ID NO: 227388 - DNA, 1120 bp, Homo Sapiens; identical to SEQ ID NO: 193881
  misc_feature (855)..(879): n is a, c, g, or t

SEQ ID NO: 227389 - DNA, 1163 bp, Homo Sapiens; identical to SEQ ID NO: 193882
  misc_feature (296)..(320): n is a, c, g, or t
  misc_feature (711)..(727): n is a, c, g, or t

SEQ ID NO: 227390 - DNA, 981 bp, Homo Sapiens
ttgggggtcccagactgaattgtccctgagcggagtctgaggtcgctgtggactgcccactgggccttgcccgagatggacagccggattccttatgatgactacccggtggttttcttgcctgcctatgagaatcctccagcatggattcctcctcatgagagggtacaccacccggactacaacaatgagttgacccagtttctgccccgaaccatcacactgaagaagcctcctggagctcagttgggatttaacatccgaggaggaaaggcctcccagctaggcatcttcatctccaaggtgattcctgactctgatgcacatagagcaggactgcaggaaggggaccaagttctagctgtgaatgatgtggatttccaagatattgagcacagcaaggctgttgagatcctgaagacagctcgtgaaatcagcatgcgtgtgcgcttctttccctacaattatcatcgccaaaaagagaggactgtgcactagaaagttgcagcccacagcccttcatgtggactctgtcatgacatgctaactagacttcaggggagccacttctgttttcagcccctccctggaatagtgagttgggaggatggggagacagctaaccaactgcattacccaaaccatattgcacttttagttccctagttttctaggtgagcttcattccctgaaaggaggatgatgatatctaggcataacctagcctgtgaggaacctagttaggaaagacaactgacatttattgaatatcatgcactagtcccttacatatgtcatattttaattatagaaatcagtagcaaaaagaatcttggggaatttccatctgacttccctggccatcttatcccatccttgcactaccagaagattcatacacttttgagactccagtgagacgctgttttcaccccttcctcctcctagcctctctcccaaaaggtaaaacacaatgctgag

SEQ ID NO: 227391 - DNA, 1039 bp, Homo Sapiens
ttggggagaagccgggaggactgggtgcgcctgcagggatcggaagccggttggggtgtgagaggttttctcgctctagggagattcttcaagcaatcactatgtcaacagacacaggtgtttcccttccttcatatgaggaagatcagggatcaaaactcattcgaaaagctaaagaggcaccattcgtacccgttggaatagcgggttttgcagcaattgttgcatatggattatataaactgaagagcaggggaaatactaaaatgtccattcatctgatccacatgcgtgtggcagcccaaggctttgttgtaggagcaatgactgttggtatgggctattccatgtatcgggaattctgggcaaaacctaagccttagaagaagagatgctgtcttggtcttgttggaggagcttgctttagttagatgtcttattattaaagttacctattattgttggaaataaactaatttgtatgggtttagatggtaacatggcattttgaatattggcttcctttcttgcaggcttgatttgcttggtgaccgaattactagtgactagtttactaactaggtcattcaaggaagtcaagttaacttaaacatgtcacctaaatgcacttgatggtgttgaaatgtccaccttcttaaatttttaagatgaacttagttctaaagaagataacaggccaatcctgaaggtactccctgtttgctgcagaatgtcagatattttggatgttgcataagagtcctatttgccccagttaattcaacttttgtctgcctgttttgtggactggctggctctgttagaactctgtccaaaaagtgcatggaatataacttgtaaagcttcccacaattgacatatatatgcatgtgtttaaaccaaatccagaaagcttaaacaatagagctgcataatagtatttattaaagaatcacaactgtaaacatgagaataacttaaggattccagtttaatttttgtaattgcaaattatattttgctgctgatatatagaata

SEQ ID NO: 227392 - DNA, 1055 bp, Homo Sapiens; identical to SEQ ID NO: 193886

SEQ ID NO: 227393 - DNA, 986 bp, Homo Sapiens; identical to SEQ ID NO: 193887

SEQ ID NO: 227394 - DNA, 1182 bp, Homo Sapiens
ttggcaccgtgtccttcccaggagacagagaaggaggagagcccggaaccagggccggagcggcgggcggagccgagctgcggggagccgctccgggtgcccccacccccgcgcgcctcagtggtgccggccgagggcagggctcgcggttgcggggctcgcgccgctgtcagtgcggcggggcgcgcgagcggcgccagctcggggcagcggaacccagagaagctgagggggcggtagcggcggcgacggcgacgacgacgactcccgcgcgtgtgcccagcctcttcccgccgcagccgcccttttcctccctcccttacgtccccgagtgcggcagtaccgcctccttcccagccgcgcggcttcctccagacctctcggcgcgggtgagccctattcccagaggcaggtggtgctgaccctgtaacccaaaggaggaaacagctggctaagctcatcattgttactggtgggcaccatgtccttgaagcttcaggcaagcaatgtaaccaacaagaatgaccccaagtccatcaactctcgagtcttcattggaaacctcaacacagctctggtgaagaaatcagatgtggagaccatcttctctaagtatggccgtgtggccggctgttctgtgcacaagggctatgcctttgttcagtactccaatgagcgccatgcccgggcagctgtgctgggagagaatgggcgggtgctggccgggcagaccctggacatcaacatggctggagagcctaagcctgacagacccaaggggctaaagagagcagcatctgccatatacagtggctacatctttgactatgattactaccgggacgacttctacgacaggctcttcgactaccggggccgtctgtcgcccgtgccagtgcccagggcggtccctgtgaagcgaccccgggtcacagtccctttggtccggcgtgtcaaaactaacgtacctgtcaagctctttgcccgctccacagctgtcaccaccagctcagccaagatcaagttaaagagcagtgagctgcaggccatcaagacggagctgacacagatcaagtccaatatcgatgccctgctgagccgcttggagcagatcgctgcggagcaaaggccaatccagatggcaagaaaaagggtgatggaggtggcgccagcggcggcggc

SEQ ID NO: 227395 - DNA, 1252 bp, Homo Sapiens
ctttgtacaaaaaagttggaagtggactaaatgtgactctcaccattcggcttcttatgcacggaaaggaagtaggaagcatcattgggaagaaaggggagtcggttaagaggatccgcgaggagagtggcgcgcggatcaacatctcggaggggaattgtccggagagaatcatcactctgaccggccccaccaatgccatctttaaggctttcgctatgatcatcgacaagctggaggaagatatcaacagctccatgaccaacagtaccgcggccagcaggcccccggtcaccctgaggctggtggtgccggccacccagtgcggctccctgattgggaaaggcgggtgtaagatcaaagagatccgcgagagtacgggggcgcaggtccaggtggcgggggatatgctgcccaactccaccgagcgggccatcaccatcgctggcgtgccgcagtctgtcaccgagtgtgtcaagcagatttgcctggtcatgctggagacgctctcccagtctccgcaagggagagtcatgaccattccgtaccagcccatgccggccagctccccagtcatctgcgcgggcggccaagatcggtgcagcgacgctgcgggctacccccatgccacccatgacctggagggaccacctctagatgcctactcgattcaaggacaacacaccatttctccgctcgatctggccaagctgaaccaggtggcaagacaacagtctcactttgccatgatgcacggcgggaccggattcgccggaattgactccagctctccagaggtgaaaggctattgggcaagtttggatgcatctactcaaaccacccatgaactcaccattccaaataacttaattggctgcataatcgggcgccaaggcgccaacattaatgagatccgccagatgtccggggcccagatcaaaattgccaacccagtggaaggctcctctggtaggcaggttactatcactggctctgctgccagtattagtctggcccagtatctaatcaatgccaggctttcctctgagaagggcatggggtgcagctagaacagtgtaggttccctcaataacccctttctgctgttctcccatgatccaactgtgtaatttctggtcagtgattccaggttttaaataatttgtaagtgttcagtttctacacaactttatcatccgctaagaatttaaaaaatcacttctctgttcagctgttaatgctggggatctat

SEQ ID NO: 227396 - DNA, 1027 bp, Homo Sapiens; identical to SEQ ID NO: 193891

SEQ ID NO: 227397 - DNA, 893 bp, Homo Sapiens; identical to SEQ ID NO: 193892

SEQ ID NO: 227398 - DNA, 995 bp, Homo Sapiens; identical to SEQ ID NO: 193893

SEQ ID NO: 227399 - DNA, 1175 bp, Homo Sapiens; identical to SEQ ID NO: 193895
  misc_feature (1012)..(1040): n is a, c, g, or t

SEQ ID NO: 227400 - DNA, 1273 bp, Homo Sapiens; identical to SEQ ID NO: 193896
  misc_feature (1146)..(1161): n is a, c, g, or t

SEQ ID NO: 227401 - DNA, 915 bp, Homo Sapiens; identical to SEQ ID NO: 193897

SEQ ID NO: 227402 - DNA, 908 bp, Homo Sapiens
actttgtacaaaaaagttggataaatataatatcatgttagtgaggctaaactcaaaatgggatctccgaagactttgtaaaactgttggtgctacagctcttcctagattgacacctcctgtccttgaagaaatgggacactgtgacagtgtttacctctcagaagttggagatactcaggtggtggtttttaagcatgaaaaggaagatggcgccatttctaccatagtacttcgaggctctacagacaatctgatggatgacatagaaagggcagtagacgatggtgttaatactttcaaagttcttacaagggataaacgtcttgtacccggaggtggagcaacagaaattgaattagccaaacagatcacatcatatggagagacatgtcctggacttgaacagtatgctattaagaagtttgctgaggcatttgaagctattccccgcgcactggcagaaaactctggagttaaggccaatgaagtaatctctaaactttatgcagtacatcaagaaggaaataaaaacgttggattagatattgaggctgaagtccctgctgtaaaggacatgctggaagctggtattctagatacttacctgggaaaatattgggctatcaaactcgctactaatgctgcagtcactgtacttagagtggatcagatcatcatggcaaaaccagctggtgggcccaagcctccaagtgggaagaaagactgggatgatgaccaaaatgattgaaattggcttaatttttactgtaggtgaaggctgtatttgtagtagtactcaagaatcacctgatgttttcttattctccttaaattaaaagttattttgtgtttgtattcttggctggatgttataataaacatattgttactgtcataaaacaaaa

SEQ ID NO: 227403 - DNA, 858 bp, Homo Sapiens
agttctgccaaaccttttcttttaaagcccaacgaataaaacccatcacctttcacaagaccaccacagcaagtaggcaggaatgccagtgttaaaagtgaaatcttttgaatttgtagtacctttccttttccaaatctagctgaaatttctcacttgttttccttttgatgaagctaaccaccggcatttctcctgatgttgatttaggatcggcaggggaagcaggatgccacactgagaacatctcctcagaatgtcataggctgctttatctcctctaggggagctggtcctgggcttgggctctgacatcaaaagtggatccaaggttttgtttttgcttcttggtgctttctttgatgaactttcagaatgaagaggaaatctgtttatacttcttgtctttggacgaacatctttctccatcgtggaagtttgattttcagcagcttgacttggaagagatgaaggaagaatttctggatttccaacaggaaagtgtttcttaaactctgagtctggacaacatttacccatatggtggaaatacttattttctggaatcatttggttgcaataatgacagtagatttccctttcaggagctgaaattctttcccctttcccgagctgggcctgttcactgcgacagacatctctgtgctgggcgagcatgcggtgcatgatgaactggccacagccttggcagagctctgtccggctgccacagtaggactcgtggagctccagcttgctgagctgcatgtccagtttgcagaacttacactcaacagggcgctcctggcactcattggccttatgaaactccagcgaggccaacttttttgtacaaag

SEQ ID NO: 227404 - DNA, 741 bp, Homo Sapiens
ttggcttcccgacctcgcttaaaacagtccaggtctcagtgctgtgccccccccagagcctagaggatgtttcatgggatcccagccacgccgggcataggagcccctgggaacaagccggagctgtatgaggaagtgaagttgtacaagaacgcccgggagagggagaagtacgacaacatggcagagctgtttgcggtggtgaagacaatgcaagccctggagaaggcctacatcaaggactgtgtctcccccagcgagtacactgcagcctgctcccggctcctggtccaatacaaagctgccttcaggcaggtccagggctcagaaatcagctctattgacgaattctgccgcaagttccgcctggactgcccgctggccatggagcggatcaaggaggaccggcccatcaccatcaaggacgacaagggcaacctcaaccgctgcatcgcagacgtggtctcgctcttcatcacggtcatggacaagctgcgcctggagatccgcgccatggatgagatccagcccgacctgcgagagctgatggagaccatgcaccgcatgagccacctcccacccgactttgaaggccgccagacggtcagccagtggctgcagaccctgagcggcatgtctgcgtcagatgaactggacgactcacaagtgcgtcagatgctgttccacctggagtcagcctacaacgccctccaaccgcttcctgcatgcctgagcccgggg

SEQ ID NO: 227405 - DNA, 943 bp, Homo Sapiens
ttggcgctccctccttccccgccttccatacctccccggctccgctcggttcctggccaccccgcagcccctgcccaggtgccatggccgcattgtaccgccctggcctgcggcttaactggcatgggctgagccccttgggctggccatcatgccgtagcatccagaccctgcgagtgcttagtggagatctgggccagcttcccactggcattcgagattttgtagagcacagtgcccgcctgtgccaaccagagggcatccacatctgtgatggaactgaggctgagaatactgccacactgaccctgctggagcagcagggcctcatccgaaagctccccaagtacaataactgctggctggcccgcacagaccccaaggatgtggcacgagtagagagcaagacggtgattgtaactccttctcagcgggacacggtaccactcccgcctggtggggcccgtgggcagctgggcaactggatgtccccagctgatttccagcgagctgtggatgagaggtttccaggctgcatgcagggccgcaccatgtatgtgcttccattcagcatgggtcctgtgggctccccgctgtcccgcatcggggtgcagctcactgactcagcctatgtggtggcaagcatgcgtattatgacccgactggggacacctgtgcttcaggccctgggagatggtgactttgtcaagtgtctgcactccgtgggccagcccctgacaggacaaggggagccagtgagccagtggccgtgcaacccagagaaaaccctgattggccacgtgcccgaccagcgggagatcatctccttcggcagcggctatggtggcaactccctgctgggcaagaagtgctttgccctacgcatcgcctctcggctggcccgggatgagggctggctggcagagcacatgctgatcctggg

SEQ ID NO: 227406 - DNA, 872 bp, Homo Sapiens; identical to SEQ ID NO: 193902

SEQ ID NO: 227407 - DNA, 548 bp, Homo Sapiens; identical to SEQ ID NO: 193905

SEQ ID NO: 227408 - DNA, 1162 bp, Homo Sapiens
ttggcctggctccgcgggcagccggagcgcacccggccggaagccgctgtcggggagccggcggtggggcgggacgcaggtgcaactgacatgggtgaaccccagggatccatgcggattctagtgacagggggctctgggctggtaggcaaagccatccagaaggtggtagcagatggagctggacttcctggagaggactgggtgtttgtctcctctaaagacgccgatctcacggatacagcacagacccgcgccctgtttgagaaggtccaacccacacacgtcatccatcttgctgcaatggtggggggcctgttccggaatatcaaatacaatttggacttctggaggaaaaacgtgcacatgaacgacaacgtcctgcactcggccttcgaggtgggcgcccgcaaggtggtgtcctgcctgtccacctgtatcttccctgacaagacgacctacccgatagatgagaccatgatccacaatgggcctccccacaacagcaattttgggtactcgtatgccaagaggatgatcgacgtgcagaacagggcctacttccagcagtacggctgcaccttcaccgctgtcatccccaccaacgtcttcgggccccacgacaacttcaacatcgaggatggccacgtgctgcctggcctcatccacaaggtgcacctggccaagagcagcggctcggccctgacggtgtggggtacagggaatccgcggaggcagttcatatactcgctggacctggcccagctctttatctgggtcctgcgggagtacaatgaagtggagcccatcatcctctccgtgggcgaggaagatgaggtctccatcaaggaggcagccgaggcggtggtggaggccatggacttccatggggaagtcacctttgatacaaccaagtcggatgggcagtttaagaagacagccagtaacagcaagctgaggacctacctgcccgacttccggttcacacccttcaagcagggtgagccctgaccccacagccctccacttggtggaggcctgccccagccactccctcatgctcgctaccagggcagaggtgaggtgccccctcagagcctgtactgctctggaggtgggacaccaaagctctgaggggtgacttccctgtccctgggcctcc

SEQ ID NO: 227409 - DNA, 421 bp, Homo Sapiens; identical to SEQ ID NO: 193909

SEQ ID NO: 227410 - DNA, 1313 bp, Homo Sapiens
ttggccggccgcttctcctctgctcctcgaagaaggccagggcggggctgccgcaagttttgacattttcgcagcggagacgcgcgcgggcactctcgggccgacggctgcggcggcggccgaccctccagagccccttagtcgcgccccggccctcccgctgcccggagtccggcggccacgaggcccagccgcgtcctcccgcgcttgctcgcccggcggccgcagccatgtcccgggggcccgaggaggtgaaccggctcacggagagcacctaccggaatgttatggaacagttcaatcctgggctgcgaaatttaataaacctggggaaaaattatgagaaagctgtaaacgctatgatcctggcaggaaaagcctactacgatggagtggccaagatcggtgagattgccactgggtcccccgtgtcaactgaactgggacatgtcctcatagagatttcaagtacccacaagaaactcaacgagagtcttgatgaaaattttaaaaaattccacaaagagattatccatgagctggagaagaagatagaacttgacgtgaaatatatgaacgcaactctaaaaagataccaaacagaacacaagaataaattagagtctttggagaaatcccaagctgagttgaagaagatcagaaggaaaagccaaggaagccgaaacgcactcaaatatgaacacaaagaaattgagtatgtggagaccgttacttctcgtcagagtgaaatccagaaattcattgcagatggttgcaaagaggctctgcttgaagagaagaggcgcttctgctttctggttgataagcactgtggctttgcaaaccacatacattattatcacttacagtctgcagaactactgaattccaagctgcctcggtggcaggagacctgtgttgatgccatcaaagtgccagagaaaatcatgaatatgatcgaagaaataaagaccccagcctctacccccgtgtctggaactcctcaggcttcacccatgatcgagagaagcaatgtggttaggaaagattacgacaccctttctaaatgctcaccaaagatgccccccgctccttcaggcagagcatataccagtcccttgatcgatatgtttaataacccagccacggctgccccgaattcacaagggtaaataattcaacaggtacttccgaagatcccagtttacagcgatcagtttcggttgcaacgggactgaacatgatgaagaagcagaaagtgaagaccatcttcccgcacactgcgggctccaacaagaccttactcagctttg

SEQ ID NO: 227411 - DNA, 499 bp, Homo Sapiens
ccttaaaaagccaactttgtacaaaaaagttggtggcccgggtggttgctgccgaaatgggcaagttcatgaaacctgggaaggtggtgcttgtcctggctggacgctactccggacgcaaagctgtcatcgtgaagaacattgatgatggcacctcagatcgcccctacagccatgctctggtggctggaattgaccgctacccccgcaaagtgacagctgccatgggcaagaagaagatcgccaagagatcaaagataaaatcttttgtgaaagtgtataactacaatcacctaatgcccacaaggtactctgtggatatccccttggacaaaactgtcgtcaataaggatgtcttcagagatcctgctcttaaacgcaaggcccgacgggaggccaaggtcaagtttgaagagagatacaagacaggcaagaacaagtggttcttccagaaactgcggttttagatgctttgttttgatcattaaaaattataaag

SEQ ID NO: 227412 - DNA, 1289 bp, Homo Sapiens
actttgtacaaaaaagttggtgcagttctccgtgtgcggcctgctgcaggtgctggtggacctggccatcctggggcaggcctacgccttcgcccgccccccccagaagccggcgccccacgccgtgcaccccactggcaccaaggccctctgacagtggggaggacgaggatgtgggaccgccagccgtgggcactggtgggccctgacctccccgcggggagggtgggtgccgtggcccctgcaggtgtggcagagatggggcatgggcattggggtctccatcagcctctgtggggtgtctcagggtgggcagtgggggtggggctgggacgctgtttgtgctcagcggggacagccagggttgatctggccccgagggttttggatgtttttaggatgacataaaaagcaagtgttttccccatttcctcttatgaaacaccgtctgagcccaaggtacacattgggcggcctgcaggaacctgctccaggtggacacacgggccagcagccgcgaaccttgaagctggggtgaccgcaggagaccctgtaaggcctgtgagcggagccctcgaccccgtgacaccctggccagacaccctgcttggactggggtggcctctgctacccaggggtctggcacgggggagggctggggctttctctgcctggtacacacggaaaggcggctgtgcggacgcagggtcaccgtgctccgggttttctgacagttggtgtttcctgggcctttggagtggctgcgaggcctgaacgccttgtggatccgctgtgtccagcccggctgagcatcgccagggctagctcatgctgctcttgtcagcctctggttctcctcgagtccttggggacgtggcagatgccagcgaccatcagacaacgtggaggccctcatgggcaatggctgagggggccgggctgaggctgtgcacatgcagtctgcacgccactcttgggctctgctggcggagatccccttccttctgggtgcagactgcacctccggatgcagttttgatgtccatcttccaggagagagacggtctcgggtccagggagtggagggggctgcccctgccgtgcaggtcctggccgatggcgccttaccctgctgccctgggcttttggcctgaagcaaattcctgagtggggggtactgggggcctgccgcatcctgtcctgttccactgcccacccccgtgtgctggctccctcacttctggctgcagtgggagccgccagtctgacccttgtcaccgcacgctctg

SEQ ID NO: 227413 - DNA, 1277 bp, Homo Sapiens; identical to SEQ ID NO: 193913
  misc_feature (93)..(111): n is a, c, g, or t

SEQ ID NO: 227414 - DNA, 1159 bp, Homo Sapiens
tactccataaagaaaactcgggcaagaagaacaaagaggttggagagggaacgggagcctcttgggagagtcttagaccttgacaaaaaccaggtgggcagagtgcaccaggtcagccacatacgccagtaggttgatggccgtcaggatggccacagccagtcggcggtcccaggcacacacgtagtaggcatggctgcggctgcagcttacatctctcgagcgccgaggctggccgccatacttctcatcgaactggtagaggggccagagaacaagggcggtggcatagaggaggacagacagcaaggccagccccgacaggaagctggggaaggggatgggtagcacgttggtgcactcccccaggttcagcaggatggcgatggccgctaggatgaagcagatggcgtacaccgccacgcaccactccagggccggctggtgctggtacaggttggggtcgctgatgaacgcgaagatgatgcaggcaacgaaggtctccagcaccttcagcagcccgggtacggtggccatatagccagtgatctcgccgggccgggcccgggtccaggccacttcggtggcgtaagccacacacgcgatgcaggagaagaaggtggcggcgatggcgtggtcccgcgaacggccgtgggacaggaactggacataggtggtggggtagatgatggaggccgagaggcagaagagggccgcatagcaggcgaaggtgatggggaagttgcgccaagacagggggaagcgggcctggagcccgcacagctccacgatgaggatgatcagggtcacggagaagcagaagcaccaggtgaacatggaccagttgcccatggaccccgtccaggcgcccacgctagccaccagcgagaaggccacgcaggtagacaccagctgcagcaggcgaaggagacccaggggctgtgtcagggcccgaggggaccccacgatcatgggggaccccaggcccgaagatgacgtcgtggtggttgtgatggtggtgcgggttaccgtcactggcatggcagcggtcttagcagaggaatccacggagaaagatctggtggtggagacggattaagccacacttggaacaggctgtaagagcacctcaggcagccagtggcgactgcggccccaa

SEQ ID NO: 227415 - DNA, 806 bp, Homo Sapiens
actttgtacaaaaaagttggcgtgctcccgcccaactgttggccccacagggacaaggagaccagtcgcgacgagttcatcttctactccaagagactgatgcggctgctcatcgagcacgcgctctccttcctgccctttcaggactgcgtcgtacagaccccgcaggggcaggactatgcgggcaagtgctatgcggggaagcagatcaccggtgtgtccattctgcgcgccggtgaaaccatggagcccgcgctgcgcgctgtgtgcaaagacgtgcgcatcggcaccatcctcatccagaccaaccagcttaccggggagcccgagctccactacctgaggctgcccaaggacatcagcgatgaccacgtgatcctcatggactgcaccgtgtccacgggcgcggcggccatgatggcagtgcgcgtgctcctggaccacgacgtgcctgaggacaagatctttttgctgtcgctgctcatggcagagatgggcgtgcactcagtggcctatgcatttccgcgagtgagaatcatcaccacggcggtggacaagcgggtcaatgaccttttccgcatcatcccaggcattgggaactttggcgaccgctactttgggacaaacgcggtccccgatggcagtgacgaggaggaagtggcctacacgggttagctgcccagtgagccatcccgtccccaccaccctcctcctgcctcctgacccaggactgctgaatacaaagatgttaatttttaaaatgttactagtataatttattctatgcattttaaaaataaataaag

SEQ ID NO: 227416 - DNA, 918 bp, Homo Sapiens
  misc_feature (327)..(336): n is a, c, g, or t
  misc_feature (376)..(391): n is a, c, g, or t
  misc_feature (652)..(660): n is a, c, g, or t
  misc_feature (818)..(839): n is a, c, g, or t
ttgggagaggccctccccgtggaggcatggtgcagaaaccaggatttggagtgggaagggggcttgcgccacggcagtgaatcttcatggatcttcatgcagccatacaaaccctggttccaacagaatggtgaattttcgacagcctttggtatcttggagtatgaccccagtctgttataaactgcttaagtttgtataattttactttttttgtgtgttaatggtgtgtgctccctctccctctcttccctttcctgacctttagtctttcacttccaattttgtggaatgatattttaggaataacggacttttaaagaagcnnnnnnnnnngactgaatttccttgcttactttgcatatacagactggannnnnnnnnnnnnnnnacagccatttccccaaaggaatgtcttgcatattactgacatttggtatgtttcattcattggaatatttcttattttctacgtgtttgaaaagcctgtaagaaatacaggatttgataatattttgaaggcaggaaaaacccaaattgtttcttctttgagagtcatgactaccttctggtgtggagaaattgccattggaaaatttgacaattttgattctcactggtatgtttaaaaactgaataaaaggaatagaannnnnnnnngataaaggatcacaaaacaattctaaaacctaactgtttttaccattgaaatttaaattgtgataataggttttaaatgtctagaatgcaactgataggcttttcttgaactgttagtttttttgaagtagttttttcatgtttaatttgtatttgtnnnnnnnnnnnnnnnnnnnnnnttcccaaaacccagataacaaccagagcaaaactgttgtgccttctatttatctttgatttcagtcttggcaattgttt

SEQ ID NO: 227417 - DNA, 912 bp, Homo Sapiens
ttggatttaagattttattcatgtgcatggcatagaagatgaattcttccacttccaccatgagtgaagagcctgacgctctatcggtagttaaccagttacgggatctagcagcagatccgttaaacagaagagccatcgtccaggatcagggatgtctgcctggccttattttatttatggaccatcccaaccctccagtcgtccactccgctttgcttgctcttcgatacttggcagaatgccgtgcaaacagagaaaagatgaaaggagaactgggtatgatgttgagcttacaaaatgttatacagaaaactacaactccaggagaaacaaaacttctggcctctgaaatctatgacattcttcagtcctccaatatggcagatggtgatagttttaatgagatgaattcacgtcgaaggaaagctcaattttttctgggaactacaaacaaacgtgccaaaacagtggttttgcatatagatggccttgatgatacgtctcggagaaatctatgtgaagaggctttgttaaaaattaaaggtgttattagctttacttttcaaatggctgttcaaaggtgtgtggtgcgaatccgttcagatttgaaagctgaggctttggcatcagcaatagcatcaaccaaggttatgaaagctcagcaagttgtgaaaagtgaaagtggagaagagatgttggtcccattccaagatactcctgtggaagttgaacagaacacagagctacctgactacctgcctgaggatgagagtcccacaaaggaacaggacaaagcggtgtcccgggtcggctcacacccagaagggagctagctggcttagcacagctgcaactttttatccagatcattttattggtgacttcacttttgggctcaaggactgtgtg

SEQ ID NO: 227418 - DNA, 1283 bp, Homo Sapiens; identical to SEQ ID NO: 193917

SEQ ID NO: 227419 - DNA, 1213 bp, Homo Sapiens
gcagcagttcttgggcttctatccactcgtgctccctgtgctcaggtgcccacgtgtgccacagtgcccagggcacagcgccgtccccgagtcacggcccacaccccatggggattctcgacaccggagctgaaggccacaaggcgcccacagcgaggacgcacccgagccgtgacagtgagggcgttgggctccgtgaagaacaggtccccaccctggaagtcatcgttgaggtagaggagtccgctgtagtcccgataggtgtaggctgggggctcccgccagcactctcccgtgtcagggtccaggacgcagttgtctgcgtgcactgggtgactcaggtccatgcgctgctcttgctctccttctatggcgctgcggcacaccaggtgggtgaaggacagatgcaggggccgttccggggagaagtaggcctgggtcaaggtccgcacccgctcgctcacctccagaagcagcttagcaccctgactgcccactgtcccagcccgggccagctgagcagccttaagcaccgtgagcccctcgaagcgttcatggggggtgtgaggggagcggcgaccacgatagccagacctggctccagccccagctgcatccttagccagctgcagcagcaccccacactcggctggggtgagcagcccatccaacaccgcccgctccgacccattcagctgcctggaatcctgggtcaaggtcacaccctccaggagaaggacatccttccagtaggtcaagggctttggcttcacgggctcatggtcccaaggcctcttctcttgatcctctctgagcttttctctaagtgcctcagggatgagagctgcaggggtccaggggtcctgcgacagtccagaaaagcatcatcacccaccaaggtcagcccctggaatccctgacattagagctgaaatatctcattaaggttcttctgtttccagagaggaagacggaggtaggaaaagcccgggactcaatgtcaggagccctgggcagtggatcaaaaggatccttgaagctggtccccaggtgctccatggcatagtagagctgcctcttctcccccagggatcggaggatgaagcgctggatgtcctctctgggtccgaggccaggtctcggctctcccagctgggcctggtactggttcagagccctcttggcagcctcatcctccgggtagaagagccaa

SEQ ID NO: 227420 - DNA, 1406 bp, Homo Sapiens; identical to SEQ ID NO: 193919

SEQ ID NO: 227421 - DNA, 1000 bp, Homo Sapiens
  misc_feature (776)..(822): n is a, c, g, or t
  misc_feature (841)..(862): n is a, c, g, or t
actttgtacaaaaaagttgggtcccgtcagctgtcccagagcctgtgtcgcgcccgtgccggtagcgcccgtgccggtagcgccgctgccaccgctcaccatgggcccgggtcctcggctgctgctacctctcgtgctttgcgtggggctcggcgcacttgtgttttcttcgggggccgagggcttccgcaagcgaggcccctcggtgacggccaaggtcttctttgatgtgaggattggagacaaagatgttggcagaattgtgattggcctctttggaaaagttgtgcccaagacagtggaaaattttgttgctctagcaacaggagagaaaggatatggatataaaggaagcaagtttcatcgtgtcatcaaggatttcatgattcaaggaggtgacatcaccactggagatggcactgggggtgtgagcatctatggtgagacatttccagatgagaacttcaagctgaagcactatggcattgggtgggtcagcatggccaacgctgggcctgacaccaatggctctcagttctttatcaccttgaccaagcccacctggttggacggcaaacatgtggtgtttggaaaagtcattgatgggatgacagtggtgcactccatagagctccaagcaactgatgggcatgaccgtccactcaccaactgctcgatcatcaacagtggcaagatagacgtgaaaacgccttttgtggttgagatcgctgattggtgacacaactggcagaaaacaagatatgctttggcagggnnnnnnnnnnnnnnnnnnnnnnnnnnnnnnnnnnnnnnnnnnnnnnntgtctttcaattatttgcnnnnnnnnnnnnnnnnnnnnnngtattctatcccagatcacaggaaagttataaaaatcaaaccgtcaccctttagtttgcttgaactttagtaaaccacctgcttagggactttgaacttaaatatatccccttcctcaaatggtgctattttaaaact

SEQ ID NO: 227422 - DNA, 975 bp, Homo Sapiens; identical to SEQ ID NO: 193920
  misc_feature (139)..(160): n is a, c, g, or t
  misc_feature (179)..(223): n is a, c, g, or t

SEQ ID NO: 227423 - DNA, 1425 bp, Homo Sapiens
  misc_feature (393)..(467): n is a, c, g, or t
gaacttacatacttaaacatcgaattgctttaagtgtttggcattcactgttcccgtgcatgccagcagcttcttactgcaaacacctgagacttgctatagagcagctggactatgttccgcccacacacaggacagggagctgacaaccaaggaggggggcgggatcaatactccagctttcccccctccatttccctgtatctcagcagtatggagcttgttatcaatgagaacctgctcgctgactttaaattgcttttcttaccttctcagttcagtttctccgtacctcaattgatgatttctggtatgacctagcaaatacactgctttcactgaaatttcagtcttgcaatctgctttgggttccccaatctaagacagaaacannnnnnnnnnnnnnnnnnnnnnnnnnnnnnnnnnnnnnnnnnnnnnnnnnnnnnnnnnnnnnnnnnnnnnnnnnnctacaaacctctggatatacacgtaggaagcttttggtatttccactagtgaaactgctcagttgaagggtatgtggatcttcatctttaataaatattaccaacatgtgaaaagcccgacaatgtcaaggactggcaagagtgccacatgtgatgggtgtggaatggcagctcactgtagcaggtgctggggactcagttggggtcttggagaagcacttagttatagcaagaatgtctcataaatggtatctgatagagacaagagtagtggggaataaaaactagttgcttagaaataattatagatctaaagtcaacaaaaaaccttttctaatgtaaaaatacatacttttttcagagggagggggaacaacttaaactagaaaacaccttcatattaatcattcttctcatatacttcaaatttgtacttaatgcctttctcctcctggacatcagagagaacacctgggtattctggcagaagtttatatttctccaaatcaatttctggaaaaaacgtgtcactttcaaagtcttgcatgatccttgtcacaaatagtttaagatggcctgggtgattcatggcttccttataaacagaactgccaccaactatccagaccatgtctactttatttgctaattctggttgttcagtaagttttaaggcatcatctagacttctggaaagaaaatgagctccttgtggaggttccttgagttctctgctgagaactaaattaattctaccctttaaaggtcgattcttctcaggaatggagaaccaggtcttcttacccataatcaccagattctgtttaccttctactgaagaggttgtggtcattctctggaaatatctgaattcattcctgagcggtggccagggcaggtccccgttcttgccgatgcccatgttctgggacacagcgacgatgcagtttagcgccaa

SEQ ID NO: 227424 - DNA, 1642 bp, Homo Sapiens
ttggcagcagcagacgctctgtcccgcccgggcagctctgcgaggcagcggctggagagggaaccatggggactgtgcacgcccggagtttggagcctcttccatcaagtggacctgattttggaggattaggagaagaagctgaatttgttgaagttgagcctgaagctaaacaggaaattcttgaaaacaaagatgtggttgttcaacatgttcattttgatggacttggaaggactaaagatgatatcatcatttgtgaaattggagatgttttcaaggccaaaaacctaattgaggtaatgcggaaatctcatgaagcccgtgaaaaattgctccgtcttggaatttttagacaagtggatgttttgattgacacatgtcaaggtgatgacgcacttccaaatgggttagacgttacctttgaagtaactgaattgaggagattaacgggcagttataacaccatggttgggaacaatgaaggcagtatggtacttggcctcaagcttcctaatcttcttggtcgtgcagaaaaggtgacctttcagttttcctatggaacaaaagaaacttcgtatggcctgtccttcttcaaaccacggcccggaaacttcgaaagaaatttctctgtaaacttatataaagttactggacagttcccttggagctcactgcgggagacggacagaggaatgtcagctgagtacagttttcccatatggaagaccagccacactgtcaagtgggaaggcgtatggcgagaactgggctgcctctcaaggacggcgtcatttgctgttcgaaaagaaagcggacattcactgaaatcatctctttcgcacgccatggtcatcgattctcggaattcttccatcttaccaaggagaggtgctttgctgaaagttaaccaggaactggcaggctacactggcggggatgtgagcttcatcaaagaagattttgaacttcagttgaacaagcaactcatatttgattcagttttttcagcgtctttctggggcggaatgttggtacccattggtgataagccgtcaagcattgctgataggttttacctcgggggacccacaagcgtccgcggattcagcatgcacagcatcgggccacagagcgaaggagactacctaggtggagaagcgtactgggccggcggcctgcacctctacaccccattacctttccggccaggccagggtggctttggagaacttttccgaacacacttctttctcaacgcaggaaacctctgcaacctcaactatggggagggccccaaagctcatattcgtaagctggctgagtgcatccgctggtcgtacggggccgggattgtcctcaggcttggcaacatcgctcggttggaacttaattactgcgtccccatgggagtacagacaggtgacagtgagtgacctgcaggaagaaggcaagaatgccatcaactcaccgatgtcccccgccctggcggatgttcaccctgaagacacccagctcgaggagaacgaggagcgcacgatgattgaccccacttccacgaagaccccaagttcaaggaactggtcaaggtcctcctcgactggattaatgacgtgctggtggaggagaggatcattgtgaa

SEQ ID NO: 227425 - DNA, 550 bp, Homo Sapiens; identical to SEQ ID NO: 193921
  misc_feature (472)..(489): n is a, c, g, or t

SEQ ID NO: 227426 - DNA, 830 bp, Homo Sapiens; identical to SEQ ID NO: 193922

SEQ ID NO: 227427 - DNA, 769 bp, Homo Sapiens; identical to SEQ ID NO: 193924
  misc_feature (132)..(183): n is a, c, g, or t
  misc_feature (697)..(711): n is a, c, g, or t

SEQ ID NO: 227428 - DNA, 767 bp, Homo Sapiens; identical to SEQ ID NO: 193925
  misc_feature (132)..(183): n is a, c, g, or t
  misc_feature (697)..(710): n is a, c, g, or t

SEQ ID NO: 227429 - DNA, 937 bp, Homo Sapiens
gaaaggatccaagcaccagcttgagaagggaggcaacagcagctaaaggggtgggaggaggaggagacagaagcatgtgctgcaggcgcatgtgtgtatgtacttacatgtgtgaacacatataaagtgtcaggtttacagaccctggctcaaggacagtctaggatgggaaaggaggtagggcgagaagaagcacatattttctccctggtgcttcagcctcaccctatccaagggacagacatatggggtgtgagaaacccatccccaggtcccagccttcaggactggagtccttttgagtctggtggagtcacagatccagtctttgggggacactgggtctgtctccttttgaaagccctggaaaggtgggaggtaagaagtaaagggagacaggtccctgctagaagaacttgacgcctcggccatcgctgacagtgatgatctcggccttgtgctcctgctgtagggcctgcagagcccgcagtagagtggcttcatccagcccgtggaactcctcatcctctgtgtcttccccattagtcagttcatacagggtaaagacggagttgttctggccactcctggaaacccactgatagatgagtttcccccattcttctggcctccgccacatgatcaggaagctggacttgctcttatccaaccactcgaggttccctttcttcctcagttcctctaatacaatctggatcgactccacaggaagctttcgctgtagcttgacgttgttgaagagcgggctctcctgagcttccatcaccgtcatgctggactgtttgtgcaggcggcagaaggacaggaccagcgagcaccaggcggccagctgcttctgccgagtgtccacattcggttgtaacgtaaagaagggtgggaagcgatactgccacggccactcgaaactcatcgccaa

SEQ ID NO: 227430 - DNA, 800 bp, Homo Sapiens
gaacaggccaagataggagggagagaaagctgctgacgccccccattagcctggtgatccctatttggtctcccacattaggcactctcccccagcatgtacatagagttgttttctcctttatgcaagcaaggcctgaccccaaagtcctttagccctagtttctgtatcccctgtctcaggggctccaacacccacctccctcctcctgaggccccctagacttgatccacagggcatgctgacaagcaggctgctcggctgggcctcagaagcctttctccaagagccaggctttaagctcctggtcaaagtagcccttgatccgtagggtacctgtcacctcattgacctgggtgacaggtgtcttccccagcagcgggctcagaaaatcttccacgtctttctgcagggcccagatgtccccttccactttccggatcacagtcatctgccggttgccatgcgtgatgtccttgtagacggggatgttgtgcatccgagagcgtcgtacaaagtaaggcaggttgggtggggggtctctgggaggctgccagccactaggggtaggataatgttcatgctttgggggatctgggatcctggtagccggtaacaggcgctccacaaactgatattcatccacagactccacaaacctggggtaatctggagggccctgggtctggctcaacagccgtagcccgcagccccgctggacaccggttctccatccccgcagcgtagcccggaacatggtagctgccatctttacctgctacgccagccttctgtgccaa

SEQ ID NO: 227431 - DNA, 739 bp, Homo Sapiens
ttggcacgtaacggagtggccaacggcctgcagagcaacatgcccaagttttattgtgactactgcgatacatacctcacccatgactctccatctgtgagaaagacacactgcagtggaaggaaacacaaagagaatgtgaaagactattatcagaaatggatggaagagcaggctcagagcctgattgacaaaacaacggctgcatttcaacaaggaaagatacctcctactccattctctgctcctcctcctgcaggggcgatgataccacctccccccagccttccgggtcctcctcgccctggtatgatgccagcaccccatatggggggccctcccatgatgccaatgatgggccctcctcctcctgggatgatgccagtgggacctgctcctggaatgaggccgcccatgggaggccatatgccaatgatgcctgggcccccaatgatgagacctcctgcccgtcccatgatggtgcccactcggcccggaatgactcgaccagacagataaggatagaggggaggccttattgtatcggttttatattacctgttctgcttcaccaggagatcatgctgctgtgatactgagttttctaaacagcataaggaagacttgctcccctgtcctatgaaagagaatagttttggaggggagaagtgggacaaaaaagatgcagttttcctttgtattgggaaatgtgaaaataaaattgtcaactctttcagtt

SEQ ID NO: 227432 - DNA, 992 bp, Homo Sapiens
tttgtacaaaaaagttgggtcttgtacatttgccttgccgtcagagttggaacgtagttatcagcgattcacagctttctacgccagccgccacagtggccgaaaattgacgtggttatatcagttgtctaaaggagaattggtaactaactgcttcaaaaacagatatactttgcaggcgtcgacattccagatggctatcctgcttcagtacaacacggaagatgcctacactgtgcagcagctgaccgacagcactcaaattaaaatggacattttggcgcaagttttacagattttattaaagtcgaagctattggtcttggaagatgaaaatgcaaatgttgatgaggtggaattgaagccagataccttaataaaattatatcttggttataaaaataagaaattaagggttaacatcaatgtgccaatgaaaaccgaacagaagcaggaacaagaaaccacacacaaaaacatcgaggaagaccgcaaactactgattcaggcggccatcgtgagaatcatgaagatgaggaaggttctgaaacaccagcagttacttggcgaggtcctcactcagctgtcctccaggttcaaacctcgagtccctgtgatcaagaaatgcattgacattctaattgagaaagaatatttggagcgagtggatggtgaaaaggacacctacagttacttggcttaacccttctggaagggtctgactgtgtgacccgcagcaaatagttcatgttggaaagaatgaaaacaactcaagttcatagcagccagcctgccgccattggacctcccttttaaaactgagaccaagactcccatcagctggtctcggatttacatcggaactgctcaagattgatacatttcaagtctgtaaatacggacaccaacgccatttaccctaatttaagaacagcggggactgaccctccgtgccgagggctgcatgctaccgcactaagtcaatacatggg

SEQ ID NO: 227433 - DNA, 762 bp, Homo Sapiens
actttgtacaaaaaagttggcagtactgatgaacctgtataaacgagtcttccccaaatggacttatgatccatatgtaccagaaccagtaccctggctgaaaagtgagatttcttcaacagtgcctcaagggggcatggagtaatggattcaaagagattctgtcttaccggtgccagtcagtactccagggatgggaggcacaagttgtgattgggcaaagtttattttctatgtcagcctgtcagtccactgccccattttgcaagacttttttttagccttgacaaaatgtctcagttaagtataaaagtttttccactacttagtccaaaaaaaactattaaatcttaatgaaatagccactctccattaagaatctgataactaagagttgacaatactaggaaacaaaatgtcttcagtatctaaagacactgaattcccaccatttccttttctgtaaattaaacagaaacagactgataagaagctggcctttcagcctgcttcacccaagttatggaggaggttaagtctacatttccaccactgagcacaatacaaatgttctttacttctggggaaacagtttgaaaatgttgagacagcacagcagccactccaacaccagctgtaggttcaatgagtagtttcatcctctcccacaccagctgggttgcacactgttgatatggaagggagtaggaattagtgaaaggggagtctagttggtttacctataaagtttcagatgagaat

SEQ ID NO: 227434 - DNA, 1169 bp, Homo Sapiens; identical to SEQ ID NO: 193928

SEQ ID NO: 227435 - DNA, 528 bp, Homo Sapiens
ctttgtacaaaaaagttgggttggtgtgtcctcggtttctcggctgctgggtcggtcccgcccacagctggggcggcctatgtcgagtggcgcccatggcgaagagggctcagctcgcatgtggaagactctcaccttcttcgtcgcgctccccggggtggcagtcagcatgctgaatgtgtacctgaagtcgcaccacggagagcacgagagacccgagttcatcgcctacccccatctccgcatcaggaccaagccgtttccctggggagatggtaaccatactctattccataaccctcatgtgaatccacttccaactggctacgaatatgaataaagagaatctggaccactacccgggcaccagggaccacagcactggtttggaccgttactctgcacatggaccagaaaaagtatatgggaccttaagctcaccttctttacttgtatcaaatgatgactggtatactggtctcccatccctttgcttgtggcaggagatggcttaaataaataacttaa

SEQ ID NO: 227436 - DNA, 951 bp, Homo Sapiens
gtacaaaaaagttggctgaacaggaccgtggaaaagtactgccactatgttgctgggctggtcggaattggcctttcccgtcttttctcagcctcagagtttgaagaccccttagttggtgaagacacagaacgtgccaactctatgggcctgtttctgcagaaaacaaacatcatccgtgactatctggaagaccagcaaggaggaagagagttctggcctcaagaggtgatggccattgccactttggctgcctgttataataaccagcaggtgttcaaaggggcagtgaagattcggaaagggcaagcagtgaccctgattatggatgccaccaatatgccagctgtcaaagccatcatatatcagtatatgggagatttatcatagaatccccgactcagacccatcttctagcaaaacaaggcagatcatctccaccatccggacgcagaatcttcccaactgtcagctgatttcccgaagccactactcccccatctacctgtcgtttgtcatgcttttggctgccctgagctggcagtacctgaccactctctcccaggtaacagaagactatgttcagactggagaacactgatcccaaatttgtccatagctgaagtccaccataaagtggatttactttttttctttaaggatggatgttgtgttctctttatttttttcctaatactttaatccctaaaagaacgctgtgtggctgggacctttaggaaagtgaaatgcaggtgagaagaacctaaacatgaaaggaaagggtgcctcatcccagcaacctgtccttgtgggtgatgatcactgtgctgcttgtggctcatggctgagcattcagtgccacggtttatgtgaagtcgctgcatatgtgactgtcatgagatcctacttagtatgatcctggctagaatgataattaaaagtatttaattt

SEQ ID NO: 227437 - DNA, 906 bp, Homo Sapiens; identical to SEQ ID NO: 193929

SEQ ID NO: 227438 - DNA, 1593 bp, Homo Sapiens
ttgggcaaactgcgcggaggcacagaggccggggagagcgttctgggtccgagggtccaggtaggggttgagccaccatctgaccgcaagctgcgtcgtgtcgccggttctgcaggcaccatgagccaggacaccgaggtggatatgaaggaggtggagctgaatgagttagagcccgagaagcagccgatgaacgcggcgtctggggcggccatgtccctggcgggagccgagaagaatggtctggtgaagatcaaggtggcggaagacgaggcggaggcggcagccgcggctaagttcacgggcctgtccaaggaggagctgctgaaggtggcaggcagccccggctgggtacgcacccgctgggcactgctgctgctcttctggctcggctggctcggcatgcttgctggtgccgtggtcataatcgtgcgagcgccgcgttgtcgcgagctaccggcgcagaagtggtggcacacgggcgccctctaccgcatcggcgaccttcaggccttccagggccacggcgcgggcaacctggcgggtctgaaggggcgtctcgattacctgagctctctgaaggtgaagggccttgtgctgggtccaattcacaagaaccagaaggatgatgtcgctcagactgacttgctgcagatcgaccccaattttggctccaaggaagattttgacagtctcttgcaatcggctaaaaaaaagagcatccgtgtcattctggaccttactcccaactaccggggtgagaactcgtggttctccactcaggttgacactgtggccaccaaggtgaaggatgctctggagttttggctgcaagctggcgtggatgggttccaggttcgggacatagagaatctgaaggatgcatcctcattcttggctgagtggcaaaatatcaccaagggcttcagtgaagacaggctcttgattgcggggactaactcctccgaccttcagcagatcctgagcctactcgaatccaacaaagacttgctgttgactagctcatacctgtctgattctggttctactggggagcatacaaaatccctagtcacacagtatttgaatgccactggcaatcgctggtgcagctggagtttgtctcaggcaaggctcctgacttccttcttgccggctcaacttctccgactctaccagctgatgctcttcaccctgccagggacccctgttttcagctacggggatgagattggcctggatgcagctgcccttcctggacagcctatggaggctccagtcatgctgtgggatgagtccagcttccctgacatcccaggggctgtaagtgccaacatgactgtgaagggccagagtgaagaccctggctccctcctttccttgttccggcggctgagtgaccagcggagtaaggagcgctccctactgcatggggacttccacgcgttctccgctgggcctggactcttctcctatatccgccactgggaccagaatgagcgttttctggtagtgcttaactttgggggatgtggcctctcggctggactgcagcctccgacctgcctgccagcgccagcctgccagccaaag

SEQ ID NO: 227439 - DNA, 886 bp, Homo Sapiens; identical to SEQ ID NO: 193930
  misc_feature (714)..(722): n is a, c, g, or t

SEQ ID NO: 227440 - DNA, 915 bp, Homo Sapiens
aactttgtacaaaaaagttggcacggggctgccctcccctgcgcactcccctcgctgcccgggcccggagcgcagcgcggccgcacagattcacaatgttgaaagcccttttcctaactatgctgactctggcgctggtcaagtcacaggacaccgaagaaaccatcacgtacacgcaatgcactgacggatatgagtgggatcctgtgagacagcaatgcaaagatattgatgaatgtgacattgtcccagacgcttgtaaaggtggaatgaagtgtgtcaaccactatggaggatacctctgccttccgaaaacagcccagattattgtcaataatgaacagcctcagcaggaaacacaaccagcagaaggaacctcaggggcaaccaccggggttgtagctgccagcagcatggcaaccagtggagtgttgcccgggggtggttttgtggccagtgctgctgcagtcgcaggccctgaaatgcagactggccgaaataactttgtcatccggcggaacccagctgaccctcagcgcattccctccaacccttcccaccgtatccagtgtgcagcaggctacgagcaaagtgaacacaacgtgtgccaagacatagacgagtgcactgcagggacgcacaactgtagagcagaccaagtgtgcatcaatttacggggatcctttgcatgtcagtgccctcctggatatcagaagcgaggggagcagtgcgtagacatagatgaatgtaccatccctccatattgccaccaaagatgcgtgaatacaccaaggctcattttattgccagtgcagtcctgggtttcaattggcagcaaacaactatacctgcgtagatataaatgaatgtgatgccagcaatcaatgtgctcagcagtgctacaacatttcttgg

SEQ ID NO: 227441 - DNA, 441 bp, Homo Sapiens; identical to SEQ ID NO: 193932

SEQ ID NO: 227442 - DNA, 917 bp, Homo Sapiens
actttgtacaaaaaagttgggttagtgcaggtcctgaaacgcgggctgcagcagatcaccggccacggcggtctccgaggctatctacgggtttttttcaggacaaatgatgcgaaggttggtacattagtgggggaagacaaatatggaaacaaatactatgaagacaacaagcaattttttggccgtcaccgatgggttgtatatactactgaaatgaatggcaaaaacacattctgggatgtggatggaagcatggtgcctcctgaatggcatcgttggcttcacagtatgactgatgatcctccaacaacaaaaccacttactgctcgtaaattcatttggacgaaccataaattcaacgtgactggcaccccagaacaatatgtaccttattctaccactagaaagaagattcaggagtggatcccaccttcaacaccttacaagtaaagacaatgaagaacagttgaaacatgcaaaatatggagcttttcatgtaattactcttttactgtttaccattcactataattcacaattaaaattgtgtgactaaacaatgtctttcgtgcctttttgcccttcactttgttgttttccaactgcaaaatagatgcttccaaacatggtgattgaagtagacttgtattggggtagctgcctggtttacagttcccttttctggaaacagcctctgtggtcctgtttgtgctttgggaccgtaccttactaccatagctcattatatgggaagacctaagccaagccagattttctcatgggaatttggaacttgaatggagagacacgaaactgaaagtcatcaaaactgggtggcttttattgacgctctctaagaggttatcagagatatcgtatttcctgagtctgggttctttaatggttcattttaa

SEQ ID NO: 227443 - DNA, 575 bp, Homo Sapiens
cctgttcgttgcacaaattgatgagcatgctttcctaaaaagccaactttgtacaaaaaagttgggtcttctgacagctggtgcgcctgcccgggaacatcctcctggactcaatcatggcttgtggtctggtcgccagcaacctgaatctcaaacctggagagtgccttcgagtgcgaggcgaggtggctcctgacgctaagagcttcgtgctgaacctgggcaaagacagcaacaacctgtgcctgcacttcaaccctcgcttcaacgcccacggcgacgccaacaccatcgtgtgcaacagcaaggacggcggggcctgggggaccgagcagcgggaggctgtctttcccttccagcctggaagtgttgcataggtgtgcatcaccttcgaccaggccaacctgaccgtcaagctgccagatggatacgaattcaagttccccaaccgcctcaacctggaggccatcaactacatggcagctgacggtgacttcaagatcaaatgtgtggcctttgactgaaatcagccagcccatggcccccaataaaggcagctgcctctgctccctctg

SEQ ID NO: 227444 - DNA, 529 bp, Homo Sapiens
tgtaatgaatgatacccaatgtgccttttctagaaaaagttgccaaatatatctcttggatctgctgagcatgtcctctgatacataaggcaagcatgtttctacacccagtgttgatgccagttagttttcagaatccaaactgatggcagctactggtccttgggactgacatcctctgggaatataaccttctcttgggctgagatgctgctgccagctctaaaacagcactctgttctcaaaacctcatggcaggctcctggctccaatactcagctgccaaacatgatgctgattcttcacgaatttgcaacctcgtggctaccccgtcttcagcactctgcagtgggtacgcaatcttaaagagggagtaaggacaggaattcagggcagggctctggcagttacggtcaactaagttgtagaggtttcagcgaccagttctctcgggtttgcacacccccactgtgggccggggaaccgggtcccggccttcgcagactccaggctctggcagatgtgccaa

SEQ ID NO: 227445 - DNA, 474 bp, Homo Sapiens; identical to SEQ ID NO: 193934

SEQ ID NO: 227446 - DNA, 421 bp, Homo Sapiens; identical to SEQ ID NO: 193935

SEQ ID NO: 227447 - DNA, 716 bp, Homo Sapiens
tttgtacaaaaaagttggcttttatctccattagagaaaaatcaggaaaaatagcttttgacaggggaaaaaactcaataactagctatttttgacctcctgatcaggaactttagttgaagcgtaaatctaaagaaacattttctctgaaatatattattaagggcaatggagataaattaatagtagatgtggttcccagaaaatataatcaaaattcaaagattttttttgtttctgtaactggaactaaatcaaatgattactagtgttaatagtagataacttgtttttattgttggtgcatattagtataactgtggggtaggtcggggagagggtaagggaatagatcactcagatgtattttagataagctatttagcctttgatggaatcataaatacagtgaatacaatcctttgcattgttaaggaggttttttgtttttaaatggtgggtcaaggagctagtttacaggcttactgtgatttaagcaaatgtgaaaagtgaaaccttaattttatcaaaagaaatttctgtaaatggtatgtctccttagaatacccaaatcataattttatttgtacacactgttaggggctcatctcatgtaggcagagtataaagtattaccttttggaattaaaagccactgactgttataaagtataacaacacacatcaggttttaaaaagccttgaatggcccttgt

SEQ ID NO: 227448 - DNA, 950 bp, Homo Sapiens
gggaagtcggggttctggaattgctgcatgagttgccacgcaggccctgacatcacatagtagatcgtcggcctctggaagccattgaacgtagaggcagcagcaacagtgtaagcgcccatgttttcaaagagcatccaatcacccacatgcatttcaggcaggtcacagcgctcaacaatccgatcgaggccatcacatgttggtccccatatgctggatgaataatacttctcatctggtttaggtctcttttgcagaaggggctttacatgtgcgtggtcatagagtatgcaattaaatgatccatagacgccatcattcacataatacataaaggtctgctcactcgactcatcttcgtcatcagagcccgtctgttcctttaatacaattttcttggcaatgatattaactgcaagcgtgaaagctgatgcaacatagtatctgccgggctcagctatgattctcactccagagtctgacggaaagtatttgtccaacgctgggttgattacgccggtgatctcttcaaatttaagtttcacatcctcagatccaggaaagccaccgccaatatcaagcagatacatgctgaaaccaacctcagcccccatgtcaaaaacacagcgggcatcagagattgcctgcacgaaggtctcaggatcggtacagccgcttcctacatggaagctgacaccaacaacatcgatatttagctctttcgcccgttccaaaaggagcctgctggttctgagcgtggcaccgaatttcacactgagacgacagactgctttggaatcatcagtggcaatccgcaaaaccaactttgctttgggatgtgctctggcaactttcatcaactcaacttcactatcaaaagtcatcatctggactccattattagcagcttttcaaagatttgagatacccaacttttttgtacaaag

SEQ ID NO: 227449 - DNA, 1111 bp, Homo Sapiens
gagcaatgcttttttcataatagccaactttgtacaaaaaagttggctcacgttgcggccttcctcgcgtcacagccgggatgaagccgatcctactgcagggccatgagcggtccattacgcagattaagtataaccgcgaaggagacctcctctttactgtggccaaggaccctatcgtcaatgtatggtactctgtgaatggtgagaggctgggcacctacatgggccataccggagctgtgtggtgtgtggacgctgactgggacaccaagcatgtcctcactggctcagctgacaacagctgtcgtctctgggactgtgaaacaggaaagcagctggcccttctcaagaccaattcggctgtccggacctgcggttttgactttgggggcaacatcatcatgttctccacggacaagcagatgggctaccagtgctttgtgagcttttttgacctgcgggatccgagccagattgacaacaatgagccctacatgaagatcccttgcaatgactctaaaatcaccagtgctgtttggggacccctgggggagtgcatcatcgctggccatgagagtggagagctcaaccagtatagtgccaagtctggagaggtgttggtgaatgttaaggagcactcccggcagatcaacgacatccagttatccagggacatgaccatgtttgtgaccgcgtccaaggacaacacagccaagctttttgactccacaactcttgaacatcagaagactttccggacagaacgtcctgtcaactcagctgccctctcccccaactatgaccatgtggtcctgggcggtggtcaggaagccatggatgtaaccacaacctccaccaggattggcaagtttgaggccaggttcttccatttggcctttgaagaagagtttggaagagtcaagggtcactttggacctatcaacagtgttgccttccatcctgatggcaagagctacagcagcggcggcgaagatggttacgtccgtatccattacttcgacccacagtacttcgaatttgagtttgaggcttaagaagctggatctcctgcccgggcgtggtgggctcatgcctgtatccccaccac

SEQ ID NO: 227450 - DNA, 1064 bp, Homo Sapiens
actttgtacaaaaaagttggcgtgccccgagctctccgcctccccccgcccgccagccgaggcagctcgagcccagtccgcggccccagcagcagcgccgagagcagccccagtagcagcgccatggccgggtggaacgcctacatcgacaacctcatggcggacgggacctgtcaggacgcggccatcgtgggctacaaggactcgccctccgtctgggccgccgtccccgggaaaacgttcgtcaacatcacgccagctgaggtgggtgtcctggttggcaaagaccggtcaagtttttacgtgaatgggctgacacttgggggccagaaatgttcggtgatccgggactcactgctgcaggatggggaatttagcatggatcttcgtaccaagagcaccggtggggcccccaccttcaatgtcactgtcaccaagactgacaagacgctagtcctgctgatgggcaaagaaggtgtccacggtggtttgatcaacaagaaatgttatgaaatggcctcccaccttcggcgttcccagtactgacctcgtctgtcccttccccttcaccgctccccacagctttgcacccctttcctccccatacacacacaaaccattttattttttgggccattaccccataccccttattgctgccaaaaccacatgggctgggggccagggctggatggacagacacctccccccacccatatccctcccgtgtgtggctggaaaacttttttgttttgatggatttcttatgaataaaaaagattctactaaaaaaaatgaataactgtacatatgtgggcatattgtttgaatctgtattctttcactttgatatatttatgaatacttacaccattactactgttttaaaattactgtagctttaaaatcaggtttgaaatctagcagagtaagtcctccaacttattgcttcttcaagaccgacttgcttattctaggttctttgattttcaaatacattttgaaactagctttcaaatttctctaaaatctcctactagaaatattaatcagaattgtgccaa

SEQ ID NO: 227451 - DNA, 882 bp, Homo Sapiens
ggtttctttacagaattcctttcttcacgttttcttcggcggattagctgttcgaggtggagtgacaggacgtccagaattcagtccaccatactggtatttagctttcttttcagatggtttcaatatctgaaatgaacacatcaaagtttcatccacactcatcattccaccagcattatcaaactcgccacagtaatttggggctgaaaataaggttaccaactgtcgtttagcaaaaaattcatatccatcttccaccacctgatgagctcgacaaatcaaatctaaatcatgacgattcagaaatttactgactacatcagctccaaaagtaaaggaaacaccacgatcattttctccccagccttgcacatccttatctggatcagaccatagcaaatcacagagcaaacctgtatcagggacatcagtaggtctcataattctccgaatctgctccatagattgcaggtctggtgacaatcctccatgacaacagaagatcttctcatccacaatggctgctataggcagacagttaaaacaatcagtgaaggtcttccacaatttaatattaaatcttcgtttgcattcatcatagaatccataaatgcgattgatgctagcacactcatggtttcctcttaagagaaagaagttctctggatatttgattttataagccaatagcaaacaaatggtttccaaagactgctttcctctgtccacataatctcctaagaaaagatagttggcttctggtgggaaacctccatattcaaataatctcagtaaatctgtatactgtccatgaatatctccacaaattttcagcggtgcttccaattccaaaagaataggctggctgagcaaagccaa

SEQ ID NO: 227452 - DNA, 1043 bp, Homo Sapiens
ttggctttctttctcacaggcataagacacaaattatatattgttatgaagcactttttaccaacggtcagtttttacattttatagctgcgtgcgaaaggcttccagatgggagacccatctctcttgtgctccagacttcatcacaggctgctttttatcaaaaaggggaaaactcatgcctttcctttttaaaaaatgcttttttgtatttgtccatacgtcactatacatctgagctttataagcgcccgggaggaacaatgagcttggtggacacatttcattgcagtgttgctccattcctagcttgggaagcttccgcttagaggtcctggcgcctcggcacagctgccacgggctctcctgggcttatggccggtcacagcctcagtgtgactccacagtggcccctgtagccgggcaagcaggagcaggtctctctgcatctgttctctgaggaactcaagtttggttgccagaaaaatgtgcttcattcccccctggttaatttttacacaccctaggaaacatttccaagatcctgtgatggcgagacaaatgatccttaaagaaggtgtggggtctttcccaacctgaggatttctgaaaggttcacaggttcaatatttaatgcttcagaagcatgtgaggttcccaacactgtcagcaaaaaccttaggagaaaacttaaaaatatatgaatacatgcgcaatacacagctacagacacacattctgttgacaagggaaaaccttcaaagcatgtttctttccctcaccacaacagaacatgcagtactaaagcaatatatttgtgattccccatgtaattcttcaatgttaaacagtgcagtcctctttcaaagctaagatgaccatgcgccctttcctctgtacatatacccttaagaacgccccctccacacactgccccccagtatatgccgcattgtactgctgtgttatatgctatgtacatgtcagaaccattaggcatttgcatgcaaggttcatatccttctaagatggaaagtaataaa

SEQ ID NO: 227453 - DNA, 847 bp, Homo Sapiens; identical to SEQ ID NO: 193939

SEQ ID NO: 227454 - DNA, 924 bp, Homo Sapiens
tgtacaaaaaagttggagctaaaatgtccgatatgttgaagcagacaggaaggccggagatggttgttggttggtatcacagtcaccctggctttggttgttggctttctggtgtggatatcaacactcagcagagctttgaagccttgtcggagagagctgtggcagtggttgtggatcccattcagagtgtaaaaggaaaggttgttattgatgccttcagattgatcaatgctaatatgatggtcttaggacatgaaccaagacaaacaacttcgaatctgggtcacttaaacaagccatctatccaggcattaattcatggactaaacagacattattactccattactattaactatcggaaaaatgaactggaacagaagatgttgctaaatttgcataagaagagttggatggaaggtttgacacttcaggactacagtgaacattgtaaacacaatgaatcagtggtaaaagagatgttggaattagccaagaattacaataaggctgtagaagaagaagataagatgacacctgaacagctggcaataaagaatgttggcaagcaggaccccaaacgtcatttggaggaacatgtggatgtacttatgacctcaaatattgtccagtgtttagcagctatgttggatactgtcgtatttaaataaagcaacgaaaaacgctattaatgatgccttcagtgtatattcctctgttgttcctaatgctcaaaatcaagggacctctgaaggtgtacttggctaaatgtaagacatctggcatcatttgcagcactgtaacaccttcagtctcagttgtgcaattacttctgtttctttagtcaaggtctttgcaggattctaaagttatacatgaatacatcaaagtggacaaatttttgttaagatcccacttata

SEQ ID NO: 227455 - DNA, 937 bp, Homo Sapiens; identical to SEQ ID NO: 193940

SEQ ID NO: 227456 - DNA, 979 bp, Homo Sapiens; identical to SEQ ID NO: 193941

SEQ ID NO: 227457 - DNA, 924 bp, Homo Sapiens
ttggatccatcacacccaactacagtgtttccaggcttatttttgtgagacacatgggtggtatcctggcagtggccaacatcagaggaggtggcgaatatggagagacgtggcataaaggtggtatcttggccaacaaacaaaactgctttgatgactttcagtgtgctgctgagtatctgatcaaggaaggttacacatctcccaagaggctgactattaatggaggttcaaatggaggcctcttagtggctgcttgtgcaaatcagagacctgacctctttggttgtgttattgcccaagttggagtaatggacatgctgaagtttcataaatataccatcggccatgcttggaccactgattatgggtgctcggacagcaaacaacactttgaatggcttgtcaaatactctccattgcataatgtgaagttaccagaagcagatgacatccagtacccgtccatgctgctcctcactgctgaccatgatgaccgcgtggtcccgcttcactccctgaagttcattgccacccttcagtacatcgtgggccgcagcaggaagcaaagcaaccccctgcttatccacgtggacaccaaggcgggccacggggcggggaagcccacagccaaagtgatagaggaagtctcagacatgtttgcgttcatcgcgcggtgcctgaacgtcgactggattccataaacagttttcgtgcttcctcctgacagcgacagaaaacctcaagggctttcccacgttgacaccaagaaaccactgggcataatgcttccccacgggaacattattcctgcactcacaggctacagttgaacagaactgccggggaattttatcttttttaagcttctcctttttagcaaggccttggtgtttctttttccaccctgttctagcacatgtg

SEQ ID NO: 227458 - DNA, 795 bp, Homo Sapiens
actttgtacaaaaaagttggcaagatgataccttcttagtgacttcctcatcccggtccagacccagcaccccatacggaagggtctgcatcacaagatcctcctggccaacttcttggcccagacagaggccctgatgaggggaaaatcgacggaggaggcccgaaaggagctccaggctgcgggcaagagtccagaggaccttgagaggctgctgccacataaggtctttgaaggaaatcgcccaaccaactctattgtgttcaccaagctcacaccattcatgcttggagccttggtcgccatgtatgagcacaagatcttcgttcagggcatcatctgggacatcaacagctttgaccagtggggagtggagctgggaaagcagctggctaagaaaatagagcctgagcttgatggcagtgctcaagtgacctctcacgacgcttctaccaatgggctcatcaacttcatcaagcagcagcgcgaggccagagtccaataaactcgtgctcatctgcagcctcctctgtgactcccctttctcttctcgtccctcctccccggagccggcactgcatgttcctggacaccacccagagcaccctctggttgtgggcttggaccacgagcccttagcagggaaggctggtctcccccagcctaacccccagcccctccatgtctatgctccctctgtgttagaattggctgaagtgttttttgtgcagctgacttttctgacccatgttcacgttgttcacatcccatgtagaaaaataaagatgccacgga

SEQ ID NO: 227459 - DNA, 925 bp, Homo Sapiens; identical to SEQ ID NO: 193942

SEQ ID NO: 227460 - DNA, 602 bp, Homo Sapiens
  misc_feature (366)..(376): n is a, c, g, or t
gtacaaaaaagttggatttaatggttaacggacttgtcccaagtctgacagccagagcgttagaggggccagcggccctcccaggcgatcttgtgtctactctaggactgggcccgagggtggtttacctgcaccgttgactcagtatagtttaaaaatctgccacctgcacaggtatttttgaaagcaaaataaggttttcttttttcccctttcttgtaataaatgataaaattccgagtctttctcactgcctttgtttagaagagagtagctcgtcctcactggtctacactggttgccgaatttacttgtattcctaactgttttgtatatgctgcattgagacttacggcaagaaggcannnnnnnnnnnaaaggaaacaaactctcaaatcatgaagtgatataaaagctgcatatgcctacaaagctctgaattcttgttccagttgctgtcacaaaggagtgagtgaaactcctttttctacccccttttttatataataaaagtgccttagcatgtgttgcagctgtcaccactacagtaagctggtttacagatgttttccactgagcatcactatatagagaaccatgtg

SEQ ID NO: 227461 - DNA, 659 bp, Homo Sapiens; identical to SEQ ID NO: 193944
  misc_feature (431)..(443): n is a, c, g, or t

SEQ ID NO: 227462 - DNA, 462 bp, Homo Sapiens
ctataaaaaagcgtctttgtacaaaaaagttggtcccgacgctgtgggttgctgtaaggggtcctccctgcgccacacggccgtcgccatggtgaagctgagcaaagaggccaagcagagactacagcagctcttcaaggggagccagtttgccattcgctggggctttatccctcttgtgatttacctgggatttaagaggggtgcagatcccggaatgcctgaaccaactgttttgagcctactttggggataaaggattatttggtcttctggatttggaggcaatcagcggacagcatggaagatgtgtgctctggctcggataagagatgggacatcattcagtcactagttggatggcacaaggctcttcacagacgcatctgtagcagagtggaacttgtactaacttatgatagaatgtatcagaataaatgtttttaacagtgttaaaaaaaa

SEQ ID NO: 227463 - DNA, 694 bp, Homo Sapiens
ttggggaaaactaccaggctgcggaggagactgcttttgttgttgatgaagtgagcaacattgtaaaagaggctatagaaagcgcaattggtggtaacgcttatcaacacagcaaagtgaaccagtggaccacaaatgtagtagaacaaactttaagccaactcaccaagctgggaaaaccatttaaatacatcgtgacctgtgtaattatgcagaagaatggagctggattacacacagcaagttcctgcttctgggacagctctactgacgggagctgcactgtgcgatgggagaataagaccatgtactgcatcgtcagtgccttcggactgtctatttgacctgcagtccagcctatggcctttctccttttgtctctagttcatcctctaaccaccagccatgaattcagtgaactcttttctcattctctttgttttgtggcactttcacaatgtagaggaaaaaaccaaatgaccgcactgtgatgtgaatggcaccgaagtcagatgagtatccctgtaggtcacctgcagcctgcgttgccacttgtcttaactctgaatatttcatttcaaaggtgctaaaatctgaaatctgctagtgtgaaacttgctctactctctgaaatgattcaaatacactaattttccatactttatacttttgttagaataaattattcaaatct

SEQ ID NO: 227464 - DNA, 358 bp, Homo Sapiens
tttgtacaaaaaagttgggtcgtggactcctatactgctaggaagctccgtagtcaccgacgagaccagaagtggcatgataaacagtataagaaagctcatttgggcacagccctaaaggccaacccttttggaggtgcttctcatgcaaaaggaatcgtgctggaaaaagtaagagttgaagccaaacagccaaattctgccattaggaagtgtgtaagggtccagctgatcaagaatggcaagaaaatcacagcctttgtacccaatgacggttgcttgaactttattgaggaaaatgatgaagttctggttgctggatttggtttctaaggtcatgctgatggtgatattcctg

SEQ ID NO: 227465 - DNA, 528 bp, Homo Sapiens; identical to SEQ ID NO: 193945

SEQ ID NO: 227466 - DNA, 749 bp, Homo Sapiens
tttgtacaaaaaagttggcagccgcccgggagaagatggctgccccagcagtgtccgggctctcccggcaggtgcgatgcttcagtacctctgtggtcagaccatttgccaagcttgtgaggcctcctgttcaggtatacggtattgaaggtcgctatgccacagctctttattctgctgcatcaaaacagaataagctggagcaagtagaaaaggagttgttgagagtagcacaaatcctgaaggaacccaaagtggctgcttctgttttgaatccctatgtgaagcgttccattaaagtgaaaagcctaaatgacatcacagcaaaagagaggttctctcccctcactaccaacctgatcaatttgcttgctgaaaatggtcgattaagcaatacccaaggagtcgtttctgccttttctaccatgatgagtgtccatcgcggagaggtaccttgcacagtgacctctgcatctcctttagaagaagccacactctctgaattaaaaactgtcctcaagagcttcctaagtcaaggccaagtattgaaattggaggctaagactgatccgtcaatcttgggtggaatgattgtgcgcattggcgagaaatatgttgacatgtctgtcaagaccaagattcagaagctgggcagggctatgcgggagattgtctaaaagtgttggttttctgccatcagtgaaaattcttaaacttggagcaacaataaaaagcttccagaacagatc

SEQ ID NO: 227467 - DNA, 425 bp, Homo Sapiens
gtttcctctgggggcttcgcgggcgcccacacgtactcggggggcacctgcgcgtggggcgccgccttgcggtagaagccgagctcctgcaatagaacattgatctcttcgcgggtcatttcactgagtgggatgcgctctagttcctcgtagcggcggcccagcagcacgagctcagggtcggccccagggaggtgtttcatcaccaggttgtgatagaatggaatgtcctgcgtgacgaaagccttcacctcctttaggcggttcagctgtcatcccccgcaggtctctacccgggcgcgggttaggccgctcagacggttccagtccggccggtaggcagtggcggctgtggctggggccacaagcgccgcgagaagcagcagcagcgccagcggaggcaacgccaacttttttgtacaaag

SEQ ID NO: 227468 - DNA, 602 bp, Homo Sapiens; identical to SEQ ID NO: 193946

SEQ ID NO: 227469 - DNA, 1390 bp, Homo Sapiens
  misc_feature (1268)..(1297): n is a, c, g, or t
ttggttttgcagttcgctatcagaagaggagtgtaggtccccgcagttttcaatcatgtctgaaccaatcagagtccttgtgactggagcagctggtcaaattgcatattcactgctgtacagtattggaaatggatctgtctttggtaaagatcagcctataattcttgtgctgttggatatcacccccatgatgggtgtcctggacggtgtcctaatggaactgcaagactgtgcccttcccctcctgaaagatgtcatcgcaacagataaagaagacgttgccttcaaagacctggatgtggccattcttgtgggctccatgccaagaagggaaggcatggagagaaaagatttactgaaagcaaatgtgaaaatcttcaaatcccagggtgcagccttagataaatacgccaagaagtcagttaaggttattgttgtgggtaatccagccaataccaactgcctgactgcttccaagtcagctccatccatccccaaggagaacttcagttgcttgactcgtttggatcacaaccgagctaaagctcaaattgctcttaaacttggtgtgactgctaatgatgtaaagaatgtcattatctggggaaaccattcctcgactcagtatccagatgtcaaccatgccaaggtgaaattgcaaggaaaggaagttggtgtttatgaagctctgaaagatgacagctggctcaagggagaatttgtcacgactgtgcagcagcgtggcgctgctgtcatcaaggctcgaaaactatccagtgccatgtctgctgcaaaagccatctgtgaccacgtcagggacatctggtttggaaccccagagggagagtttgtgtccatgggtgttatctctgatggcaactcctatggtgttcctgatgatctgctctactcattccctgttgtaatcaagaataagacctggaagtttgttgaaggtctccctattaatgatttctcacgtgagaagatggatcttactgcaaaggaactgacagaagaaaaagaaagtgcttttgaatttctttcctctgcctgactagacaatgatgttactaaatgcttcaaagctgaagaatctaaatgtcgtctttgactcaagtaccaaataataataatgctatacttaaattacttgtgaaaaacaacacattttaaagattacgtgcttcttggtacaggtttgtgaatgacagtttatcgtcatgctgttagtgtgcattctaaataaatatatattcaaatgnnnnnnnnnnnnnnnnnnnnnnnnnnnnnnccccaactttcttgtacaaagttgggcattataaaaagcattgcttattcaatttgttgcaacgaacaggtcactatcagtcaaaataaaatc

SEQ ID NO: 227470 - DNA, 990 bp, Homo Sapiens; identical to SEQ ID NO: 193947

SEQ ID NO: 227471 - DNA, 465 bp, Homo Sapiens
ctttgtacaaaaaagttggctcggagcgggcggaaagcgttggcggcttgtgcagcaatggccaagatcaaggctcgagatcttcgcgggaagaagaaggaggagctgctgaaacagctggacgacctgaaggtggagctgtcccagctgcgcgtcgccaaagtgacaggcggtgcggcctccaagctctctaagatccgagtcgtccggaaatccattgcccgtgttctcacagttattaaccagactcagaaagaaaacctcaggaaattctacaagggcaagaagtacaagcccctggacctgcggcctaagaagacacgtgccatgcgccgccggctcaacaagcacgaggagaacctgaagaccaagaagcagcagcggaaggagcggctgtacccgctgcggaagtacgcggtcaaggcctgaggggcgcattgtcaataaagcacagctggctgagaa

SEQ ID NO: 227472 - DNA, 961 bp, Homo Sapiens
ttgggtagacactgcctcacccaggccctcaggcagcccctccacagggcccctctcctgcctggacagctctgctggtctccccgtcccctggagaagaacaaggccatgggtcggcccctgctgctgcccctgctgctcctgctgcagccgccagcatttctgcagcctggtggctccacaggatctggtccaagctacctttatggggtcactcaaccaaaacacctctcagcctccatgggtggctctgtggaaatccccttctccttctattacccctgggagttagccatagttcccaacgtgagaatatcctggagacggggccacttccacgggcagtccttctacagcacaaggccgccttccattcacaaggattatgtgaaccggctctttctgaactggacagagggtcaggagagcggcttcctcaggatctcaaacctgcggaaggaggaccagtctgtgtatttctgccgagtcgagctggacacccggagatcagggaggcagcagttgcagtccatcaaggggaccaaactcaccatcacccaggctgtcacaaccaccaccacctggaggcccagcagcacaaccaccatagccggcctcagggtcacagaaagcaaagggcactcagtaatcatggcacctaagtctggacactgccatcagggttgcattggctgtcgctgtgctcaaaactgtcattttgggactgctgtgcctcctcctcctgtggtggaggagaaaggaaaggtagcagggcgccaaacactgacttctgaccaacagagtgtggggagaagggatgtgtattagccccggaggacgtgatgtgagacccgcttgtgaattcttccacactcattcccccatgggcagtacatggaaaagcacctttgaagggaccttttaaagggaaatcctccaaggcagaaaggaggctgggtcc

SEQ ID NO: 227473 - DNA, 667 bp, Homo Sapiens
  misc_feature (418)..(464): n is a, c, g, or t
tgtacaaaaaagttggctcctttggacctcatgccggaaaattggtcgcgattgtagatgttattgatcagaacagggctttggtcgatggaccttgcactcaagtgaggagacaggccatgcctttcaagtgcatgcagctcactgatttcatcctcaagtttccgcacagtgcccaccagaagtatgtccgacaagcctggcagaaggcagacatcaatacaaaatgggcagccacacgatgggccaagaagattgaagccagagaaaggaaagccaagatgacagattttgatcgttttaaagttatgaaggcaaagaaaatgaggaacagaataatcaagaatgaagttaagaagctttaaaaggcagctctcctgaaagcttctcccaaaaaagcacctggtactaagggtannnnnnnnnnnnnnnnnnnnnnnnnnnnnnnnnnnnnnnnnnnnnnnaaagttccagcaaaaaagatcaccgccgcgagtaaaaaggctccagcccagaaggttcctgcccagaaagccacaggccagaaagcagcgcctgctccaaaagctcagaagggtcaaaaagctccagcccagaaagcacctgctccaaaggcatctggcaagaaagcataagtggcaatcataaaaagtaataaaggttcttt

SEQ ID NO: 227474 - DNA, 723 bp, Homo Sapiens; identical to SEQ ID NO: 193952
  misc_feature (471)..(511): n is a, c, g, or t

SEQ ID NO: 227475 - DNA, 739 bp, Homo Sapiens; identical to SEQ ID NO: 193953
  misc_feature (454)..(485): n is a, c, g, or t

SEQ ID NO: 227476 - DNA, 687 bp, Homo Sapiens; identical to SEQ ID NO: 193954
  misc_feature (472)..(518): n is a, c, g, or t

SEQ ID NO: 227477 - DNA, 776 bp, Homo Sapiens; identical to SEQ ID NO: 193955

SEQ ID NO: 227478 - DNA, 890 bp, Homo Sapiens
ctttgtacaaaaaagttgggtccaagatgccttgaagaagccacgcgacgtgttgtgtctgagatcccggtgctgaagactaacgccggaccccgagatcgtgagttgtgggtgcagcgactgaaggaggaatatcagtcccttatccggtatgtggagaacaacaagaatgctgacaacgattggttccgactggagtccaacaaggaaggaactcggtggtttggaaaatgctggtatatccatgacctcctgaaatatgagtttgacatcgagtttgacattcctatcacatatcctactactgccccagaaattgcagttcctgagctggatggaaagacagcaaagatgtacaggggtggcaaaatatgcctgacggatcatttcaaacctttgtgggccaggaatgtgcccaaatttggactagctcatctcatggctctggggctgggtccatggctggcagtggaaatccctgatctgattcagaagggcgtcatccaacacaaagagaaatgcaaccaatgaagaatcaagccactgaggcagggcagagggacctttgataggctacgatactattttcctgtgcatcacacttaactcatctaactgcttccccggacaccctccacctctagttgttactaagtagctgcagtaggcattgctggggaagaaacaaacacacaccaaacagtactgctacttagtttctaaggctgcacagggaagggaaagactgggctttggacaatctagaggtaatttatatccgcccccaggtggagcaacatgcgattctggaggcacgggggtaactgaaagtgagtacatatagtctttctggtttctggagataacccatcaataaaagctgcttcctc

SEQ ID NO: 227479 - DNA, 924 bp, Homo Sapiens
ttggcgctttctgggtaaagatggacgtccacgatctctttcgccggctcggcgcgggggccaaattcgacacgagacgcttctcggcagacgcagctcgattccagataggaaaaaggaaatatgactttgattcttcggaggtgcttcagggactggacttttttggaaacaagaagtctgtcccaggtgtgtgtggagcatcacaaacacatcagaagccccaaaatggagagaaaaaagaagagagcctaactgaaaggaagagggagcagagcaagaaaaaaaggaagacgatgacttcagaaattgcttcccaagaagaaggtgctactatacagtggatgtcatctgtagaagcaaagattgaagacaaaaaagttcagagagaaagtaaactaacttccggaaagttggagaatctcagaaaagaaaagataaacttcttgcggaataaacacaaaattcacgtccaaggaaccgatcttcctgacccaattgctacatttcagcaacttgaccaggaatataaaatcaattctcgactacttcagaacattctagatgcaggtttccaaatgcctacgccaatccaaatgcaagccatcccagttatgctgcatggtcgggaacttctggcttctgctccaactggatctggaaaaacattagcttttagcattcctattttaatgcagctgaaacaacccgcaaataaaggcttcagagccctgattatatcaccaacacgagaacttgccagccagattcacagagagttaataaaaatttctgagggaacaggattcagaatacacatgatccacaaagcagcagtggcagccaagaaatttggacctaaatcatctaaaaagtttgatattcttgtgactactccaaatcgactaatctatttattaaagc

SEQ ID NO: 227480 - DNA, 629 bp, Homo Sapiens; identical to SEQ ID NO: 193956
  misc_feature (450)..(473): n is a, c, g, or t

SEQ ID NO: 227481 - DNA, 480 bp, Homo Sapiens
ctttgtacaaaaaagttgggtcaagggcaccagcatcggccatgcctttcttggacatccagaaaaggttcggccttaacatagatcgatggttgacaatccagagtggtgaacagccctacaagatggctggtcgatgccatgcttttgaaaaagaatggatagaatgtgcacatggaatcggttatactcgggcagagaaagagtgcaagatagaatatgatgatttcgtagagtgtttgcttcggcagaaaacgatgagacgtgcaggtaccatcaggaagcagcgggataagctgataaaggaaggaaagtacacccctccacctcaccacattggcaagggggagcctcggccctgaacagagcacctgctgatgtctggaggctgattttcctgttctctgttctccactggaaaggttgtttacgacaaacctccttgtcaaagtgtgtaaaaataaaggattgctccatcct

SEQ ID NO: 227482 - DNA, 532 bp, Homo Sapiens; identical to SEQ ID NO: 193958

SEQ ID NO: 227483 - DNA, 939 bp, Homo Sapiens
ttgggcctcgggtgggccggggttgctgcgccgtcctccactactggctactggcgctgcagccatgcagcccccgcccccgggcccgctgggcgactgcctgcgggactgggaggatctacagcaggacttccagaacatccaggagacccatcggctctaccgcctgaagctggaggagctgaccaaacttcagaacaattgcaccagctccatcacgcggcagaagaagcggctccaggagctggccctcgccctgaagaaatgcaaaccctccctcccagcagaggccgagggggccgcacaggagctggagaaccagatgaaagagcgccaaggcctcttctttgacatggaggcctatttgcctaagaagaatggattgtacctgagcctggttctggggaacgtcaacgtcacgctcctgagcaagcaggctaagtttgcctacaaggacgagtatgagaagttcaagctctacctcaccatcatcctcatcctcatctccttcacttgccgcttcctgctcaactccagggtgacagatgctgccttcaacttcctgctggtctggtactactgcaccctgaccatccgggagagcatcctcatcaacaacggctcccggatcaaaggctggtgggtgttccatcactacgtgtccaccttcctgtcgggagtcatgctgacgtggcccgacggtctcatgtaccagaaattccggaaccaattcctctccttttccatgtaccaaagcttcgtgcagtttctccagtactactaccagagcggctgcctctaccgcctgcgggcgctgggcgagcggcacaccatggacctcactgtggagggcttccagtcctggatgtggcggggcctcaccttcctgctgccttttcttttctttggccacttctggcagctttttaacgcgctgac

SEQ ID NO: 227484 - DNA, 1108 bp, Homo Sapiens; identical to SEQ ID NO: 193959

SEQ ID NO: 227485 - DNA, 937 bp, Homo Sapiens; identical to SEQ ID NO: 193960

SEQ ID NO: 227486 - DNA, 1043 bp, Homo Sapiens
agtgacctgttcgttgcaacaaaattgatgagcaatgcttgacttataaaaggcaactttgtacaaaaaagttgggagaaggaggaaaaaagagaccatagacttccatcctggcctagagcggcccttaaagtgccagggagaggagggcgggtggggaccactccagaattggccgctggcggtatcatggcgacccggaacccccctccccaagactatgaaagtgatgacgactcttatgaagtgttggatttaactgagtatgcaagaagacaccagtggtggaatcgagtgtttggccacagttcgggacctatggtagaaaaatactcagtagctacccagattgtaatgggtggcgttactggctggtgtgcaggatttctgttccagaaagttggaaaacttgcagcaactgcagtaggtggtggctttcttcttcttcagattgctagtcatagtggctatgtgcagattgactggaagagagttgaaaaagatgtaaataaagcaaaaagacagattaagaaacgagcgaacaaagcagcacctgaaatcaacaatttaattgaagaagcaacagaatttatcaagcagaacattgtgatatccagtggatttgtgggaggctttttgctcggacttgcatcttaaggacatgaatattctcccataacggattcaactatgagaagagaagtggcagcaataaaggcagtctctcaaaagtcatactgccagagtctctagggcaaggagaaacaactagctggacaatactcaattcacaacttagcattttgccatctgaagcttggcaaactagtatctgctgtaaaacaacctatatggtatgtgaaccgtagtattcctgagcaaaacgtggctttcatcgctttgtaaaatttgcatctgtttagaaactagcctataaaatatcacccttggatgtagatatggagagaaaagaaaatatggtgggtttattgcttaccaaataatccctttttatttaaattaaatgttcttcttggggtttt

SEQ ID NO: 227487 - DNA, 1092 bp, Homo Sapiens
ttggattccagggtatatctgggaggccggaggacgtgtctggttattacacagatgcacagctggacgtgggatccacacagctcagaacagttggatcttgctcagtctctgtcagaggaagatcccttggacaagaggaccctgccttggtgtgagagtgagggaagaggaagctggaacgagggttaaggaaaaccttccagtctggacagtgactggagagctccaaggaaagcccctcggtaacccagccgctggcaccatgaacccagagagcagtatctttattgaggattaccttaagtatttccaggaccaagtgagcagagagaatctgctacaactgctgactgatgatgaagcctggaatggattcgtggctgctgctgaactgcccagggatgaggcagatgagctccgtaaagctctgaacaagcttgcaagtcacatggtcatgaaggacaaaaaccgccacgataaagaccagcagcacaggcagtggtttttgaaagagtttcctcggttgaaaagggagcttgaggatcacataaggaagctccgtgcccttgcagaggaggttgagcaggtccacagaggcaccaccattgccaatgtggtgtccaactctgttggcactacctctggcatcctgaccctcctcggcctgggtctggcacccttcacagaaggaatcagttttgtgctcttggacactggcatgggtctgggagcagcagctgctgtggctgggattacctgcagtgtggtagaactagtaaacaaattgcgggcacgagcccaagcccgcaacttggaccaaagcggcaccaatgtagcaaggtgatgaaggagtttgtgggtgggaacacacccaatgttcttaccttagttgacaattggtaccaagtcacacaagggattgggaggaacatccgtgccatcagacgagccagagccaaccctcagttaggagcgtatgccccacccccgcatgtcattgggcgaatctcagctgaggcggtgaacagttgagagggttgttgaaggccccgcccaggcaatgagcagaggaaccatgatcgtgggtgc

SEQ ID NO: 227488 - DNA, 1202 bp, Homo Sapiens
atgcccttctccaacagccacaacgcactgaagctgcgcttcccggccgaggacgagttccccgacctgagcgcccacaacaaccacatggccaaggtgctgacccccgagctgtacgcggagctgcgcgccaagagcacgccgagcggcttcacgctggacgacgtcatccagacaggcgtggacaacccgggccacccgtacatcatgaccgtgggctgcgtggcgggcgacgaggagtcctacgaagtgttcaaggatctcttcgaccccatcatcgaggaccggcacggcggctacaagcccagcgatgagcacaagaccgacctcaaccccgacaacctgcagggcggcgacgacctggaccccaactacgtgctgagctcgcgggtgcgcacgggccgcagcatccgtggcttctgcctccccccgcactgcagccgcggggagcgccgcgccatcgagaagctcgcggtggaagccctgtccagcctggacggcgacctggcgggccgatactacgcgctcaagagcatgacggaggcggagcagcagcagctcatcgacgaccacttcctcttcgacaagcccgtgtcgcccctgctgctggcctcgggcatggcccgcgactggcccgacgcccgcggtatctggcacaatgacaataagaccttcctggtgtgggtcaacgaggaggaccacctgcgggtcatctccatgcagaaggggggcaacatgaaggaggtgttcacccgcttctgcaccggcctcacccagattgaaactctcttcaagtctaaggactatgagttcatgtggaaccctcacctgggctacatcctcacctgcccatccaacctgggcaccgggctgcggggcaggtgtgcatatcaagctgcccaacctgggcaagcatgagaagttctcggaggtgcttaagcggctgcgacttcagaagcgaggcacaggcggtgtggacacggctgcggtgggcggggtcttcgacgtctccaacgctgaccgcctgggcttctcagaggtggagctggtgcagatggtggtggacggagtgaagctgctcatcgagatggagcagcggctggagcaagggctaggccatcgacgacctcttgcctgcccagaaatgaaacccggccacaacccgacaccagccctgctgcttcctaaacttattgcctggg

SEQ ID NO: 227489 - DNA, 561 bp, Homo Sapiens
  misc_feature (304)..(331): n is a, c, g, or t
cattttcctgtaagcactcaggaagaatgaagcttcctgtgtcctttaacactttaagtacagatcttagtgatacataaccagttttatctctctcaagctctaccttccgcaaagtgctagaatacagttctgccaagttcttcactacttcgtatcaagggttgtattttctttatttcccaatagcatgttcctcattccccaatgacacctcaccaggatcacccttaccaaccttacttccagcttgcacatcagaatttttccagcctcatttgtcagtttcaaatctgcttcacannnnnnnnnnnnnnnnnnnnnnnnnnnnaatctgccttaatgagctcaggccactatcacaaaataccacagaccaaatggcttacaaatttgttaattttaaataaatgaggttaaaaacaaatttatattctcacatttctcgaggctggaagtctgagatcagagtgccagcatggtcaacttctggcgagagctctcttcctggtatgtaaatgcccacttcctcatgtcttcacaggaaggaaaccaacaaat

SEQ ID NO: 227490 - DNA, 667 bp, Homo Sapiens
gaaactcccaggagacagcagcctagttttcgagtgtgagcttgtgcttgtgaaagctaaccatgctaaccaccaaggcaaagcagcacagtgtgaatagaacagagcgggatcaagaatttcacagaagacaggtcagctgaggggcctgcacacacagggtgttgaggaaccacagatgggcgccgagaggcctgccttttgcctggcccaggctcacccccaccttgggcctcacctcctccaggaagccttcccagctacccgaagctcaggtggccttcttgcaggtccccgtagcaccctgagcctgtaccttgggtggcacttgttatgctatcctgtgctagccgtttgtgcctcgtctcgctgttagattgtgagttcccatgggcagagacccactgtcgttccccgtgtgtccccagcccggtccctgtcacatttgttaaatgaaagaacaatgaagcccagtgtaacgtcagtccacagaaatagccacagcttccagtggtggcggtagacttggctcggaacttagttggcaccagagtaactctagtcagttacagtaaaatccactgtgtgtgggaggggagaagctagcggttgtatccccagcatcttttgtatttgtctttatactatgctgaattctctgaaatac

SEQ ID NO: 227491 - DNA, 1080 bp, Homo Sapiens
ctttgtacaaaaaagttgggtgtaattacctgtcccatcatctgacaattagcccacagagtggcaacttccgccaattgctacttcaaagatgtcggactgaatatgaagttaaagatcaagctgcaaaaggggatgaagttactcgaaaacgatttcatgcatttgtactctttctgggagaactttatcttaacctggagatcaagggaacaaatggacaggttacaagagcagatattcttcaggttggtcttcgagaattgctgaatgccctgttttctaatcctatggatgacaatttaatttgtgcagtaaaattgttaaagttgacaggatcagttttggaagatgcttggaaggaaaaaggaaagatggatatggaagaaattattcagagaattgaaaacgttgtcctagatgcaaactgcagtagagatgtaaaacagatgctcttgaagcttgtagaactccggtcaagtaactggggcagagtccatgcaacttcaacatatagagaagcaacaccagaaaatgatcctaactactttatgaatgaaccaacattttatacatctgatggtgttcctttcactgcagctgatccagattaccaagagaaataccaagaattacttgaaagagaggacttttttccagattatgaagaaaatggaacagatttatccggggctggtgatccatacttggatgatattgatgatgagatggacccagagatagaagaagcttatgaaaagttttgtttggaatcagagcgtaagcgaaaacagtaaagttaaatttcagcatatcagttttataaagcagtttaggtatggtgatttagcagaacacaagagagcaagaaaatgtgtcacatctataccaaattgaggatgttgagttatgttactaatgtatgcaactttaattttgtttaacactatctgccaaaataaactttattccctataacttaaaatgtgtatatatatataatagtttattatgtacagttaattctactgttttggctgcaataaaatcgattttgaaataaatgaaatgttgaaaatt

SEQ ID NO: 227492 - DNA, 991 bp, Homo Sapiens; identical to SEQ ID NO: 193964

SEQ ID NO: 227493 - DNA, 986 bp, Homo Sapiens; identical to SEQ ID NO: 193965

SEQ ID NO: 227494 - DNA, 828 bp, Homo Sapiens
ttggcgacggcagcggcggcggcgggtgggaaatggcggagtatctggcctccatcttcggcaccgagaaagacaaagtcaactgttcattttatttcaaaattggagcatgtcgtcatggagacaggtgctctcggttgcacaataaaccgacgtttagccagaccattgccctcttgaacatttaccgtaaccctcaaaactcttcccagtctgctgacggtttgcgctgtgccgtgagcgatgtggagatgcaggaacactatgatgagttttttgaggaggtttttacagaaatggaggagaagtatggggaagtagaggagatgaacgtctgtgacaacctgggagaccacctggtggggaacgtgtacgtcaagtttcgccgtgaggaagatgcggaaaaggctgtgattgacttgaataaccgttggtttaatggacagccgatccacgccgagctgtcacccgtgacggacttcagagaagcctgctgccgtcagtatgagatgggagaatgcacacgaggcggcttctgcaacttcatgcatttgaagcccatttccagagagctgcggcgggagctgtatggccgccgtcgcaagaagcatagatcaagatcccgatcccgggagcgtcgttctcggtctagagaccgtggtcgtggcggtggcggtggcggtggtggaggtggcggcggacgggagcgtgacaggaggcggtcgagagatcgtgaaagatctgggcgattctgagccatgccatttttaccttatgtctgctagaaagtgttgtagttgattgaccaaccaagttcataagagggaa

SEQ ID NO: 227495 - DNA, 916 bp, Homo Sapiens
ttggcgccaagggacgtgtttctgcgctcgcgtggtcatggaggcgctgccgctgctagccgcgacaactccggaccacggccgccaccgaaggctgcttctgctgccgctactgctgttcctgctgccggctggagctgtgcagggctgggagacagaggagaggccccggactcgcgaagaggagtgccacttctacgcgggtggacaagtgtacccgggagaggcatcccgggtatcggtcgccgaccactccctgcacctaagcaaagcgaagatttccaagccagcgccctactgggaaggaacagctgtgatcgatggagaatttaaggagctgaagttaactgattatcgtgggaaatacttggttttcttcttctacccacttgatttcacatttgtgtgtccaactgaaattatcgcttttggcgacagacttgaagaattcagatctataaatactgaagtggtagcatgctctgttgattcacagtttacccatttggcctggattaatacccctcgaagacaaggaggacttgggccaataaggattccacttctttcagatttgacccatcagatctcaaaggactatggtgtatacctagaggactcaggccacactcttagaggtctcttcattattgatgacaaaggaatcctaagacaaattactctgaatgatcttcctgtgggtagatcagtggatgagacactacgtttggttcaagcattccagtacactgacaaacacggagaagtctgccctgctggctggaaaccctggtagtgaaacaataatcccagatccagctggaaagctgaagtatttcgataaactgaattgagaaatacttcttccagttatgatgcttgaaagttcctcaataaagttccacgggtttccttt

SEQ ID NO: 227496 - DNA, 904 bp, Homo Sapiens
acaaaaaagttggggagctctcagaggctaagaaggtggagaccggagaagctgtgaggttctttagcgtcacctccctcactgggcagcatgggggagaagtcagagaactgtggggttccagaggatctgttaaatggtttgaaggttacagatactcaggaagccgagtgtgctggccctccagttcctgatcccaaaaatcagcattcccagagtaagctgctcagggatgatgaggcccatctccaggaggaccagggagaagaggagtgttttcatgactgcagtgcctcatttgaggaggagccaggagcggacaaggttgagaacaaatctaatgaagatgtgaattcctctgaactagatgaagaatacctaatagaactggaaaaaaacatgtcggatgaagagaaacagaaaagaagagaagagagcactagactaaaggaggagggaaatgaacagtttaagaaaggagattatatagaagctgaaagttcttatagtcgagccctcgaaatgtgcccatcctgcttccaaaaggagaggtcgattctattttcaaatagagctgcagcaaggatgaaacaggacaagaaagaaatggccatcaatgactgcagcaaagcaattcaattaaaccccagctatatcagggcaatattgaggagagcagagttgtatgagaagacggacaagctagatgaagccctggaagactataaatctatattagaaaaagatccatcaatacatcaagcaagagaagcttgtatgagattacctaagcaaattgaagaacgtaatgaaagactaaaagaagagatgttaggtaaattaaaagatctttgggaacttggttcctccgaccttttgggctctccacggaaaatttccagat

SEQ ID NO: 227497 - DNA, 1069 bp, Homo Sapiens
cctgttaggttttgcctgcacagcttgtaggatcttgttcattggatgctgccactgaaaaactgatcaaaagccatatgctgttcatgtttcttaatactctcacacctttaaagttggggatagggaggggaaggtctcacaaaaggcagttggtctgctggttcctggccaaggcgagcaatggaggatccagaaaaacttggccccaaagggtctgaattctcggaggagctagtggcagccacaggcccggaccaccatgttttgtattttttcaggatgacgttggagctgtcatcgaagtagaggacggagatggcattgagctgcgtgggcgcacagcagggcttgggcaccgtttccgggttgatgaagtggaccagcgtctgcacgatggcgtggttggtggcgttcatgtaggagttcagagggaaggcacactccccctcacagtagtaggcggcgtagccttcaggcgcgatgatccagtcctgccagcccaggtctcggaagctgacatacagctcgtgcttcttacaggcctgcctctggtcgctgctgctgttctctgccacgttggccatccgcagggcttcctggttcttgggcgtcttggagcggttctggctgcgctgtttgctccccgtggaccggatgctgcggaagtggacctccgtggccttgaagaaagccaccatgaagggctgcttgttctggggcccgtgccgcccaatcaggcccgccaacttggggttgatgctctgcccatccagcgtctccaccgagagctgcaggcccaggttgtgccgcggattgaccacccagtggttgctggtggctgtgatgtcaaacaccagccagccctcctccgaggcccagagggtacggctgtcgagcaggaagagatccgattccctgcccaagtgctcctggagcacctgataaacgctgatccggaacgtctcattgtcgaagcgttcccggatgtagtccttgtagatccggaattcggctgccgtgacagcttccccttctgggatcttggaaagatcaaaccggaacccaa

SEQ ID NO: 227498 - DNA, 1057 bp, Homo Sapiens
ttggcaccgctcaacatccgcagcatcttctacgtgcccgacatgaaaccgtccatgtttgatgtgagccgggagctgggctccagcgttgcactgtacagccgcaaagtcctcatccagaccaaggccacggacatcctgcccaagtggctgcgcttcatccgaggtgtggtggacagtgaggacattcccctgaacctcagccgggagctgctgcaggagagcgcactcatcaggaaactccgggacgttttacagcagaggctgatcaaattcttcattgaccagagtaaaaaagatgctgagaagtatgcaaagttttttgaagattacggcctgttcatgcgggagggcattgtgaccgccaccgagcaggaggtcaaggaggacatagcaaagctgctgcgctacgagtcctcggcgctgccctccgggcagctaaccagcctctcagaatacgccagccgcatgcgggccggcacccgcaacatctactacctgtgcgcccccaaccgtcacctggcagagcactcaccctactatgaggccatgaagaagaaagacacagaggttctcttctgctttgagcagtttgatgagctcaccctgctgcaccttcgtgagtttgacaagaagaagctgatctctgtggagacggacatagtcgtggatcactacaaggaggagaagtttgaggacaggtccccagccgccgagtgcctatcagagaaggagacggaggagctcatggcctggatgagaaatgtgctggggtcgcgtgtcaccaacgtgaaggtgaccctccgactggacacccaccctgccatggtcaccgtgctggagatgggggctgcccgccacttcctgcgcatgcagcagctggccaagacccaagaggagcgcgcacagcttcctgcagcccacgctggagatcaaccccaggccacgcgctcatcaagaagctgaaatcaggctgcgcgcaagcgagcctggcctggctcagcctgctggtggatcaagatatacgaagacgccatgattgctgctggactttgtt

SEQ ID NO: 227499 - DNA, 904 bp, Homo Sapiens
ttggcgtgtgaccttccagcccgcggaccgatgctgccggcggccgctcgccccctgtgggggccttgccttgggcttcgggccgctgcgttccgccttgccaggcgacaggtgccatgtgtctgtgccgtgcgacatatgaggagcagcggccatcagaggtgtgaggccctcgctggtgcacccctggataacgcccccaaggagtacccccccaagatacagcagctggtccaggacatcgccagcctcactctcttggaaatctcagacctcaacgagctcctgaagaaaacgttgaagatccaggatgtcgggcttgtgccgatgggtggtgtgatgtctggggctgtccctgctgcagcagcccaggaggcggtggaagaagatatccccatagcgaaagaacggacacatttcaccgtccgcctgaccgaggcgaagcccgtggacaaagtgaagctgatcaaggaaatcaagaactacatccaaggcatcaacctcgtccaggcaaagaagctggtggagtccctgccccaggaaatcaaagccaatgtcgccaaagctgaggcggagaagatcaaggcggccctggaggcggtgggcggcaccgtggttctggagtagcctccagctcggaggacttgtgttcaggggtcctgggccccgggcgaggtcccgccctcccgtggtcactggctccgcccccagcaccaggcgcccagtggagccgtttgggagaattgcctgcgccacgcagcggggccggacaggccgcacagacctactgtggcgggagggaggggcggctgctgcctggtgacggcacccggaggcccaccaggacgcgccaccggtgaatgtgcctctggtggctgctgagaaaaatacactgtgcagctca

SEQ ID NO: 227500 - DNA, 992 bp, Homo Sapiens
actttgtacaaaaaagttggggcgtttgtttggtggggtcacacgcgggttcaacatgcgtatcgaaaagtgttatttttgttcggggcccatctatcctggacacggcatgatgttcgtccgcaacgattgcaaggtgttcagattttgcaaatctaaatgtcataaaaactttaaaaagaagcgcaatcctcgcaaagttaggtggaccaaagcattccggaaagcagctggtaaagagcttacagtggataattcatttgaatttgaaaaacgtagaaatgaacctatcaaataccagcgagagctatggaataaaactattgatgcgatgaagagagttgaagaaatcaaacagaagcgccaagctaaatttataatgaacagattgaagaaaaataaagagctacagaaagttcaggatatcaaagaagtcaagcaaaacatccatcttatccgagcccctcttgcaggcaaagggaaacagttggaagagaaaatggtacagcagttacaagaggatgtggacatggaagatgctccttaaaaatctctgtaaccatttcttttatgtacatttgaaaatgccctttggatacttggaactgctaaattattttattttttacataaggtcacttaaatgaaaagcgattaaaagacatctttcctgcattgccatctacataatatcagatattacggatgttagattgcatctcagtgttaaatctttactgatagatgtacttaagtaaatcatgaaaattctacttgtaactatagaagtgaattgtggacgtaaaatggttgtgctatttggataatggcactaggcagcatttgtatagtaactaatggcaaaaattcatggctagtgatgtataaaaaaaaatattctttgcagtaaaatattccctttgttaatgttatagaagggggatacaaaaggaactaacaatttggcagtgtagatattttatttagtattt

SEQ ID NO: 227501 - DNA, 1052 bp, Homo Sapiens
ttggctaagtccttcggccgccaccatgtccgcctcggctgtcttcattctggacgttaagggcaaggtattctgcgaatacttcaaggagctggaggaggagagcatccgggacaactttgtcatcgtctacgagttgctggacgagctcatggactttggcttcccgcagaccaccgacagcaagatcctgcaggagtacatcactcagcagagcaacaagctggagacgggcaagtcacgggtgccacccactgtcaccaacgctgtgtcctggcgctccgagggtatcaagtataagaagaacgaggtcttcattgatgtcatagagtctgtcaacctgctggtcaatgccaacggcagcgtccttctgagcgaaatcgtcggtaccatcaagctcaaggtgtttctgtcaggaatgccagagctgcggctgggcctcaatgaccgcgtgctcttcgagctcactggccgcagcaagaacaaatcagtagagctggaggatgtaaaattccaccagtgcgtgcggctctctcgctttgacaacgaccgcaccatctccttcatcccgcctgatggtgactttgagctcatgtcataccgcctcagcacccaggtcaagccactgatctggattgagtctgtcattgagaagttctcccacagccgcgtggagatcatggtcaaggccaaggggcagtttaagaaacagtcagtggcaacggtgtggagatatctgtgcctgtacccagcgatgccgactcccccagattcaagaccagtgtgggcagcgccaagtatgtgccggagagaaacgtcgtgatttggagtattaagtctttcccggggggcaaggagtacttgatgcgagcccactttggcctccccagtgtggaaaaggaagaggtggagggccggccccccatcggggtcaagtttgagatcccctacttcaccgtctctgggatccaggtccgatacatgaagatcattgagaaaagtggttaccaggccctgccctgggttcgctacatcacccagagtgacgatta

SEQ ID NO: 227502 - DNA, 999 bp, Homo Sapiens; identical to SEQ ID NO: 193968

SEQ ID NO: 227503 - DNA, 641 bp, Homo Sapiens
ttggggcagcggttggaggcttcgcccggctttgcagcggggacttcggcggcggcgcctcaggcacctcggcccggacacgatgaggcgagtggtacgacagagcaagtttcggcatgtatttgggcaagcggtgaaaaatgaccagtgctatgatgacatccgggtttctcgtgtgacctgggatagttccttttgtgctgtcaatcccagatttgttgccataatcatagaggcaagtgggggaggagcgttccttgtcctccctctgcacaagactggtcgaattgacaaatcttaccctacagtatgtggccacacaggaccagtgctggacatagactggtgcccacataacgatcaggtcattgccagcggttcagaggactgcacggtcatggtatggcagatcccagaaaatggactcaccctttccctgactgaacctgtggtgattttggaaggccactcaaagagagtcggcatcgtggcttggcatccaacggcccgcaatgtgcttcttagtgcaggctgtgataatgccattatcatctggaatgtgggaacaggggaagcccttataaacttggacgatatgcattcagacatgatttacaatgtgagctggaaccggaatggca

SEQ ID NO: 227504 - DNA, 956 bp, Homo Sapiens; identical to SEQ ID NO: 193970

SEQ ID NO: 227505 - DNA, 906 bp, Homo Sapiens
  misc_feature (257)..(284): n is a, c, g, or t
ttgggataaatctacaaacaaatgaattgtttttatgggtggagttcttctataagagtatattaaatgctttcagagttgtattaattttgtttctaaataatataccacttatttggagtgactaactcagtatgtaagtagatgagatttgttgattttgcccctaaaacgggctttagtcattttaggagtgagttgcacaaaaggacctaaaatgcattgttttttgccttcttttaagagatggggtctcnnnnnnnnnnnnnnnnnnnnnnnnnnnntgctatcatacatagctcactgcagtctccaactcctcataccagaggcatgtgtcaccatgtcttactcctaaaatgcatttttaaaaagcgaatttttagattaaagtgcctagtttctgattaataaatagaagatgaaaaaagtgggcgggaaaagcataatcttttaagatttgtaattttctgtatgtgccacatttatgtaaattaactataaaatatggaattcaggatcatgctgttttgcatgtactttataggttatatagcatgaaacatacaaattatcactgttctttagtatatagctccttgccttttcttacatagatgcttaatttaacaattacctatttatagttcttattattgacgggaatatgattagaagtaccaaaactaaaaattccattatgtactgtttactttttatttaatattacatgtttttaccttgttgcggtatctttggccttcacacacacatgtgtgcgtgcacgtgcatttcattaccatgtagacaagacagttattgcttatagtaatttacccatttgagggctaagtgtttttagctgtggttttatagcaaagctgtaagtaaatgtaattttatttt

SEQ ID NO: 227506 - DNA, 1328 bp, Homo Sapiens
ttggcagctgtcagtgcctgccgagtgttcaagctctggcccctgtccttcctcgggagcaaactctccacgtgcgaacagctccggcaccggctggagcacctcacgctaatcttcagtacacggaaggcggagaaccctgcccagctgatgaggaaggccaacacggtggcctctgtgctgctggacgtggccctgggcctcatgctgctgtcctggctccacgggagaagccgcatcgggcatctggccgacgccctcgttcctgtggctgaccacgtggccgaggagctccagcatctgctgcagtggctgatgggtgctcccgccgggctcaagatgaaccgtgcactggaccaggtgctgggccgcttcttcctctaccacatccacctgtggatcagctacatccacctcatgtcccccttcgtggagcacatcctttggcgtgggcctctcggcctgcctgggcctgacggtggccctgtccctcctctcggacattatcgccctcctcaccttccacatctactgcttttacgtctatggagccaggctgtactgcctgaagatccatggcctgtcctcactgtggcgtctgttccgggggaagaagtggaacgttctgcgccagcgcgtggactcctgttcctatgacctggaccagctgttcatcgggactctgctcttcaccatcctgctcttcctcctgcctaccacagccctgtactacctggtgttcaccctgctccggctcctggtggtcgccgtgcagggcctgatccatctgctcgtggacctcatcaactccctgccgctgtactcactgggtcttcggctctgccggccctacaggctggcggctggcgtgaagttccgtgtcctccggcacgaggccggcaggcccctccgcctcctgatgcagataaacccactgccctacagccgcgtggtgcacacctaccgcctccccagctgtggctgccaccccaagcactcctggggcgccctgtgccgcaagctgttccttggggagctcatctacccctggaggcagagaggggacaagcaggactgagggaactgctggctcgcctggcaccaccacacggccacagccagccatctgctctgccagggtggcaccagctcagctggcgcatgtcccgtgctttgtggacgctgctgtgtgctcctgaacacggcaggccctgctatcacaccttgggcttggaggtcattgggagtgagcaaatgtgggggtggccagccaggctggccgcactccatcactggcactgcctgccttgggacccgcttcccacctg

SEQ ID NO: 227507 - DNA, 1529 bp, Homo Sapiens; identical to SEQ ID NO: 193974

SEQ ID NO: 227508 - DNA, 1407 bp, Homo Sapiens; identical to SEQ ID NO: 193975
  misc_feature (840)..(848): n is a, c, g, or t

SEQ ID NO: 227509 - DNA, 937 bp, Homo Sapiens; identical to SEQ ID NO: 193977
  misc_feature (138)..(146): n is a, c, g, or t

SEQ ID NO: 227510 - DNA, 650 bp, Homo Sapiens; identical to SEQ ID NO: 193980

SEQ ID NO: 227511 - DNA, 943 bp, Homo Sapiens; identical to SEQ ID NO: 193982

SEQ ID NO: 227512 - DNA, 1286 bp, Homo Sapiens
ttggcgatacctattttctagtgctgagatcctgagacaatgaatcatagtgaaagattcgttttcattgcagagtggtatgatccaaatgcttcacttcttcgacgttatgagcttttattttacccaggggatggatctgttgaaatgcatgatgtaaagaatcatcgcacctttttaaagcggaccaaatatgataacctgcacttggaagatttatttataggcaacaaagtgaatgtcttttctcgacaactggtattaattgactatggggatcaatatacagctcgccagctgggcagtaggaaagaaaaaacgctagccctaattaaaccagatgcaatatcaaaggctggagaaataattgaaataataaacaaagctggatttactataaccaaactcaaaatgatgatgctttcaaggaaagaagcattggattttcatgtagatcaccagtcaagaccctttttcaatgagctgatccagtttattacaactggtcctattattgccatggagattttaagagatgatgctatatgtgaatggaaaagactgctgggacctgcaaactctggagtggcacgcacagatgcttctgaaagcattagagccctctttggaacagatggcataagaaatgcagcgcatggccctgattcttttgcttctgcggccagagaaatggagttgttttttccttcaagtggaggttgtgggccggcaaacactgctaaatttactaattgtacctgttgcattgttaaaccccatgctgtcagtgaaggactgttgggaaagatcctgatggctatccgagatgcaggttttgaaatctcagctatgcagatgttcaatatggatcgggttaatgttgaggaattctatgaagtttataaaggagtagtgaccgaatatcatgacatggtgacagaaatgtattctggcccttgtgtagcaatggagattcaacagaataatgctacaaagacatttcgagaattttgtggacctgctgatcctgaaattgcccggcatttacgccctggaactctcagagcaatctttggtaaaactaagatccagaatgctgttcactgtactgatctgccagaggatggcctattagaggttcaatacttcttcaagatcttggataattagtggtgtggaaagtaaagaagtcacaggttgggacatttagacaagagtgaatcacacacgagaatgtgttcattcttttattgtccgttgtttacctgactgaatacagatcaaca

SEQ ID NO: 227513 - DNA, 1035 bp, Homo Sapiens; identical to SEQ ID NO: 193983

SEQ ID NO: 227514 - DNA, 597 bp, Homo Sapiens
ttggctcttcggacccaaggaagtgaacaccggtgcggtgggcagctacatctatgaccgggaccccgaaggcaaggtccagccctaggctacagcggctctcatgatgtgggctcacctgcgccccaaaccctgcaggggcccccctgcttggctctgctgggagagtgctcagccgcccagtcctgcctgcaagcccagggcgagtattggaggaggggcagccacgggcagagcaccatgcccatccccgagtctctggtgtgtctgccccctctggcatcctctgggcgtcccatgatcccttctgtgtctgcgtgtccgaatccccgtgtgaccctgtcccagcattttcccgccgaccctgcgtgtccccgtggcgctgtccgctctccctctcctgctgcccacccacctgccagtgttatttatgctcccttcgtgggtgatggccacgccctcaccatgtccctggcagagggcttccctccgggatcccctgcctggtgcccacactgcctcgcaagcgctcgccaccctcacgtggctcacctgctgttgagccttgtgctgtcaataaacggtttgaggattgca

SEQ ID NO: 227515 - DNA, 876 bp, Homo Sapiens; identical to SEQ ID NO: 193987

SEQ ID NO: 227516 - DNA, 1216 bp, Homo Sapiens; identical to SEQ ID NO: 193989

SEQ ID NO: 227517 - DNA, 938 bp, Homo Sapiens
ttggcttctctctgctgctgtagctgccatgggcaaaagagaccgagcggaccgcgacaagaagaaatccaggaagcggcactatgaggatgaagaggatgatgaagaggacgccccggggaacgaccctcaggaagcggttccctcggcggcggggaagcaggtggatgagtcaggcaccaaagtggatgaatatggagccaaggactacaggctgcaaatgccgctgaaggacgaccacacctccaggcccctctgggtggctcccgatggccatatcttcttggaagccttctctccagtttacaaatatgcccaagacttcttggtggctattgcagagccagtgtgccgaccaacccatgtgcatgagtacaaactaactgcctactccttgtatgcagctgtcagcgttgggctgcaaaccagtgacatcaccgagtacctcaggaagctcagcaagactggagtccctgatggaattatgcagtttattaagttgtgtactgtcagctatggaaaagtcaagctggtcttgaagcacaacagatacttcgttgaaagttgccaccctgatgtaatccagcatcttctccaggaccccgtgatccgagaatgccgcttaagaaactctgaaggggaggccactgagctcatcacagagactttcacaagcaaatctgccatttctaagactgctgaaagcagtggtgggccctccacttcccgagtgacagatccacagggtaaatctgacatccccatggacctgtttgacttctatgagcaaatggacaaggatgaagaagaagaagaagagacacagacagtgtcttttgaagtcaagcagaaatgattgaggaactccagaaacgttgcatccacctggagtaccctctgttggcagaatatgacttccggaatgattctgtcaaccc

SEQ ID NO: 227518 - DNA, 1096 bp, Homo Sapiens
ctttgtacaaaaaagttggcaagaaattaccaattagagcttgctttgcctgctatgaaaggaaaaaacacaataatatgtgctcctacaggttgtggaaaaacctttgtttcactgcttatatgtgaacatcatcttaaaaaattcccacaaggacaaaaggggaaagttgtcttttttgcgaatcagatcccagtgtatgaacagcagaaatctgtattctcaaaatactttgaaagacatgggtatagagttacaggcatttctggagcaacagctgagaatgtcccagtggaacagattgttgagaacaatgacatcatcattttaactccacagattcttgtgaacaaccttaaaaagggaacgattccatcactatccatctttactttgatgatatttgatgaatgccacaacactagtaaacaacacccgtacaatatgatcatgtttaattatctagatcagaaacttggaggatcttcaggcccactgccccaggtcattgggctgactgcctcggttggtgttggggatgccaaaaacacagatgaagccttggattatatctgcaagctgtgtgcttctcttgatgcgtcagtgatagcaacagtcaaacacaatctggaggaactggagcaagttgtttataagccccagaagtttttcaggaaagtggaatcacggattagcgacaaatttaaatacatcatagctcagctgatgagggacacagagagtctggcaaagagaatctgcaaagacctcgaaaacttatctcaaattcaaaatagggaatttggaacacagaaatatgaacaatggattgttacagttcagaaagcatgcatggtgttccagatgccagacaaagatgaagagagcaggatttgtaaagccctgtttttatacacttcacatttgcggaaatataatgatgccctcattatcagtgagcatgcacgaatgaaagatgctctggattacttgaaagacttcttcagcaatgtccgagcagcagattcgatgagattgagcagatcttactcagagatttgaagaaagctgcaggaactagaaagtgtttccaggg

SEQ ID NO: 227519 - DNA, 1051 bp, Homo Sapiens
tttgtacaaaaaagttggctttagattgctgtcacattttacaaggaggagccaaaggacctggtttgttttttattctgccatgcactgacagcttcatcaaagtggacatgagaactatttcatttgatattcctcctcaggagatcctcacaaaggattcagtgacaattagcgtggatggtgtggtctattaccgcgttcagaatgcaaccctggctgtggcaaatatcaccaacgctgactcagcaacccgtcttttggcacaaactactctgaggaatgttctgggcaccaagaatctttctcagatcctctctgacagagaagaaattgcacacaacatgcagtctactctggatgatgccactgatgcctggggaataaaggtggagcgtgtggaaattaaggatgtgaaactacctgtgcagctccagagagctatggctgcagaagcagaagcgtcccgcgaggcccgcgccaaggttattgcagccgaaggagaaatgaatgcatccagggctctgaaagaagcctccatggtcatcactgaatctcctgcagcccttcagctccgatacctgcagacactgaccaccattgctgctgagaaaaactcaacaattgtcttccctctgcccatagatatgctgcaaggaatcataggggcaaaacacagccatctaggctagtgtagagatgagcgctagccttccaagcatgaagtcggggaccaaattagcctttaactcataaagagagggtagggcttttctttttccatatgtcaattgtggtgttcccagaatgtatagcagttataaaaataggtgaaagaattgttagcttgtaaatactgagagattggtgatttatataaggtaatctgttagtcttaaaatagttaaaagtttgtatttttagattattatgtagtaggttagatccctcttgttttgacttccactgactcattctgaaccccctaagcacccaggccagaggcaagaacctgggctgtaactgccacctgacacgctgactggctaaa

SEQ ID NO: 227520 - DNA, 1324 bp, Homo Sapiens; identical to SEQ ID NO: 193999

SEQ ID NO: 227521 - DNA, 794 bp, Homo Sapiens
tgggttccctcagcccagccctgtccagcccggttcccgggaggatgaagttcgtgtacaaagaagagcatccgttcgagaagcgccgctctgagggcgagaagatccgaaagaaatacccggaccgggtgccggtgatagtagaaaaggctcccaaagctcggataggagacctggacaaaaagaaatacctggtgccttctgatctcacagttggtcagttctacttcttgatccggaagcgaattcatctccgagctgaggatgccttgtttttctttgtcaacaatgtcattccacccaccagtgccacaatgggtcagctgtaccaggaacaccatgaagaagacttctttctctacattgcctacagtgacgaaagtgtctacggtctgtgaagctgctgcccctgagctggaggggggtctcattctacaaagagagaggtggcccccctttcttgacctcctcctccttcaagctcaaacaccacctcccttattcaggaccggcacttcttaatgtttgtggctttctctccagcctctcttaggaggggtaatggtggagttggcatcttgtaactctcctttctcctttcttcccctttctctgcccgcctttcccatcctgctgtagacttcttgattgtcagtctgtgtcacatccagtgattgttttggtttctgttccctttcgatgcccaaggggctcagaaccccagcaatcccttcctttcactaccttcttttttgggggtagttggaagggactgaaattgtggggggaaggta

SEQ ID NO: 227522 - DNA, 841 bp, Homo Sapiens; identical to SEQ ID NO: 194001

SEQ ID NO: 227523 - DNA, 722 bp, Homo Sapiens; identical to SEQ ID NO: 194002

SEQ ID NO: 227524 - DNA, 469 bp, Homo Sapiens; identical to SEQ ID NO: 194003

SEQ ID NO: 227525 - DNA, 1442 bp, Homo Sapiens
ggagggggaggaagaggggcgtggggcctgttccccaggggctgatggcattgccctgggccctgccagcaggcttgtggcactgcccagaccccagctccgccccagcccttggggctgaccccatgctaggcaggtcctgccagaacccccaccagtcccaccccttgcctcagtccatcatggcctcgagcatctccaagaacagcttgtgcatgggcaccttgccctccagcttcaccccatagaaatgggccagcactttgcccgctgtctggcggaggagcggtagcgtgagcagcagcctgcccgcccgccgccgctcagcaccccctccggggccagcccggccggcttcatactccagcagggcctcgtgcagagcttctcgcagctgctccacagcctcggcatcttcgatgtgcacagagtctgaattggcaagggccaaggcctttagtagaacatactcctctcgctccagccgcagggcctgcagccgccgcactagttgcagcagggcagcccccagttcccccaggccagctgcccgtgccccctcttcatccaggactaagtcctcagcgaaggccagctcatcctgcagtggcagtgagcgctgggccacacccagcaccagcacctccatccacacgctctgcagtactgacatctggtcagacagcgacagcgatgagaagcctgggatgctcttggcccagctgatggtgaccacaatctctcggtcaaagaggtcacagagggtagccacggctgggaggtgcccatcagggcctgcggggtcaggcatggcatagagcttctcaggctcaaccaccagcagatgagacaccagtgcattcactggggctgctgtcttccgggggcctccagcgactgccaggggcccagcagggaaggggcccgggaagggcagtgggtccacctccggccgccgcttgtacttctgccgcccaccccggacgcggtccaggcgcactccctccttgagcatgcccacccgcaggcacttggtgaagcggcaggcctggcaggccttgcgtctccgcttggtgatctcacactcgttggaggccggacagctgtactcgatgctccctgccaggaagaggcagggctccagtggcggcctcccggggctgggaggggacccagctgacaggagagccctgactctccccgggcaagcacaggtctgggggtatggggaggaaagggagagcagggggccatgagcaggcagggaggggagtggctgctgggcgggggagccctgcctggatgagggaggagctggaccaggcagcggggctgcatctcagccccaagcctcatctctggaccacactgccctcatctgccgacatcaagggccacaaggacctctgcattgctaaatccagtggtcaattcttagccaa

SEQ ID NO: 227526 - DNA, 925 bp, Homo Sapiens; identical to SEQ ID NO: 194005

SEQ ID NO: 227527 - DNA, 1343 bp, Homo Sapiens
  misc_feature (1172)..(1205): n is a, c, g, or t
agcaatgcttttttcatttaaaagaaaagactttgtacaaaaaagttgggcagaagagatcctttctaggaggcttcagcaatggaatttagcattataagagagattggacaaaccagtccaaagtggtccgagttcttaaatccaggtagggaactcactcttctttcttctctggacctaattgggcattgggctttagtgagaccacagaccaggcccgtctctcctgtaggcttttaattcaatggcaactctatttcaaagaataaaagcctttggagagttgcggcagttctgggggcgggctcaggagagtccatagatcagccgtaactggaacgtagaatctacgtctgcctctgaatggacttcccacctcctctctcttgctctgatgcttgcctctgggcctctccatgcccaaggtggtctttcatccttgacaggctggtaatgtgctggccacctccagctcctgcatcgagtctgtaaaccagagctggttctcatggccttcgtcacgataccaggatacggaggggagcccagggccatccatacccaccccagggtaacggggctggcctggcattagtcattatttagtttccaggccaaccatccagatagagattccctctttcctttgagcagtgctctcaagagctccgtgcctgtccacaatgacctagagtgcatcctgctcattgtcagtgtagcccctcgcccctatattcatccaggatacttggaagtgctaaaataggaagggattcggctttcaactttgctaccatcttccctgaagcaggaaaatgaacatggacttaaatgttctttgaaaaaaccaaagttttaagatttgctgtgtgatgaagtgacagggagggccggagtcagcaggtgccagactttctgttctgtctgccatgggtttgtccagctcaggtagctctaggagcaccatcctgccctagcagagcccaggccttgccctcatgaagcatcattgaaatagcaggagcatgttgatttcttggttaggttgcattataataacaagagtcagaacattaattcgaaacaacttgcagtatgcatttcttcacaccagtacattcttaagtgtacttgtttataaggaataacataaactaatctgtaccttnnnnnnnnnnnnnnnnnnnnnnnnnnnnnnnnnnaactgtatagtgtacatggtaatgatttattgctatgccccagatccttaatgtagttctcatcctccgcatgccctcagccacaagcgggtgactgactgttccctgatgatttggcccacctcctgtgtttggacc

SEQ ID NO: 227528 - DNA, 736 bp, Homo Sapiens; identical to SEQ ID NO: 194010
  misc_feature (125)..(158): n is a, c, g, or t

SEQ ID NO: 227529 - DNA, 648 bp, Homo Sapiens; identical to SEQ ID NO: 194013

SEQ ID NO: 227530 - DNA, 955 bp, Homo Sapiens
actttgtacaaaaaagttggcacagtaggcactggagaggaatgattcccagtttaaccacactacggtaccttttatgaagaaaaattagagcataaaatctactacaagctccataggaactcaaagatgagggcaaaactgtgagccaagaagcagagaaagaaaatagaaccagttattcttgatttaggggacctcaaccttgggttcagtctctgaggacaaagggaaaggtagttgttggcctgcctctcgcctgcacgtcactgctggactagctgtcgcatgtggctgggagctgcaaggccagtgcttgaggggccccagcagttccacaggtggtgaagcctgagttggcagaggaggagccagaagagaactgccctttctgcactggtggaaactagttatttatgccatgtggagagccagtgagatagatagatagtctgtttgttttgaggacttggaaagttgttcctatgaagcctggagcttggatggttttgagaggttaatggtgcctccacactcactcttccctagttccaggattactgtcctagcagctaacggttctactctcttccccagagtgtagacaggcagcaggtctccccacagctctgaaaggaccctggtgacagctacaccctcagcaccaggagctggccttcctgatgagggaggcttccaggaaacacagaatccacatgaccttaagattatttacaactcagtcatggtgctgctgtcctccaggcttactggcccctcctgactggcatcaggggcttcctcagtggtggagagagtttactttcaacaactagtttattcaagaaaagaacttactgattcctctgttcctaaagcaagagtggcaagtgatcagggctggtgtagcatccggttcctttagtgcagctaactgcatttgtcactgatgacc

SEQ ID NO: 227531 - DNA, 1013 bp, Homo Sapiens
  misc_feature (751)..(760): n is a, c, g, or t
actttgtacaaaaaagtgaacaactccagcctgataggtttaggatacactcagactctaaagccaggtattaaactgacactgtcagctcttctggatggcaagaacgtcaatgctggtggccacaagcttggtctaggactggaatttcaagcataaatgaatactgtacaattgtttaattttaaactattttgcagcatagctaccttcagaatttagtgtatcttttaatgttgtatgtctgggatgcaagtattgctaaatatgttagccctccaggttaaagttgattcagctttaagatgttacccttccagaggtacagaagaaacctatttccaaaaaaggtcctttcagtggtagactcggggagaacttggtggcccctttgagatgccaggtttcttttttatctagaaatggctgcaagtggaagcggataatatgtaggcactttgtaaattcatattgagtaaatgaatgaaattgtgatttcctgagaatcgaaccttggttccctaaccctaattgatgagaggctcgctgcttgatggtgtgtacaaactcacctgaatgggacttttttagacagatcttcatgacctgttcccaccccagttcatcatcatctcttttacaccaaaaggtctgcagggtgtggtaactgtttcttttgtgccattttggggtggagaaggtggatgtgatgaagccaataattcaggacttattccttcttgtgttgtgnnnnnnnnnngcccttgcaccagagtatgaaatagcttccaggagctccagctataagcttggaagtgtctgtgtgattgtaatcacatggtgacaacactcagaatctaaatttggacttctgttgtattctcaccactcatttgttttttagcagtttaatgggtacattttagagtcttccattttgttggaattagatcctccccttccaatgctgtaattaacaacacttaaaaacttggataaatattgaaaccctc

SEQ ID NO: 227532 - DNA, 798 bp, Homo Sapiens; identical to SEQ ID NO: 194014
  misc_feature (546)..(555): n is a, c, g, or t

SEQ ID NO: 227533 - DNA, 1745 bp, Homo Sapiens; identical to SEQ ID NO: 194015
  misc_feature (1503)..(1512): n is a, c, g, or t

SEQ ID NO: 227534 - DNA, 491 bp, Homo Sapiens
aaaaaagttggctgccgtccccgggatgctgagcgcccaccgtctccccgcacccccctcatgcccggctgcgagctgcccgtgggcacctgcccggacatgtgcccggccgccgagcgcgcccagcgcgaaagggagcaccgcctgcaccgcttggaggtggtgccgggttgccgccaggacccgccccgcgcggatccgcagcgcgcggtgaaggagtacagccgacccgccgccggcaagccccggcccccgcccagccagttgcgtccgccctccgtgctgctggccaccgtgcgctacctggccggtgaggtggcggagagcgccgacatcgcctgcgccgaggtggccagcttcgtggcagaccgcttgcgagctgtgcgcctggacctggcgctgcagggagcgggcgacgccgaggcagcggtggtgctggaggaggcgctggccacgctgctggccgtaatggcgcggctcgggcccgacgc

SEQ ID NO: 227535 - DNA, 865 bp, Homo Sapiens; identical to SEQ ID NO: 194017
  misc_feature (425)..(469): n is a, c, g, or t

SEQ ID NO: 227536 - DNA, 908 bp, Homo Sapiens
atgcttttttctaaaaaacaactttgtacaaaaaagttggctactgcaaattttgtctttctgtaaatgttattaaaatatccagtgagctctttagaaggactcagtattatttcaagactatttttgaggtaattctagccttttaaaatattctacagacctacggggcttaaaagaaccccagtaccgactaagcaaataggcaaaagacatgttggaaatgtagtatagtacttgaaacagtcactatcatagggataattggtgcatcctgtgtaaatggaagctgagcttgacacctggtgcttttaagtagggataaagtcatcctctcactgcaagcacagcatacctgtacctccaaaagtgacgttttagtgaacaggccgttttcaacacttgtgccttggggtgttcattgaagctttgtgaaaactactgatgttttctcagtctccttaaagttacgtccatgctttaaaatgtctgtgtaggagagaagtggggtttataatgttttctctaagatatctttgctgctttccagactttgaaactattaagcttcttaactgcctcttaccggaaatacttctggggaaacttcatggtcccaaaatgtcattgccatacagcttcactagagttctttgaaccacagctgaaaagagctttgtattattttttaattccctccccagatatcatttaggagtattatataaaggtggtgggcaaaaacaatgtaaggagcctttccagttatcttgagttgcagctctgtagtttcttgaggccaaacacactgtattttacaagtcaaaatataatttacattaatcactatgttaatgagtatgtaaaacattcttttgcattgatgaattttgtatctgcttccatta

SEQ ID NO: 227537 - DNA, 1236 bp, Homo Sapiens; identical to SEQ ID NO: 194018

SEQ ID NO: 227538 - DNA, 1010 bp, Homo Sapiens; identical to SEQ ID NO: 194019

SEQ ID NO: 227539 - DNA, 654 bp, Homo Sapiens
  misc_feature (401)..(422): n is a, c, g, or t
tttgtacaaaaaagttgggtctgcgctaggcccgcttggagttctgagccgatggaagagttcactcatgtttgcacccgcggtgatgcgtgcttttcgcaagaacaagactctcggctatggagtccccatgttgttgctgattgttggaggttcttttggtcttcgtgagttttctcaaatccgatatgatgctgtgaagagtaaaatggatcctgagcttgaaaaaaaactgaaagagaataaaatatctttagagtcggaatatgagaaaatcaaagactccaagtttgatgactggaagaatattcgaggacccaggccttgggaagatcctgacctcctccaaggaagaaatccagaaagccttaagactaagacaacttgactctgctgattcnnnnnnnnnnnnnnnnnnnnnnaaataaaaatactattaactggacttcctaatatatacttctatcaagtggaaaggaaattccaggcccatggaaacttggatatgggtaatttgatgacaaataatcttcactaaaggtcatgtacaggtttttatacttcccagctattccatctgtggatgaaagtaacaatgttggccacgtatattttacacctcgaaataaaaaatgtgaatactgctccccacca

SEQ ID NO: 227540 - DNA, 1101 bp, Homo Sapiens
  misc_feature (798)..(806): n is a, c, g, or t
  misc_feature (922)..(972): n is a, c, g, or t
actttgtacaaaaaagttggcgctcgtgccccggaatttcagggaagagccaggtcctgtttgctgtggtgttcactgcccgatatctggacctcttcaccaactacatctcactctacaacacgtgtatgaaggtggtctacatagcctgctccttcaccacggtctggttgatttatagcaagttcaaagctacttacgatgggaaccatgacacgttcagagtggagttcctggtcgttcccacagccattctggcgttcctggtcaatcatgacttcacccctctggagatcctctggaccttctccatctacctggagtcagtggccatcttgccgcagctgttcatggtgagcaagaccggcgaggcggagaccatcaccagccactacttgtttgcgctaggcgtttaccgcacgctctatctcttcaactggatctggcgctaccatttcgagggcttcttcgacctcatcgccattgtggcaggcctggtccagacagtcctctactgcgatttcttctacctctatatcaccaaagtcctaaaggggaagaagttgagtttgccggcatagccccggtcctctccatctctctcctcggcagcagcgggaggcagaggaaggcggcagaagatgaagagctttcccatccaggggtgacttttttaagaacccacctcttgtgctccccatcccgcctcctgccgggtttcagggggacagtggaggatccaggtcttggggagctcaggacttgggctgtttgtagttttttgccttttagacaagnnnnnnnnntctttccactctttagtttttgattctgatgactcgtttttcttctactctgtggccccaatttttataaagtgtttttgagtgtcctatgggccggggcagggtccaagatcttnnnnnnnnnnnnnnnnnnnnnnnnnnnnnnnnnnnnnnnnnnnnnnnnnnnctggttgccaaacactaaatctgccgacacccatctgccccacctcctgccatggccatgaaccgcgacccccactaaatttctagattggggatagggagaaagggaggcccaggaagtctcctctga

SEQ ID NO: 227541 - DNA, 969 bp, Homo Sapiens; identical to SEQ ID NO: 194022

SEQ ID NO: 227542 - DNA, 1110 bp, Homo Sapiens; identical to SEQ ID NO: 194023
  misc_feature (298)..(306): n is a, c, g, or t

SEQ ID NO: 227543 - DNA, 925 bp, Homo Sapiens
ccaactttgtacaaagaacctgtaaacgctctcggaattatggcggcggtggatatccgagacaatctgctgggaatttcttgggttgacagctcttggatccctattttgaacagtggtagtgtcctggattacttttcagaaagaagtaatcctttttatgacagaacatgtaataatgaagtggtcaaaatgcagaggctaacattagaacacttgaatcagatggttggaatcgagtacatccttttgcatgctcaagagcccattcttttcatcattcggaagcaacagcggcagtcccctgcccaagttatcccactagctgattactatatcattgctggagtgatctatcaggcaccagacttgggatcagttataaactctagagtgcttactgcagtgcatggtattcagtcagcttttgatgaagctatgtcatactgtcgatatcatccttccaaagggtattggtggcacttcaaagatcatgaagagcaagataaagtcagacctaaagccaaaaggaaagaagaaccaagctctatttttcagagacaacgtgtggatgctttacttttagacctcagacaaaaatttccacccaaatttgtgcagctaaagcctggagaaaagcctgttccagtggatcaaacaaagaaagaggcagaacctataccagaaactgtaaaacctgaggagaaggagaccacaaagaatgtacaacagacagtgagtgctaaaggcccccctgaaaaacggatgagacttcagtgagtactggacaaaagagaagcctggaagactcctcatgctagttatcatacctcagtactgtggctcttgagctttgaagtactttattgtaaccttctatttgtatggaatgcgcttattttttgaaaggatatttgctcggatg

SEQ ID NO: 227544 - DNA, 1235 bp, Homo Sapiens
ttggcttataatgaaaaagacgacttaggtataaatcctagcaggatttggtgctatggagaaatttttggtagaatataagagtgcagtggagaagaaactggcagagtacaaatgtaacaccaacacagcaattgaactaaaattagttcgttttcctgaagatcttgaaaatgacattagaactttctttcctgagtatacccatcaactctttggggatgatgaaactgcttttggttacaagggtctaaagatcctgttatactatattgctggtagcctgtcaacaatgttccgtgttgaatatgcatctaaagttgatgagaactttgactgtgtagaggcagatgatgttgagggcaaaattagacaaatcattccacctggattttgcacaaacacgaatgatttcctttctttactggaaaaggaagttgatttcaagccattcggaaccttacttcatacctactcagttctcagtccaacaggaggagaaaactttacctttcagatatataaggctgacatgacatgtagaggctttcgagaatatcatgaaaggcttcagacctttttgatgtggtttattgaaactgctagctttattgacgtggatgatgaaagatggcactactttctagtatttgagaagtataataaggatggagctacgctctttgcgaccgtaggctacatgacagtctataattactatgtgtacccagacaaaacccggccacgtgtaagtcagatgctgattttgactccatttcaaggtcaaggccatggtgctcaacttcttgaaacagttcatagatactacactgaatttcctacagttcttgatattacagcggaagatccatccaaaagctatgtgaaattacgagactttgtgcttgtgaagctttgtcaagatttgccctgtttttcccgggaaaaattaatgcaaggattcaatgaagatatggcgatagaggcacaacagaagttcaaaataaataagcaacacgctagaagggtttatgaaattcttcgactactggtaactgacatgagtgatgccgaacaatacagaagctacagactggatattaaaagaagactaattagcccatataagaaaaagcagagagatcttgctaagatgagaaaatgtctcagaccagaagaactgacaaccagatgaatcaaatagaaataagcatgcaacatgaacagctggaaga

SEQ ID NO: 227545 - DNA, 867 bp, Homo Sapiens
  misc_feature (739)..(747): n is a, c, g, or t
ttggctccctaaagctttgccgttggaggcggctgctgcggtcttgtgagtttgaccagcgtcgagcggcagcaacatggaggaattcgactccgaagacttctctacgtcggaggaggacgaggactacgtgccgtcgggtggaaagtatagtgaagatgatgtaaattgttggtaaaagcataatagctacagaaacctaaagaaacagaaaaagttaaaatcaccaaggtgtttgattttgctggtgaagaagtaagggtaactaaggaagtggatgctacatctaaagaggccaaatccttcttcaagcagaatgagaaagaaaaaccacaggctaatgttccttcagctctgccatcactccctgccgggtcagggttaaaaagatcaagtggcatgagcagccttttggggaaaattggtgccaagaagcagaaaatgagcacccttgagaagtccaaactggactgggagagcttcaaggaggaagaggggattggtgaagaactggccatccataatcgagggaaagaggggtacattgaacggaaagccttcctcgaccgagtggatcacaggcagtttgaaattgagcgagatctcaggctgaccaaaatgaaaccttgatgttacgggctaaatcaagagcagcttaatcctgtttacaatgtgagctttttgtgcgtctgtgaaatgttttacagtgtttctcatcatctgtttcccagcaaggtcnnnnnnnnnacacacatgaagttctgtctatgtatcttaatcacaaatggtttcattcactttacttttaaaaatttgtccttaaatgaagtaaataaaataaaagttggtcctgtgagaggataatga

SEQ ID NO: 227546 - DNA, 1444 bp, Homo Sapiens; identical to SEQ ID NO: 194024

SEQ ID NO: 227547 - DNA, 1119 bp, Homo Sapiens
  misc_feature (222)..(236): n is a, c, g, or t
ttggtccatctctagcctctgtcctgtttagtttgatacgtcactgcagtaccttaagaggtgactcttaagaatgcatcccctcctgattcctcagctggttcacccttgaggttatttgcaaaaagaaaaggaggttcttgagggcaccgattgcgagcattctggtgcctggctccccgcctgggaagcgatggggtgctcagagcagcaggcaggttnnnnnnnnnnnnnnntcatagttgggttccagctcctggcttgatgagcccagggcgcttacaggcagcccatgaagttgatgacagttttagcatgagaatcacacagggtccctgtcctgggctcctctaaagccagtggatgtgctgggcaccagagacaaatcatggagatggctgctggtggctcccaggttggcccagatggggtgagctgacatactacaggcccatcccaggccccgtgggctctgcttctggggctccataccctgccctgcaggggtgctgtgtttttcacacatttctttccctgaagccttctgtaacctgtcattttccttccttcctcttccggagcctgctgctttctctggacctgtctccacctcccacacagctcatcgtgaacaccacttggtgatggagggagtggacccgtgtgtggtccccaagtgaggccactgggagtttgtccttttcctcctttgcttcactcccagcagcagacccaggttgtcaggacaggagggcctgagctaagcagtaggcatcagtctcgtttgtcttcagacggcgggggcaggtccagggtgaggctgggtggagggctgaccaaggtccaaagggcctgcgcagcctccgggagggcagcttctccagccagaggcttgtgtgagccatcgtgtgctgggcttgtttttaagtaagaaacaaggaaatcactccagattctgtcattccaaggaaagggaaggggacagttcagtttctcagctgttcttaggggtcactgagcgtctacctcctcctccagaggaggctggctcagaacacctagaggagggggccggggatgcaccccccaccagaggctgccttcagcgtctcacgggtg

SEQ ID NO: 227548 - DNA, 1071 bp, Homo Sapiens
ttggggctagagtattacaacctggaaagagctcatggtgacacccagcactgccggaaggctctgcaccgggccgtccagtgcaccagtgactacccagagcacgtctgcgaagtgttactcaccatggagaggacagaaggttctttagaagattgggatatagctgttcagaaaactgaaacccgattagctcgtgtcaatgagcagagaatgaaggctgcagagaaggaagcagcccttgtgcagcaagaagaagaaaaggctgaacaacggaaaagagctcgggctgagaagaaagcgttaaaaaagaagaaaaagatcagaggcccagagaagcgcggagcagatgaggatgatgagaaagagtggggcgatgatgaagaagagcagccttccaaacgcagaagggtcgagaacagcatccctgcagctggagaaacacaaaatgtagaagtagcagcagggcccgctgggaaatgtgctgccgtagatgtggagcccccttcgaagcagaaggagaaggcagcctccctgaagagggacatgcccaaggtgctgcacgacagcagcaaggacagcatcaccgtctttgtcagcaacctgccctacagcatgcaggagccggacacgaagctcaggccactcttcgaggcctgtggggaggtggtccagatccgacccatcttcagcaaccgtggggatttccgaggttactgctacgtggagtttaaagaagagaaatcagcccttcaggcactggagatggaccggaaaagtgtagaagggaggccaatgtttgtttccccctgtgtggataagagcaaaaaccccgattttaaggtgttcaggtacagcacttccctagagaaacacaagctgttcatctcaggcctgcctttctcctgtactaaagaggaactagaagaaatctgtaaggctcatggcaccgtgaaggacctcagctggtcaccaaccgggctggcaaaccaaagggcctggcctacgtggagtatgaaaatgaatcctcaggcgtcgcagctgtgatgaagatgggacggcatgactatc

SEQ ID NO: 227549 - DNA, 1024 bp, Homo Sapiens
ttggctcggcttcctcaacatggctgcgcccttgtcagtggagggggagttcggaggtggtgcggagctcctgtttgacggtattaagaaacatcgagtcactttgcctggacaggaggaaccctgggacatccggaacctgctcatctggatcaagaagaatttgctaaaagagcggccagagttgttcatccagggagacagcgtgcggccaggaattctggtgctgattaacgatgccgactgggagctactgggtgagctggactaccagcttcaggaccaggacagcgtcctcttcatctccactctgcacggcggctgagggcccttctctgggcctgggcacccttagaggggagaacgaagcaatcagacatccccttgggccctgcttccaggtctccctgtcccccttgcctgccttcttccctgctctgtcccctaagctccctccaggcagggaaaagaggccaggtgctaaaaatgagcctttctcaagcacgtgagcagcggaaggcagacaggcgccagagcccagcactcccttttccagcagctgtggtgggggagggttcccctccagtttgtcaagagttgaaggaggctctgtggccaggtgacctggctgccttccactccttgtacctcagtctaaacatggagtggccgctgacaaggcgctccagccccagagccagcgtcttcatggggaagatgaatggacctgagtagctgaaggaaggcccctccctacccaaagactggaggcttctcagcctcatttccctgtctgtacagctgagggctctgcctgtcccccactgctatcagtatggaaccccagctggggtcccctattgagtgccgactccccccaccgccagcagctgctcctccagccacacccctcctgctcccccacccctagcccttgaccctggctggcctgccccgctccacaggccaccagatgggctcctgagaccctccccaggctgcttacagctcattctgctggggg

SEQ ID NO: 227550 - DNA, 841 bp, Homo Sapiens
ggagggatcctggttgaaggaggacacgcagtcagtgggggcagccaggctctgggagcccaggaaggccagggcggtggcctgattgctctgctcgctgacctcggtcacatcttccaggctgtacttggtccagcgctcggggtgtgccacgtagtcggggaccggaggcacccttggtgaggcagggctccgatgggccctgcccaggccttccactggagaccggcctgagggcgctaggggccgcttgaagcctccgttgtcactcatgctggtgtgggccacagaggatggagcccgtctggccgccccctccaggcagtcaaagatgtcacggctgcgctgggagaaggtggagctcatgcctctcagatggaatggctgcaccgtggctgggaggaggcctgacgggggtgagggcggctcatcaggacctgaatcctcctccccaggcagccccatcggggacagtgcttccacttcagcaccaccgggcaagctgaggtcagagtccgagtcactgagggagactgtgtcggaaggcagcgtgtcatactccgtcccgtgttcgccctccacgctgggggacggctcacctgttcctgcctcagccatgcgtccccagggccacgccacacctctcttggctgctgggtgccagtggttgacactggagtgtgattggacagccaagcgggccaagtggacggagccctgatgaaggtcctcagcggcacaggcgtggtcgtctcaggcctcggagtgccccggcatggcctctgttcagctgctcaacggctcaaggctgctcggcagtctccatcttggtcggcgccaa

SEQ ID NO: 227551 - DNA, 980 bp, Homo Sapiens
agcaatgcttttttataatggccaactttgtacaaaaaagttgggtgaggtttgttaccgcgattctgagaggtgggcttttagtccctccagacctcggctttagtgctgtctccgcttttctttcaccttcacagagatgtcttatggtgaaattgaaggtaaattcttgggacctagagaagaagtaacgagtgagccacgctgtaaaaaattgaagtcaaccacagagtcgtatgtttttcacaatcatagtaatgctgattttcacagaatccaagagaaaactggaaatgattgggtccctgtgaccatcattgatgtcagaggacatagttatttgcaggagaacaaaatcaaaactacagatttgcatagacctttgcatgatgagatgcctggtaatagaccagatgttattgaatccattgattcacaggttttacaggaagcacgtcctccattagtatccgcagacgatgagatatatagcacaagtaaagcatttataggacccatttacaaaccccctgagaaaaagaaacgtaatgaagggaggaatgaggcacatgttctaaatggtataaatgacagaggaggacaaaaagagaaacagaaatttaactctgaaaaatcagagattgacaatgaattattccagttttacaaagaaattgaagagcttgaaaaggaaaaagatggttttgagaacagttgtaaagaatctgaaccttctcaggaacaatttgttccattttatgagggtcataataatggtctcttaaaacctgatgaagaaaagaaagatcttagtaataaagctatgccatcacattgtgattatcagcagaacttggggaatgagccagacaaatatccctgtaatggaaaagtaatacctacattttgtgacacttcatttacttctttcaggcctgaatggcagtcagtatatccttttatagtgccctatggtcccc

SEQ ID NO: 227552 - DNA, 1015 bp, Homo Sapiens
ttggggttttgctaatggcactttacagactccatggagatgtcaggtggaccatcttctagggcccagcaggagtagggaatgtgccaacagactgcccaggttgccgtggccttccccaccccccagatctcctgagtcatcatgctgtgctaatgaaagggatcatatcatcctctctggggatggtgggtgggggtgtcaatatcctggagctcccttaccccaactcaatgacttgggggtaaagttctcttccttttgttgcctacctcttcctccactcatttgggttcagaataaacatgccctgaagttaaagaggagttaagtcctaaaggaggcatttcttccccacctccctgacctggaactctggctacagccattgtaggaactccgtgcctggcctgtcagctccctgctaggctacagtggaatagcagagcccacaggcttctcgtggggagttggctccttaacatttcttggcaacagaaagccccaggcacagctcagggaggagggaaggcaggtaagctttggacgagaactggcatatttattttgacccaaatcagggatttccccagtccacccagtactgggctcttaagcaaaagtctgagaaacaagacagtggtttgaattctggggcctttgtgtaggattgtgcctgacctttatttatttattaacagcagggccactcgtctagggcagtggagtctgcgtgtctcctggggctggggcagggcattggcagttacgcagtggccctgaacctggtctggtgcccccgaacctggtctgatgccccctcagctctttgacaatcactgtggctgttgggttttctcctatttctaaaaatgttctcttctttcctaagtgacagttttgaagtattggataaccaagagctcaggtcacacagaccttggagccccatctttgcttgcagcttagctttgagatactaagcaagcgagggacttcactcttgagcctgttt

SEQ ID NO: 227553 - DNA, 972 bp, Homo Sapiens
tttgtacaaaaaagttggctttagaagaatcgaaaaacctcacagtctgtcctgatggagcactttttgaacagaagggtccagtttatgttgcatgtcagtttcctatttcattacttcaagcatgcagtggtatgaatgatcctgattttggctattctcaaggaaacccttgtattcttgtgaaaatgaacagaataattggattaaagcctgaaggagtgccaaggatagattgtgtttcaaagaatgaagatataccaaatgtagcagtttatcctcataatggaatgatagacttaaaatatttcccatattatgggaaaaaactgcatgttgggtatctacagccattggttgctgttcaggtcagctttgctcctaacaacactgggaaagaagtaacagttgagtgcaagattgatggatcagccaacctaaaaagtcaggatgatcgtgacaagtttttgggacgagttatgttcaaaatcacagcacgtgcatagtatgagtaggatatctccacagagtaaatgttgtgttgtctgtcttcattttgtaacagctggaccttccattctagaattatgagaccaccttggagaaaggtgtgtggtacatgacattgggttacatcataacgtgcttccagatcatagtgttcagtgtcctctgaagtaactgcctgttgcctctgctgccctttgaaccagtgtacagtcgccagatagggaccggtgaacacctgattccaaacatgtaggatggggttcttgtcctctttttatgtggtttaattgccaagtgtctaaagcttaatatgccgtgctatgtaaatattttatggatataacaactgtcatattttgatgtcaacagagttttagggataaaatggtacccggccaacatcaagtgactttatagctgcaagaaatgtggtatgtggagaaagttctgtatgtgaggagg

SEQ ID NO: 227554 - DNA, 889 bp, Homo Sapiens; identical to SEQ ID NO: 194034

SEQ ID NO: 227555 - DNA, 1223 bp, Homo Sapiens
ttgggggaaagagccggtgaaggggcagaacaggcaggttccctcgacccaggaccccctgttcccaggctatggcccccagtgccctgtagacctggcaggccccccgtgcttgcgacccctatttgggggtctgggtggctactggagggccttgcagaggggcagagaaggcaggaccatgacatctagggcctctgaactttctccggggcgcagcgtgacggctggcatcatcattgttggagatgagatccttaagggacacactcaggacaccaacaccttctttctgtgccggacactgcgctccctaggggtccaggtttgccgagtctcagttgtacctgatgaggtagccaccattgcagctgaggtcacttctttctccaaccgcttcacccatgtcctcacagcagggggcatcggccccactcatgatgatgtgacctttgaggcagtggcacaggcctttggagatgagctgaagccacaccccaagttggaagcagccaccaaagccctaggaggggaaggctgggagaagctatcattggtgccctcctctgcccgcctgcattatggcacagatccttgcactggtcaacctttcagattccctctggtctccgtccgaaacgtctacctcttcccaggcattccagagctgctgcggcgggtgctggaggggatgaagggactattccaaaacccagctgttcagttccactcaaaggagctatatgtggctgctgatgaagcctccatcgcccccattctggctgaggcccaggcccactttggacgtaggcttggcctgggttcctaccctgactggggcagcaactactatcaggtgaagctgactctagactcagaggaagaaggacccctggaggaatgcttggcctacctgactgcccgtttgccccagggatcgctggtcccctacatgcccaacgctgtggagcaggccagtgaggctgtatacaaactcgctgaatcagggtcttctttggggaaaaaggtggcaggtgccctacagaccattgagacctccctggctcagtacagcctcacccagctctgtgtgggcttcaacgggggcaaagactgcactgccctcctgcacctcttccatgcagctgtgcagagggaaattacctgatgttcaaaaccccctccagatccctgtatatccgcagcatctcctctttccctga

SEQ ID NO: 227556 - DNA, 964 bp, Homo Sapiens; identical to SEQ ID NO: 194035

SEQ ID NO: 227557 - DNA, 1056 bp, Homo Sapiens; identical to SEQ ID NO: 194039

SEQ ID NO: 227558 - DNA, 786 bp, Homo Sapiens; identical to SEQ ID NO: 194040

SEQ ID NO: 227559 - DNA, 1081 bp, Homo Sapiens
ttggcttcgtttaggtcggctggaaattatgtcctccgtcggttttccgcagtttttccaccaagcgagatatttttgggagttattccctaaataactgcattatatgctcctttcatgacgaaattgctgccgtggagaagactggaggaaactcgaggaagagggagaagccgacaagtgctcgacgggctaggaactgtcctgcttgggtgttagcgtttcccgccgggccagtaaggctgagtgacccggcgtggctactaggagaagggggtacggtcctgctagtagaggaatatgtcgagtttctctagggcgccccagcaatgggccacttttgctagaatatggtatctcttagatgggaaaatgcagccacctggcaaacttgctgctatggcatctataagacttcagggattacataaacctgtgtaccatgcactgagtgactgtggggatcatgttgttataatgaacacaagacacattgcattttctggaaacaaatgggaacaaaaagtatactcttcgcatactggctacccaggtggatttagacaagtaacagctgctcagcttcacctgagggatccagtggcaattgtaaaactagctatttatggcatgctgccaaaaaaccttcacagaagaacaatgatggaaaggttgcatctttttccagatgagtatattccagaagatattcttaagaatttagtagaggagcttcctcaaccacgaaaaatacctaaacgtctagatgagtacacacaagaagaaatagacgccttcccaagattgtggactccacctgaagattatcggctataagagaataagaattgcagaaaataacagtgaagtgattgaaactttcttctgatgagtttctctaacctacaggatggagtaaaacaactgctacagttcagcacctgttttatgtgccgaatcactgtggggaaaggtcaggaaggtatagtccttcaataggaaattgtaattaaaatataattttatagaaaccatttttatgtaatctgatttgaatgttatagttgataataataaaatc

SEQ ID NO: 227560 - DNA, 866 bp, Homo Sapiens
ctttgtacaaaaaagttggctccagtttgcctcctgctatatccattggaagagaaaagtttgtgacttgggcccccaagttttgagagaactgggctttcggcgcggggggacagaggaggctcgtggggagctttccccatggagcttacccagcctgcagaagacctcatccagacccagcagacccctgcctcagaacttggggaccctgaagaccccggagaggaggctgcagatggctcagacactgtggtcctcagtctctttccctgcacccctgagcctgtgaatcctgaaccggatgccagtgtttcctctccacagggcagctccctgaagcactccactactctcaccaaccggcagcgagggaacgaggtgtcagctctgccggccaccctagactccctgtccatccaccagctcgcagcacagggggagctggaccagctgaaggagcatttgcggaaaggtgacaacctcgtcaacaagccagacgagcgcggcttcacccccctcatctgggcctccgcctttggagagattgagaccgttcgcttcctgctggagtggggtgccgacccccacatcctggcaaaagagcgagagagcgccctgtcgctggccagcacaggcggctacacagacattgtggggctgctgctggagcgtgacgtggacatcaacatctatgattggaatggagggacgccactgctgtacgctgtgcgcgggaaccacgtgaaatgcgttgaggccttgctggcccgaggcgctgacctcaccaccgaagcccactctggctacaccccgatggaccttgccgtggccctgggataccggaaagtgcaacaggtgatcga

SEQ ID NO: 227561 - DNA, 863 bp, Homo Sapiens
  misc_feature (711)..(721): n is a, c, g, or t
ttgggtaggctctgtgcccagccctgggggcctctcctctcaccctgggccttcgcagggcagccatgccagaggcctgccctggaaggctgtggctgtggagctgagtggatagaggccggcagagggctgagcagagggagcagcggggggtgcagagccccaggttggaggcctgggccgtgacagtagtgccctggggctacagtgggattggcaccgcagctcacctggggagggaggggagctgcggcccgtcaggcatgcagtgggctgggggtcgagctgggtgggccgtgggccttactcgctcatcccctgggagtgacaaaggggcccacgagtcccttgccctgggccgggctggggcacagcctcaccctctgccctcccccaggtccccagcgggacgcccaggcggcgcgggagttcatcctgaagatgttcgtggacctgaaccccgacagcgacaagatcatctactcacacttcacgtgtgccaccgacacggagaacatccgcttcgtgttcgcggccgtgaaggacaccatcctgcagctcaacctcaaggagtacaacctggtctgagcgcccaggcccagggagacgggatggagacacggggcaggaccttccttccacggagcctgcggctgccgggcgggtggcgctgccgagtccgggccggggcctctgcccgcgggaggagannnnnnnnnnncatatttttaacaaatggtttttatttcacagttatcaggggatgtacatctctccctccgtacacttcgcgcaccttctcaccttttgtcaacggcaaaggcagcctttttctggccttgacttatggctcgcttttttct

SEQ ID NO: 227562 - DNA, 1275 bp, Homo Sapiens
  misc_feature (1016)..(1038): n is a, c, g, or t
ttggcttggtgaaacctcaggccaagaagaaggctggagaccaggaagaagagagctgtgaattctccagtgctctggagtacttgaaattacttcattcttttgtggactctgtgggggttatgagccccccactctccaggagctccgtgctcaagtccgccctgggtccagacatcatctgtcggtggtggacgtctgcaatcactgtggccatcagctggctccagggagacgatgcagctgtgcgctctcattttaccaaagtggaacgcatccccaaggccctggaagtgacagagagccccctggtgaaggccatcttccatgcctgcagagccatgcatgcctcactccctgggaaagcagatgggcagcagagttccttctgccattgcgagagggccagtggccacctatggagcagcctcaacgtcagtggggccacctctgaccctgccctcaaccacgtggtccagctgctcacctgtgacctgctactgtcgctacggacagcgctctggcaaaaacaggccagtgccagccaggctgtgggggagacctaccacgcgtcaggcgctgaactggcgggcttccaacgggacctgggcagcctgcgcaggctggcacacagcttccgcccagcataccgcaaggtgttcctgcatgaagccaccgtgcgcctgatggcaggagccagccccacccgcacccaccagctgctggaacacagcctgcggcggcgcaccacgcagagcaccaagcacggagaggtggatgcctggcccggccagcgagagcgggccaccgccatcctgctggcctgccgccacctgcccctctccttcctctcctccccgggccagcgggcagtgctgctggccgaagctgcccgcaccctggagaaggtgggcgaccggcgctcctgcaacgactgccagcagatgattgttaagctgggtggtggcactgccattgccgcctcctgaccaccaggctcagcccacccctccacnnnnnnnnnnnnnnnnnnnnnnncccctcagcatcttcccgctgagagtggtggggaagagccttgtcttcttagctgtcacctgccgaggcttctgggccactcagccagtgcacccctgggcagagccccttaaagctgctgtcactagatgcccatggtccaggcctggtgggcgtgagaggataggtggcagggcagaaactggggcagccctgacttgatagcagcaggggagctcccaagctgccaagcccctg

SEQ ID NO: 227563 - DNA, 1108 bp, Homo Sapiens
gccaactttgtacaaaaaagttgggttagctcgctttgagccagaggtgaaagcgtgcttatgggttttcttgtggagattcaccatctactccaaaaatgccacagtgggacagtcagttttgaatattaagtacaaaaatgatttttcccctaacctgagatatcagccacccagtaaaaatcaaaaaatctggtatgctgtttgtacaattggtggcaggtggttagaagaacgatgctatgatttgtttcgaaaccatcatttagcatcatttgggaaagtcaagcagtgtgtgaattttgtgattggacttttgaaattaggtgggctgattaattttttgattttccttcagaggggaaagtttgcaactttgacagaacgtctcctaggtattcattctgtattttgcaagcctcaaaacatacgtgaagttggctttgaatacatgaatagggaacttctctggcatggttttgctgaatttctgatttttctcttaccacttatcaatgtccagaagttgaaagccaagctgtcttcatggtgtattcctcttactggtgcacctaatagtgacaatacattagccaccagtggcaaagaatgcgctctatgtggagagtggcccaccatgcctcacaccataggatgtgagcatattttctgttatttctgtgctaagagtagtttcttatttgacgtgtactttacttgtcctaagtgtggcacagaagtacacagtctgcagccactgaaatcaggaatcgagatgtcagaagtaaatgctctttagaaactaaaattgcttcctttgaggaaaaaaatgcaccgtgtttaaattcttatattagtcatcctaagtataccatttatgtatcctttataaggaatgtgctcctagccactgtcttctcctttccaggcatgactgaaatctaatcactggaaaccatgtgattctaaatatattatgtaaatgttaatgtattatgttttttaaatcattgcattcaatttttaatgtcaagaataatggacagcttttgtcaagggactactaacaatgctccttcattttactacttcttaaaacaaagttgga

SEQ ID NO: 227564 - DNA, 1255 bp, Homo Sapiens
ttggttgggctcaaggactgtgtgaaccaacaaggggccagttttccattgttgtggtgaactgtcaagtgcaatttgcaataagttatcatgaaaagtttttagattacacgatcgcatatgctgcatttcacattttattggacattttaccccactgagtggtaaaaaggacagaggctacagatggagttgctttgtttatgaaagtattttggtttgttttctttcatttaattgcctcatatttaaaaaccatgggtccactgttaaaaccacatgtgtatgtgcagctttacattttattttacgtgaagcatgtgattaggaaaactcattttcttttcaagcctcaggacctacctgaagagaagttttcttgtagctcaagttgtgcatgaattactgaatattttactgtgcttttcttcatgaagggtacatgctttgtactcttcactgaaagctgaaaacatttcttgttaccctcttttgtgcctttttattttgccaaccgtgtttatagaaaggacattactaatgacattttgcagattaaaaacattcatttgaacacagtagtcccctagaaaaacaactctacaaaaattttgcagccttattcattataattttaataaaattaacacaaaatcagtcaagaaggaaacatgtatattagtgaagtgtttttggagactgtttgaatgtgaccaaatgtggttctagttgacttcttttcactttggcttatatcaactcttgagagttaatgtgatcatgatattgcaaacaactataaatggtctctaggccttactttgtgattatacgttatctctggctagaaaaaaataatggtagtaaagaaactgacaaactgaaaataagaaaacaaaaatcaaatgcctataataccataatgccagtttggtatagagtccaactttaaaacatgaattgctcgacagagttctattcagtaggtgtttctttgtattgtcttttgtgaatttattatgaaaatgctgcgttgtgttgaatgaaaaagacccaaattactgcttatgaagaaataaagccagcattgatcacttaatcctgtttctcatgtccagccagaaaaagaacttcagtgaaggtaagataaataaatacatacacatatgtttttttggtagataagtgctaattacatatatgtaatgctttattaaatttctgaaatatttggtaactaaaattttctttttgg

SEQ ID NO: 227565 - DNA, 1035 bp, Homo Sapiens
ttggatctctgtgtatagttcatggtacctgtgtgctctgtggctaggtcctcagagtcagtccctgggcaggtactgtcagccttcagttttccccacagactgtgttcctgggcctgaatcgctcagactacatgttccagcgcagcgcagatggctccccagccctgaaacagatcgaaatcaacaccatctctgccagctttgggggcctggcctcccggaccccagctgtgcaccgacatgttctcagtgtcctgagtaagaccaaagaagctggcaagatcctctctaataatcccagcaagggactggccctgggaattgccaaagcctgggagctctacggctcacccaatgctctggtgctactgattgctcaagagaaggaaagaaacatatttgaccagcgtgccatagagaatgagctactggccaggaacatccatgtgatccgacgaacatttgaagatatctctgaaaaggggtctctggaccaagaccgaaggctgtttgtggatggccaggaaattgctgtggtttacttccgggatggctacatgcctcgtcagtacagtctacagaattgggaagcacgtctactgctggagaggtcacatgctgccaagtgcccagacattgccacccagctggctgggactaagaaggtgcagcaggagctaagcaggccgggcatgctggagatgttgctccctggccagcctgaggctgtggcccgcctccgcgccacctttgctggcctctactcactggatgtgggtgaagaaagggaccaggccatcgccgaggcccttgctgcccctagccggtttgtgctaaagccccagagagagggtggaggtaacaacctatatggggaggaaatggtacacgccctgaaacagctgaagacagtgaggagagggcctcctacatcctcatggagaagatcgaacctgagcctttgagaattgcctgctacggcctggcagccctgcccgagtggtccagtgcatttcagagctgggcatcttt

SEQ ID NO: 227566 - DNA, 596 bp, Homo Sapiens
ccaactttgtacaaaaaagttggcattgccttctgttttctccagcatgcgcttgctccagctcctgttcagggccagccctgccaccctgctcctggttctctgcctgcagttgggggccaacaaagctcaggacaacactcggaagatcataataaagaattttgacattcccaagtcagtacgtccaaatgacgaagtcactgcagtgcttgcagttcaaacagaattgaaagaatgcatggtggttaaaacttacctcattagcagcatccctctacaaggtgcatttaactataagtatactgcctgcctatgtgacgacaatccaaaaaccttctactgggacttttacaccaacagaactgtgcaaattgcagccgtcgttgatgttattcgggaattaggcatctgccctgatgatgctgctgtaatccccatcaaaaacaaccggttttatactattgaaatcctaaaggtagaataatggaagccctgtctgtttgccacacccaggtgatttcctctaaagaaacttggctggaatttctgctgtggtctataaaataaacttcttaacatgcttctccaacaat

SEQ ID NO: 227567 - DNA, 1081 bp, Homo Sapiens
ttgggcaacgtggggactcaggcgcgctgggcggcaggagttgcttccggccgtgttggtggtctgaattgagaagccgcgactaagggaagatggagacaatactggagcagcagcggcgctatcatgaggagaaggaacggctcatggacgtcatggctaaagagatgctcaccaagaagtccacgctccgggaccagatcaattctgatcaccgcactcgggccatgcaagataggtatatggaggtcagtgggaacctgagggatttgtatgatgataaggatggattacgaaaggaggagctcaatgccatttcaggacccaatgagtttgctgaattctataatagactcaagcaaataaaggaattccaccggaagcacccaaatgagatctgtgtgccaatgtcagtggaatttgaggaactcctgaaggctcgagagaatccaagtgaagaggcacaaaacttggtggagttcacagatgaagagggatatggtcgttatctcgatctccatgactgttacctcaagtacattaacctgaaggcatctgagaagctggattatatcacatacctgtccatctttgaccaattatttgacattcctaaagaaaggaagaatgcagagtataagagatacctagagatgctgcttgagtaccttcaggattacacagatagagtgaagcctctccaagatcagaatgaactttttgggaagattcaggctgagtttgagaagaaatgggagaatgggacctttcctggatggccgaaagagacaagcagtgccctgacccatgctggagcccatcttgacctctctgcattctcctcctgggaggagttggcttctctgggtttggacagattgaaatctgctctcttaactttagcttgaaatgtggcgggaccctacaagagcgagcccagagactattcagtaccaaaggaaagtccctggagtctcttgatacctctttgtttgcccaaaatcccaagtctgatggcaccaagcgagactctgaaaggaccctagacattgcttttctagaagcccagatctatgaatat

SEQ ID NO: 227568 - DNA, 748 bp, Homo Sapiens; identical to SEQ ID NO: 194048

SEQ ID NO: 227569 - DNA, 795 bp, Homo Sapiens
tttgtacaaaaaagttggcaatgatgaaactcagatggagcttcctactcatgttgatttatgtctcacaatcctgggtattgttaattcaacatagggtgaaactatttctgataaagaacttttgaaaaactttttatactctaaagtgatactcagaacaaaagaaagtcataaaactcctgaatttaatttccccacctaagtcgagacagtattatcaaaacacatgtgcacacagattattttttggctccaaaactggattgcaaaagaaagaggagaagaatattttgtgtgttcctggtattcttttataagtaaagtttacccaggcatggaccagcttcagccagggacaaaatcccctcccaaaccactctccacagctttttaaaaatacttctactcttaacaattacctaaggcttcctcaactgccccaaatctcttaatagcttctagtgctgctacaatctaagtcaggtcaccagagggaagagaacatggcattaaaagaatcacatcttcagaagagaagacactaatattattacccatatacatgatttcagaagatgacataagattcctcttaaagaggaaatgtcaggaatcaagccactgaatccttaaagagaaaagttgaatatgagtcattgtgtctgaaaactgcaaagtgaacttaactgagatccagcaaacaggttctgtttaagaaaataatttatactaaatttagtaaaatggacttcttatttcaaagcatcaataattaaaagaattattttaatg

SEQ ID NO: 227570 - DNA, 1426 bp, Homo Sapiens
cccatatctactacagcaggtcttcaagcttattatcctgtcatgagttcataaagatgacaaactcatcatttgggagctataaggtcaaagtggccagaatgcaactgcgctgttacactgtgcaaaatcaagtcaactgtcttgtaggtccttggctgtctcttgttataacctcgaacacttaaaaaaggaaacctcaagtatgctgagataattatcagaatgttcaggtacctttgttcctgaatatcaagtaatagggctcatctctgtgactgcttgcgacaagcacatagggcaactcattaccaactgctcattataaatgctgagctcttgagttcctgaggagggggtgggctctagactatcgagggctgagtcaactaggtgaagggccaacctgtacagttctaagtcttattttggttctgggcacatttcagttctgctccaagtccgctttgctccaattcagcgatgacagacatatatttgaactcatttggtctgaggttaaaggtctccactaacccgtaggtctctttccgatcagtagcgtagaagagctgaacttggttggcgatgcactgtgcctcagcaacattcagaaatgtggaatccatttctgcagtcatcagcactatgcccttttcttccttaagttcaggatagtgatataaaatcagctggctggctgcagcttcccctcgggtctgaatatttataagtgcagtgaagtggagttcagtacctgtccattgtcctacaaaaaactcataaccttcccttcttggcagagcacatagaaatgttggacaggactgagcccggttccagatcaaatcaaacttttctgcaggaataactgcgtagactgtatcttttgctgcaaaatattgctgccaaatctgttttatttcttctgcagttttttcttttaccatctcaatgttaaagattgaactgagagtcttgtccttagtgaatcctctgttcacagactgtttccccaaggcatctgtcttctgttccacacatttgataaaatcaccttgcctggaatgccccactggctgcttccgaaattcactgcgtttctccaggcgggactcaaaagcagctgggtctgacctgcgcagcagctggatcttgtcgcggtagcggtcgtagaaagggttggcctggagctcggcctcggccccgaccccgctgccgtcggcgcccccctcgggccggcccgagccggggcgcactgggaagacgcgcagctgcgcgggtgacacgagccccaggcccagggcgcggctgcgcaccgcgcacaggccccggtagagaccggccacctgcaggaccgccggtcccgcgccacccgcagccgccaccaccacagcagccatggccgcccccgcctcctccccaa

SEQ ID NO: 227571 - DNA, 854 bp, Homo Sapiens
tttgtacaaaaaagttgggaacaaacaggacacattggagctggagagcccctcgctgacatccaccccagtgtgcagccagaaggtggtggtcaccacaccactgcaccgggacaagacacccctgcaccagaaacatgctgcgtttgtaaccccagatcagaagtactccatggacaacactccccacacgccaaccccgttcaagaacgccctggagaagtacggacccctgaagcccctgccacagaccccgcacctggaggaggacttgaaggaggtgctgcgttctgaggctggcatcgaactcatcatcgaggacgacatcccgcccgagaagcagaagaggaagcctgggctgcggcggagccccatcaagaaagtccggaagtctctggctcttgacattgtggatgaggatgtgaagctgatgatgtccacactgcccaagtctctatccttgccgacaactgccccttcaaactcttccagcctcaccctgtcaggtatcaaagaagacaacagcttgctcaaccagggcttcttgcaggccaagcccgagaaggcagcagtggcccagaagccccgaagccacttcacgacacctgcccctatgtccagtgcctggaagacggtggcctgcggggggaccagggaccagcttttcatgcaggagaaagcccggcagctcctgggccgcctgaagcccagccacacatctcggaccctcatcttgtcctgaggtgttgagggtgtcacgagcccatttctcatgtttacaggggttgtgggggcagagggggtctgtgactctgagagtcattcaggtgacctcctgcagggagccttctgcc

SEQ ID NO: 227572 - DNA, 950 bp, Homo Sapiens
tgtacaaaaaagttgggtcaagatggaggagtacgcgcgagagccttgcccatggcgaattgtggatgactgtggtggggcctttacgatgggtaccattggtggtggtatctttcaagcaatcaaaggttttcgcaattctccagtgggagtaaaccacagactacgagggagtttgacagctattaaaaccagggctccacagttaggaggtagctttgcagtttggggagggctgttttccatgattgactgtagtatggttcaagtcagaggaaaggaagatccctggaactccatcacaagtggtgccttaacgggagccatactggcagcaagaaatggaccagtggccatggttgggtcagccgcaatgggtggcattctcctagctttaattgaaggagctggtatcttgttgacaagatttgcctctgcacagtttcccaatggtcctcagtttgcagaagacccctcccagttgccttcaactcagttaccttcctcaccttttggagactatcgacaatatcagtaggacttctttcctaggatttctttaacagaacgagttgtggttcgagaaggatttcagaagatcaagttacagtctgtttttaaaaccataggtgggacagctatggccaataggctataaagagacatttagcacttttttctatttaaaggaacaagcggggaagggtgctaaaagataatacgtttatttattcacacttgaattgcatttgtgatcaaaataaatgtttaaatcgctaaaggaaaatacagtaagtgcttgaaagatgaaggaccaaaaggccaaaaaacagtgaaatatgatcatcatttccttgcggacttctctgcctggttttgtgtgttctgttattcaaacaataaaaagctggtggaacttactctttcttttaagataagttgtagacttc

SEQ ID NO: 227573 - DNA, 867 bp, Homo Sapiens; identical to SEQ ID NO: 194051

SEQ ID NO: 227574 - DNA, 850 bp, Homo Sapiens
ttggccttaaaaaccggagctggcgcttggcatcgccactctgggcaggatccaacgtcgctccagctgctcttgacgactccacagataccccgaagccatggcaagcaagggcttgcaggacctgaagcaacaggtggaggggaccgcccaggaagccgtgtcagcggccggagcggcagctcagcaagtggtggaccaggccacagaggcggggcagaaagccatggaccagctggccaagaccacccaggaaaccatcgacaagactgctaaccaggcctctgacaccttctctgggattgggaaaaaattcggcctcctgaaatgacagcagggagacttgggtcggcctcctgaaatgacagcagggagacttgggtgaccccccttccaggcgccatctagcacagcctggccctgatctccgggcagccaccacctcctcggtctgccccctcattaaaattcacgttcccaccctgtgtccacttcatgattcctcgcaagctgggcccagtcctctcatcccaagagcagagccaccgtagccggagtcctagcctcccaaattcggaaatccaatccaacggtctcaggaatgttttctatcccgccacgcgtctcctgaagctcccagaccggaggctcagcccccatctcggttagtgcccctctcccgcccgactttagagccagcccctgccccttattccctgccccaggatcccggcccctcctgggagctgggctggactcggtcctcagatcctcggaaggctcagctctgggcggggcaagggaccttgcaagtcggggggcctcgggaacttctctccgccagctgcga

SEQ ID NO: 227575 - DNA, 935 bp, Homo Sapiens
ttggccgctcgtgtccgtcaacatggaggcagaggaatcggagaaggccgcaacggagcaagagccgctggaagggacagaacagacactagatgcggaggaggagcaggaggaatccgaagaagcggcctgtggcagcaagaagcgggtagtgccaggtattgtgtacctgggccatatcccgccgcgcttccggcccctgcacgtccgcaaccttctcagcgcctatggcgaggtcggacgcgtcttctttcaggctgaggaccggttcgtgagacgcaagaagaaggcagcagcagctgccggaggaaaaaagcggtcctacaccaaggactacaccgagggatgggtggagttccgtgacaagcgcatagccaagcgcgtggcggccagtctacacaacacgcctatgggtgcccgcaggcgcagccccttccgttatgatctttggaacctcaagtacttgcaccgtttcacctggtcccacctcagcgagcacctcgcctttgagcgccaggtgcgcaggcagcgcttgagagcggaggttgctcaagccaagcgtgagaccgacttctatcttcaaagtgtggaacggggacaacgctttcttgcggccgatggggaccctgctcgcccagatggctcctggacatttgcccagcgtcctactgagcaggaactgagggcccgtaaagcagcacggccagggggacgtgaacgggctcgcctggcaactgcccaggacaaggcccgctccaacaaagggctcctggccaggatctttggagccccgccaccctcagagagcatggagggaccttcccttgtcagggactcctgagggcctgggtggccccttccatttcctggccctgctctgcttcctgtctacctcatactagaatgatcgtgactaccccgggcagacattttac

SEQ ID NO: 227576 - DNA, 1114 bp, Homo Sapiens
ttggggaacattatctggacagtattgaaaaccttccctttgaattacagagaaactttcagctcatgagggacctagaccaaagaacagaggacctgaaggctgaaattgacaagttggccactgagtatatgagtagtgcccgcagcctgagctccgaggaaaaattggcccttctcaaacagatccaggaagcctatggcaagtgcaaggaatttggtgacgacaaggtgcagcttgccatgcagacctatgagatggtggacaaacacattcggcggctggacacagacctggcccgttttgaggctgatctcaaggagaaacagattgagtcaagtgactatgacagctcttccagcaaaggcaaaaagagccggactcaaaaggagaagaaagctgctcgtgctcgttccaaagggaaaaactcggatgaagaagcccccaagactgcccagaagaagttaaagctcgtgcgcacaagtcctgagtatgggatgccctcagtgacctttggcagtgtccacccctctgatgtgttggatatgcctgtggatcccaacgaacccacctattgcctttgtcaccaggtctcctatggagagatgattggctgtgacaaccctgattgttccattgagtggttccattttgcctgtgtggggctgacaaccaagcctcgggggaaatggttttgcccacgctgctcccaagaacggaagaagaaatagataagggccttggattccaacacagtttcttccacatcccctgacttgggctagtgggcagaggaatgcctgtgctggggccaggggttcagggaggagtggatggcacagtgctgtcatcccttctcctcccctctccccactcccggtgctgaagctgcatcagaccctggtagggaggggtgccgcagccactaacggtatgtgctctccttcagccctctccctttcggagggacgtggtcttgcccactgtccttttgcctccatgctgaggtcggtgctgtatttcagagggagggtccttttcattctctttgctttgtatttaagactggggcatagcatgggggcagtcccccagactcttcattcccctcctg

SEQ ID NO: 227577 - DNA, 855 bp, Homo Sapiens
  misc_feature (152)..(193): n is a, c, g, or t
gctcgtcttcctcgtcactggaggaatcctcactgctagaactcttccgggtaggggtggtagctgctttcactggggcttggccacaacttgctttttaggtacagtcttcttgggggtggctgctgccttctcctcctctgagtcatcannnnnnnnnnnnnnnnnnnnnnnnnnnnnnnnnnnnnnnnnnttaccattggctattttaggtgctgctcgagctggtttgggaggggctttagtctgagctttaactgtcacaggtgttatctttggcttctggttctttggtggctcatcctcggagcttgagtcagaatcagaatcagagctcttggccttcttaggaggagctttggctgccttggcttggggcttaactcccttctggacaggctgtttcttttggtcctcctcatcatcatcatcactggactcttcactgctgctactctctgatgctttggctgcagccttcccaggaggcagaccgactcgcttggcaggtacagcagccttctttgctggaggcccttgaacttcctcctcctcctcgctgctgtcctcactgtcactggatgaggccttcttcttagctttcttagccactggtccatttgcctgtaactttcgctctgggaccttggcagacctgttgagccagaagctatagatgtctaagagggaagaggcattggcatcctgctgtgtagctcctgtcgctttggcgaacttattggccacctctgagagttggttatcgcgcaggaagccgagcacgaggggatacaggtcgctgggaaccacgcggcgaatgccggcgtccgccatcctccaggcaatacgcgccaa

SEQ ID NO: 227578 - DNA, 619 bp, Homo Sapiens
tgtacaaaaaagttggctttgccagtacaggagctcgtgccgtggcccacagcccacagcccacagccatgggctgggacctgacggtgaagatgctggcgggcaacgaattccaggtgtccctgagcagctccatgtcggtgtcagagctgaaggcgcagatcacccagaagatcggcgtgcacgccttccagcagcgtctggctgtccacccgagcggtgtggcgctgcaggacagggtcccccttgccagccagggcctgggccccggcagcacggtcctgctggtggtggacaaatgcgacgaacctctgagcatcctggtgaggaataacaagggccgcagcagcacctacgaggtgcggctgacgcagaccgtggcccacctgaagcagcaagtgagcgggctggagggtgtgcaggacgacctgttctggctgaccttcgaggggaagcccctggaggaccagctcccgctgggggagtacggcctcaagcccctgagcaccgtgttcatgaatctgcgcctgcggggaggcggcacagagcctggcgggcggagctaagggcctccaccagcatccgagcaggatcaagggccggaaataaaggctgttgt

SEQ ID NO: 227579 - DNA, 963 bp, Homo Sapiens
ctttgtacaaaaaagttggagcatctcttcttttttccacctcgccttccgcggattcccagcttgagaaacacctctttgccccgtcatgccaaagaggaaagtgaccttccaaggcgtgggagatgaggaggatgaggatgaaatcattgtccccaagaagaagctggtggaccctgtggctgggtcagggggtcctgggagccgctttaaaggcaaacactctttggatagcgatgaggaggaggatgatgatgatggggggtccagcaaatatgacatcttggcctcagaggatgtagaaggtcaggaggcagccacactccccagcgaggggggtgttcggatcacaccctttaacctgcaggaggagatggaggaaggccactttgatgccgatggcaactacttcctgaaccgggatgctcagatccgagacagctggctggacaacattgactgggtgaagatccgggagcggccacctggccagcgccaggcctcagactcggaggaggaggacagcttgggccagacctcaatgagtgcccaagccctcttggagggacttttggagctcctattgcctagagagacagtggctggggcactgaggcgtctgggggcccgaggaggaggcaaagggagaaaggggcctgggcaacccagttcccctcagcgcctggaccggctctccgggttggccgaccagatggtggcccggggcaaccttggtgtgtaccaggaaacaagggaacggttggctatgcgtctgaagggtttggggtgtcagaccctaggaccccacaatcccacacccccaccctccctggacatgttcgctgaggagttggcggaggaggaactggagaccccaacccctacccagagaggagaagcaaagtcgcggggagatggtctggtggatgtgatgtgggaatataagtgggagaacacggggga

SEQ ID NO: 227580 - DNA, 722 bp, Homo Sapiens
  misc_feature (150)..(179): n is a, c, g, or t
ttggctccagacaaaggaagagcaacggaagaaacgcgagcaagaacgaaaggagaagaaagcaaaggttttgggaatgcgaaggggcctcattttggctgaagattaataattttttaacatcttgtaaatattcctgtattctcaacnnnnnnnnnnnnnnnnnnnnnnnnnnnnnngctgtcatccccactttagtcacgagatctttttctgctaactgttcatagtctgtgtagtgtccatgggttcttcatgtgctatgatctctgaaaagacgttatcaccttaaagctcaaattctttgggatggtttttacttaagtccattaacaattcaggtttctaacgagacccatcctaaaattctgtttctagatttttaatgtcaagttcccaagttccccctgctggttctaatattaacagaactgcagtcttctgctagccaatagcatttacctgatggcagctagttatgcaagcttcaggagaatttgaacaataacaagaatagggtaagctgggatagaaaggccacctcttcactctctatagaatatagtaacctttatgaaacggggccatatagtttggttatgacatcaatattttacctaggtgaaattgtttaggcttatgtaccttcgttcaaatatcctcatgtaattgccatctgtcactcactatattcacaaaaataaaactctacaactcattct

SEQ ID NO: 227581 - DNA, 1109 bp, Homo Sapiens
  misc_feature (1010)..(1026): n is a, c, g, or t
ttggggcggcggcagggctgagccagcgacgccctccattcactctccgcgcccgttctccggctgtcctcccgttccgctgcccgccctgccaccatgacggaacaggccatctccttcgccaaagacttcttggccggaggcatcgccgccgccatctccaagacggccgtggctccgatcgagcgggtcaagctgctgctgcaggtccagcacgccagcaagcagatcgccgccgacaagcagtacaagggcatcgtggactgcattgtccgcatccccaaggagcagggcgtgctgtccttctggaggggcaaccttgccaacgtcattcgctacttccccactcaagccctcaacttcgccttcaaggataagtacaagcagatcttcctggggggcgtggacaagcacacgcagttctggaggtactttgcgggcaacctggcctccggcggtgcggccggcgcgacctccctctgcttcgtgtacccgctggatttcgccagaacccgcctggcagcggacgtgggaaagtcaggcacagagcgcgagttccgaggcctgggagactgcctggtgaagatcaccaagtccgacggcatccggggcctgtaccagggcttcagtgtctccgtgcagggcatcatcatctaccgggcggcctacttcggcgtgtacgatacggccaagggcatgctccccgaccccaagaacacgcacatcgtggtgagctggatgatcgcgcagaccgtgacggccgtggccggcgtggtgtcctaccccttcgacacggtgcggcggcgcatgatgatgcagtccgggcgcaaaggagctgacatcatgtacacgggcaccgtcgactgttggaggaagatcttcagagatgaggggggcaaggccttcttcaagggtgcgtggtccaacgtcctgcggggcatggggggcgccttcgtgctggtcctgtacgacgagctcaagaaggtgatctaagggccgcggcctcctcnnnnnnnnnnnnnnnnnccaggggaaccaagagaaccacgtagaatcctcaaccgtgcgggaccatcaaccttcgagaaattccagttgtctttttccca

SEQ ID NO: 227582 - DNA, 1158 bp, Homo Sapiens; identical to SEQ ID NO: 194055

SEQ ID NO: 227583 - DNA, 1229 bp, Homo Sapiens; identical to SEQ ID NO: 194058
  misc_feature (237)..(274): n is a, c, g, or t
  misc_feature (965)..(1019): n is a, c, g, or t

SEQ ID NO: 227584 - DNA, 905 bp, Homo Sapiens
  misc_feature (109)..(117): n is a, c, g, or t
ttggctatattaaaccatgaaaattgcctttatgagtgatacccatttgagggcctctaaacccttcaatttggtactcacgtgaagagggaaagcggaagatggtaannnnnnnnnatggatgatatggcaggatgattggttctgatcttaccggctagtggtcatttttaaaaaacttgtaccctcttatctgaaatcctgtttctggaatttggccattttaagtgattttgtttgccctcttctataatattcctacttcccataataatgactgatttatttgtaattcaggtatttataaacctattggctacaaagactttgttaaacattatccagtggttttcgtgaaatggaattatgtttatttttatgggatttgggtaaattttaaattgtctagaaaactgaaatttcagttgtcagttgtggaattcagtttttcaattgtggaaatttcctgccaccccaacagtatttttgtgtgttaattaattttgcaaaatgagaatcatggtgtgacactcatctaatttatcttgttgtgatgttatggtcataataaggagaaagagggtttaatttttcttgtatttggtttcctggtggtatcatagtgtaattttagtatttgaaaatcagtgtgattccttaatggccaactgaagattgaattgccgctaacaaccatatcgtgttagtgaattttcaatatggaccaggaaggcatatgtattttgaacttgagtgaaaaggttgaagttacagacttttgcatagatggtttgtcaatttaaaattccagaatttattattggcatattttcacatgctgcttatacaagattattattgagtaataactgcttccctgtcaatgtagaattgccctgtgtttt

SEQ ID NO: 227585 - DNA, 961 bp, Homo Sapiens
ttggggaagtggggtgcacgcttcgggttgggtcatggcagctgcggggagccgcaagaggcgcctggcggagctgacggtggacgagttcctagcttcgggctttgactccgagtccgaatccgagtccgaaaattctccacaagcggagacacgggaagcacgcgaggctgcccggagtccggataagccgggcgggagcccctcggccagccggcgtaaaggccgtgcctctgagcacaaagaccagctctctcggctgaaggacagagaccccgagttctacaagttcctgcaggagaatgaccagagcctgctaaacttcagcgactcggacagctctgaggaggaagaggggccgttccactccctgccagatgtgctggaggaagccagtgaggaggaggatggagcggaggaaggagaagatggggacagagtccccagagggctgaaggggaagaagaattctgttcctgtgaccgtcgccatggttgagagatggaagcaggcagcaaagcaacgcctcactccaaagctgttccatgaagtggtacaggcgttccgagcagctgtggccaccacccgaggggaccaggaaagtgctgaggccaacaaattccaggtcacggacagtgctgcattcaatgctctggttaccttctgcatcagagacctcattggctgtctccagaagctgctgtttggaaaggtggcaaaggatagcagcaggatgctgcagccgtccagcagcccgctctgggggaagcttcgtgtggacatcaaggcttacctgggctcggccatacagctggtgtcctgtctgtcggagacgacggtgttggcggccgtgctgcggcacatcagcgtgctggtgccctgcttcctgaccttccccaagcagtgccgcatgctgctcaagagaatggtggtcgtatggagcactggggaggagtctctg

SEQ ID NO: 227586 - DNA, 1135 bp, Homo Sapiens
ctttgtacaaaaaagttgggaaaagggaattccttcctgtggaaccttggggggtccccggggtcggcgccttcccattgactgtgggcggtgcaagggacggagcctctggcggctcgtgggggtgttggggtccgcagggggagggaggggagtgtcagagtgtgagcggggtacgggaattccaaatttgagggcctcccggctctggcgccggggagggagagctcaggccgccatgcgggacaggacccacgagctgagacagggggatgacagctcggacgaagaggacaaggagcgggtcgcgctggtggtgcacccgggcacggcacggctggggagcccggacgaggagttcttccacaaggtccggacaattcggcagactattgtcaaactggggaataaagtccaggagttggagaaacagcaggtcaccatcctggccacgccccttcccgaggagagcatgaagcaggagctgcagaacctgcgcgatgagatcaaacagctggggagggagatccgcctgcagctgaaggccatagagccccagaaggaggaagctgatgagaactataactccgtcaacacaagaatgagaaaaacccagcatggggtcctgtcccagcaattcgtggagctcatcaacaagtgcaattcaatgcagtccgaataccgggagaagaacgtggagcggattcggaggcagctgaagatcaccaatgctgggatggtgtctgatgaggagttggagcagatgctggacagtgggcaaagcgaggtgtttgtgtccaatatcctgaaggacacgcaggtgactcgacaggccttaaatgagatctcggcccggcacagtgagatccagcagcttgaacgcagtattcgtgagctgcacgacatattcacttttctggctaccgaagtggagatgcagggggagatgatcaatcggattgagaagaacatcctgagctcagcggactacgtggaacgtgggcaggagcacgtcaagacggccctggagaaccagaagaaacgaggaagaagaaagtcttgattgccatctgtgtgtccatcaccgtcgtcctcctagcagtcatcattggcgtcacagtggttggataatgtc

SEQ ID NO: 227587 - DNA, 718 bp, Homo Sapiens
  misc_feature (382)..(394): n is a, c, g, or t
agactttaaaaaacatgcactatacaatcttttatttccagtttaaaaacaaaatcttaaattactaggagtatatttacaagattaattacattttaagccagcacaccatggatgtacatgaagggccactcggtgtccctcgctgggacaggttgtgtgacctgcccaaggggctccggctcatttgccaaagtcaagacgacgaccaggtcttctgactgctcagcccaaccaataatgaaaaaagtatcagagatgtgtcatatccattttgctaacaagcaattacatgcctttttagtgtttaagagaagccttaattttcctgggatatctccgtaaaatcattctggaatttgattttgaaaattctttaagnnnnnnnnnnnnngcttgtcacccccatgagacctgctgtctctcatgtctgcagggacaggccttttagaggcagcaaaagggaatactggtctctggaaagtccagacagaactctagcagctccgatggcttgatctcttccagggagccagtgggctaggcccatgctttggttcaaagcgtttggagaacatcttcttgctccttttccggaaacgagataatggacacagagtcccagacgtcatcctttggtgagctgtccttgtccaaggcctctaagatgggctgagttgggtcttttaaatactcttctatcggtaatgggatccaa

SEQ ID NO: 227588 - DNA, 722 bp, Homo Sapiens; identical to SEQ ID NO: 194062
  misc_feature (365)..(377): n is a, c, g, or t

SEQ ID NO: 227589 - DNA, 1040 bp, Homo Sapiens
ctttgtacaaaaaagttggcgccttcgccgccacaaacccgcaaaccttcgtgcccggcccgtcctcgcccccgcctccgccaccgcctcggcccgcagagcttgccccctccccacccgcagacatgtccgagtccaagagcggccccgagtatgcttcgtttttcgccgtcatgggcgcctcggccgccatggtcttcagcgccctgggcgctgcctatggcacagccaagagcggtaccggcattgcggccatgtctgtcatgcggccggagcagatcatgaagtccatcatcccagtggtcatggctggcatcatcgccatctacggcctggtggtggcagtcctcatcgccaactccctgaatgacgacatcagcctctacaagagcttcctccagctgggcgccggcctgagcgtgggcctgagcggcctggcagccggctttgccatcggcatcgtgggggacgctggcgtgcggggcaccgcccagcagccccgactattcgtgggcatgatcctgattctcatcttcgccgaggtgctcggcctctacggtctcatcgtcgccctcatcctctccacaaagtagaccctctccgagcccaccagccacagaatattatgtaaagaccacccctcctcattccagaacgaacagcctgacacatacgcacggggccgccgcccccagtagttggtcttgtacatgcgcagtgtcctagtgcccatcgtctgtttccccggccttgcccccgcccgccccgtgccgtggacatctgggcccactcatcgcccctccaggcccccggcgccccaccccctagagtgctctgtgtatgcggatgatttagaattgtcatttctctttactggatgtttatttataaagatctggcctgttcctgcgtctgcggagcggcccttgtctcccagctatctataaccttagctagagtgtcgccttgtgggttcctgttgctgagacttcctggatggagccgccctcaccgccgggcccgtggccctgcgcggagct

SEQ ID NO: 227590 - DNA, 862 bp, Homo Sapiens
cccactttgtacaaaaaagttggcgacgaagttctacggaagcgtctcctcattgatggagatggtgctggagatgatcggagaattaatctgctagtgaagagtttcattaaatggtgcaactctgggtcccaggaagagggatatagccagtaccaacgtatgctgagcacgctgtctcaatgtgaattttcaatgggcaaaactttactagtatatgatatgaatctcagagaaatggaaaattatgaaaaaatttacaaggaaatagaatgtagcatagctggagcacatgaaaaaattgctgagtgcaaaaagcaaattcttcaagcaaaacgaatacgaaaaaatcgccaagaatatgatgctttggcaaaagtgattcagcaccatccagacaggcatgagacattaaaggaactagaggctctgggaaaagaattagagcatctttcacacattaaagaaagtgttgaagataagctggaattgagacggaaacagtttcatgttcttcttagtaccatccatgaacttcagcaaacattggaaaatgatgaaaaactctcagaggtagaagaagctcaggaagcaagcatggaaacagatcctaagccatagacaggctaattgcccaccactcccaggaatattgaaatagctacatgaccataatgtgtttaaaatgtggtatgctcttgagatatttaaagttttggcagtaaaatactctgtttttaagtatgaatgtatttcattcatatttcctctcacaaaggaaaatgacttcagtatagatttgtttttattaaaatgcattttttattcttaagtggtgggaagcaacattcaaaatgcttaa

SEQ ID NO: 227591 - DNA, 942 bp, Homo Sapiens
ttggctccttttcgccctcccacccgcactgcagtctccagcctgagccatgggccgccgagccctcctgctcctgcttctgtcttttctggcgccctgggccaccatagccctccggccggccttaagggccctcggcagcctacacttgccaaccaaccccacatccctcccggctgtagccaagaactattcggttctctacttccaacagaaggttgatcattttggatttaatactgtgaaaacttttaatcagcggtacctagtagctgataaatactggaagaaaaatggtggatcaatacttttctacactggtaatgaaggggacattatctggttttgtaataacacggggttcatgtgggatgtggctgaggaactgaaagctatgttggtgtttgctgaacatcgatactatggagagtctctcccctttggtgacaactcattcaaggattccagacacttgaatttcctgacatcagaacaagctctggctgattttgcagagttaatcaaacacttgaaaagaacaatcccaggagctgaaaatcaacctgtcattgccataggaggctcctatggtggcatgcttgccgcctggtttaggatgaaatatcctcatatggtagttggagctcttgcagcttctgcccctatctggcagtttgaggatttagtaccttgtggtgtatttatgaagatcgtaactacagattttaggaaaagcggtccacattgttcagagagcatccacaggtcctgggatgccattaatcgactctcaaatactggcagtggtttgcagtggcttactggagcccttcacttatgcagcccattaacttctcatgacatccaacatttgaaagactggatctctgaaacctgggtgaatctggcaatggtggactatccttatgcctctaacttttt

SEQ ID NO: 227592 - DNA, 968 bp, Homo Sapiens; identical to SEQ ID NO: 194064

SEQ ID NO: 227593 - DNA, 951 bp, Homo Sapiens
agccccgtagaaccgagggggtcggcccgggggtcccgggggaggtggagatggtgaaggggcagccgttcgacgtgggcccgcgctacacgcagttgcagtacatcggcgagggcgcgtacggcatggtcagctcggcctatgaccacgtgcgcaagactcgcgtggccatcaagaagatcagccccttcgaacatcagacctactgccagcgcacgctccgggagatccagatcctgctgcgcttccgccatgagaatgtcatcggcatccgagacattctgcgggcgtccaccctggaagccatgagagatgtctacattgtgcaggacctgatggagactgacctgtacaagttgctgaaaagccagcagctgagcaatgaccatatctgctacttcctctaccagatcctgcggggcctcaagtacatccactccgccaacgtgctccaccgagatctaaagccctccaacctgctcatcaacaccacctgcgaccttaagatttgtgatttcggcctggcccggattgccgatcctgagcatgaccacaccggcttcctgacggagtatgtggctacgcgctggtaccgggccccagagatcatgctgaactccaagggctataccaagtccatcgacatctggtctgtgggctgcattctggctgagatgctctctaaccggcccatcttccctggcaagcactacctggatcagctcaaccacattctgggcatcctgggctccccatcccaggaggacctgaattgcatcatcaacatgaaggcccgaaactacctacagtctctgccctccaagaccaaaggtggcttgggccaagcttttccccaagtcagactccaaagcccttgacctgctgggaccgggatgtttacttttaaccccaataaacggatcacagtggaggaagcgctggctcacccct

SEQ ID NO: 227594 - DNA, 1131 bp, Homo Sapiens
ttggacttagctccatttacaatttaaaacatgcaaaatatactcactatacataaaattaatgtttcttaagaaagtaaggcaaaaataattcagcatgagctaatggactgctaacagagaaaccaccaggtacaagtgcacacacatgcttggtgcctggccagcattccacctagtcggggaggagctgtttctcttcctggccgccagggggcagttagctcatggctgagaagtctctcaagggttcagttaaacaagcttccaaatcaaactcatcctccacttgactgtccatgtgtctcaccttggtgggtgtgccagagtacacatcaaagtcatcctgagagctggtctggggctcggagctgctttctgcagattcaaggtctacagggtgtatttcttgcaaatcacatccttcttccgctggaggatcccaaaaatgcagagccaccttccagagtttgatttgctggtcccatgaacgtcgactatacttcttaaatttattaggggtcttgggatgaatgccaggttgtcgaaggtgtcttgggacttctttaatataacgatcgtaggcaattgtgttcttcccatagttgatctgcttctgtctcctcattaggacactttcatctgtctcaaagtcagccggcacagtagacatagactcctttgaatcagaacttcctgatgatgattttctctctcttccaaagtcattgatgaggagtttccttttatatcttgccatttctttgttaactctggtcctcatttcatcttcttcaactgcacttgcccagtcagagcatctggaacggggtttagggccttcaggagtggtaaagctctcgggtctgcgctcggcgccgcggtgctctgcctcctcggcgtcttcgggcctccagcgcctgccgtcggctctgcgcttccgtcccaggctccatcgcgcgggggacggcgggctggcgtcaccgtcgcagcggctctgatgcctcggcgggcttcgcgggcggcaggccatggcagcacgggccgggcgcgcagcgcagggccgaggctgaggcggcggcggcgcgggcagagagcgcagagtagagcagggcagggcctgagacccaa

SEQ ID NO: 227595 - DNA, 1113 bp, Homo Sapiens
tattagcaaagctttggtgttgggttccaaccattggtcaaagctgtaataagactgagtctgtaggcagagtgaagggggtgccttgagtaggaggggggaggcccgctgggagagggtcagtgggcagtgattgtaacatgattaggccctccttgcagatggcggctgtgctgaacggggagtggggttggaaggagccacaagccccctcactctgcctttgtactacactgaagacaggttgctcacatactctaaagcacattcttgatacaggaagaagggcttgtggggaaagcggcgatttggtattgggcaagagccacgttaagccttcatgagggcagccaccacagccttggcattgaggctgcgtaggtcacagtaggtctggccggtgcccacaaagacgatgggtttgcttgtgatgtacgtcatagaaatagcagctcccaccttgtcatcaatggtatcaaatttggtaagaacaatgccatcaatgagccgaggtgtctgagccatagaatggtcagccaaggctctgttgaacttgaccagctggtccacggcttcattgcctactaaggcttctcctacaaacagcaccaaatcaggtgtattgacagtaatgagtttggccagggcagtcatcagaggggcattgtcttgcatgcggcctgccgtgtccaccagcaccacgtcaaagccttggttacgtgcaaaagcaatggcttccatggcaatgccagcagcatccttgccatagcccttttcaaacaactgcaccatggtgcggccaccatgcttctctggagggtgtagggcactcaaacgccgggtgtgtgtacgcagctgctccacggccccagcacgaaatgtatcacaggcagcaatgaggacactgaagccattctctaacaaccagaaggaaatcttggcaagattagtagatttccccactccattaacgccgcagaaggtgacgacataagggcgctggcgacgctgggcatccatgatgtcccggagcatgtctacacgacgctgtggctgcagaatctgcaccagggactctatgtagggcttgctttccaacttttttgtacaaag

SEQ ID NO: 227596 - DNA, 1027 bp, Homo Sapiens
ttggctggactctgcgctacttaaataggaatcaagccaggtccctaccattgctcagcccgcagccgagtgggaaagaagctcgcaaaagcagcaaacaggcagtaatcgagggaagatggaagagttgagtcaggccctggctagtagcttttctgtgtctcaagatctgaacagcacagctgccccacacccccgcctatcccagtacaagtccaagtacagttccttggagcagagtgagcgccgccggaggttactggaactgcagaaatccaagcggctggattatgtgaaccatgccagaagactggctgaagatgactggacagggatggagagtgaggaagaaaataagaaagatgatgaagaaatggacattgacactgtcaagaagttaccaaaacactatgctaatcaattgatgctttctgagtggttaattgacgttccttcagatttggggcaggaatggattgtggtcgtgtgccctgttggaaaaagagcccttatcgtggcctccaggggttctaccagtgcctacaccaagagtggctactgtgtcaacaggttttcttcacttctgccaggaggcaacaggcgaaactcaacagcaaaagactacaccattctagattgcatttacaatgaggtaaaccagacctactacgttctggatgtgatgtgctggcggggacaccctttttatgattgccagactgatttccgattctactggatgcattcaaagttaccagaagaagaaggactgggagagaaaaccaagcttaatccttttaaatttgtggggctaaagaacttcccttgcactcccgaaagcctgtgtgatgtgctatctatggatttcccttttgaggtagatggacttctcttctaccacaaacagacccactacagccccggaagcactcccttggtgggctggctgcgcccctacatggtgtcagatgtccttggtgtagctgtgccggctggcccgctgaccaccaagccagactatgctggg

SEQ ID NO: 227597 - DNA, 1075 bp, Homo Sapiens
  misc_feature (1009)..(1022): n is a, c, g, or t
ttggctgatatctgttttctatgggactgattctgaaattcttaactattaagaatattttaatagcagcatgacatttagcagtaatccattaagggcagtacctctaacaaggacgccttccagcttcagcgatgttacttacgtttgatgctacttaaagtaatgaatgacgttttaaggaatccctaaccctactatcagaaaaggtgtttgttaaagagccttctcttgtgtgttacgcatgaactttggtctgtaggtgttaaatggaacctctccatgtgtatatagtatttccttgtataaagcactttactacctaccacttgtgttgtgaacgtttggtgactgctgttgaaagaaggaaaagggtgtgtgagaaagcctactgaagcagcagcactgccactacatgtggacaaaagtgaacatataaaagaagttgtgctatttaactctgaatacttggagaaactaggtgaagatgcaaccagaaaggagaatatgtatgcgtgaagtctcagctttgagctggaggctagattccaagatgacagccatgatgaaactttttaaaaaactaaaccagaagagactttaaaataagagaaagaaatcataaatgtagacatatgcttggctaaaggggaaatggactttaaattttaaagagctcatttgcaatgcacttgtatacacttcaaaaattattgtagacacagaatttgttatatttttgtgcttagtatttaaacctgaacattgaaacagttttcctccttgtctttcttaacagtaatagtcattatatttacctgttttttaacacaatgtatgtgatagtcaaaaaatcacagtttttcattattattcatcttctgtacccacgcataaccactatacatagtttcttttgtacttgaatatacaaaacatgaacacagtgccatatgaataatttcacatacagaacctttttttctctgaagtcctgtggacttgcaannnnnnnnnnnnnntgctttgttaatttgtttttatatttcatatatgtaataaaggaatatgatct

SEQ ID NO: 227598 - DNA, 964 bp, Homo Sapiens; identical to SEQ ID NO: 194068

SEQ ID NO: 227599 - DNA, 658 bp, Homo Sapiens; identical to SEQ ID NO: 194069

SEQ ID NO: 227600 - DNA, 1285 bp, Homo Sapiens
  misc_feature (1026)..(1087): n is a, c, g, or t
ttggctcaaaggcactctcaggacagacggcgtggggagcacagaggaggctggcagagctggggactgagggcattgttgctgattctcactcaccggggcagcctgccgcagatgcacaggccccaggtgcaggccaccacctccgggtcggcaccaggactgccctcggtgctcatagggaatggctgggcccacggaaggtcggcctgggatgtggcctgggactgctgctctgctggctgctgtgtggatgcttttcctggagcactttccaaggcatcccccagccccaagcctgcacgcatctgtcactcagggactttctatgggtctttgtgggggaaggccctggctttgtattccccacaagtagcactgagtttcttaggaaatttgtcttcagtattaggtctccaactcttgtaaaaagtttatatgtaggataaaaaccttttagaggacacgtaggcggtaccactaaggttttggtaatgagccattcaaaccgacagcagtgtgaaggtgtgtcaaggtgtatattctcgtggctcggcattctcagtgcaaaggcctgtttggagactctgtgggaattgtttttcatctgtttctatggttgtcaaatgaattcttcacccaccctacagtttgctaactccttgaagctatcaaattagtaagagaggctgcccgcacccagggggcaccatcgcccacttattatttagttttgcggatactcatggaccatctatcacatccagcattgtcccagtgctttgagttggacgggaatgggactctgcagccaaggcaggataagaaaatcttgcaatcccgtcctgcagtgatagaaacaggtcgttctgcattataagccataggtggagcattcggtagcgtattcagactgcatgggccggcctaggagtctttgccttcataaattttaagaaccccgcccacaacagggagttaaactggaggactttgcatgattagttcagggatgagtggtttctnnnnnnnnnnnnnnnnnnnnnnnnnnnnnnnnnnnnnnnnnnnnnnnnnnnnnnnnnnnnnnccgttctggagaacacgtcacgcctgtcctggagacagtgtgccgggaaaagggaacgtggtactcactggatgcacccaggccggcccgagcctcccaccgcagacagtgtggaacagagtgagcctgagctgcccaagcgatgccctttgtgctgtatgactggagtctctccgcgtgggtacttgggggtggggc

SEQ ID NO: 227601 - DNA, 889 bp, Homo Sapiens; identical to SEQ ID NO: 194072

SEQ ID NO: 227602 - DNA, 930 bp, Homo Sapiens
ttggggaaaaagtatgtcggcaagtcagctggtttcccagtgcaggacgcgctgacagctcgagtgagcggactgcccaggacttcggaactagacgagttctgtagaaatcctgtcaaagaatatgaagaaaaacagagaaagattctgcaatagagagagagaatttgtatataaatttaaagtaggaagtcagtgcttagaactgagagtgccactcaaatttcctgttcaagagaatgccagtcatttgcatggacgtctgatgctgctgcacagtttaccgtgctttatagaaaaagacttaaaagaagctctgactcagtttatagaagaagaatccctcagcgattatgatagagatgctgaagcatccctggcagctgtgaaatcaggtgaagtagatttacatcagctggcgagtacatgggccaaagcttatgctgagaccacgttagagcatgcaaggcctgaagaacccagctgggatgaagattttgcagatgtgtaccatgacttaattcattctcctgcctctgaaactctcttaaatttggaacataattactttgttagtatctcagaactgattggtgaaagagatgtggagctgaaaaaattacgagagagacaaggtattgaaatggaaaaagtcatgcaggaattgggaaaatcactgacagatcaagatgtaaattcactggctgctcagcattttgaatcccagcaagacctagaaaataaatggtcgaatgaattaaaacaatcaactgccatccaaaaacaagagtatcaagaatgggtaataaaacttcaccaagacctaaaaaaccccaacaacagctcccttagtgaggaaattaaagttcagccaagtcagttcagagaatctgtagaagcaattggaaggatttatgagaacagagaaag

SEQ ID NO: 227603 - DNA, 907 bp, Homo Sapiens
tttgtacaaaaaagttggcttaaaaaacctatgtacacatatgtatgcaagtatgtatatatgtgtatgctcagattaacttccataggtacataagtgaaagaagtctcagttcagtgaacacaaaacttatttaaagatgctttatatgtagaaattgtttcaaatcatactctaacccttagtgagggcaaagtgtagttggtagaagaaattgctaaatacctatctaatgtgctatgtttatcaaatcgtgtactaaaatggaaagctagttttgagaaattattcagaagccttgttattttaaaaatgaaatatttcaaagactgaatattttcaaagaaaatgaataattcattgcccttgtgatttagaagattataacagctgtatttcatatttgcctccttatatatatcaaagaccaaggtatttccttctgcttcaaaagaacaaaattgggaaagaaaactcacttgagtcttgatcaaacaagtgtcttttacttaagaagaaacttggtaatcattgtggcacccacagcaagcagttgccttaccagtgaaaaaggtgcactgaggtaacatctaaaacagagatgtggttcttaatgtttaacagaacagttctaatcctgccacgtgttatcattatagattttatagttgcctttctaactacttagcacagtttgagaatacgttaattgctatttactatttaaaaagttttactgaaatcagtccataacattaagatgagccctaatatgtaagattttcctctggaatggatgtgagaaatgtaaattttataacagcagtatttatcctgggtttaattctaatacgatgtcatgttaatttcatggtgtgattaaataaaagcatttttttcttcactc

SEQ ID NO: 227604 - DNA, 1005 bp, Homo Sapiens
ttggctttcttgaaaataagcgacgacattgtaggtcctatgaccgacgtgctctccttccagctgtgcaacaagagcaggagttctatgagcagaaaatcaaagagatggcagagcatgaagactttttgcttgccctacagatgaatgaagaacagtatcaaaaggatggccagctgattgagtgtcgctgctgctatggggaatttccattcgaggagctgacgcagtgcgcagatgctcacttgttctgcaaagagtgtctcatcagatatgcccaagaggcagtctttggatctggaaagttggagctcagctgcatggaaggcagctgcacgtgttcgttcccaaccagtgagctggagaaggtgctcccccagaccatcctgtataagtactatgagcgaaaagccgaggaggaggttgcggcagcctacgccgacgagcttgtcaggtgcccgtcctgtagctttccggctctgttggacagtgatgtgaagaggttcagctgtcctaatcctcactgccgaaaggaaacctgtaggaagtgtcagggactctggaaagaacataatggcctcacctgtgaagagctggctgaaaaagacgacatcaagtaccgtacctctattgaagaaaaaatgactgctgcccgcattagaaaatgccacaagtgtgggactggcctcatcaaatctgaaggctgcaaccgcatgtcttgccgctgtggtgcccagatgtgctacctctgtcgagtttctattaatggatatgaccatttctgccaacatccccgctcaccaggagccccttgccaggagtgttcaagatgctctctctggaccgatcccactgaagatgatgagaagcttattgaggaaatccagaagaggctgaagaggaacagaaaagaaagaatggagagaacaccttcaaacgcattggacccccgctggagaagcctgtggagaagtgcagagggtggaggccctcccgaggcccgtt

SEQ ID NO: 227605 - DNA, 986 bp, Homo Sapiens
ttggggaggaatatgtccgagagggaagtgtcgactgcgccggcgggaacagacatgcctgcggccaagaagcagaagctgagcagtgacgagaacagcaatccagacctctctggagacgagaatgatgacgctgtcagtatagaaagtggtacaaacactgaacgccctgatacacctacaaacacgccaaatgcacctggaaggaaaagttggggaaagggaaaatggaagtcaaagaaatgcaaatattctttcaaatgtgtaaatagtctcaaggaagatcataaccaaccattgtttggagttcagtttaactggcacagtaaagaaggagatccattagtgtttgcaactgtaggaagcaacagagttaccttgtatgaatgtcattcacaaggagaaatccggttgttgcaatcttacgtggatgctgatgctgatgaaaacttttacacttgtgcatggacctatgatagcaatacgagccatcctctgctggctgtagctggatctagaggcataattaggataataaatcctataacaatgcagtgtataaagcactatgttggccatggaaatgctatcaatgagctgaaattccatccaagagatccaaatcttctcctgtcagtaagtaaagatcatgctttacgattatggaatatccagacggacactctggtggcaatatttggaggcgtagaaggcacagagatgaagttctaagtgctgattatgatcttttgggtgaaaaaataatgtcctgtggtatggatcattctcttaaactttggaggatcaattcaaagagaatgatgaatgcaatttacggatcttatgattataatccaaataaaactaacaggccatttatttctcagaaaatccattttcctgatttttctaccagagacatacataggaattatgttgattgtgtgcgatggttaggcgatttgatactttctagtcttgtgaaa

SEQ ID NO: 227606 - DNA, 1070 bp, Homo Sapiens; identical to SEQ ID NO: 194078

SEQ ID NO: 227607 - DNA, 936 bp, Homo Sapiens; identical to SEQ ID NO: 194079

SEQ ID NO: 227608 - DNA, 816 bp, Homo Sapiens
ttggggcatctgagaggctggtcgtggactgtggttgggggaggtgggagctgttttaaccgtgtgccccctctcctgtgccggcgtgggcatcccccggggcagtggaacgcgggcgctcctccagcttccgagtccagccagcctgggcgcggggcgccgcccccgagacacccgaggagtccgttcctccctggttacgtggactgtggagctggtctcttgtggctcagcgccgtgcggaggttgaagcgtacctgcggaggtcgcaccagggcgtgaggaggaggaggaagggcatgagccgagcttgaggaatccgtgctccaaactctacactcaagggtggcccttgggtagggtgaagatcccctgtctttatcctagttccacaccttggtgtgggttactgggtgcaggatgaactgtcgctcggaggtgctggaggtgtcggtggaggggcggcaggtggaggaggccatgctggctgtgctgcacacggtgcttctgcaccgcagcacaggcaagttccactacaagaaggagggcacctactccattggcaccgtgggcacccaggatgttgactgtgacttcatcgacttcacttatgtgcgtgtctcttctgaggaactggatcgtgccctgcgcaaggttgttggggagttcaaggatgcactgcgcaactctggtggcgatgggctggggcagatgtccttggagttctaccagaagaagaagtctcgctggccattctcagacgagtgcatcccatgggagtgtggacggtcaaggtgcatgttggtatccctggcc

SEQ ID NO: 227609 - DNA, 1103 bp, Homo Sapiens; identical to SEQ ID NO: 194081

SEQ ID NO: 227610 - DNA, 841 bp, Homo Sapiens
ctttgtacaaaaaagttggggcttcttggcgcgatgaggttccggttctgtggtgatctggactgtcccgactgggtcctggcagaaatcagcacgctggccaagatgtcctctgtgaagttgcggctgctctgcagccaggtactaaaggagctgctgggacaggggattgattatgagaagatcctgaagctcacggctgacgccaagtttgagtcaggcgatgtgaaggccacagtggcagtgctgagtttcatcctctccagtgcggccaagcacagtgtcgatggcgaatccttgtccagtgaactgcagcagctggggctgcccaaagagcacgcggccagcctgtgccgctgttatgaggagaagcaaagccccttgcagaagcacttgcgggtctgcagcctacgcatgaataggttggcaggtgtgggctggcgggtggactacaccctgagctccagcctgctgcaatccgtggaagagcccatggtgcacctgcggctggaggtggcagctgccccagggaccccagcccagcctgttgccatgtccctctcagcagacaagttccaggtcctcctggcagaactgaagcaggcccagaccctgatgagctccctgggctgaggagaaggtgttccaggcctgtgtggagccgccctgcccgtatggagtcacgccctctgaactgctcttcgggaggcagccctggttctaggatgctgaggccctggcccggactctggcctcccatatccccagctgcctcacttctctcttgaaacttggctcagggctcctgaggacctttcccagcattacctttcccttcccc

SEQ ID NO: 227611 - DNA, 761 bp, Homo Sapiens
  misc_feature (393)..(441): n is a, c, g, or t
ttggcaagaggacggcagaggcccggcagctcggagctccgggaccttgtggcgcatcaggacgcggctgtccctctgccgggacccagagccgccgccgccgctctgcctcctgcgtgttagcctcctctgcgcgctccgggcaggcggccgtgggagccgctggggcgaggacggcgcgaggctgctgctgctgcccccggcccgcgcggctggaaacggagaggccgagccaagcggcggcccctcttatgctgggaggatgctggagagtagcggctgcaaagcgctgaaggagggcgtgctggagaagcgcagcgacgggttgttgcagctctggaagaaaaagtgttgcatcctcaccgaggaagggctgctgcttatcccgcccannnnnnnnnnnnnnnnnnnnnnnnnnnnnnnnnnnnnnnnnnnnnnnnnacaacagcccgggcaggggccggccgagccgtcccaacccagtggccccgctgtcgccagcctcgagccgccggtcaagctcaaggaactgcacttctccaacatgaagaccgtggactgtgtggagcgcaagggcaagtacatgtacttcactgtggtgatggcagagggcaaggagatcgactttcggtgcccgcaagaccagggctggaacgccgagatcacgctgcagatggtgcagtacaagaatcgtcaggccatcctggcggtcaaatccacgcggcagaagcagcagcatctggtcccagcagcagcccccc

SEQ ID NO: 227612 - DNA, 854 bp, Homo Sapiens
tggacgtggtgccggaggggaagaaaataaagaaaacgaacgcccttcggccggatcgaaggcaaacaaagaatttggggatagcctgagtttggagattcttcagattattaaggaatcccagcagcagcatggtttacggcatggagattttcagaggtacaggggctactgttcccgtagacaaagacgtcttcgaaaaacactcaacttcaagatgggtaacagacacaaattcacagggaagaaagtgactgaagagcttctgaccgataatagatacttgcttctggttctgatggatgctgaaagagcctggagctacgccatgcagctgaaacaggaagccaacactgaaccccgaaaacggtttcacttgttatctcgcctacgcaaagccgtgaagcatgcagaggaattggaacgcttgtgtgagagcaatcgcgtggatgccaagaccaaattagaggctcaggcttacacagcttacctctcaggaatgctacgttttgaacatcaagaatggaaagctgccattgaggcttttaacaaatgcaaaactatctatgagaagctagccagtgctttcacagaggagcaggctgtgctgtataaccaacgtgtggaagagatttcacccaacatccgctattgtgcatataatattggggaccagtcagccatcaatgaactcatgcagatgagattgaggtctgggggcactgagggtctcttggctgaaaaattggagctttgatcactcagactcgagccaacaggcagctaccatgagtgaagtggagtggagagggagacggttccagtgagattgacaaagtgcgcattttcttatt

SEQ ID NO: 227613 - DNA, 924 bp, Homo Sapiens; identical to SEQ ID NO: 194087

SEQ ID NO: 227614 - DNA, 922 bp, Homo Sapiens
acaaaaaagttggcgtggtcttgcgagtggagtgtccgctgtgcccgggcctgcaccatgagcgtcccggccttcatcgacatcagtgaagaagatcaggctgctgagcttcgtgcttatctgaaatctaaaggagctgagatttcagaagagaactcggaaggtggacttcatgttgatttagctcaaattattgaagcctgtgatgtgtgtctgaaggaggatgataaagatgttgaaagtgtgatgaacagtgtggtatccctactcttgatcctggaaccagacaagcaagaagctttgattgaaagcctatgtgaaaagctggtcaaatttcgcgaaggtgaacgcccgtctctgagactgcagttgttaagcaaccttttccacgggatggataagaatactcctgtaagatacacagtgtattgcagccttattaaagtggcagcatcttgtggggccatccagtacatcccaactgagctggatcaagttagaaaatggatttctgactggaatctcaccactgaaaaaaagcacacccttttaagactactttatgaggcacttgtggattgtaagaagagtgatgctgcttcaaaagtcatggtggaattgctcggaagttacacagaggacaatgcttcccaggctcgagttgatgcccacaggtgtattgtacgagcattgaaagatccaaatgcatttctttttgaccaccttcttactttaaaaccagtcaagtttttggaaggcgagcttattcatgatcttttaaccatttttgtgagtgctaaattggcatcatatgtcaagttttatcagaataataaagacttcattgattcacttggcctgttacatgaacagaatatggcaaaaatgagactacttacttttatgggaatggcagtagaaa

SEQ ID NO: 227615 - DNA, 918 bp, Homo Sapiens
ttgggtgtgggtggcgttttccttcccgagtggaagacttgagtgagagagaaggacatcgaggtcccgctggacctgcaatccgaccaactctttgcagattttctgccgcttaagtgtgatgcctgctcaggcatcttctgcgcagaccatgtggcctacgcccagcatcactgtggatctgcttaccaaaaggtgagggggcgatcctcagggtgaaagcaggcagatggagaatgcgtgcagaatcccccaaatctgtgtctcacgtttcttctcccttttgtccttctgaggctgtcagtgctgggaaacactgtttttttgcgtgtttgtggtgggtcatatccaagttctttcaggaccagagatttgttggactggagtgggccacagactgacccttgctccttgactacaggatatccaggtacctgtgtgccctctctgtaatgtgcctgtgcctgtggccagaggggagccccctgaccgtgctgtgggagagcacattgacagagactgtcgctctgatccagcacagcaaaaacgtaaggtaaacattgtaggggtcagccacaacccagctgggactacggatgcctggaaacccaaacagctaatcagagtctcagcagagacaaccttctcacttcacctcagatcttcaccaataagtgtgaacgcgctggctgccggcagcgagaaatgatgaaactgacctgtgaacgctgtagccgaaacttctgcatcaagcaccggcatccactggaccatgattgctctggggaggggcacccaaccagccgggcaggacttgctgccatctccagagcacaagctgtggcttctacaagcactgtccccagcccaagtcaaaccatgccttcctgtacctctcccagcaaggtaggcctgccc

SEQ ID NO: 227616 - DNA, 870 bp, Homo Sapiens; identical to SEQ ID NO: 194088

SEQ ID NO: 227617 - DNA, 947 bp, Homo Sapiens
ttggatctattttacctcctgaagtccaaactctagatctacggagctgcgatatatcagatgctgctctcctgcacctgtctaactgtagaaaactgaagaaattaaatttaaatgcttcaaaagggaaccgagtttctgtaacttcagaaggaataaaagctgtggcttcatcttgttcatacctacacgaagcttctttgaaaagatgctgcaatctcactgacgaaggagtcgttgctcttgcactcaattgccagctgctaaagatcatcgatttaggtggctgcttaagtattactgatgtgtccttacatgcattaggaaaaaactgcccatttttgcagtgtgtcgacttttcagctactcaggtatctgacagtggtgtgattgcacttgttagtggaccttgtgcgaagaaattagaggagattcatatgggacattgtgtaaatctgactgatggggctgtcgaagctgtccttacttactgtcctcaaatacgtatattactcttccatggatgccccttgataacagatcattcccgagaagtgttggagcaattagtaggcccaaacaaactaaagcaagtgacatggactgtttattgatgcttttttgaagatgatcaatgctaggaaagcttatcaaaactactttcccaggaaaccatctatagagatttgcattctacttaatgttaacactatttttaattattttattgtcttaagttataactctcagagaattagctaagtcttggtatatacatggtttgtgctttactcttaaacatctttaaagtgctattattctatatctgttggatgagtcattatttttgaaatgataatcctagcatgaactctgatctgtggtgttggattctgtttcttaaataactttaaaattaactgttttcccttgagatttccttctcc

SEQ ID NO: 227618 - DNA, 1303 bp, Homo Sapiens
ttggcgcctaggttggcgcgggcatgggaggtgttccagccctttaagatgttgcgcgtggtgagctggaacatcaatgggattcggagacccctgcaaggggtggcaaatcaggaacccagcaactgtgccgccgtggccgtggggcgcattttggacgagctggatgcggatatcgtctgtctccaggaaaccaaagtgaccagggatgcactgacagagcccctggctatcgttgagggttataactcctatttcagcttcagccgcaaccgtagcggctattctggtgtagccaccttctgtaaggacaatgctaccccagtggctgctgaagaaggcctgagtggcctgtttgccacccagaatggggatgttggttgctatggaaacatggatgagtttacccaagaggaactccgggctctggatagtgagggcagggccctcctcacacagcataagatccgcacatgggaaggtaaggagaagaccttgaccctaatcaacgtgtactgcccccatgcggaccctgggaggcctgagcggctagtctttaagatgcgcttctatcgtttgctgcaaatccgagcagaagccctcctggcggcaggcagccatgtgatcattctgggtgacctgaatacagcccaccgccccattgaccactgggatgcagtcaacctggaatgctttgaagaggacccagggcgcaagtggatggacagcttgctcagtaacttggggtgccagtctgcctctcatgtagggcccttcatcgatagctaccgctgcttccaaccaaagcaggagggggccttcacctgctggtcagcagtcactggcgcccgccatctcaactatggctcccggcttgactatgtgctgggggacaggaccctggtcatagacacctttcaggcctctttcctgctgcctgaggtgatgggctctgaccactgccctgtgggtgcagtcttgagtgtgtcctctgtgcctgcaaaacagtgcccacctctgtgcacccgcttcctccctgagtttgcaggcacccagctcaagatccttcgcttcctagttcctctcgaacaaagtcctgtgttggagcagtcgacgctgcagcacaacaatcaaacccgggtacagacatgccaaaacaaagcccaagtgcgctcaaccaggcctcagcccagtcaggttggctctagcagaggccagaaaaacctgaagagctactttcagccctcccctagctgtccccaagcctctcctgacatagagctgcctagcctaccactgatga

SEQ ID NO: 227619 - DNA, 983 bp, Homo Sapiens
ttggggccgcgcttgcaccgctgcccccgctccccgcacagttcaagagcatacagcatcatctgaggacggctcaggagcatgacaagcgagaccctgtggtggcttattactgtcgtttatacgcaatgcagactggaatgaagatcgatagtaaaactcctgaatgtcgcaaatttttatcaaagttaatggatcagttagaagctctaaagaagcagttgggtgataatgaagctattactcaagaaatagtgggctgtgcccatttggagaattatgctttgaaaatgtttttgtatgcagacaatgaagatcgtgctggacgatttcacaaaaacatgatcaagtccttctatactgcaagtcttttgatagatgtcataacagtatttggagaactcactgatgaaaatgtgaaacacaggaagtatgccagatggaaggcaacatacatccataattgtttaaagaatggggagactcctcaagcaggccctgttggaattgaagaagataatgatattgaagaaaatgaagatgctggagcagcctctctgcccactcagccaactcagccatcatcatcttcaacttatgacccaagcaacatgccatcaggcaactatactggaatacagattcctccgggtgcacacgctccagctaatacaccagcagaagtgcctcacagcacaggtgtagcaagtaatactatccaacctactccacagactatacctgccattgatcccgcacttttcaatacaatttcccagggggatgttcgtctaaccccagaagactttgctagagctcagaagtactgcaaatatgctggcagtgctttgcagtatgaagatgtaagcactgctgtccagaatctacaaaaagctctcagttactgacgacaggcagagaatgaagcctttgtatgacagacccatgtatttttggcatgaggaactaacagtccattactc

SEQ ID NO: 227620 - DNA, 1115 bp, Homo Sapiens
ttggctaaagtggatgagagagaaaacggtgcgatgtctgtcttgtaagtgcttggtctctgaggaagagcttatacaccacttgctgatgcatggcttggggtgcttgttctgtccatgcaccttccatgatatcaaaggtctttcagagcacagcaggaataggcacctggggaagaagaagttgcctatggattatagcaacagaggttttcaattagatgtcgatgccaatggcaacctgctctttccccaccttgatttcatcaccatattgccaaaggagaagcttggggagcgggaagtctacttggcaatcctggctgggatacactccaagtcactggtgcctgtgtatgtgaaggtgaggcctcaggctgagggcacccccgggagcaccggcaagcgagtgtccacctgccccttttgctttggcccctttgtgacaactgaggcctatgagctgcatttgaaggagaggcaccacatcatgcccacagtccacacggtcctgaagtctcccgccttcaagtgcatccactgctgtggggtctacacgggaaatatgaccctggctgccatcgccgtccatttggtgcgctgcagaagtgctcccaaggacagcagctcagacctgcaggcccagccgggttttattcacaacagtgaactgcttttagtcagtggtgaagtgatgcatgattccagtttttctgttaagagaaagctgcctgacggccacttaggggccgaagaccagcggcatggggaggagcagcctcccatcctaaatgccgatgcagccccgggtccagaaaaggtgacgagtgttgtgccttttaaaagacaaaggaatgaaagcagaacagagggacctattgtcaaggacgaggctcttcagattttagcattagatcctaaaaaatatgaaggccgttcttatgaagaaaagaagcaatttcttaaagattatttccataagaaaccatatcctagtaaaaaggaaatagaactgttgtcctcactcttttgggtgtggaaaattgatgtggcttcattttttggaaaaagaaggtatatttgcatgaaagcaataaaaaatcacaagccttctg

SEQ ID NO: 227621 - DNA, 1387 bp, Homo Sapiens
  misc_feature (154)..(203): n is a, c, g, or t
ttggcgcaggacccccagtgggggtcccggagccagagggccaattcctgtccccccagcagcatggcatcgtgtgctgaaccctctgagccctctgccccactgcccgccggggtcccaccgctcgaggacttcgaggtactggatggggttnnnnnnnnnnnnnnnnnnnnnnnnnnnnnnnnnnnnnnnnnnnnnnnnnntgacctgagtgagctgccaccgctggaggacatgggacaacccccggcggaggaggctgagcagcctggggccctggcccgagagttccttgctgccatggagcccgagcccgccccagccccggccccagaagagtggctggacattctggggaacgggctgttgaggaagaagacgctggtcccagggccgccaggttcgagccgcccggtcaagggccaggtggtcaccgtacatctgcagacgtcgctggagaatggcacacgggtgcaggaggagccggagctggtgttcactctgggtgactgtgacgtcatccaggccctggatctcagtgtcccactcatggacgtgggggagacggccatggtcactgctgactccaagtactgctacggcccccaaggcagcaggagcccatacatccccccgcacgcggccctgtgcctggaggtgaccctgaagacggctgtggacgggcctgacctggagatgctcacggggcaggagcgcgtggccctggccaaccggaagcgggagtgcggcaacgcccactaccagcgggcggacttcgtcctggccgccaactcctacgacctcgccatcaaggctatcacctccagcgccaaagtggacatgacgttcgaggaggaggcacagctcctgcagttgaaggtgaagtgtctgaacaacctggcggcctcacagctgaagctcgaccactaccgcgcagccctgcgctcctgcagccttgtgctggagcaccagccagacaacatcaaggctctcttccgcaagggcaaggtgctggcccagcagggggagtacagtgaggccatccccatcctgagggcagccctgaagctggaaccttccaacaagacgatccacgcagagctctcaaagctggtgaagaagcatgcggcgcagcggagcacggagaccgccttgtaccggaaaatgctgggcaaccccagccggctgcctgctaagtgccctggcaagggtgcctggtccatcccatggaagtggctgtttggggcgactgctgttgccttggggggtgtggcactctctgtggtcatcgctgccaggaactgaccacctaggtggctgccaccccctctgcacaccatggaccctgccctgcgctcttaactcccacaggctccctgtacaatgc

SEQ ID NO: 227622 - DNA, 850 bp, Homo Sapiens
ttggcagtgttttagccttcgaaggaccatggtgcttccacgtcatcgtgttgtggcgctcccggctatggcagtaccgtagttttcctctcttctgcctgcggtgaccattgggctgtagggtgccccgaggcctccctggccccctcacgccggcagaatggcctcagcccgaggggccaagcagtcttcgccccgggtggggaccacccgctacacagagacgtccacggtccgcgtggagacctcgtcccaccgcgtggagacgtcgtcccggcgggtggagacctcccagcgccgcagcgaggggccctccctctccccctcggggaagcggctccctcgcatcctcgaggcgtcctcccggcacgtggaatcctcctcgcagcgcacggaaacgacctcccgccacgtcagagcctcgtccctgagggtggagacgtctctgcactgcgcggagagcccgaccccgcgggccaagccggccgcccgccagaacgaaaaaacggcccgatgagatgctgcttcccaaaggccaccaaggggccagggccctcagccaggacagaaaggcctccagttgccagccagccagccagctgccaggtggaccaatcattttcggtttcatggaaacaaaccataaatcaatgtaagaaacagccaagccgcagtttctgaacacagccaacgtttactgaccgtcctgcgtcttggaccagcctacttttgaccagtgaactattttcacttgaagccagcacagaaggttttcaggcccaggatgctgtctaaatcgggttgatggacaaagagaggctgtttgagcctctgagccaggtgagtttgg

SEQ ID NO: 227623 - DNA, 607 bp, Homo Sapiens
ttggaggaaagacaccgccaaaatccactaccggaagaagaaacagctcatgaggctacagaaacaggccgagaagaacgtggagaagaacattgacaaatacacagaggtcctcaagacccacggactcctggtctgagcccaataaagactgttaattcctcatgcgttgcctgcccttcctccattgttgccctggaatgtacgggacccaagggcagcagcagtccaggtgccacaggcagccctgggacataggaagctgggagcaaggaaagggtcttagtcactgcctcccgaagttgcttgaaagcactcggagaattgtgcaggtgtcatttatctatgaccaataggaagagcaaccagttactatgagtgaaagggagccagaagactgattggagggccctatcttgtgattggggcatctgttggactttccacctggtcatatactctgcagctgttagaatgtgcaagcacttggggacattctgaccttgctgttgtacacagggtatttctaaaatcagaaatagactgggaagatgcacaacccacgggttacaggcatcgcccatgctcctcacctgtattttataat

SEQ ID NO: 227624 - DNA, 1135 bp, Homo Sapiens
ttgggtcagcggaagcggtgacagatcatcccagggcacacagaggccggcttggtcactatggaggagataggcatcttggtggagaaggctcaggatgagatcccagcactgtccgtgtcccggccccagaccggcctgtccttcctgggccctgagcctgaggacctggaggacctgtacagccgctacaagaagctgcagcaagagctggagttcctggaggtgcaggaggaatacatcaaagatgagcaaaagaacctgaaaaaggaatttctccatgcccaggaggaggtgaagcgaatccaaagcatcccgctggtcatcggacaatttctggaggctgtggatcagaatacagccatcgtgggctctaccacaggctccaactattatgtgcgcatcctgagcaccatcgatcgggagctgctcaagcccaacgcctcagtggccctccacaagcacagcaatgcactggtggacgtgctgccccccgaagccgacagcagcatcatgatgctcacctcagaccagaagccagatgtgatgtacgcggacatcggaggcatggacatccagaagcaggaggtgcgggaggccgtggagctcccgctcacgcatttcgagctctacaagcagatcggcatcgatcccccccgaggcgtcctcatgtatggcccacctggctgtgggaagaccatgttggcaaaggcggtggcacatcacacaacagctgcattcatccgggtcgtgggctcggagtttgtacagaagtatctgggtgagggcccccgcatggtccgggatgtgttccgcctggccaaggagaatgcacctgccatcatcttcatagacgagattgatgccatcgccaccaagagattcgatgctcagacaggggccgacagggaggttcagaggatcctgctggagctgctgaatcagatggatggatttgatcagaatgtcaatgtcaaggtaatcatggccacaaacagagcagacaccctggatccgccctgctacggccaggacggctggaccgtaaaattgaatttccacttcctgaccgccgccagaagagattgattttctccactatcactagcaagatgaacctctctgagaggttgac

SEQ ID NO: 227625 - DNA, 778 bp, Homo Sapiens
ctttgtacaaaaaagttggctctcagacaccaagctgcagatccaggcttttctgggaaagtgaggccaccatggctctggagaagtctcttgtccggctccttctgcttgtcctgatactgctggtgctgggctgggtccagccttccctgggcaaggaatcccgggccaagaaattccagcggcagcatatggactcagacagttcccccagcagcagctccacctactgtaaccaaatgatgaggcgccggaatatgacacaggggcggtgcaaaccagtgaacacctttgtgcacgagcccctggtagatgtccagaatgtctgtttccaggaaaaggtcacctgcaagaacgggcagggcaactgctacaagagcaactccagcatgcacatcacagactgccgcctgacaaacggctccaggtaccccaactgtgcataccggaccagcccgaaggagagacacatcattgtggcctgtgaagggagcccatatgtgccagtccactttgatgcttctgtggaggactctacctaaggtcagagcagcgagataccccacctccctcaacctcatcctctccacagctgcctcttccctcttccttccctgctgtgaaagaagtaactacagttagggctcctattcaacacacacatgcttccctttcctgagtcccatccctgcgtgattttgggggtgaagagtgggttgtgaggtgggccccatgttaacccctccactctttctttcaataaaacgcagttgcaaac

SEQ ID NO: 227626 - DNA, 637 bp, Homo Sapiens
ttggaggacattccctgttgactgcgtcgcgatgtgtggcgactgtgtggagaaggaatatcccaaccggggtaatacctgcctggagaatggatctttcttactgaactttacaggctgtgcagtgtgcagtaagcgggattttatgctgatcacaaacaaatccttgaaagaagaagatggagaagaaatagttacctatgatcatttgtgtaagaattgtcatcatgtaatagccagacatgagtatacattcagtatcatggatgaatttcaggagtataccatgctgtgtctgttatgcggcaaagccgaagatactatcagtattctccctgatgacccccgacaaatgactctcttattctaaggatccttctacagatctgttataactatattgtgttggtttacaatacagcaagcctgatggtttgtcttatttcattcatactgaaaattctttgcatattttttttctgcttagacttacttattctttgaggaaaaaaggtaatgtaggagctcattgttctctagagctgagctcttctgctaaagttcaaagttcacatcagtgtagccagagtgaagcatctttgttagcagttatgtggtcagaaaacaactagaatgg

SEQ ID NO: 227627 - DNA, 1258 bp, Homo Sapiens
ttggcttgggtactggctgggtccgatgctgggtacgctgcgcgccatggagggcgaggacgtggaagacgaccagctgctgcagaagctcagggccagtcgccgccgcttccagaggcgcatgcagcggctgatagagaagtacaaccagcccttcgaggacaccccggtggtgcaaatggccacgctgacctacgagacgccacagggattgagaatttggggtggaagactaataaaggaaagaaacaaaggagagatccaggactcctccatgaagcccgcggacaggacagatggctccgtgcaagctgcagcctggggtcctgagcttccctcgcaccgcacagtcctgggagccgattcaaaaagcggtgaggtcgatgccacgtcagaccaggaagagtcagttgcttgggccttagcacctgcagtgcctcaaagccctttgaaaaatgaattaagaaggaaatacttgacccaagtggatatactgctacaaggtgcagagtattttgagtgtgcaggtaacagagctggaagggatgtacgtgtgactccgctgccttcactggcctcacctgccgtgcctgcccccggatactgcagtcgtatctccggaaagagtcctggtgacccagcgaaaccagcttcatctcccagagaatgggatcctttgcatccttcctccacagacatggccttagtacctagaaatgacagcctctccctacaagagaccagtagcagcagcttcttaagcagccagccctttgaagatgatgacatttgcaatgtgaccatcagtgacctgtacgcagggatgctgcactccatgagccggctgttgagcacaaagccatcaagcatcatctccaccaaaacgttcatcatgcaaaactggaactgcaggaggaggcacagatataagagcaggatgaacaaaacatattgcaaaggagccagacgttctcagaggagctccaaggagaacttcataccctgctctgagcctgtgaaagggacaggggcattaagagattgcaagaacgtattagatgtttcttgccgtaagacaggtttaaaattggaaaaagcttttcttgaagtcaacagaccccaaatccataagttagatccaagttggaagagcgcaaagtgacaccctcgaagtattcttccttgatttacttcgactccagtgcaacatataatcttgatgaggaaatagatttaggacattaaaatggttaatttc

SEQ ID NO: 227628 - DNA, 761 bp, Homo Sapiens
tgagcaatgcttttttataatgccaactttgtacaaaaaagttggctcttccacccctgccaggcccagcagccaccacagcgcctgcttcctcggccctgaaatcatgcccctaggtctcctgtggctgggcctagccctgttgggggctctgcatgcccaggcccaggactccacctcagacctgatcccagccccacctctgagcaaggtccctctgcagcagaacttccaggacaaccaattccaggggaagtggtatgtggtaggcctggcagggaatgcaattctcagagaagacaaagacccgcaaaagatgtatgccaccatctatgagctgaaagaagacaagagctacaatgtcacctccgtcctgtttaggaaaaagaagtgtgactactggatcaggacttttgttccaggttgccagcccggcgagttcacgctgggcaacattaagagttaccctggattaacgagttacctcgtccgagtggtgagcaccaactacaaccagcatgctatggtgttcttcaagaaagtttctcaaaacagggagtacttcaagatcaccctctacgggagaaccaaggagctgacttcggaactaaaggagaacttcatccgcttctccaaatctctgggcctccctgaaaaccacatcgtcttccctgtcccaatcgaccagtgtatcgacggctgagtgcacaggtgccgccagctgccgccacagcccgaaacaccattggagggagctggga

SEQ ID NO: 227629 - DNA, 1226 bp, Homo Sapiens
ttggggaggaggccgagcctggggcggagtttgggctgactggggctggaccgggcaagacgccgccgctgcccggatgttgcgatggctgatcgggggaggccgagaaccgcagggactggccgagaaatctcctttacagacaataggtgaagaacaaacccagaatccctacactgaactgctagtactgaaggctcatcatgatattgtacgatttctggtacagttagatgactacagatttgcatctgctggtgatgatggaattgtagttgtgtggaatgcccagacaggggaaaaacttttagaactgaatggacacactcaaaagataacagctattattacatttccttccttggaatcttgtgaagagaaaaatcaactcatcttgacagcctctgctgatagaacagttattgtgtgggatggtgatactaccagacaagttcagagaatatcatgcttccagtctactgtaaagtgtttaactgttcttcagagactagatgtttggctttctggtgggaatgacctgtgtgtgtggaaccgaaaattagatctcctgtgtaagactagccacctttctgatacaggtattagtgctttggttgaaatacctaagaactgtgttgtggcagcagttggcaaagaactgataattttcaggttggtagcacccacagaaggatcactagaatgggatattcttgaagttaagcgcctccttgatcaccaggataatattctctcattgattaatgtcaatgatttgagttttgtcaccggctcccacgtcggagagctgatcatctgggatgccctggactggaccatgcaggcctatgaacgcaacttctgggacccatctccacaactggacacccaacaagaaataaaactctgtcaaaaatcaaatgacatttctattcatcatttcacatgtgatgaagagaatgtatttgctgcagttggaaggggtttatacgtgtatagccttcaaatgaagcgtgtgattgcctgccagaaaactgcacatgactccaatgtcctgcacgttgccagacttccaaacaggcagttaatctcatgctcagaagatggcagtgtacgcatttgggagttaagagaaaaacagcagcttgcagctgagcctgtaccaacagttttttaacatgtggggatttggaagagtcagcaaacaagccagccaactgttaaaa

SEQ ID NO: 227630 - DNA, 1223 bp, Homo Sapiens
ttggcaagatggcggtgcaggagtcggcggctcagttgtccatgaccctgaaggtccaggagtacccgaccctcaaggtgccctacgagacgctgaacaaacgctttcgcgccgctcagaagaacattgaccgggagaccagccacgtcaccatggtggtggccgagctggagaagacgttgagcggctgccccgccgtggactccgtggtcagcctgctggacggcgtggtggagaagctcagcgtcctcaagaggaaggcggtggaatccatccaggccgaggacgagagcgccaagctgtgcaagcgccggatcgagcacctcaaagagcatagcagcgaccagcccgcggcggccagcgtgtggaagaggaagcgcatggatcgcatgatggtggagcacctgctgcgttgcggctactacaacacggctgtcaagctggcgcgccagagcggcatcgaggacctagtgaatattgagatgttcctgacggccaaagaggtggaggagtccctggagaggcgtgagacggccacctgcctggcctggtgccatgacaacaagtcccggctccggaagatgaagagctgcctggagttcagcctcagaatccaggagttcattgaactcatccggcagaataagagactggacgctgtgagacatgcaagaaagcacttcagccaagcagaagggagccagctggacgaggtgcgccaggccatgggcatgctggccttcccgcccgacacgcacatctccccgtacaaggaccttctggaccctgcacggtggcggatgctgatccagcagttccggtacgacaactaccgactacaccagctgggaaacaattctgtgttcaccctcaccctgcaggccggcctctcagccatcaagacaccacagtgctacaaggaggacggcagctccaagagccctgactgccctgtgtgcagccgctccctgaacaagctggcgcagcccctgcccatggcccactgtgccaactcccgcctggtctgcaagatttctggcgacgtgattattttttaacaatccgcccatgatgctgcccaacggccacgtctacggctacaattctctgctttctatccgtcaagatgataaagtcgtgtgcccgagaaccaaagaagtcttccacttctcacaagccgagaaggtgtacatcatgtaggccccaagtcgtgaagcgcacgc

SEQ ID NO: 227631 - DNA, 999 bp, Homo Sapiens
ttggctcagtcagcagaagagataaaagcaaacaggtctgggaggcagttctgttgccactctctctcctgtcaatgatggatctcagaaataccccagccaaatctctggacaagttcattgaagactatctcttgccagacacgtgtttccgcatgcaaatcaaccatgccattgacatcatctgtgggttcctgaaggaaaggtgcttccgaggtagctcctaccctgtgtgtgtgtccaaggtggtaaagggtggctcctcaggcaagggcaccaccctcagaggccgatctgacgctgacctggttgtcttcctcagtcctctcaccacttttcaggatcagttaaatcgccggggagagttcatccaggaaattaggagacagctggaagcctgtcaaagagagagagcattttccgtgaagtttgaggtccaggctccacgctggggcaacccccgtgcgctcagcttcgtactgagttcgctccagctcggggagggggtggagttcgatgtgctgcctgcctttgatgccctgggtcagttgactggcggctataaacctaacccccaaatctatgtcaagctcatcgaggagtgcaccgacctgcagaaagagggcgagttctccacctgcttcacagaactacagagagacttcctgaagcagcgccccaccaagctcaagagcctcatccgcctagtcaagcactggtaccaaaattgtaagaagaagcttgggaagctgccacctcagtatgccctggagctcctgacggtctatgcttgggagcgagggagcatgaaaacacatttcaacacagcccagggatttcggacggtcttggaattagtcataaactaccagcaactctgcatctactggacaaagtattatgactttaaaaaccccattattgaaaagtacctgagaaggcagctcacgaaacccaggcctgtgatcctggacccggcggaccctacaggaaacttgg

SEQ ID NO: 227632 - DNA, 891 bp, Homo Sapiens
ttggcacttcgcctgccgcggtcgggtccgcggcctgcgctgtagcggtcgccgccgttccctggaagtagcaacttccctaccccaccccagtcctggtccccgtccagccgctgacgtgaagatgagcagctcagaggaggtgtcctggatttcctggttctgtgggctccgtggcaatgaattcttctgtgaagtggatgaagactacatccaggacaaatttaatcttactggactcaatgagcaggtccctcactatcgacaagctctagacatgatcttggacctggagcctgatgaagaactggaagacaaccccaaccagagtgacctgattgagcaggcagccgagatgctttatggattgatccacgcccgctacatccttaccaaccgtggcatcgcccagatgttggaaaagtaccagcaaggagactttggttactgtcctcgtgtgtactgtgagaaccagccaatgcttcccattggcctttcagacatcccaggtgaagccatggtgaagctctactgccccaagtgcatggatgtgtacacacccaagtcatcaagacaccatcacacggatggcgcctacttcggcactggtttccctcacatgctcttcatggtgcatcccgagtaccggcccaagagacctgccaaccagtttgtgcccaggctctacggtttcaagatccatccgatggcctaccagctgcagctccaagccgccagcaacttcaagagcccagtcaagacgattcgctgattccctcccccacctgtcctgcagtctttgacttttcctttcttttttgccaccctttcaggaaccctgtatggtttttagtttaattaaaggagtcgttatcgtggtgggaatatgaa

SEQ ID NO: 227633 - DNA, 823 bp, Homo Sapiens
tacaggcaaaagccagtggaaacatttttgttcaatttctaggaattttctcttgggggaaagtcggtcgaaagttacctgatcatattcttaggcttcatctccactgtccatttcaatatccatctcttctgtatcagcagctcgcgacaagatgtctgccatcagtgcttcttccaatttcttgcgtacttgctgtactcgctcttcctgtttcctgatgtcttcatctgtgacaataaaagctttgcagaggggttgagatgtgttaagccaaacagcagggttcttttccacagcagcggagacttgccctgtgattggcgcagagcttgtgtgcaaagcactggcaacagcagataaaagggtctcatcattgctacctggaccaactccttgaagacctttgggtagttccatggtttttataatttgttctgttacatctgatgcactaagtccttgtagcctcttctcccagaaaagctgacgtggctgttcattcattcgttgtgggtctgatttcactttattactaggatgatttgtgactttggttaccggttgtttgaaaattgatgctgtttgtctaattggcaatgttgtattcaagtctggtttacccttattttgattgagaggatcgtttcgcagtctctgtttgttcttctgtaatttactaggcatcatctttccagttctgaagtcaaaactgctgagatcaacagtatttcccaggtaccttgccaactgaggcttgcttctgaacttcttaccacttggactgaagtagtagacatcgctcttgccagcacttagccaa

SEQ ID NO: 227634 - DNA, 1017 bp, Homo Sapiens; identical to SEQ ID NO: 194103

SEQ ID NO: 227635 - DNA, 988 bp, Homo Sapiens
  misc_feature (754)..(774): n is a, c, g, or t
ttgggttccatcatggcgtcaatgcagaccacaggaaggagggtggaagtatggtttccaaaacgactacagaaagaactgttggctttgcaaaatgacccacctcctggaatgaccttaaatgagaagagtgttcaaaattcaattacacagtggattgtagacatggaaggtgcaccaggtaccttatatgaaggggaaaaatttcaacttctatttaaatttagtagtcgatatccttttgactctcctcaggtcatgtttactggtgaaaatattcctgttcatcctcatgtttatagcaatggtcatatctgtttatccattctaacagaagactggtccccagcgctctcagtccaatcagtttgtcttagcattattagcatgctttccagctgcaaggaaaagagacgaccaccggataattctttttatgtgcgaacatgtaacaagaatccaaagaaaacaaaatggtggtatcatgatgatacttgttgatgccactgttatcatcctcctagcagaagatagtcctactgagaaaatgagcactttgatcattcagtctttgaactttaacctttgactggaagtgacctataggcaatgaagactacttccttttactgcatttttactcgtgtgcattctgggcgcatgttgatcgctggttcagtccaggcaactgacatgcttttattagtcatacagtattaatgcaggtgtcaggaaatgtcaaatataattccannnnnnnnnnnnnnnnnnnnnaagcttttggaaaagctccaggtcctcatgtattgtgcaataacaatgacttccttggcggttttggtacgttcattgccggcaatgggcgttgtaacaggaaaagttttcattaactcctgccattcaatgattaatgcatgatagggcctatgaaatgaacttactggttatagtgggaatataaataaagtgagggatccaacattacttt

SEQ ID NO: 227636 - DNA, 1010 bp, Homo Sapiens
  misc_feature (926)..(946): n is a, c, g, or t
ttggccggagcctgggacaccgccggcggggagagaagcggatcccgtccgagccccggccccaagtaacgccgccgccccggagccgccttggaggtccccctccccactaagtgcctctttgcatagcaccagtccccacccgcacgctctctggaccactacagctggacgggcaatggcgggtcggggaggcgcagcacgacccaatggaccagctgctgggaacaagatctgtcaatttaagctggttctgctgggggagtctgcggtaggcaaatccagcctcgtcctccgctttgtcaagggacagtttcacgagtaccaggagagcacaattggagcggccttcctcacacagactgtctgcctggatgacacaacagtcaagtttgagatctgggacacagctggacaggagcggtatcacagcctggcccccatgtactatcggggggcccaggctgccatcgtggtctatgacatcaccaacacagatacatttgcacgggccaagaactgggtgaaggagctacagaggcaggccagccccaacatcgtcattgcactcgcgggtaacaaggcagacctggccagcaagagagccgtggaattccaggaagcacaagcctatgcagacgacaacagtttgctgttcatggagacatcagcaaagactgcaatgaacgtgaacgaaatcttcatggcaatagctaagaagcttcccaagaacgagccccagaatgcaactggtgctccaggccgaaaccgaggtgtggacctccaggagaacaacccagccagccggagccagtgctgcagcaactgagccccccttgcctgcccgctgcccccgcctcctccgcctgaatgacccgactggaatccactctaaccaatcgcacttaacgactcgggccaccacnnnnnnnnnnnnnnnnnnnnntccaccatgatttctccatataattttgatcatagcccggagtgagtcattccacctgcacctt

SEQ ID NO: 227637 - DNA, 926 bp, Homo Sapiens
aactttgtacaaaaaagttgggacagctgcaaattcttctttcttgactgatggtgcatctgcaatgttaatcatggcggaggaaaaggctctggccatgggttataagccgaaggcatatttgagggattttatgtatgtgtctcaggatccaaaagatcaactattacttggaccaacatatgctactccaaaagttctagaaaaggcaggattgaccatgaatgatattgatgcttttgaatttcatgaagctttctcgggtcagattttggcaaattttaaagccatggattctgattggtttgcagaaaactacatgggtagaaaaaccaaggttggattgcctcctttggagaagtttaataactggggtggatctctgtccctgggacacccatttggagccactggctgcaggttggtcatggctgctgccaacagattacggaaagaaggaggccagtatggcttagtggctgcgtgtgcagctggagggcagggccatgctatgatagtggaagcttatccaaaataatagatccagaagaagtgacctgaagtttctgtgcaacactcacactaggcaatgccatttcaatgcattactaaatgacatttgtagttcctagctcctcttaggaaaacagttcttgtggccttctattaaatactttgcacttaagccttgccagtgttctgagcttttcaataatcagtttactgctctttcagggatttctaagccaccagaatctcacatgagatgtgtgggtggttgtttttggtctctgttgtcactaaagactaaatgagggtttgcagttgggaaagaggtcaactgagatttggaaatcatctttgtaatatttgcaattatacttgttcttatctgtgtcctaaagatgtgttctctataaatacaa

SEQ ID NO: 227638 - DNA, 965 bp, Homo Sapiens; identical to SEQ ID NO: 194106

SEQ ID NO: 227639 - DNA, 1160 bp, Homo Sapiens; identical to SEQ ID NO: 194107

SEQ ID NO: 227640 - DNA, 970 bp, Homo Sapiens; identical to SEQ ID NO: 194108

SEQ ID NO: 227641 - DNA, 818 bp, Homo Sapiens
ttggggttgatttcaggcggacaccaatagactccacagcagctccaggagcccagacaccggcggccagaagcaaggctaggagctgctgcagccatgtcggccctcagcctcctcattctgggcctgctcacggcagtgccacctgccagctgtcagcaaggcctggggaaccttcagccctggatgcagggccttatcgcggtggccgtgttcctggtcctcgttgcaatcgcctttgcagtcaaccacttctggtgccaggaggagccggagcctgcacacatgatcctgaccgtcggaaacaaggcagatggagtcctggtgggaacagatggaaggtactcttcgatggcggccagtttcaggtccagtgagcatgagaatgcctatgagaatgtgcccgaggaggaaggcaaggtccgcagcaccccgatgtaaccttctctgtggctccaaccccaagactcccaggcacatgggatggatgtccagtgctaccacccaagccccctccttctttgtgtggaatctgcaatagtgggctgactccctccagccccatgccggccctacccgcccttgaagtatagccagccaaggttggagctcagaccgtgtctaggttggggctcggctgtggccctggggtctcctgctcagctcagaagagccttctggagaggacagtcagctgagcacctcccatcctgctcacacgtccttccccataactatggaaatggccctaatttctgtgaaataaagactttttgtatttctggggctgaggctcagcaacagcccctcaggcttcc

SEQ ID NO: 227642 - DNA, 965 bp, Homo Sapiens; identical to SEQ ID NO: 194109

SEQ ID NO: 227643 - DNA, 1172 bp, Homo Sapiens
ttggctctaacttccgccggaagtgccttccagccgcaggcgcccttcctcttctgtgcgctcgggctcctggtcccggctccccggttaccggggcgcgagtatgaccacaatggcggccgccaccctgctgcgcgcgacgccccacttcagcggtctcgccgccggccggaccttcctgctgcagggtctgttgcggctgctgaaagccccggcattgcctctcttgtgccgcggcctggccgtggaggccaagaagacttacgtgcgcgacaagccacatgtgaatgtgggtaccatcggccatgtggaccacgggaagaccacgctgactgcagccatcacgaagattctagctgagggaggtggggctaagttcaagaagtacgaggagattgacaatgccccggaggagcgagctcggggtatcaccatcaatgcggctcatgtggagtatagcactgccgcccgccactacgcccacacagactgcccgggtcatgcagattatgttaagaatatgatcacaggcactgcacccctcgacggctgcatcctggtggtagcagccaatgacggccccatgccccagacccgagagcacttattactggccagacagattggggtggagcatgtggtggtgtatgtgaacaaggctgacgctgtccaggactctgagatggtggaactggtggaactggagatccgggagctgctcaccgagtttggctataaaggggaggagaccccagtcatcgtaggctctgctctctgtgcccttgagggtcgggaccctgagttaggcctgaagtctgtgcagaagctactggatgctgtggacacttacatcccagtgcccgcccgggacctggagaagcctttcctgctgcctgtggaggcggtgtactccgtccctggccgtggcaccgtggtgacaggtacactaaagcgtggcattttaaagaagggagacgagtgtgagctcctatgacatagcaagaacatccgcactgtggtgacaggcattgagatgttccacaagagcctggagagggccgaggccggagataacctctgggccctggtccgaggcttgaagcgggaggacttgcggcggggcctggtcatggtcaagccaagttccatcaagccccaccagaaagtggagg

SEQ ID NO: 227644 - DNA, 671 bp, Homo Sapiens; identical to SEQ ID NO: 194110

SEQ ID NO: 227645 - DNA, 729 bp, Homo Sapiens; identical to SEQ ID NO: 194111

SEQ ID NO: 227646 - DNA, 899 bp, Homo Sapiens; identical to SEQ ID NO: 194112
  misc_feature (159)..(195): n is a, c, g, or t

SEQ ID NO: 227647 - DNA, 368 bp, Homo Sapiens; identical to SEQ ID NO: 194114

SEQ ID NO: 227648 - DNA, 1177 bp, Homo Sapiens
ttgggtcccttttcgcgctagtgcagcggcccctctggacccggaagtccgggccggttgctgaatgaggggagccgggccctccccgcgccagtccccccgcaccctccgtcccgacccgggccccgccatgtccttcttccggcggaaagtgaaaggcaaagaacaagagaagacctcagatgtgaagtccattaaagcttcaatatccgtacattccccacaaaaaagcactaaaaatcatgccttgctggaggctgcaggaccaagtcatgttgcaatcaatgccatttctgccaacatggactccttttcaagtagcaggacagccacacttaagaagcagccaagccacatggaggccgctcattttggtgacctgggcagatcttgtctggactaccagactcaagagaccaaatcaagcctttctaagacccttgaacaagtcttgcacgacactattgtcctcccttacttcattcaattcatggaacttcggcgaatggagcatttggtgaaattttggttagaggctgaaagttttcattcaacaacttggtcgcgaataagagcacacagtctaaacacagtgaagcagagctcactggctgagcctgtctctccatctaaaaagcatgaaactacagcgtcttttttaactgattctcttgataagagattggaggattctggctcagcacagttgtttatgactcattcagaaggaattgacctgaataatagaactaacagcactcagaatcacttgctgctttcccaggaatgtgacagtgcccattctctccgtcttgaaatggccagagcaggaactcaccaagtttccatggaaacccaagaatcttcctctacacttacagtagccagtagaaatagtcccgcttctccactaaaagaattgtcaggaaaactaatgaaaagtatagaacaagatgcagtgaatacttttaccaaatatatatctccagatgctgctaaaccaataccaattacagaagcaatgagaaatgacatcatagcaaggatttgtggagaagatggacaggtggatcccaactgtttcgttttggcacagtccatagtctttagtgcaatggagcaagagcactttagtgagtttctgcgaagtcaccatttctgtaaataccagattgaa

SEQ ID NO: 227649 - DNA, 1204 bp, Homo Sapiens
ttggcagcagccccggcatgacctcagggaacggaaactctgcctccagcatcgccggcactgccccccagaatggtgggacgctcgtccctgctggtggggaatctcaagaagaagtatgcacaggggttcctgcctgagaaacttccacagcaggatcacaccaccaccactgactcggagatggaggagccctatctgcaagaatccaaagaggagggtgctcccctcaaactcaagtgtgagctctgtggccgggtggactttgcctataagttcaagcgttccaagcgcttctgttccatggcttgtgcaaagaggtacaacgtgggatgcaccaaacgggtgggacttttccactcagaccggagcaagctgcagaaggcaggagctgcgacccacaaccgccgtcgggccagcaaagccagtctgccaccacttaccaaggataccaagaagcagccaacaggcactgtgcccctttcggttactgctgctttgcagctaacacacagccaggaagactccagccgttgctcagataactcaagctatgaggaacccttgtcacccatctcagccagctcatctacttcccgccggcgacaaggccagcgggacctggagctccccgacatgcatatgcgggacctggtgggcatgggacaccacttcctgccaagtgagcccaccaagtggaatgtagaagacgtctacgaattcatccgctctctgccaggctgccaggagatagcagaggaattccgtgcccaggaaatcgacgggcaagccctgctgctgctcaaggaggaccacctgatgagcgccatgaacatcaagctggggcccgccctgaagatctacgcccgcatcagcatgctcaaggactcctagggctggtggcagccaggattctggcccagggcgcctcctcccgactgagcagagccagacagacattcctgaggggcccagaaatgggggccggttggagggcaggggctctccctaagggcatagctggtgaggaggtctgggcacctcctccatggctctcaggggcctttcatttctgtgggaggggcagagaggtacgtggcacagaagatggggctttatgcttgtaaatattgatagcactggcttcctccaaagtcccaatactctagccccgctctcttccctctttctgtccccattttcc

SEQ ID NO: 227650 - DNA, 1506 bp, Homo Sapiens
ttggctgctacttaacaaggtggtttgagccaaactgtggcacgtttcaggcaggattcctccttcattcaaactgcatcacccaggagtctgcaaattccccaaagtaggaggaaaaatgaccacattcaaggaggcagtgaccttcaaggatgtggctgtggtcttcactgaggaggagctggggctgctggaccctgcccagaggaagctgtaccgagatgtgatgctggagaacttcaggaacctgctctcagtggggcatcaaccgttccaccaagatacttgccacttcctaagggaagaaaagttttggatgatggggacagcaacccaaagagaagggaattcaggaggcaagatccaaactgagttggagtctgttccagaagcaggagcacatgaagagtggtcctgccagcaaatctgggaacaaattgcaaaagacttaaccaggtctcaggactctatcataaataactctcagttctttgaaaatggtgatgtcccctcccaggttgaagcaggactacccacaattcatacaggacagaaaccttcccagggtgggaagtgtaaacagtccttcagtgatgttcccatctttgatcttcctcagcagttatactcagaagagaagtcttatacatgtgatgagtgtggaaaaagcatctgttacatctcagctcttcatgttcatcagagagtccacgtgggagagaaactctttatgtgtgatgtgtgtggcaaggaatttagtcaaagctcacatctgcaaactcatcagagagtccacactggagagaaaccattcaaatgtgagcaatgtgggaaaggtttcagtcgtagatcagcacttaatgttcatcataaattacacacaggagagaaaccttacatttgtgaggcatgtgggaaggccttcattcatgattcccagcttaaggaacataagagaatccatactggggagaaaccattcaaatgtgatatatgtggtaagaccttctattttaggtcaagacttaagagccattccatggttcacacaggagaaaaaccatttaggtgtgatacatgtgataagagctttcatcagagatcagcacttaataggcattgcatggtccacacaggagagaaaccgtacagatgtgagcagtgtggaaaaggctttattggtaggctagatttttataagcatcaggtggtccacacaggagagaaaccatataattgtaaagaatgtgggaagagcttcagatggtcctcatgccttttgaaccatcagcgagtccacagtggagaaaaaagcttcaaatgtgaagaatgtgggaagggattttatacaaattcacaactgtcttcccatcagagatcccacagtggtgaaaagccatataaatgtgaggagtgtggggagggctatgttactaagttttatcttgacttgcaccagagggtccacacgggagagagaccttataattgtaaggaatgtgggaa

SEQ ID NO: 227651 - DNA, 1040 bp, Homo Sapiens
ttgggagcttaaatataatttgtaaagcacttggtttaaatttctctctacctataaacagtttagcattaagggtttctattaatgacacagaattattggccaagtgtaatttcttaaaatttagcattactttaaatagccagcatgtaatacaagtaactacactacctcatatctacatgattttcaagttgtaatgcagatggacagataaaaaagattttacgtttgtcttttggccataagtgggaaagttttctgtatattgcatagcattacacatttatgcctattttaacattaacttctaaagaagttttttctaagaaaatgtttcaaggcaatattttttttgaggctgccgaagacaaatgacaggattatgagtatacagtgtatgccttttccttcatgcagaattttgaaatgttttcagtttgtatattgcatattcacatgatcattgctcactattttatgaactggccttctcaatgtttgatgattttttaaaagctgttatgttgaattcagtaaaataacattaccttattttttttcttattcaaattctggaactatagcaaataattcgttaaattgtcatattcaaaacaaatgtggatacagtcttggttctccatctgtaattttttttaacagtttgctatagcttactgcttaactaattttaaataaggaaataagtatgttagatgcagtagacgatacaggttgcatgtggacactcagtcacattaacaacttgggaaaaaaatggcaatgttacggtgaattctcaggtgaacttttttcagttataaaacatctattttgaatctgtaaatattttaaatgttttattaaggcatgtaataaactattctttgaaacttgttgggtagaatgaaaattaaagccataatggtaaaagatggcatactgattataaaagaagcagaaaaacattgatttttttatatctttcataatataattttctaacaatgcaataaaaccactaaacttttgtgtcc

SEQ ID NO: 227652 - DNA, 964 bp, Homo Sapiens
ttggcaacccgcgcgcagccggggccactcagccaggcgggaagcgctggtgttgcggcgctggcgacagtcggggttgcgagcggcccggggccggggcggccagggccgctgcaggacgagaccctgggtgtggcgtccgtgccctcgcagtggagggccgtccagggcatccgcggggagacgaaaagttgccagacggccagcattgccactgccagtgcatccgcccaggccaggaatcatgtggacgcccaggtgcagacggaggcccccgtgcctgtcagcgtgcagcccccgtcccagtacgacatacccaggctcgcagcctttcttcggagagtggaggccatggtcatccgagagctgaacaagaattggcagagccacgcgtttgatggcttcgaggtgaactggaccgagcagcagcagatggtgtcttgtctgtataccctgggctacccgccagcccaagcgcagggtctgcatgtgaccagcatctcctggaactccactggctctgtggtggcctgtgcctacggccggctggaccatggggactggagcacgcttaagtccttcgtgtgtgcctggaacctggaccggcgagacctgcgtccccagcaaccgtcggccgtggtggaggtccccagcgctgtcctgtgtctggccttccaccccacgcagccctcccacgtcgcaggagggctgtacagtggtgaggtgttggtgtgggacctgagccgtcttgaggacccgctgctgtggcgcacaggcctgacggatgacacccacacagaccctgtgtcccaggtggtgtggctgcccgagcctgggcacagccaccgcttccaggtgctgagtgtggccactgacgggaaggtgctactctggcagggcatcggggtaggccagctgcagctcacagagggcttcgccctggtcatgcagcagctgccacgga

SEQ ID NO: 227653 - DNA, 797 bp, Homo Sapiens
ttggctcccctatccagccccattctagaactgcattcagaggacacacttcagatggatggacacatactggattcaaagagatatgccgttattggagcatctccgagacctgtctgaactggaagagaagctaaagaaatgtaacatgaatacacaattgccaacactcctgatagctgaatgtgtgctggtttacatgactccagagcagtccgcaaacctcctgaagtgggcagccaacagttttgagagagccatgttcataaactacgaacaggtgaacatgggtgatcggtttgggcagatcatgattgaaaacctgcggagacgccagtgtgacctggcgggagtggagacctgcaagtcattagagtcacagaaagaacggctcctgtcgaatgggtgggaaacagcatcggccgtcgacatgatggagttgtacaacaggttacctcgagctgaagtgagcaggatagaatcacttgaattcctggatgaaatggagctgctggagcagctcatgcggcattactgcctttgctgggcaaccaaaggaggaaatgagcttgggctgaaggagataacttattaatctgtcgaaggcttatgccgagccagaagccgaagccacttgccctcctggaggagacctgcaagctccctgagcggtgggcgggcctcgtccgcaggtctcatcccacactcttgagaagccttggtcactacagtggtcgcacatgttcctcttcctgttcctgttgacatgtcgttgtttaaataaatctcacttgccc

SEQ ID NO: 227654 - DNA, 968 bp, Homo Sapiens
ttggctcttcctcaggcggcggccatggcgggacaggaggatccggtgcagcgggagattcaccaggactgggctaaccgggagtacattgagataatcaccagcagcatcaagaaaatcgcagactttctcaactcgttcgatatgtcttgtcgttcaagacttgcaacactaaacgagaaattgacagcccttgaacggagaatagagtacattgaagctcgggtgacaaaaggtgagacactcacctagaacagtgccgtgctgctgctgggaagttgctttacacaacacaggccacatgggaaaggccccagcagccttcagctccttcctttctccttaaagagcaacagggcttattcttgtttttcttttttcaaaagtgtggcctttgggctctgccatctggggtgtggtgtggtatgtgggaagaagttcagaggaaccgttggaaacgacgttaggcattttaccttttcagtaacattttatacatctacttgtcaatgtatttgagacattcacagccaaaagcctgggactctttgtgaaggtcctcctcacctctatctttctttctctctctctcaaactttccttaaagttctcattgcctttgcactgcttctgtgaacagtctttgtctcctccccacctttggtgggaagtgcggggcagtcctggtcaagacactcatgccctggcaatgtggctgccagagaatgttgttgctaacccaccagtttcttgttgatttggagaggtcaaggccaggcccccacttggcttgaagggacattttcagacttttctttctgtcacttggagtgtctatgcctctcatattcccctaataaactcctcaactttttatctgactgctgtgattatggtggggagaggagctaagatatggggttcactttattgcacagaatgtaataccttggcgttattattctaac

SEQ ID NO: 227655 - DNA, 919 bp, Homo Sapiens; identical to SEQ ID NO: 194127

SEQ ID NO: 227656 - DNA, 908 bp, Homo Sapiens; identical to SEQ ID NO: 194129

SEQ ID NO: 227657 - DNA, 925 bp, Homo Sapiens
ctttgtacaaaaaagttggctccgcttctgttgcagctggcggtgctcggcgcggcgctggcggccgcagccctcgtactgatttccatcgttgcatttacaactgctacaaaaatgccagcactccatcgacatgaagaagagaaattcttcttaaatgccaaaggccagaaagaaactttacccagcatatgggactcacctaccaaacaactttctgtcgttgtgccttcatacaatgaagaaaaacggttgcctgtgatgatggatgaagctctgagctatctagagaagagacagaaacgagatcctgcgttcacttatgaagtgatagtagttgatgatggcagtaaagatcagacctcaaaggtagcttttaaatattgccagaaatatggaagtgacaaagtacgtgtgataaccctggtgaagaatcgtggaaaaggtggagcgattagaatgggtatattcagttctcgaggagaaaagatccttatggcagatgctgatggagccacaaagtttccagatgttgagaaattagaaaaggggctaaatgatctacagccttggcctaatcaaatggctatagcatgtggatctcgagctcatttagaaaaagaatcaattgctcagcgttcttacttccgtactcttctcatgtatgggttccactttctgggtgtggttcctttgtgtcaaaggaatcagggacacacagtgtgggttcaaattatttactcgagaagcagcttcacggacgttttcatctctacacgttgaacgatgggcatttgatggtagaactactgtacatagcacagttctttaaaattcccataacagaaattgctgtcaactgggacagaaattgaaggttctaaattagttcccattctggagctgggtacaaatgggtaagacc

SEQ ID NO: 227658 - DNA, 1385 bp, Homo Sapiens
ttggcggtcacaggctgagtgctgcggcgcgatccttgcttccctgagcgttggcccgggaggaaagaagatggtgctggatctggatttgtttcgggtggataaaggaggggacccagccctcatccgagagacgcaggagaagcgcttcaaggacccgggactagtggaccagctggtgaaggcagacagcgagtggcgacgatgtagatttcgggcagacaacttgaacaagctgaagaacctatgcagcaagacaatcggagagaaaatgaagaaaaaagagccagtgggagatgatgagtctgtcccagagaatgtgctgagtttcgatgaccttactgcagacgctttagctaacctgaaagtctcacaaatcaaaaaagtccgactcctcattgatgaagccatcctgaagtgtgacgcggagcggataaagttggaagcagagcggtttgagaacctccgagagattgggaaccttctgcacccttctgtacccatcagtaacgatgaggatgtggacaacaaagtagagaggatttggggtgattgtacagtcaggaagaagtactctcatgtggacctggtggtgatggtagatggctttgaaggcgaaaagggggccgtggtggctgggagtcgagggtacttcttgaagggggtcctggtgttcctggaacaggctctcatccagtatgcccttcgcaccttgggaagtcggggctacattcccatttataccccctttttcatgaggaaggaggtcatgcaggaggtggcacagctcagccagtttgatgaagaactttataaggtgattggcaaaggcagtgaaaagtctgatgacaactcctatgatgagaagtacctgattgccacctcagagcagcccattgctgccctgcaccgggatgagtggctccggccggaggacctgcccatcaagtatgctggcctgtctacctgcttccgtcaggaggtgggctcccatggccgtgacacccgtggcatcttccgagtccatcagtttgagaagattgaacagtttgtgtactcatcaccccatgacaacaagtcatgggagatgtttgaagagatgattaccaccgcagaggagttctaccagtccctggggattccttaccacattgtgaatattgtctcaggttctttgaatcatgctgccagtaagaagcttgacctggaggcctggtttccgggctcaggagccttccgtgagttggtctcctgttctaattgcacggattaccaggctcgccggcttcgaatccgatatgggcaaaccaagaagatgatggacaagagaagtttgtccatatgctcaatgctaccatgtgcgccactacccgtaccatctgcgc

SEQ ID NO: 227659 - DNA, 764 bp, Homo Sapiens; identical to SEQ ID NO: 194132

SEQ ID NO: 227660 - DNA, 850 bp, Homo Sapiens; identical to SEQ ID NO: 194138
  misc_feature (459)..(481): n is a, c, g, or t

SEQ ID NO: 227661 - DNA, 1020 bp, Homo Sapiens
tccgcagcagcagcccaggtggagtccacatgcaggaggttcactctcacagcctccatcgctcccagagcgacctggcgtttggtctttaccacgtcaaagagtagagtcagcactgcagccaccgtcctgagatgccaccagccacaaagctcatgcccacagaagtctggtccttcggcctgaacccattgagccagctcttcaccagctcatagttgaaccagtacagggctgagaagggcacatctcgaagggcagtggggccccagcccagccacagtgagcgccagccaccctgagccactgcagttcgaacacaggcacccagctcccggtacgacacatgctgagcctgcagctttgtccgcataagctccagggggctgatcacagtcacggtgcccaagcgggccagcgcgccagccaccatgggtgcgtagaggtcagaggtcagggctcgaccacacaggaaggccttcagttggtcataggcagtgaagtagatggcggtagctggcacagtcatcaccagggtggcggggaggccgctccagagggtcctggtgccctcgtgcctcacgatcttcacgaaggcatccatggtgccagtgaagcgggtagggtcttgaaaccaggtggcacagcgggcaccatttgggcacaggtacagaggctccaggacaccattgcaatacaggaggcaatttggtataggagaggctccacagtctggaggaaggcatcagctcgctggccatggagggccgctgagactgcaggcgaaccttcaccacgtccaggggtgtcatgaagagagaggtaaccacagccccggtgcctgaggccaccatttgctggagggggctgatgcccgcagggtcctggtcagccatcttgaagcttcagtcctggctctaggctggtgctcgtgcggcgcggcgcccagggtcaggcgggcccataccggctccgccgcctgtgcgcggtccgcgcgcgctcgcagcgcacctaggccaa

SEQ ID NO: 227662 - DNA, 965 bp, Homo Sapiens; identical to SEQ ID NO: 194139

SEQ ID NO: 227663 - DNA, 1161 bp, Homo Sapiens
actttgtacaaaaaagttggaccggagataacaatgtgtgatgcctacgttactgattttccacttgatctagatattgatccaaaagatgcaaataaaggcacacctgaagaaactggcagctacttggtatcaaaggatcttcccaagcattgcctctataccagactcagttcactgcaaaaattaaaggaacatctagtcttcacagtatgtttatcatatcagtactcaggattggaagatactgtagaggacaagcaggaagtgaatgttgggaggcctctcattgctaaattagacatgcatcgaggtttgggaaggaagacttgctttcaaacttgtcttatgtctaatggtccttaccagagttctgcagccacctcaggaggagcagggcattatcactcattgcaagacccattccatggtgtttaccattcacatcctggtaatccaagtaatgttacaccagcagatagctgtcattgcagccggactccagatgcatttatttcaagtttcgctcaccatgcttcatgtcattttagtagaagtaatgtgccagtagagacaactgatgaaataccatttagtttctctgacaggctcagaatttctgaaaaatgacctccttgtttttgaaagttagcataattttagatgcctgtgaaatagtactgcacttacataaagtgagacattgtgaaaaggcaaatttgtatatgtagagaaagaatagtagtaactgtttcatagcaaacttcaggactttgagatgttgaaattacattatttaattacagacttcctctttctaagattttgtgaattggttgaatagttctatacaaatgaagtatggaggtgtgtatgtttatatgtatataacaaaatattttcattgtgaccactctgaagtaagagcaatgggaatggcattattgtagaataagtcattgtatttttaacaccagaaagaaccttgccgatcaccaggcataacctaattttatccatggaagaaacacagaaaggcatctaagttagagctggcaccagaactgagacctccagaaatctattccagtattttttccactacacaactgccttcctgacaggttctgagataagtgttatgtttgtagatagagtgaa

SEQ ID NO: 227664 - DNA, 1313 bp, Homo Sapiens
ctttgtacaaaaaagttggcggtctctgctgaagagagaagatggcgcttgacggaccagagcagatggagctggaggaggggaaggcaggcagcggactccgccaatattatctgtccaagattgaagaactccagctgattgtgaatgataagagccaaaacctccggaggctgcaggcacagaggaacgaactaaatgctaaagttcgcctattgcgggaggagctacagctgctgcaggagcagggctcctatgtgggggaagtagtccgggccatggataagaagaaagtgttggtcaaggtacatcctgaaggtaaatttgttgtagacgtggacaaaaacattgacatcaatgatgtgacacccaattgccgggtggctctaaggaatgacagctacactctgcacaagatcctgcccaacaaggtagacccattagtgtcactgatgatggtggagaaagtaccagattcaacttatgagatgattggtggactggacaaacagatcaaggagatcaaagaagtgatcgagctgcctgttaagcatcctgagctcttcgaagcactgggcattgctcagcccaagggagtgctgctgtatggacctccaggcactgggaagacactgttggcccgggctgtggctcatcatacggactgtacctttattcgtgtctctggctctgaattggtacagaaattcataggggaaggggcaagaatggtgagggagctgtttgtcatggcacgggaacatgctccatctatcatcttcatggacgaaatcgactccatcggctcctcgcggctggaggggggttctggaggggacagtgaagtgcagcgcacgatgctggagttgctcaaccagcttgacggctttgaggccaccaagaacatcaaggttatcatggctactaataggattgatatcctggactcggcactgcttcgcccagggcgcattgacagaaaaattgaattcccaccccccaatgaggaggcccggctggacattttgaagattcattctcggaagatgaacctgacccgggggatcaacctgagaaaaattgctgagctcatgccaggagcatcaggggctgaagtgaagggcgtgtgcacagaagctggcatgtatgccctgcgagaacggcgagtccatgtcactcaggaggactttgagatggcagtagccaaggtcatgcagaaggacagtgagaaaaacatgtccatcaagaaattatggaagtgagtggacagcctttgtgtgtatctctccaataaagctctgtgggccaaagtc

SEQ ID NO: 227665 - DNA, 907 bp, Homo Sapiens; identical to SEQ ID NO: 194141

SEQ ID NO: 227666 - DNA, 689 bp, Homo Sapiens
ttgggctctcgcgagatttgggtctcttcctaagccggcgctcggcaagttctcccaggagaaagccatgttcagttcgagcgccaagatcgtgaagcccaatggcgagaagccggacgagttcgagtccggcatctcccaggctcttctggagctggagatgaactcggacctcaaggctcagctcagggagctgaatattacggcagctaaggaaattgaagttggtggtggtcggaaagctatcataatctttgttcccgttcctcaactgaaatctttccagaaaatccaagtccggctagtacgcgaattggagaaaaagttcagtgggaagcatgtcgtctttatcgctcagaggagaattctgcctaagccaactcgaaaaagccgtacaaaaaataagcaaaagcgtcccaggagccgtactctgacagctgtgcacgatgccatccttgaggacttggtcttcccaagcgaaattgtgggcaagagaatccgcgtcaaactagatggcagccggctcataaaggttcatttggacaaagcacagcagaacaatgtggaacacaaggttgaaactttttctggtgtctataagaagctcacgggcaaggatgttaattttgaattcccagagtttcaattgtaaacaaaaatgactaaataaaaagtatatattcacagta

SEQ ID NO: 227667 - DNA, 1142 bp, Homo Sapiens
aggcttgcacccctagaacctagagaagccacagctaggagaactcccttggtacccagcataggggcaagagctggtgctgaaagagagaaactatatgtgtctctaatttagaacttatgcacaatcattggttcttatgtcccaaggtccttttatgtatggcttgagcttgtaggcccagttggaaccctatctaatcctctctcacaggaaggctatacaggctctcaaaggcaagcctcccctctctttcaccccattagagtcccggtagccattcccataccgcctagagcttgactacgcaaaaactgtcaggaggcagactgacctaatggtcagactagctctggccctgcagcccagatgcagtggggagtccaagagcatctcatctctctctcaggctgaggcactgaggttgcaggagatagggctgagagccggaagtgacagcctgacccagaaggaacagggaacagatacatacatgcgtgtgcatgcacacacacgcacacattctgaagttgacagactaacatacacacagacatgatgacaaccaaaagctgggactccacacactgaatgcaggactttaggcggggggcagagagagaaggtgctggggcacaagaggcaagggtatgaagtccctccaaataggagtggagtgccaactgccctgcctcgctccaaacacctgactcctgggccatggcaagagtccagtccattaagtgcagcgtgcaatactagcgcttggagtctcctgtcctcatcaatgaagcggtgtggacgggatagcagtcacctggcaggaggccttgacccctggcaggctagttgtatcggcccttgatcattgtgttcaacaagggccccacctcttgtgggttccccaaggcctctccaagcatcttctcaatgtttctcattatggccactttctgatgagctttgagaggatattcaattctcttaggggtgggagcccccttataccagaagttcacagtgatggtaatccccccatttagtaatgactctatgtgatgccaccagtacattgggatgtaaagaacatcaccagggccaaccactgtttcgtaaccaaccacattttggaaattagccaa

SEQ ID NO: 227668 - DNA, 1174 bp, Homo Sapiens
cagcccaccaacccccaaacctctacttgcagccaccctaaaaggcgactttcaagaagatggaaaggatctcacggatctcattcgtaatggtcccgccgaagtctcacacagtagacagacggagttgagatgctggaggatgcagtcacctcctaaacttacgacccaccaccagacttcatcccagccgggacgtcctcccccacccgagtcctccccatttttttctcctactttgccgcagttccaggtgtcctgcttccaccagtcccacaaagctcaataaataccaagagacctgcatttacagcagggggaacatctcacacccttgcataagttaaaataaatattacgtacacatctccatcacctaggaggacgtacataaatacatataaatattaattaggagcaataagaaataaattaacgacgctctccttcccaccgggcctagccccagctgggctgtgcctcggtctctatgcgcctcggtctctgtgcgcctcggtcccgcctcaagcaccgggtggcgtctccgctgtagtgttctgagttcaagttgcctcggaagtcccagttggggatacgctctcgcgcaccaggtacgcctggtgtttctttgtggtttttcggattctttttggggagtgcggggagtcacagttagaaggcggccgggtgttgctggaggaaagtgctgaggtccagagcgtagtccgagggctccgaagtcagattaaagggctcgaggacgggggacacaggggtgggcgccagggatgcggcgttaggggcgtcctctggaggcaggggcgccggcacaccctcttcagccatcaggatctggcagaagacgatggtgagcagcagaaagagaagccttttggctgggttcggttcctcgactggcagctggcgccggaccactcgagggtagagaaccctgcggctgcgctttcggtgcccgcgagaggcgctggggcgcccggcaggggccgctgcgggctccgggagagggtcgaaggtgaagatctcaggaccggagccccgccggggtcccgggatggtggagggggccggggtcggggcctgcaggatggtcatggtcgggtggcagctgcgagagtgacacatggtgagccgagcggagtgccaacttttttgt

SEQ ID NO: 227669 - DNA, 894 bp, Homo Sapiens; identical to SEQ ID NO: 194146

SEQ ID NO: 227670 - DNA, 831 bp, Homo Sapiens
ttggcgctttccggcccagccagcgcccgcgatgactgccactctccgcccctacctgagtgccgtgcgggccacattgcaggctgccctctgcctggagaacttctcctcccaggttgtggaacgacacaacaagccggaagtggaagtcaggagtagcaaagagctcctgttacaacctgtgaccatcagcaggaatgagaaggaaaaggttctgattgagggctccatcaactctgtccgggtcagcattgctgtgaaacaggctgatgagatcgagaagattttgtgccacaagttcatgcgcttcatgatgatgcgagcagagaacttctttatccttcgaaggaagcctgtggaggggtatgatatcagctttctgatcaccaacttccacacagagcagatgtacaaacacaagttggtggactttgtgatccacttcatggaggagattgacaaggagatcagtgagatgaagctgtcagtcaatgcccgtgcccgcattgtggctgaagagttccttaagaatttttaaaccatctggctggatctcgtggccttccccctcagactacccatgtctccacgaaggcgtcctggagtcactccccgagcagcgcggcggcggcagggagttgggttggggtgggcatttgatgcgggaggtgggtggtgtgcttgctagctgggcaagaaagcagcagtggacctgccccaaggccacacgtgcctggtcaggctggcttctgatgttcagtcccctgggccgggacagattttttttaacgtcttgaaacttaaactctgtgcttgtaggatactgtaacc

SEQ ID NO: 227671 - DNA, 841 bp, Homo Sapiens; identical to SEQ ID NO: 194147

SEQ ID NO: 227672 - DNA, 944 bp, Homo Sapiens
aactttgtacaaaaaagttggcagggattgtgtttaaagtagtgcttctaccaacatgtcccgtggttccagcgccggttttgaccgccacattaccattttttcacccgagggtcggctctaccaagtagaatatgcttttaaggctattaaccagggtggccttacatcagtagctgtcagagggaaagactgtgcagtaattgtcacacagaagaaagtacctgacaaattattggattccagcacagtgactcacttattcaagataactgaaaacattggttgtgtgatgaccggaatgacagctgacagcagatcccaggtacagagggcacgctatgaggcagctaactggaaatacaagtatggctatgagattcctgtggacatgctgtgtaaaagaattgccgatatttctcaggtctacacacagaatgctgaaatgaggcctcttggttgttgtatgattttaattggtatagatgaagagcaaggccctcaggtatataagtgtgatcctgcaggttactactgtgggtttaaagccactgcagcgggagttaaacaaactgagtcaaccagcttccttgaaaaaaaagtgaagaagaaatttgattggacatttgaacagacagtggaaactgcaattacatgcctgtctactgttctatcaattgatttcaaaccttcagaaatagaagttggagtagtgacagttgaaaatcctaaattcaggattcttacagaagcagagattgatgctcaccttgttgctctagcagagagagactaaacattgtcgttagtttaccagatccgtgatgccacttacctgtgtgtttggtaacaacaaaccaacatcatggaggtccctggattgaaaaaggagcctctcccactcctcctaccaccgaagtggttaggactctatataaataaaa

SEQ ID NO: 227673 - DNA, 609 bp, Homo Sapiens; identical to SEQ ID NO: 194150

SEQ ID NO: 227674 - DNA, 935 bp, Homo Sapiens; identical to SEQ ID NO: 194151

SEQ ID NO: 227675 - DNA, 1094 bp, Homo Sapiens
ttggcaaaggtagaacatggaggatcgtcaggctctaaacaaaattctgatcatagcaatggatcatttaacttgaaagctttgtcaggaagctctggatataagtttggtgttcttgctaagattgtgaattacatgaagacacggcatcagcgaggagatacgcatcctctaaccttagatgaaattttggatgaaacacaacatttagatattggactcaagcagaaacaatggctaatgactgaggctttagtcaacaatcccaaaattgaagtaatagatgggaagtatgctttcaagcccaagtacaacgtgagagataagaaggccctacttaggctcttagatcagcatgaccagcgaggattaggaggaattcttttagaagacatagaagaagcactgcccaattcccagaaagctgtcaaggctttgggggaccagatactatttgtaaatcgtcccgataagaagaaaatacttttcttcaatgataagagctgtcagttttctgtggatgaagaatttcagaaactgtggaggagtgtcactgtagattccatggacgaggagaaaattgaagaatatctgaagcgacagggtatttcttccatgcaggaatctggaccaaagaaagtggcccctattcagagaaggaaaaagcctgcttcacagaaaaagcgacgctttaagactcataacgaacacttggctggagtgctgaaggattactctgacattacttccagcaaatagggaacagttttgccctggaacagagttacagatacacaatcaagagtgttcttgctgatgctcggggtctgaagactgtcttcctatctgcttcttgcggctgaggagaggagcagttcagtttacaaaacaagtgcaaattaccaaactcaaagcttatttgagtagaatgggctcatgggcaatgtgatgttccctgttaaccttctgttactccctgggagaaaggcgctgagcgtggcatgcacgtgtctttgctgtgtttttctccacttctaaatggttcctgggttcctttcttcctcgtttgttactttagagcaagtttgcccata

SEQ ID NO: 227676 - DNA, 796 bp, Homo Sapiens
cgcccagcccgagcagagccctccagccgctcaccccgcgtgccaccccagcgaccctcagccgctctctgcccttctctcggccccgcgcccgccctcgcggcccctctgcccaatgaaactggccgcgatgatcaagaagatgtgcccgagcgactcggagctgagtatcccggccaagaactgctatcgcatggtcatcctcggctcgtccaaggtgggcaagacggccatcgtgtcgcgcttcctcaccggccgcttcgaggacgcctacacgcctaccatcgaggacttccaccgcaagttctactccatccgcggcgaggtctaccagctcgacatcctcgacacgtccggcaaccacccgttccccgccatgcggcgcctctccatcctcacaggagacgttttcatcctggtgttcagtctggacaaccgcgactccttcgaggaggtgcagcggctcaggcagcagatcctcgacaccaagtcttgcctcaagaacaaaaccaaggagaacgtggacgtgcccctggtcatctgcggcaacaagggtgaccgcgacttctaccgcgaggtggaccagcgcgagatcgagcagctggtgggcgacgacccccagcgctgcgcctacttcgagatctcggccaagaagaacagcagcctggaccagatgttccgcgcgctcttcgccatggccaagctgcccagcgagatgagcccagacctgcaccgcaaggtctcggtgcagtactgcgacgtgctgcacaagaagggctgcggaacaagaagctgc

SEQ ID NO: 227677 - DNA, 1344 bp, Homo Sapiens
  misc_feature (1255)..(1266): n is a, c, g, or t
tgtacaaagaagtggaccaagaaaaatactctaatttagttcagtctgtcttgtcatccagaggcgtcgcccagaccccgggatcggtggaggaagatgctttgctctgtggacccgtgagcaagcataagctgccaaaccaaggtgaggacagacgagtgccacaaaactggtttcctatcttcaatccagagagaagtgataaaccaaatgcaagtgatccttcagttcctttgaaaatccccttgcaaaggaatgtgataccaagtgtgacccgagtccttcagcagaccatgacaaaacaacaggttttcttgttggagaggtggaaacagcggatgattctggaactgggagaagatggctttaaagaatacacttcaagttttcatgtttgtgatcatgtgtatatgaagaacctagccagggacgtctttttacaagggaaacggttccacgaagccttggaaagcatactttcaccccaggaaaccttaaaagagagagatgaaaatctcctcaagtctggttacattgaaagtgtccagcatattctgaaagatgtcagtggagtgcgagctcttgaaagtgctgttcaacatgaaaccttaaactatataggtctgctggactgtgtggctgagtatcagggcaagctctgtgtgattgattggaagacatcagagaaaccaaagccttttattcaaagtacatttgacaacccactgcaagttgtggcatacatgggtgccatgaaccatgataccaactacagctttcaggttcaatgtggcttaattgtggtggcctacaaagatggatcacctgcccacccacatttcatggatgcagagctctgttcccagtactggaccaagtggcttcttcgactagaagaatatacggaaaagaaaaagaaccagaatattcagaaaccagaatattcagaatagggagcaagttgctatttgggaacattcagcaccttctcacagtttgggaacatatattgctgtttactccagtgtaaaaatgaggtgccactggatctgagtgctacacgaacacaagtagaagtattaatttgttgaaatgtgttgttaccaaaaagactgaaaagccccaaagtctagatataaagacctagacttcggcacgcgaaatcccagctatgctacctcttatttacctgaaaggaggacacgcaggatgggcagtcatgctggtgactcttgtactcccttgagggacattnnnnnnnnnnnncggtggtccccaggcaggatgccccagtctttgagctgagattggaaggcagtgaggctgagggtgccaaaatttccc

SEQ ID NO: 227678 - DNA, 979 bp, Homo Sapiens
cttttttataatagccaactttgtacaaaaaagttggctggggcggaggcagcggcagtggagttcgctgcgcgctgttgggggccacctgtcttttcgcttgtgtccctctttctagtgtcgcgctcgagtcccgacgggccgctccaagcctcgacatgtcgtacaactacgtggtaacggcccagaagcccaccgccgtgaacggctgcgtgaccggacactttacttcggccgaagacttaaacctgttgattgccaaaaacacgagattagagatctatgtggtcaccgccgaggggcttcggcccgtcaaagaggtgggcatgtatgggaagattgcggtcatggagcttttcaggcccaagggggagagcaaggacctgctgtttatcttgacagcgaagtacaatgcctgcatcctggagtataaacagagtggcgagagcattgacatcattacgcgagcccatggcaatgtccaggaccgcattggccgcccctcagagaccggcattattggcatcattgaccctgagtgccggatgattggcctgcgtctctatgatggccttttcaaggttattccactagatcgcgataataaagaactcaaggccttcaacatccgcctggaggagctgcatgtcattgatgtcaagttcctatatggttgccaagcacctactatttgctttgtctaccaggaccctcaggggcggcacgtaaaaacctatgaggtgtctctccgagaaaaggaattcaataagggcccttggaaacaggaaaatgtcgaagctgaagcttccatggtgatcgcagtcccagagccctttgggggggccatcatcattggacaggagtcaatcacctatcacaatggtgacaaatacctggctattgcccctcctatcatcaagcaaagcacgattgtgtgccacaatcgagtggaccctaatggctcagatacctgctggga

SEQ ID NO: 227679 - DNA, 1256 bp, Homo Sapiens
  misc_feature (1014)..(1028): n is a, c, g, or t
ttgggtttctgtgaagaaccatttcccatgttttcttggcaaaataatgctgtattccatatgtacatgtgaaatgatgttttaaattgataaaagcttaaataagatctacctatacccagtattttcatgatattagaacaaatgggtttttggttatattttatatttgtcaatataatttttgtattcacattctgttacactctgcctattcattgatatatgatattctgtaaatattgtacaatttgatcttttttatggtttaaattagttaattacatacaaattgattggcttatcacaaaaatcatttcatcagtaaaccttgttaacattttgtactggtgacccacctcttaggactttggtcttatccacgtgtatgttgttttcatttggtccaaataatattttatttgtatgggtatcttctaagactaaataggtagttgtgttctttatttttaaaatttctttttagagcaaatgttatgggttcttacccaaagagtcaaaaactatttcttaagaaagagcagagttattcatgactgttctttatacactaaaagcatgcatctaatctaatagtcctcttattatgcttttagttgtatgagtctctttctatgaactgaacacaaaactcaggaattggtggcttaattttagatcagtgcttgtactaggcttagttatatgaatctttataacacataattactaactttgtagccatatatgtaattgactttgaatgttatttacctgaaattaatcttccttcacacatggaccgtaaacggttcccagttgtctgagagcctcatgagggtttctaggatttatgaccttatgaccagtttttttcatttaccaagattttattttcctacatgaaaatttaattgagtaataattattcacatgtgcattttctttttagctgttaaatgtactatgccatcatccaccatttagtaaaatgtagctggcccaggacatgtnnnnnnnnnnnnnnncaacaacaataaatagggcatgtgaaatgttaagttacagcaatagatattttatttgtatttcatgttagtacttttttgttttatatcacttataaaggtacagtgtactctttgtcacagctcagttggtaaccgcattccattgaaaagttggccttgtaaaatacaactctcatttaatattcatgcttttgtgcctttaagaaaatatttttgtcatttttg

SEQ ID NO: 227680 - DNA, 825 bp, Homo Sapiens; identical to SEQ ID NO: 194155
  misc_feature (191)..(244): n is a, c, g, or t

SEQ ID NO: 227681 - DNA, 942 bp, Homo Sapiens
ttggctgtaatccactgtagtgaagaacagagcctctcaatcagacgggtgtaaataagagacggaggggagtccaaaagaaaaggaagaggaggaaaaacaagtgtgtgttggggggaacagggggaaaagcatttttggtggatggtatgaagccagccatggaaactgcagccgaggaaaatactgaacaaagccaagagagaaaaggctgctttgaatgctgcatcaagtgtctgggaggagtcccctacgcctccctggtggccaccatcctctgcttctccggggtggccttattctgcggctgtgggcatgtggctctcgcaggcaccgtggcgattcttgagcaacacttctccaccaacgccagtgaccatgccttgctgagcgaggtgatacaactgatgcagtatgtcatctatggaattgcgtcctttttcttcttgtatgggatcattctgttggcagaaggcttttacaccacaagtgcagtgaaagaactgcacggtgagtttaaaacaaccgcttgtggccgatgcatcagtggaatgttcgttttcctcacctatgtgcttggagtggcctggctgggtgtgtttggtttctcagcggtgcccgtgtttatgttctacaacatatggtcaacttgtgaagtcatcaagtcaccgcagaccaacgggaccacgggtgtggagcagatctgtgtggatatccgacaatacggtatcattccttggaatgctttccccggaaaaatatgtggctctgccctggagaacatctgcaacacaaacgagttctacatgtcctatcacctgttcattgtggcctgtgcaggagctggtgccaccgtcattgccctgctgatctacatgatggctactacatataactatgcggttttgaagtttaagagtcgggaagattgctgcactaaat

SEQ ID NO: 227682 - DNA, 943 bp, Homo Sapiens
  misc_feature (120)..(183): n is a, c, g, or t
ttgggtcaaacttgcgggaattttgcagtttatctgcagggctgttgtttccagcaagacccaaagctagaaaaggaggaggaagaaactgacccgatcagtgccagaagtcattgtatnnnnnnnnnnnnnnnnnnnnnnnnnnnnnnnnnnnnnnnnnnnnnnnnnnnnnnnnnnnnnnnntcctgtcaaaaaatggaaggaaaaccagaaaatgagagtgaaccaaagcatgaggaagagccaaagcctgaggaaaagccagaagaggaggagaagctagaggaggaggccaaagcaaaaggaacttttagagaaaggctgattcaatctctccaggagtttaaagaagatatacacaacaggcatttaagcaatgaagatatgtttagagaagtggatgaaatagatgagataaggagagtcagaaacaaacttatagtgatgcgttggaaggttaatcgaaaccatccttacccctatttaatgtagtttaccttgatttttatctgatattaacaataccatatagcttgctttttattagcatttcctgatattcctttgtccatatttctacttataacctgttgctattaatggttttagatgtatctcttgttatctgcatctcattgtttattgtattttgaaccaatctacaagtctctgtcttttaataaaagaactttacacatttgtaaaaaagaggttcttggtaagatataaaatggaaaaaggctaagtaatatgtgaatatcatatttttgaaaggtaaaaagtacatttgtatattacatatatggacataacttgtgaaggatgaaagaaagtacagcctctcggtggtgggattatgaatgatttttctccttttgcttgtttgtattttctatattcctaaaattaacacacattattattgctagaataataaaagttt

SEQ ID NO: 227683 - DNA, 922 bp, Homo Sapiens; identical to SEQ ID NO: 194157
  misc_feature (747)..(764): n is a, c, g, or t
  misc_feature (811)..(837): n is a, c, g, or t

SEQ ID NO: 227684 - DNA, 680 bp, Homo Sapiens; identical to SEQ ID NO: 194158
  misc_feature (46)..(56): n is a, c, g, or t
  misc_feature (160)..(367): n is a, c, g, or t
  misc_feature (529)..(555): n is a, c, g, or t
  misc_feature (602)..(619): n is a, c, g, or t

SEQ ID NO: 227685 - DNA, 936 bp, Homo Sapiens; identical to SEQ ID NO: 194159
  misc_feature (737)..(754): n is a, c, g, or t
  misc_feature (801)..(827): n is a, c, g, or t

SEQ ID NO: 227686 - DNA, 912 bp, Homo Sapiens; identical to SEQ ID NO: 194160
  misc_feature (720)..(737): n is a, c, g, or t
  misc_feature (784)..(810): n is a, c, g, or t

SEQ ID NO: 227687 - DNA, 960 bp, Homo Sapiens; identical to SEQ ID NO: 194161
  misc_feature (709)..(726): n is a, c, g, or t
  misc_feature (773)..(799): n is a, c, g, or t

SEQ ID NO: 227688 - DNA, 987 bp, Homo Sapiens; identical to SEQ ID NO: 194162
  misc_feature (776)..(793): n is a, c, g, or t
  misc_feature (840)..(866): n is a, c, g, or t

SEQ ID NO: 227689 - DNA, 933 bp, Homo Sapiens
ttggcgagctcggcggcgggtttgctgagatctgtggccggcggcagctggtgcggggggcagctgagagcgagaggtggatcggggcggtgtgtggccagggccatgacgggcaatgccggggagtggtgcctcatggaaagcgaccccggggtcttcaccgagctcattaaaggattcggttgccgaggagcccaagtagaagaaatatggagtttagagcctgagaattttgaaaaattaaagccagttcatgggttaatttttcttttcaagtggcagccaggagaagaaccagcaggctctgtggttcaggactcccgacttgacacgatattttttgctaagcaggtaattaataatgcttgtgctactcaagccatagtgagtgtgttactgaactgtacccaccaggatgtccatttaggcgagacattatcagagtttaaagaattttcacaaagttttgatgcagctatgaaaggcttggcactgagcaattcagatgtgattcgacaagtacacaacagtttcgccagacagcaaatgtttgaatttgatacgaagacatcagcaaaagaagaagatgcttttcactttgtcagttatgttcctgttaatgggagactgtatgaattagatggattaagagaaggaccgattgatttaggtgcatgcaatcaagatgattggatcagtgcagtaaggcctgtcatagaaaaaaggatacaaaagtacagtgaaggtgaaattcgatttaatttaatggccattgtgtctgacagaaaaatgatatatgagcagaagatagcagagttacaaagacaacttgcagaggaacccatggatacagatcaaggtaatagtatgttaagtgctattcagtcagaagttgccaaaatcagatgcttattggaagaagaagtacggaaa

SEQ ID NO: 227690 - DNA, 755 bp, Homo Sapiens
tttaaaagccaactttgtacaaaaaagttgggtgggttggccaatatgagagttgtaatggcccgactgttgagtgagggggagcaggggatcccaacggcttgcgctgcctttgcgcagcagccggcgggcggccacgtcgcggcctggctggggtaggagagggcggtccccagtgcagttgggtgaactaccgttgcacactggagtttctggtgtctttgcttggaactgacctagctcgtggcagggggaactcggctagcggccccacagcccctgctgactcaaaacaactgagttgtaagacgttcatcgccgtgttatccttgagtaaagaatgaactctggaagcccagccagggacaatgcaccttcacagagattctgcactaatctgagtgaaggtctaaggtttggaatctccccctcatggagagaagctttgtatggctgtcatgcttagacagtgattcctgcaacttgaccttcaggctgggagaggtggagagccatgcctgttctccttccttgctatggaatttgctgacacaatatcttccgcctggtgctgggcatatcctaagaacttacaactttcctgtattatcctgtgtgagcagctgtcaccttattgggggaaaaatgcctgaaaattatggggcacttcaagtagatagcttctatttcctatatttgtcttatatacaagtatttgcttttatcaaaataattccaataaagcattttaaagt

SEQ ID NO: 227691 - DNA, 803 bp, Homo Sapiens
ttgggtggcctctgcggggggcacgcatgtttgaccaaagccctcattgtggtccgaggacagccttttccccaggcctcagagcattgctcatccgtgccaaactgggtaggtggatttgagcggaaagactcccaaaatgtgccaagaatttcccggtcccaggcagggcaggggaaactaagggcaagcaggatacagggcgagggatgtggcaggtgagggggctcccgcctgtgccccttctcctcaccatgtctcccccaccctgcctcagttctccgttccccttcatctccgtccccctctttgaagctgtccccatctcagtgtcagaccagccttctcctcatctgaccaccctcctctgacccacgccccctccttgtctgaaagaaaggagccttgaatggtggagggaggcagtggggagaaaggtctcaccggacaggttgggagaatgaggtcagcggtgctggggaacagatggagggggcagtggggacagggcttgggcagacaccagcaggaataatttgaaatgtgtgaggtgactccccggagggccttgggcttgggcatttgggaaaagaatgatgtctggaagggcttaagggacacagtggacgaggggagagtcctcatctgctggcattttgtggggtgttagtgccaaacttgaataggggctggggtgctgtcttccactgacacccaaatccagaatccctggtcttgagtcccagaacttttgcctcttgactgttccttctcttcctacctccctccatggaaaattagtt

SEQ ID NO: 227692 - DNA, 1110 bp, Homo Sapiens
tttgtacaaaaaagttgggaaacatatcttatctagcagatgatttgcggattaatctttggcatctggaaattacagacaggagttttaacattgtggatatcaagcctgccaatatggaagagctaacagaggtgattacagcagcagaatttcatccaaacagctgtaacacatttgtatacagcagcagtaaaggaactattcggctatgtgacatgagggcatctgccctctgtgatagacattctaaattgtttgaagaacctgaagatcccagtaacaggtcatttttttccgaaatcatctcctctatttcggatgtaaaattcagccatagtggtcgatatatgatgactagagactatttgtcagtcaaaatttgggacttaaatatggaaaacaggcctgtggaaacataccaggtgcatgaatacctcagaagtaaactctgttcactgtatgaaaatgactgcatatttgacaaatttgaatgttgttggaatggatctgacagtgttgtcatgactggatcttacaataatttcttcagaatgtttgacagaaacacaaagcgagacataaccctagaagcatcgcgggaaaacaataagcctcgcacagttctgaagcctcgcaaagtctgtgcaagtggcaagcgaaagaaagatgaaataagtgttgacagcctagacttcaataagaaaatccttcacacagcctggcaccccaaggaaaatatcattgccgtagctactacaaacaatctgtatatatttcaagacaaagtgaattagggttggcattcctagcagaagaacccacttcctgcttagttgagatagttgaatctagcattcgttcctataaaagagagaggtccattgtggcgcccctttccagtgtttgacagtgtgccattcgacaacacattgttatagctacatggagaaagctctgtggattcatcactgtggtgttctccatgtctgctagccatttaagtaagggtagggcacttttaaatttaaatgactttcttgcaccatcttgcctaatggactagattggactgtatcaacattgatttactccactttttatgccttc

SEQ ID NO: 227693 - DNA, 922 bp, Homo Sapiens; identical to SEQ ID NO: 194165
  misc_feature (777)..(795): n is a, c, g, or t

SEQ ID NO: 227694 - DNA, 899 bp, Homo Sapiens
ttggagatggctgactccaaagagggtgttttgccgctgacggctgcttccactgccccaatttcattcggcttcactcgcacgtccgcacggaggcggctggccgactcgggagacggcgcggggccatctccggaggagaaggatttcttgaaaaccgtggaagggagggagctgcagagtgtgaagccccaggaggcccccaaggaactcgtcatccctttgatccagaatggccatcgcaggcagccaccagcccggccccctgggccatccacagatactggggccttggcggatggggtggtgtcccaggctgtgaaggagctcattgcggaatccaagaagtctctggaagagagagagaatgcgggtgtcgaccccacgctcgctatccccatgatccagaaaggatgcacccccagcggggaaggggcagacagcgaaccccgggcagagacagtgccagaggaggctaattatgaggcggtccccgtggaggcctatgggctggccatgctgcggggcatgggctggaaacctggcgagggcatcggccgcaccttcaatcaagtagtgaagccccgtgtcaactcactgaggcccaaggggttagggctgggtgccaacctgaccgaggcccaggccttgacccccactggcccctcccgcatgccaagaccagatgaggagcaagagaaagataaggaagatcagcctcaagggctggtgcctggaggagctgtggtggttctttctggccctcaccgaggcctctatgggaaaggggaaaggcttgatcctgacaatgttcgggccatggttcgtctggctgtggggagccgggtggtgactgttagtgagtactacctgcggcctgtctcccagcaggagtttga

SEQ ID NO: 227695 - DNA, 1260 bp, Homo Sapiens
ttgggacccagagcatcacaaatatcccccatcctgggcttttcccagaggagatgggggcttctgaagatggacttacctgggacctgccccccatgagccaggacggtccccccacagtcagcctgtgcaaaggccccgtggccaggggtggaggagaatatgtgggtgtggacaggatgggagactgtggcctgaacaggagattttattatatctggagaccctgagagaccctgagacctggggcaccatggctggccaggtcagaagcatcctgactgcagaggtccgtgcagccacaccctcttccctgccagcaagctgtctgcggctcatcggaggcccctccgcctggagccttctatggacgtgatatgcctgtatctgtttttaattttcattcttcacttaggggaagtgaaatcgctcagagatgagatcctttaattgaaaacgaagtgtaacggaatctagtgtctttctaatgtggtaaaattctccatcaacatcacagtcagctggcagctgaacttcagaatctcacttacagcaggcgacacgggggtacaccgatgggtcacactgggtctgggggctccctggagctcctcctgcgtgtggtctggttaggagttgagttgtttgctccagggttattctcctcctcgagtcacagtcacacgaatacctgccttctctggctttcctgctatacacatattcacatggcgctcaagaagttaggctcatggcaacgtgtgtctttctctggacaactggcccagtttacagtgaaatggagaatttcaggtctccacgtctgcccaggaaagaacttcagctgactccacggggatctggaaatccacgaccaatcccgatcggctcttattagctccccgctccacaagacacctgtgctttggaaatccaccaccaatcccgatcggctcttattagctccccgctccacaagacacctgtgatctggaaatctaccaccaatcccgatcggctcttattagctccccgctccacaagacacctgtgacatcctccagggccacaggagcacgtgctgaccagttttcccttccagttcctgcacaaaaagtgtccagagggctgtttgcaaacactagtgcactttgtagcttttcaccctctgtcccagggaatctaggagagatgaggcccgtcagagtcaagagatgtcatccccccagggtctccaaggcatttcacactattggtggc

SEQ ID NO: 227696 - DNA, 1481 bp, Homo Sapiens
ttggcccagcgctgcgggctcggagagcagtcctaacggcgcctcgtacgctagtgtcctcccttttcagtccgcgtccctccctgggccgggctggcactcttgccttccccgtccctcatggcgctgctccgacgcccgacggtgtccagtgatttggagaatattgacacaggagttaattctaaagttaagagtcatgtgactattaggcgaactgttttagaagaaattggaaatagagttacaaccagagcagcacaagtagctaagaaagctcagaacaccaaagttccagttcaacccaccaaaacaacaaatgtcaacaaacaactgaaacctactgcttctgtcaaaccagtacagatggaaaagttggctccaaagggtccttctcccacacctgaggatgtctccatgaaggaagagaatctctgccaagctttttctgatgccttgctctgcaaaatcgaggacattgataacgaagattgggagaaccctcagctctgcagtgactacgttaaggatatctatcagtatctcaggcagctggaggttttgcagtccataaacccacatttcttagatggaagagatataaatggacgcatgcgtgccatcctagtggattggctggtacaagtccactccaagtttaggcttctgcaggagactctgtacatgtgcgttggcattatggatcgatttttacaggttcagccagtttcccggaagaagcttcaattagttgggattactgctctgctcttggcttccaagtatgaggagatgttttctccaaatattgaagactttgtttacatcacagacaatgcttataccagttcccaaatccgagaaatggaaactctaattttgaaagaattgaaatttgagttgggtcgacccttgccactacacttcttaaggcgagcatcaaaagccggggaggttgatgttgaacagcacactttagccaagtatttgatggagctgactctcatcgactatgatatggtgcattatcatccttctaaggtagcagcagctgcttcctgcttgtctcagaaggttctaggacaaggaaaatggaacttaaagcagcagtattacacaggatacacagagaatgaagtattggaagtcatgcagcacatggccaagaatgtggtgaaagtaaatgaaaacttaactaaattcatcgccatcaagaataagtatgcaagcagcaaactcctgaagatcagcatgatccctcagctgaactcaaaagccgtcaaagaccttgcctccccactgataggaaggtcctaggctgccgtggcccctggggatgtgtgcttcattgtgccctttttcttattggtttagaactcttgattttgtacatagtcctctggtctatctcatgaaacctcttctcagaccagttttctaaacatatattgaggacaactcaagcgattggtttttcttaa

SEQ ID NO: 227697 - DNA, 1052 bp, Homo Sapiens
tacaaaaaagttggcggggacactgtgaatgtcagcccagaaggtgatcagagcctgttaattaaaatggaaagaagacagaagggaaggtagacatcaggttctccctggagacttttcgttttcatttacgctgcggaaactgacgtttttgcctaacaccccatgtaatgtaaacgtataggcttgagtacgtgtccggccgcatgtgtagtgaaccctaaagctttcctaattgtagttagcatcgtccctaagcggaacgattttccgtgaacatgatttgtacttttctacgagccgtacagtatacggagaagctgcacaggtcctcggcaaagcgattgcttttgccatacatcgtgcttaacaaagcgtgcttgaagactgagcccagtttgagatgtgggcttcaatatcaaaagaaaacgctgcgacctagatgtattcttggagtcacccagaaaaccatctggacgcagggaccgagcccccgaaaagcaaaggaggatggcagcaaacaagtgtctgtgcacaggagtcagagagggggaaccgccgtcccaacatcacaaaaagtgaaagaagccggaagagattttacctatttaatagtggtgctttttggaatcagcattacaggtggcttgttttacacgattttcaaagaacttttttcttcatccagtcctagcaagatatatgggagagccttagaaaaatgcagatcacatcctgaggtgatcggtgtctttggtgagtctgttaaaggctatggggaggtgacaaggcggggtcgccggcagcatgtcaggttcactgaatatgtaaaagatgggctgaaacacacgtgtgtgaaattctacattgagggctctgagccagggaagcaaggaacggtgtatgcgcaagtgaaagagaacccagaaagtggtgaatatgattttcgatatatatttgtagaaattgaatcttatcctataagaactattatcattgaagatatcgatcccaagatgattaaaatagggtttctgatggatgttgaatgg

SEQ ID NO: 227698 - DNA, 994 bp, Homo Sapiens
ttgggttctggcaggtaaggaacgccggctcttcgcctctcagcgcggcttgtcctttgttccggacgcccgctcctcagccctgcggctcctggggtcgctgctgcatcccgcacgcctccaccggctgcagacccatggccgagcgcggggaactcgacttgaccggcgccaaacagaacacaggagtgtggctagtcaaggttcctaaatatttgtcacagcaatgggctaaagcctctggaagaggtgaagttgggaaactgcggattgccaagactcaaggaaggactgaggtgtcatttactttgaatgaggatcttgcaaatattcatgatattggtggaaaaccagcttcagtcagtgctcctagagaacatccatttgtcttgcaaagtgttggaggacagacattaacagtatttactgagagctcatcagataagctgtcattggaaggaatagtggtacaaagagctgaatgccgaccagctgccagtgaaaactacatgcgattaaaaagattgcaaatagaagagtcttccaaaccagtgaggctatcacaacagctggacaaagttgtaacaaccaattacaaacctgttgctaatcatcaatacaatatcgaatatgaaaggaaaaagaaagaagacggaaagcgagctcgagctgataaacaacatgttttagacatgctattttcagcctttgagaaacatcaatactataatcttaaggacttggtggacatcacaaagcaacctgtggtgtacctgaaggaaatcttaaaagaaattggtgttcagaatgtaaaagggatccacaaaacacatgggagctgaagccagagtacagacactatcaaggagaagaaaagagtgactaagaagactcctagccagcatgctagtgaaacgactagcagcgatgctatgcaaaaagcgctgatactggaaagcttgaacaccggtatgttaataggggttaagtgaca

SEQ ID NO: 227699 - DNA, 986 bp, Homo Sapiens; identical to SEQ ID NO: 194170

SEQ ID NO: 227700 - DNA, 974 bp, Homo Sapiens
  misc_feature (738)..(761): n is a, c, g, or t
ttggggagggatcctgaaccgcgcggccgaaccctccggtgtcccgacccaggctaagcttgagcatggctgagcaggagcccacagccgagcagctggcccagattgcagcggagaacgaggaggatgagcactcggtcaactacaagcccccggcccagaagagcatccaggagatccaggagctggacaaggacgacgagagcctgcgaaagtacaaggaggccctgctgggccgcgtggccgtttccgcagaccccaacgtccccaacgtcgtggtgactggcctgaccctggtgtgcagctcggccccgggccccctggagctggacctgacgggcgacctggagagcttcaagaagcagtcgtttgtgctgaaggagggtgtggagtaccggataaaaatctctttccgggttaaccgagagatagtgtccggcatgaagtacatccagcatacgtacaggaaaggcgtcaagattgacaagactgactacatggtaggcagctatgggccccgggccgaggagtacgagttcctgacccccgtggaggaggcacccaagggtatgctggcccggggcagctacagcatcaagtcccgcttcacagacgacgacaagaccgaccacctgtcctgggagtggaatctcaccatcaagaaggactggaaggactgagcccagccagaggcgggcagggcagactgacggacggacgacggacaggcggatgtgnnnnnnnnnnnnnnnnnnnnnnnnataccaaagtgctgacaggccctccgtgcccctcccaccctggtccgcctccctggcctggctcaaccgagtgcctccgacccccctcctcagccctcccccacccacaggcccagcctcctcggtctccctgtctcgttgctgcttctgcctgtgctgtggaggaagagaggccgcagcccaggcctctgctgcccttactgtggcccccca

SEQ ID NO: 227701 - DNA, 1182 bp, Homo Sapiens; identical to SEQ ID NO: 194172
  misc_feature (92)..(115): n is a, c, g, or t

SEQ ID NO: 227702 - DNA, 1154 bp, Homo Sapiens
  misc_feature (1044)..(1067): n is a, c, g, or t
ttggctggactttgggtgaggcggttcagccatgaggctggctgtgcttttctcgggggccctgctggggctactggcagagagcactggaacaaccagccacaggactaccaagagccacaaaaccaccactcacaggacaaccaccacaggcaccaccagccacggacccacgactgccactcacaaccccaccaccaccagccatggaaacgtcacagttcatccaacaagcaatagcactgccaccagccagggaccctcaactgccactcacagtcctgccaccactagtcatggaaatgccacggttcatccaacaagcaacagcactgccaccagcccaggattcaccagttctgcccacccagaaccacctccaccctctccgagtcctagcccaacctccaaggagaccattggagactacacgtggaccaatggttcccagccctgtgtccacctccaagcccagattcagattcgagtcatgtacacaacccagggtggaggagaggcctggggcatctctgtactgaaccccaacaaaaccaaggtccagggaagctgtgagggtgcccatccccacctgcttctctcattcccctatggacacctcagctttggattcatgcaggacctccagcagaaggttgtctacctgagctacatggcggtggagtacaatgtgtccttcccccacgcagcacagtggacattctcggctcagaatgcatcccttcgagatctccaagcacccctggggcagagcttcagttgcagcaactcgagcatcattctttcaccagctgtccacctcgacctgctctccctgaggctccaggctgctcagctgccccacacaggggtctttgggcaaagtttctcctgccccagtgaccggtccatcttgctgcctctcatcatcggcctgatccttcttggcctcctcgccctggtgcttattgctttctgcatcatccggagacgcccatccgcctaccaggccctctgagcatttgcttcaaaccccagggcactgannnnnnnnnnnnnnnnnnnnnnnntaccctttatttcctcgacacgcaactggctcaaagacaatgtttattttccttccctttcttgaagatcaaaaagaaagccggggc

SEQ ID NO: 227703 - DNA, 866 bp, Homo Sapiens; identical to SEQ ID NO: 194180

SEQ ID NO: 227704 - DNA, 979 bp, Homo Sapiens
ttggctttctttcttagctgttagctgagaggaagtctctgaacaggcggcagcggctcttatagtgcaaccatggcagactattcaacagtgcctcccccctcttctggctcagctggtggcggtggtggcggcggtggtggtggaggagttaacgacgctttcaaagatgcactgcagagagcccggcagattgcagcaaaaattggaggtgatgcagggacatcactgaattcaaatgactatggttatgggggacaaaaaagacctttagaagatggagatcaaccagatgctaagaaagttgctcctcaaaatgactcttttggaacacagttaccaccgatgcatcagcagcaaagatctgtaatgacagaagaatacaaagttccagatggaatggttggattcataattggcagaggaggtgaacagatctcacgcatacaacaggaatctggatgcaaaatacagatagctcctgacagtggtggccttccagaaaggtcctgtatgttaactggaacacctgaatctgtccagtcagcaaaacggttactggaccagattgttgaaaaaggaagaccagctcctggcttccatcatggcgatggaccgggaaatgcagttcaagaaatcatgattccagctagcaaggcaggattagtcattggaaaagggggagaaactattaaacagcttcaggaacgggctggagttaaaatggttatgattcaagacgggccgcagaacactggtgctgacaaacctcttagattacaggagacccatataaagttcaacaagccaaggaaatggtgttagagttaattcgtgatcaagcggtttcagagaagttcggaatgagtatgggtcaagaataggaggaaatgaagggatagatgtccccattccaagatttgctgttggcattgtaataggaaaatggagagatgatcaaaaaaatacaaaatgatgc

SEQ ID NO: 227705 - DNA, 1054 bp, Homo Sapiens
  misc_feature (866)..(903): n is a, c, g, or t
actttgtacaaaaaagttgggatcagtcccccgcttggagactttcgccacaccatccacattggcaaagagggccagcacgatgtctttggagatatttcctttcttcaagggaactacgagcttttacctggaaaccaggagaaagcacacctgggccagttccctgggcataatgagttcttccgggccaacagcacctcggactctgtgttcacagaaacgccctccccggtgctcaaaaatgccatctccctcccgaccattggaggatcccaagctctcatgttgcccttattgtcaccagtgacatttaattccaaacaggagtccttcgggccagcaaagctgcccaggcttagctgcgagcccgtcatggaggaaaaagctcaggagaaaagcagtctgttggagaatgggacagtccaccagggagacacctcgtggggctccagcggttctgcatctcagtccagccaaggcagagacagccactcctccagcctgtccgaacagtaccccgactggccagccgaggacatgtttgaccatcccaccccatgcgagctcatcaagggaaagactaagtcagaggagtccctctctgaccttacaggttccctcctctccctgcagcttgatcttgggccctcacttttggatgaggtgctgaatgtaatggataaaaataagtaacaagatgccaacttttttcctttggggtaaaaggtacaaaaacaaactaaccacagttgaagagaagggcttccggagctgtatttgcagttttgtgttgggttttctaaataatattcttacaaagtatttttttacctgttatgccctgtttgcaaaaacaatttagnnnnnnnnnnnnnnnnnnnnnnnnnnnnnnnnnnnnnnggaagtgagtcagagcccattttctgaggcattggtgatgttcggctcacatattgtttgcagacacacaagaaatctggcttggccaggattggcactagctatgaagggctgagcgagtcacattaagaacttcacggaactttatagc

SEQ ID NO: 227706 - DNA, 1261 bp, Homo Sapiens
ctttgtacaaaaaagttggaatcaaggtgtggcttacaaagatatttttgagggggtttacttcccagccatctcactgtacaagagctgcacggtttccattaactttggaccatgcttcaagtatcctccgaaggatctcacttaccgccctatgagtgacatgggctggggcgccgtggtagagcacaccctggctgacgtcttgtatcacgtggagacagaagtggatgggaggcgcagtcccccatgggaaccctgaccaggtccctcttttctgtcaaggactttctgggaataatactgggggttttgtttttgtttttgaactgtctcaaatgttctcccaaagatgctaaaaacacagcctctccttttagcaagttaaaaggctgggtaggactgcgggagactgcctgcctttcaccattttctccccacttccagtgactgctcttattttgtgtaccataagccaacaaccgctgactccaggattgcataagccccctgtgaaatcggtgctgtactgcataccctgccagctgtgacttgttatcctactatattttctaaggagtgaataatattgtccgagtaactaacttatttaaaagacatttccttctgtgggcattgactgtatcccacctgttttccaaggaaatggtaacctgtttctgagaacacctgaaatcaatggctatacattccaaaccaatctaaacgctatttccttttggtgtgggtttggttttgttcattttgaaatacacttttgaacactgagatccgtaaaactactagatctctggaagtgtaattgtgaaagaaacttgcttgcagctttaacaaaatgagaaacttcccaaataaaacttgttttgaagtttatgtgacactttgcttcccttcatattgggtgcctcttggtgacagtgttcagaaatgtaagcagcacgaggaagggagctggcactgggaggaagagccgggtttctgagttgtgttttggctgctttcctattgctcccattcttgccaatcagccaccccctttcctgtgaaaatctgccaccttgaggagaggaacaagagtttaaaagggctaatgatctccctcccggtcttcccttggaacatggatgttgatatatgtgcgggtggtttcctgtcttgcttatcttcctttgccctgagctgatggctaaagggcagttttcggactattaaagactgaaatgtaagaatgagccttcta

SEQ ID NO: 227707 - DNA, 931 bp, Homo Sapiens
ttggcgtcggtcggtccttgcttcctgcttcgcctccgcgcctcgcgctatgggacagagcccccgatccgccagcaccacctgaggatccagaaaccgccccagcgatggaagaggatcaggagctggagaggaaagcaatagaagaactgcttaaggaggcaaaacgtgggaaaactagagctgaaacaatgggacccatgggttggatgaagtgtcctcttgctagcaccaataaaagatttctaattaacacaattaaaaacacattgccctctcataaagagcaagaccatgaacaaaaagagggcgataaggaaccagccaagagccaggcccagaaagaagaaaacccaaagaaacacagaagccatccttacaagcacagcttccgcgctcgaggttccgccagttactccccgccacgaaagcggagcagccaggacaagtacgaaaagcggtccaaccggcggtgaggctggaaccagggccagccagccctgcgggcctccgtgctccttcggggtgcggtgtgcggagaaggcctgagctggcagggcaaacacctgagagtgactttgacattaggtcctttgttgtttttaaagaggctgctggccacaggcaaaaaaaatgacctagcaactcttgaggaaacaagtgcaaaggaggatgtcttggcaagtttaagctacttctgcagtgtagtagacttacatattgttgtttatcttgtttggaagtgtgtttcaaaataaacatgtctagaatttaaagttttcagagattgttaaaactggttccaattttttgggtcatttctcagaaaaataaaatacttataaatcctatattttactttttgggggtattacatttaaaatttagaaatcatcagtccagtgaccatatttatgaaaagctgtagccc

SEQ ID NO: 227708 - DNA, 942 bp, Homo Sapiens
aaagtcaagtcaatcacttttctacatgtaagagtagtgttccaaagtaactaagaagctgttacatttttaaagcagggaggaaaaaactttcattttggtctttgtgttccagcaaattatactttcaattaacaccaacaaatgatatcataaaaaatggtctgcttttaaatttctgaacttcttcaatacaaattaaaatagtactggagtcttttgggaggccaatagctagcagctacattaattggtgtagaggagcctccttatcgataaccaggtccaggttgggtatagccctgaccaaagggaggacggttacgcgcataaggattaggcccacttggaggaggggtcatggtacttccaggaagtgaagtaaaacctggtcttggttgataggccccaggttggcttggagccattccaggttgagaggcaggagccacagtataattagtaggctgagaagtttgggcagtgtaagtttgtgcaggataattgctcgcctggtactgctgtggcggctgagcaggcagttgttgaggctgaccagaaaaggcaggagctggtgcctgggaagttggttgctggccatatccctggaactgctgaggttgttgaggtccagtctgctgactatagcttgctgaatactgaataccatactgttgaggctgctgaggtggagcctgcggctgctgtgcaccatagccggcctgttgctggtactgttggtacatctgacctgcttgagtctgagctcctgtatatggtggctgctgtggctgaacgcctggtgggtgagctgctgaggaggaggaagcaatgctgtcgggtgttcctgaacgatcttctgcaggagcactgggtggccctgaaacctgatcatctgttaagccaaacgctgacataacatttttattgatttcatcccaa

SEQ ID NO: 227709 - DNA, 891 bp, Homo Sapiens
atagtaaaccgtcacggatcccacggcccgggccacagccacacccgtcttggggtcgatgtggaggatgctgttggctgaggagctccaggttctgagaggccttccaggctggtcagaacagtggccagacagagcacgtcccccaccaccatggccccagacagctctggggagatggcctgtaggacaggcaggggcatgaagtccgagaggcccgggtgctctgcgtcccacacacggagcagtgtcaggcccacgctgactgtgcggacaacgcaggtgttgttggtggggcccttcccgatctgcacaaagtcgtctctgttagtggcaaagttgaggaccgaactgtgagcatggaagacatctccagagttgtcgtggaagtggacagtgaaggtcacggtcattcccaaaggcacggccaccagggcctccttgttctgggtgtgcaggacagggctcatggaaaccctcaggtaggaaacaggggatacctttacagcaacaatgatggtttggttggccccaaagggctcttgtgcaatcacttcgatggtggatgtcccgatcatagaccctgatgctagaaagcctttctcatcaacatgcacaactggaaccttttcgggtccatccaggacgcggtagctcagagaggctgcaccatccctgtttgtctgcagctttatatatgagttgggcgacattaatatttgttctgcttctatttcagggttgagcagctgcagcttctcaaacacctggacttggatctcatccgagagttctctggccaggccatacagctgccccgatgtggggtccacagccttgaccaccaccctcagcccggtccggccttttacccggccgagcacgttccaa

SEQ ID NO: 227710 - DNA, 1464 bp, Homo Sapiens
  misc_feature (1257)..(1286): n is a, c, g, or t
ctttgtacaaaaaagttggcgtcactgcgcaggctgcggcccgggagcgtgggggatctcgaggtgccgggttgcaggcgctcaggagcgctagggtttgaggcctgctttctgctcgcgccagcagagcactacctgaggcagcgaggcgcagcgagcctagcctccccgcgccctgggcagtgtggccatggagaatcaggtgttgacgccgcatgtctactgggctcagcgacaccgcgagctatatctgcgcgtggagctgagtgacgtacagaaccctgccatcagcatcactgaaaacgtgctgcatttcaaagctcaaggacatggtgccaaaggagacaatgtctatgaatttcacctggagttcttagaccttgtgaaaccagagcctgtttacaaactgacccagaggcaggtaaacattacagtacagaagaaagtgagtcagtggtgggagagactcacaaagcaggaaaagcgaccactgtttttggctcctgactttgatcgttggctggatgaatctgatgcggaaatggagctcagagctaaggaagaagagcgcctaaataaactccgactggaaagcgaaggctctcctgaaactcttacaaacttaaggaaaggatacctgtttatgtataatcttgtgcaattcttgggattctcctggatctttgtcaacctgactgtgcgattctgtatcttgggaaaagagtccttttatgacacattccatactgtggctgacatgatgtatttctgccagatgctggcagttgtggaaactatcaatgcagcaattggagtcactacgtcaccggtgctgccttctctgatccagcttcttggaagaaattttattttgtttatcatctttggcaccatggaagaaatgcagaacaaagctgtggttttctttgtgttttatttgtggagtgcaattgaaattttcaggtactctttctacatgctgacgtgcattgacatggattggaaggtgctcacatggcttcgttacactctgtggattcccttatatccactgggatgtttggcggaagctgtctcagtgattcagtccattccaatattcaatgagaccggacgattcagtttcacattgccatatccagtgaaaatcaaagttagattttccttttttcttcagatttatcttataatgatatttttaggtttatacataaattttcgtcacctttataaacagcgcagacggcgctatggacnnnnnnnnnnnnnnnnnnnnnnnnnnnnnngatttagatggcttcttgccagtttgagcctaatctgattcttacagttttaccttcttgaaccaatgtaaaagtttttttaatgttaaatgattaaattctcagtgaggctatcttccttttccccagtaacattcctgaatttactgttatcttattgtagtacttgcatgacatg

SEQ ID NO: 227711 - DNA, 477 bp, Homo Sapiens
acaaaaaagttggggggcgtctcgcgcaaacgtccataactgaaagtagctaaggcaccccagccggaggaagtgagctctcctggggcgtggttgttcgtgatccttgcatctgttacttagggtcaaggcttgggtcttgccccgcagacccttgggacgacccggccccagcgcagctatgaacctggagcgagtgtccaatgaggagaaattgaacctgtgccggaagtactacctgggggggtttgctttcctgccttttctctggttggtcaacatcttctggttcttccgagaggccttccttgtcccagcctacacagaacagagccaaatcaaaggctatgtctggcgctcacctgtgggcttcctcttctgggtgatagtgctcacctcctggatcaccatcttccagatctaccggccccgctggggtgcccttggggactaactctccttaaccatacccctggg

SEQ ID NO: 227712 - DNA, 1244 bp, Homo Sapiens
cagctcacacctcttaagggtcttccttcagtgtgtcagttcggttaaagacaagctttccctgatggctgtctggatccacggagaaatatccaagacgctcaaactggaacttgtcgaagggttttgccagggccacagagcagtccactaatgctgcatccaccacgtgtagtaaagccaggttcaggtcacttaaaaatccaccaggcacctcagtaggatcttcagggttcttgtgctggaatagtcgctcatagaggcgaacctcacacatcaaaggctgtgacacccagtgaataaaggcctttggcttctctccagcatctgcccgtctgcaggtcacctccagactctctacacaaccactggggcccttgacaacatgctgcagctcaatgacgtagcctgtatgcctcaggcccacaggctggccccaagccaggcgcttaaatcctggctctggctcctcggggaagtcagtcctctcaatgaagacaatgagtgcaaagagaacttgatggaagcttttggtctcatcagctgggaagttgggcacctggatgtccaaggacttggcagcaggaaagttggtgatgatgacccgtagtgactccagcacagccatggctcgtggggctgtgtcattcagcacatcacgcacacaggcttctagaagatgtggctccattgtggtttgtgccacagtcactcccacccgggcacagaagttgttgatggcctcaggtgggaagccccgccgtcgcagggccgtgagtgtaaagagccgtgggtcatcccagtcccgcacagcaccagttgctacaagctggaggatcttcctcttagagacaacagcatagtgcaggttgaggcggccatactcccactgcacagggcaatagacgtccagtgcattgcaaagccagaagtaggaagagcgtcgggcctggaattccttggtgcagagtgagtgagtgatgtgctcgatggagtcacagaggcagtgtgtgtagtcgtaggtgggatagatgcaccatttgtcccctgtgcggtggtgtggtgtatacttgactcgataggctacagggtccatcttgccatcctccatcaccagcttcatccgtagtgtggcctcgccctctgaaaacttgcccttgcgcattgcctcaaagagcagcagtgactcctccatgggacggtctctccagggtgaaggcagagtattagggcctttgagccaa

SEQ ID NO: 227713 - DNA, 944 bp, Homo Sapiens; identical to SEQ ID NO: 194195

SEQ ID NO: 227714 - DNA, 1055 bp, Homo Sapiens; identical to SEQ ID NO: 194196

SEQ ID NO: 227715 - DNA, 943 bp, Homo Sapiens
ttggagaaagctcaaattaatgatgcaaaataccatgagatctcaatcatttaccacaatgataagaaaatgatcttggtagttgacagaaggcatgtcaagagcatggataatgaaaagatgaaaataccttttacagatatatacattggaggagctcctccagaaatcttacaatccagggccctcagagcacaccttcccctagatatcaacttcagaggatgcatgaagggcttccagttccaaaagaaggacttcaatttactggagcagacagaaaccctgggagttggttatggatgcccagaagactcacttatatctcgcagagcatatttcaatggacagagcttcattgcttcaattcagaaaatatctttctttgatggctttgaaggaggttttaatttccgaacattacaaccaaatgggttactattctattatgcttcagggtcagacgtgttctccatctcactggataatggtactgtcatcatggatgtaaagggaatcaaagttcagtcagtagataagcagtacaatgatgggctgtcccacttcgtcattagctctgtctcacccacaagatatgaactgatagtagataaaagcagagttgggagtaagaatcctaccaaagggaaaatagaacagacacaagcaagtgaaaagaagttttacttcggtggctcaccaatcagtgctcagtatgctaatttcactggctgcataagtaatgcctactttaccagggtggatagagatgtggaggttgaagatttccaacggtatactgaaaaggtccacacttctctttatgagtgtcccattgagtcttcaccattgtttctcctccataaaaaaggaaaaaatttatccaagcctaaagcaagtcagaataaaagggagggaaaagtaaagatgcaccttcatggga

SEQ ID NO: 227716 - DNA, 941 bp, Homo Sapiens
ttgggggaaggagagaaaatggcggcggagccgaacaagaccgaaatccagactctttttaagaggcttcgcgcagttccaaccaacaaggcctgtttcgactgcggcgccaagaatccgagttgggccagcatcacgtacggtgttttcttgtgcattgactgttccggggtgcaccgctccctgggcgtccatctgagcttcatcaggtccacagagttggattccaactggaactggttccagctgaggtgtatgcaggtcggcgggaatgccaatgcgacggctttttttcgccaacatggatgcacagccaatgatgccaacaccaaatataatagccgagctgcccagatgtaccgggagaagatccggcagctggggagtgcggccctggctaggcatggcactgatctttggatagacaacatgagtagtgccgttcctaatcactccccagagaagaaggactctgatttcttcacagaacacactcaaccccctgcctgggatgcgccagccactgagccttcagggacccagcagccagccccgtctacagagagcagtggcctggcacagccggagcatggccccaacacagacctgcttggcacctcacccaaagcctcactggaactgaaaagctccatcattggcaagaagaagccagcagcagctaagaaagggctgggtgccaagaaaggcctaggggcccagaaggtgagcagccagagcttcagtgagattgagcggcaggctcagtggcagagaagctccgtgagcagcagcagccgatgccaagaagcagcggaggagtccatggtcgcctccatgcgtctggcctaccaggagctccagattgatcgtaagaaagaggaaaagagctacagaatctggaaggaagaagcgagagcaagcagaaaggttgggcatgggct

SEQ ID NO: 227717 - DNA, 888 bp, Homo Sapiens; identical to SEQ ID NO: 194198

SEQ ID NO: 227718 - DNA, 984 bp, Homo Sapiens
ttggccctattctatgtgtccagcgacgatgagttcattattaagacagtccaacataaagaggcggaatttctgcagaagctgcttccaggatactacatgaacctcaaccagaaccctcggactttgctgcctaaattctatggactgtactgtgtgcaggcaggtggcaagaacattcggattgtggtgatgaacaatcttttaccaagatcggtaaaaatgcatatcaaatatgacctcaaaggctcaacctacaaacggcgggcttcccagaaagagcgagagaagcctcttcccacatttaaagacctagacttcttacaagacatccctgatggtctttttttggatgctgacatgtacaacgctctctgtaagaccctgcagcgtgactgtttggtgctgcagagcttcaagataatggattacagcctcttgatgtcaatccataatatagatcatgcacaacgagagcccttaagcagtgaaacacagtactcagttgatactcgaagaccggccccccaaaaggctctgtattccacagccatggaatccatccagggagaggctcgacggggtggtaccatggagactgatgaccatatgggtggcatccctgcccggaatagtaaaggggaaaggcttctgctttatattggcatcattgacattctacagtcttacaggtttgttaagaagttggagcactcttggaaagccctggtacatgacggagacactgtctcagtgcatcgcccaggcttctacgctgaacggttccagcgcttcatgtgcaacacagtatttaagaagattcccttgaagccttctccttccaaaaagtttcggtctggctcatctttctctcggcgagcaggctccagtggcaactcctgcattacttaccagccatcggtctctggggaacacaaggcacaagtgaacaacaaaggcagaagttggagccaggcgttcacc

SEQ ID NO: 227719 - DNA, 1055 bp, Homo Sapiens
ggatttccaatcacatcagtgatgatcttgaggtctcggcgctgggaacggagccattcctggatgaagtcctgggggtcggtgctaaaactgagcatgaaatctctctgggtcttcagctggttgatggactcaatggtctcatggatcttgacatcaagggaggcgatctcctgctgattggtggtagaggccagaaaattgctcatttgggccttcagtgggtcgtccacctccacatcgatgtcgtaacaggctgtcttcttctggtcgttagggtcgacactaatgacatggttgatgacaatggggtctggatgctgcagcaaccctgccagcttcatgggaatctcggagaaacggagtcggccacaactgaagatctggcggaagtaacggttgcagttgatgtactcccgctcgtgcccatcctgcagctggttgtgcttgatgtaaagccacagggcctgcatgatggcggccctcgtctgcgtgtgcactcccagcagccttgccaatcgggggtccaatttgtactggggaggctgatgatccagcatgagcaggagggtgcacttgacgttgaggtctccaggccgttttacttggaagccatctgtctcctgggtggtgggcatccggtgccactccaccaggtgattgtcaggcccgtacagctccttgtccagctcaatgacgaggctcttaaagaatgaagaaaacttcctcttctgtttgctaggatcatccagcagttttccttccactcggagttcccaggaagccaccttgtcccctgctggggttcccccaggggtccctgcagttcctgcactatcgccttccgccttgctgggactgaacgtattggaaatgtagatccgaagctttcgcttttgtgtcagaggctttttgatggcctcctggatctccatccgcttgcgagcaatggtctggtccagcttccgctcaaaagccaagagatccatgtacgcctgagactctggaacaagctcccggattcgctgaggtagaaccttatctgccatctccaa

SEQ ID NO: 227720 - DNA, 1639 bp, Homo Sapiens; identical to SEQ ID NO: 194201

SEQ ID NO: 227721 - DNA, 1218 bp, Homo Sapiens
tggggggccggggatgggcctgagcctgggcctgggtctgggtctgagcctaggcatgagtgaggccaccagtgaggcagaggaggaggcggccacggccgaggcggtgggacgcctggccacgacgctgtggctgcggctccgcggctgggaggcggtgctggcggcggcgcagcggttgctggtgtgggagaagccgctgcacagcctggtcacggcggccgcgctcaacggcctcttctggttgctgtcttcctcgtccctccggcccttcttcctactcagcgtctcacttttggcctattttctgctggatctctggcagcctcgctttctccctgacgtttcagcatcatccccagaggagccacactctgacagtgagggtgcggggtcaggcgcccggccgcacctgctgagtgtgcccgagttgtgcagatacctggctgagagctggctcaccttccagattcacctgcaggagctgctgcagtacaagaggcagaatccagctcagttctgcgttcgagtctgctctggctgtgctgtgttggctgtgttgggacactatgttccagggattatgatttcctacattgtcttgttgagtatcctgctgtggcccctggtggtttatcatgagctgatccagaggatgtacactcgcctggagcccctgctcatgcagctggactacagcatgaaggcagaagccaatgccctgcatcacaaacacgacaagaggaagcgtcaggggaagaatgcacccccaggaggtgatgagccactggcagagacagagagtgaaagcgaggcagagctggctggcttctccccagtggtggatgtgaagaaaacagcattggccttggccattacagactcagagctgtcagatgaggaggcttctatcttggagagtggtggcttctccgtatcccgggccacaactccgcagctgactgatgtctccgaggatttggaccagcagagcctgccaagtgaaccagaggagaccctaagccgggacctacgggagggagaggagggagagctggcccctcccgaagacctactaggccatcctcaagctctgtcaaggcaagccctgtactcggaggaagaggaagaggatgtggcagctatgaaaccttgttgcggctctcatcccccctccactttgtgaacacgcacttcaatggggcaagggtccccccc

SEQ ID NO: 227722 - DNA, 824 bp, Homo Sapiens; identical to SEQ ID NO: 194204

SEQ ID NO: 227723 - DNA, 1313 bp, Homo Sapiens; identical to SEQ ID NO: 194206

SEQ ID NO: 227724 - DNA, 936 bp, Homo Sapiens
ttggggcagaggtgggctgtagagccaaagtggggtgggagcgcgaagatggcagctgctgaggaggagccgaagcccaaaaagctgaaggtggaggcgccgcaagcgctgagagaaaatattctctttggaatgggaaatcctctgcttgacatctctgctgtagtggacaaagatttccttgataagtattctctgaaaccaaatgaccaaatcttggctgaagacaaacacaaggaactgtttgatgaacttgtgaaaaaattcaaagtcgaatatcatgctggtggctctacccagaattcaattaaagtggctcagtggatgattcaacagccacacaaagcagcaacattttttggatgcattgggatagataaatttggggagatcctgaagagaaaagctgctgaagcccatgtggatgctcattactacgagcagaatgagcagccaacaggaacttgtgctgcatgcatcactggtgacaacaggtccctcatagctaatcttgctgctgccaattgttataaaaaggaaaaacatcttgatctggagaaaaactggatgttggtagaaaaagcaagagtttgttatatagcaggcttttttcttacagtttccccagagtcagtattaaaggtggctcaccatgcttctgaaaacaacaggattttcactttgaatctatctgcaccgtttattagccagttctacaaggaatcattgatgaaagttatgccttatgttgatatactttttggaaatgagacagaagctgccacttttgctagagagcaaggctttgagactaaagacattaaagagatagccaaaaagacacaagctcctgccaaagatgaactcaaagaggcagcgaatcgtgatcttcacccaagggagagatgacactataatggctacagaaagtgaagt

SEQ ID NO: 227725 - DNA, 1431 bp, Homo Sapiens
ttggcaaggtttgaacgagcagcgccgcaggcgcgctcctcggtgccgtgagcgcgccccggggccggccggtctgctcgggagcgcgccccgtggcccagccctgtctccttttagcataggggcttcggcgccagcggccagcgctagtcggtctggtaaggcaaagcggagcggagatcctcaaacggcctagtgcttcgcgcttccggagaaaatcagcggtctaattaattcctctggtttgttgaagcagttaccaagaatcttcaaccctttcccacaaaagctaattgagtacacgttcctgttgagtacacgttcctgttgatttacaaaaggtgcaggtatgagcaggtctgaagactaacattttgtgaagttgtaaaacagaaaacctgttagaaatgtggtggtttcagcaaggcctcagtttccttccttcagcccttgtaatttggacatctgctgctttcatattttcatacattactgcagtaacactccaccatatagacccggctttaccttatatcagtgacactggtacagtagctccagaaaaatgcttatttggggcaatgctaaatattgcggcagttttatgcattgctaccatttatgttcgttataagcaagttcatgctctgagtcctgaagagaacgttatcatcaaattaaacaaggctggccttgtacttggaatactgagttgtttaggactttctattgtggcaaacttccagaaaacaaccctttttgctgcacatgtaagtggagctgtgcttacctttggtatgggctcattatatatgtttgttcagaccatcctttcctaccaaatgcagcccaaaatccatggcaaacaagtcttctggatcagactgttgttggttatctggtgtggatgctgacttgctcatcagttttgcacagtggcaattttgggactgatttagaacagaaactccattggaaccccgaggacaaaggttatgtgcttcacatgatcactactgcagcagaatggtctatgtcattttccttctttggttttttcctgacttacattcgtgattttcagaaaatttctttacgggtggaagccaatttacatggattaaccctctatgacactgcaccttgccctattaacaatgaacgaacacggctactttccagagatatttgatgaaaggataaaatatttctgtaatgattatgattctcagggattggggaaaggttcacagaagttgcttattcttctctgaaattttcaaccacttaatcaaggctgacagtaacactgatgaatgctgataatcaggaaacatgaaagaagccatttgatagattattctaaaggatatcatcaagaagactattaaaaacacctatgcctatacttttttatctcagaaaataaag

SEQ ID NO: 227726 - DNA, 956 bp, Homo Sapiens
ttggctggtgcttctctcacctctgacgcccttgactgtagtcaccctgctccaggcctccaatgtgcctgctgtggtggtggggaggcttctccaggcagccaccaactaccacaacgggcacacaggccagctctcagccatcacagtcttcctgctgtttgggggctccctggcccgaatcttcacttccattcaggaaaccggagatcccctgatggctgggacctttgtggtctcctctctctgcaacggcctcatcgccgcccagctgctcttctactggaatgcaaagcctccccacaagcagaaaaaggcgcagtagagccagctactggagtcattccgtttccactcattcacccaacctcagggttctccccatctgagccagcctgctggtgtgacttactcatcctccattcctctgcacttgcagactttctgagccagggttttcttttagtggaaacaaatggttgatggatccagatccttagaaaaggagaggatgggggtagagtctcccaagccaaaattttgacatttgagtgctttcgtaagccctgtacatgtactattaattcagtcattcagccaagcctcctcctctagcagcaatttccagctgtttaacactatcctgggcaaatgttttaccctgtcctccagcctccctgcttcccttctggccctggaagactgagtctggacggcagagtggagggactgggaggctgtggctgcctccctccctcagcccggctgggactgtctcccggaccccagtgctggggtgggggaagggggacggagaatgactcaggcagggccccagggtggggtgaggaggttcctgctctggcaggtctaggcggaagggagtggagatggggctggttcctgctgcagtgaggggaacagatgggacaataaagactggagactcatttgaa

SEQ ID NO: 227727 - DNA, 944 bp, Homo Sapiens
tcccgcatgcgcagtcgctcctcctccatctcccgcatgtcgtcctctcattctttgggtcgtacactttctccagctccttggtgaagagtgcctccagctcctgctcatccaggacaccatcactgttgatatcatgcagtatgaagaaggtcttggggttaaacctgttggggtccagtccatccagctcctcccacacctccttcaactgggcttggctgccaggcacgttgactttagggtgctcgcggtgccggcgctgttgctcttccagcttcctctccgcctcctttctctgctcctctcccagtgactccagataacgccgtctctcgtgttccttaagcatctcgtagcgcttgaactcttcatgatgggctgcgtcgtactgggcaaggtcccgggtggccgtctggatcagcagctccaggtcgcgggcctcgaatgtatgctggttctgagggtccaggtgttcaaactgtttcaggagattcagatgatccacctgtacattgggatcctgctcggcgtccatcttggccttgagcagcatccgcagccgtgacacctcctgtcgcttgagctcatccagcttggtgcggacgtggtggctgacaaagtccagctctcggctcagcttcccgctcttgatgtcctccgcattggcagcctgcagcttctctcggaaatgcccatccgtctccagtacatcgatgacctcctggaggtaccggtggtagtacaggcctgtgtcgggactctcagtcgcaggggtctcctccttgttgggcgcccctcgctccagggggacagccagcacggcgcgaagcaggagcagcagcagcagcggcaacagaaggagggttcctcggggcccagagggaggcatggcagtgtggtctctccttcaccgcagagggcgccaacttttttgtacaaag

SEQ ID NO: 227728 - DNA, 1268 bp, Homo Sapiens
  misc_feature (876)..(888): n is a, c, g, or t
  misc_feature (966)..(974): n is a, c, g, or t
ccaactttgtacaaaaaagttggatagccacaaaacgtaagcagtatcccagaaagatcctggaatgtgtcatcaaaaccataaaagcaaaacaagaaattctgaagcagtaccaccctgttgtacatccactggacctaaaatatgaccctgatccagcccctcatatggaaaatttgaaatgcagaggggaaacagtagcaaaggagatcagtgaagccatgaagtccttgcctgcattaattgaacaaggagagggattttcccaagttctcaggatgcagcctgttatccacctccagaggattcaccaagaagtcttttccagttgtcataggaaaccagatgctaaacctgagaactttataacacagatagaaaccacaccaacagagactgcttccaggaaaacctctgacgtggtactgaaaagaaagcaaactaaagactgcccccagagaaaatggtatccattgcggccaaagaaaattaatcttgatacatgagctctttctgtttattttgggagttgaaaataggcaccatcaacatttagattacagcctaattaatacctagataagacttcatttgaaataagaaataactcttttactagtgattcatttatacagatatagtatctctgtgcggggatatgatataatattgtatttccttactgttttatctattgtaaataaaaagcattttaaaaagtattgacacaaagcccatcagtgggcattaaaaatattaaaagtgcagacttttactgtccttaagtgccatcaactctcagctcccttgtagcttttgtgggatttaacaagtaacaaattctgttgtgtttccctggtatacatctttctaggnnnnnnnnnnnnngagagagagctgtataatgatttttcgtttacatgctgaaaagtaattatcagttctgcacagcagcagatgcagggnnnnnnnnnaaagatgtagtttgatttatcaaattaatgtgctgatgataatactggctttgactttgttactccatgttcagctaatttaggtttgtgaaattaactttaggattttttgttgtgtaagacaatgataactattatttgtgcaacattactctttgaaataaaaattggcatgtagccaatgtttcctgcccacactcacttttttctatagaccattaacataatttgactgggaactaatggtttctttttagggtttcttatttatttctttacaaatcattccagttc

SEQ ID NO: 227729 - DNA, 910 bp, Homo Sapiens
ttggcagcggagcatttggcagcactccagagcctgctcaaggcctcctcgaaagatgttgtcagacagctgtgtcaagaaagcttttccagttcagcccttggcttgaaaaaactcttggatgttacatgttccagcttgtctgtgacccaggaggaggcagaggaactgctccaggctctgcaccgcctcactaggctggtggcattccgtgacctgtcctctgccgaggcaattctggctctctttccagaaaatttccaccaaaacctcaaaaacctgctgacaaagatcatcctagaacatgtgtctacttggagaaccgaagcccaggcaaatcagatctctctgccacgcctggtcgatctggactggagagtggatatcaaaacctcctcagacagcatcagccgcatggccgtccccacctgcctgctccagatgaagatccaagaagatcccagcctatgcggagacaaaccctccatctcagctgtcaccgtggagctgagcaaagaaacactggacaccatgttagatggcctgggccgcatccgagaccaactctctgccgtggccagtaaatgatccagccagctgccagggccactgccatgacccagctgctcatgagtgataaatgtctccccatatgcaggctgcccttgcagctgcagctgacaacaggcaggatggtggggacagcagggggctactgccatccagaagttacagttggattgggaagaagcagccagatcccccgctgttctcactcatcttctttctctttctgaagctggagagcagaagcccccatctttgaaaagctcctgagtgcaacttaattaccaccatggcagggtgagggaacatttgcatcgtcagctgcctctgcatagctgtttga

SEQ ID NO: 227730 - DNA, 961 bp, Homo Sapiens
ttggggtcatgtttcagtttctaagccaggggttttactgtggagtaggactgtttactcgttttcttaagctgctgggtgctttgctgctcctggctctggccctctttttgggctttctacagttgggatggcggtttctggtgggactaggtgaccggttaggctggagggataaggctacctggctcttctcttggctggattctccagccttgcagcgttgcttgactctgctgagagatagcaggccatggcagcggctggtaagaatagttcagtggggctggctggagttgccttgggtcaagcagaatattaataggcaggggaatgcacctgtagctagtgggcgctactgccagcctgaagaggaagtggctcgactcttgaccatggctggggttcctgaggatgagctaaaccctttccatgtactgggggttgaggccacagcatcagatgttgaactgaagaaggcctatagacagctggcagtgatggttcatcctgacaaaaatcatcatccccgggctgaggaggccttcaaggttttgcgagcagcttgggacattgtcagcaatgctgaaaagcgaaaggagtatgagatgaaacgaatggcagagaatgagctgagccggtcagtaaatgagtttctgtccaagctgcaagatgacctcaaggaggcaatgaatactatgatgtgtagccgatgccaaggaaagcataggaggtttgaaatggaccgggaacctaagagtgccagatactgtgctgagtgtaatagctgcatcctgctgaggaaggagacttttgggcagagtcaagcatgttgggcctcaagatcacctactttgcactgatggatggaaaggtgtatgacatcacagagtgggctggatgccagcgtgtaagtatctccccagatacccacagagtcccctatcacatctcatttggt

SEQ ID NO: 227731 - DNA, 1937 bp, Homo Sapiens
ttggcgcagtttctggagggagccgctgcgggtctttccctcactcgtcctccgcgcgtcgccgctcttcggttctgctctgtccgccgccatggcccaagctgacatcgcgctgatcggattggccgtcatgggccagaacttaattctgaacatgaatgaccacggctttgtggtctgtgcttttaataggactgtctccaaagttgacgatttcttggccaatgaggcaaagggaaccaaagtggtgggtgcccagtccctgaaagagatggtctccaagctgaagaagccccggcggatcatcctcctggtgaaggctgggcaagctgtggatgatttcatcgagaaattggtaccattgttggatactggtgacatcatcattgacggaggaaattctgaatatagggacaccacaagacggtgccgagacctcaaggccaagggaattttatttgtggggagcggagtcagtggtggagaggaaggggcccggtatggcccatcgctcatgccaggagggaacaaagaagcgtggccccacatcaagaccatcttccaaggcattgctgcaaaagtgggaactggagaaccctgctgtgactgggtgggagatgagggagcaggccacttcgtgaagatggtgcacaacgggatagagtatggggacatgcagctgatctgtgaggcataccacctgatgaaagacgtgctgggcatggcgcaggacgagatggcccaggcctttgaggattggaataagacagagctagactcattcctgattgaaatcacagccaatattctcaagttccaagataccgatggcaaacacctgctgccaaagatcagggacagcgcggggcagaagggcacagggaagtggaccgccatctccgccctggaatacggcgtacccgtcaccctcattggagaagctgtctttgctcggtgcttatcatctctgaaggatgagagaattcaagctagcaaaaagctgaagggtccccagaagttccagtttgatggtgataagaaatcattcctggaggacattcggaaggcactctacgcttccaagatcatctcttacgctcaaggctttatgctgctaaggcaggcagccaccgagtttggctggactctcaattatggtggcatcgccctgatgtggagagggggctgcatcattagaagtgtattcctaggaaagataaaggatgcatttgatcgaaacccggaacttcagaacctcctactggacgacttctttaagtcagctgttgaaaactgccaggactcctggcggcgggcagtcagcactggggtccaggctggcattcccatgccctgttttaccactgccctctccttctatgacgggtacagacatgagatgcttccagccagcctcatccaggctcagcgggattacttcggggctcacacctatgaactcttggccaaaccagggcagtttatccacaccaactggacaggccatggtggcaccgtgtcatcctcgtcatacaatgcctgatcatgctgctcctgtcaccctccacgattccacagaccaggacattccatgtgcctcatggcactgccacctggccctttgccctattttctgttcagttttttaaaagtgttgtaagagactcctgaggaagacacacagtttatttgtaaagtagctctgtgagagccaccatgccctctgcccttgcctcttgggactgaccaggagctgctcatgtgcgtgagagtgggaaccatctccttgcggcagtggcttccgcgtgccccgtgtgctggtgcggttcccatcacgcagacaggaaggtgtttgcgcactctgatcaactggaaacctctgtatcatgcggctgaattccctttttcctttactcaataaaagctacatcagactg

SEQ ID NO: 227732 - DNA, 1395 bp, Homo Sapiens
ttggcgggcggcggactaggcacagagctgcgggagcaggcacagggagtgtggagcctggcggcgggacggcgggatccggtgggagccggagtcccgccgaggggggctggaggtggaggggcccggcgaggccgcgatgaagccgagcggcgaggaccaggcggcgctggcggccggcccctgggaggagtgcttccaggcggccgtgcagctggcgctgcgggcaggacagatcatcagaaaagcccttactgaggaaaaacgtgtctcaacaaaaacatcagctgcagatcttgtgacagaaacagatcaccttgtggaagatttaattatttctgagttgcgagagaggtttccttcacacaggttcattgcagaagaggccgcggcttctggggccaagtgtgtgctcacccacagcccgacgtggatcatcgaccccatcgacggcacctgcaattttgtgcacagattcccgactgtggcggttagcattggatttgctgttcgacaagagcttgaattcggagtgatttaccactgcacagaggagcggctgtacacgggccggcggggtcggggcgccttctgcaatggccagcggctccgggtctccggggagacagatctctcaaaggccttggttctgacagaaattggccccaaacgtgaccctgcgaccctgaagctgttcctgagtaacatggagcggctgctgcatgccaaggcgcatggggtccgagtgattggaagctccacattggcactctgccacctggcctcaggggccgcggatgcctattaccagtttggcctgcactgctgggatctggcggctgccacagtcatcatcagagaagcaggcggcatcgtgatagacacttcgggtggccctcgacctcatggcttgcagagtggttgcggccagcacccgggagatggcgatgctcatagctcaggccttacagacgattaactatgggcgggatgatgagaagtgactgcggctgaggcaaagctgctcccaaggcctccctgggctgctgtgggctcctggggaggtggccctcgtggcccacgctccatgccagtggctcacgctctgctcctggctaccccagagggagttgtcacgctacagtgagtggctggccttttaaatcgacgtctctctcaccaggatttggtgtttagctgtttctctctttaatctcacgtagcctttttcaggttagtacgtgttcttctgtcagggccaaaactcaaatctcctgtgaaatacgtattgataatccaatcttgatttttccccccagaatataaatctcaggtaataaggctttaaaactgctgataaagcggatcgttctcaggccctccccccggagtact

SEQ ID NO: 227733 - DNA, 1310 bp, Homo Sapiens; identical to SEQ ID NO: 194218
  misc_feature (1228)..(1246): n is a, c, g, or t

SEQ ID NO: 227734 - DNA, 1223 bp, Homo Sapiens; identical to SEQ ID NO: 194219
  misc_feature (70)..(88): n is a, c, g, or t
  misc_feature (831)..(843): n is a, c, g, or t
  misc_feature (1065)..(1076): n is a, c, g, or t

SEQ ID NO: 227735 - DNA, 1238 bp, Homo Sapiens
ttgggtcatcgcctgtcggggctaggatatgatgggtgagaggtgtcaaaccaaattctctcggtttggaaacggagaaaatctaaaaatgaggatgtgaggaaagagtccgctctcaaggcgcgttgtggtctatccgagccccgtcccctgggctccctcgggctggggtgaggcgggcagcgctacgcgtggggtaggaccatcttacgctgggaccccgccaaggagccccaggaagtaggtgaaagggcaggggcgtggctctcggggcgccacccacgctcttgaaatctgggtgattgcgagcggccgctcagcgtcccccacaccacagacccgcgccgccgacgacccagcagccgccatggctctgctccgaggtgtgtttgtagttgctgctaagcgaacgccctttggagcttacggaggccttctgaaagacttcactgctactgacttgtctgaatttgctgccaaggctgccttgtctgctggcaaagtctcacctgaaacagttgacagtgtgattatgggcaatgtcctgcagagttcttcagatgctatatatttggcaaggcatgttggtttgcgtgtgggaatcccaaaggagaccccagctctcacgattaataggctctgtggttctggttttcagtccattgtgaatggatgtcaggaaatttgtgttaaagaagctgaagttgttttatgtggaggaaccgaaagcatgagccaagctccctactgtgtcagaaatgtgcgttttggaaccaagcttggatcagatatcaagctggaagattctttatgggtatcattaacagatcagcatgtccagctccccatggcaatgactgcagagaatcttgctgtaaaacacaaaataagcagagaagaatgtgacaaatatgccctgcagtcacagcagagatggaaagctgctaatgatgctggctactttaatgatgaaatggcaccaattgaagtgaagacaaagaaaggaaaacagacaatgcaggtagacgagcatgctcggccccaaaccaccctggaacagttacagaaacttcctccagtattcaagaaagatggaactgttactgcagggaatgcatcgggtgtagctgatggtgctggagctgttatcatagctagtgaagatgctgttaagaaacataacttcacaccactggcaagaattgtgggctactttgtatctggatgtgatccctcta

SEQ ID NO: 227736 - DNA, 964 bp, Homo Sapiens
ttggccaagaacaattgtctctggacggcagctatgcgactcaccgtgctgtgtgctgtgtgcctgctgcctggcagcctggccctgccgctgcctcaggaggcgggaggcatgagtgagctacagtgggaacaggctcaggactatctcaagagattttatctctatgactcagaaacaaaaaatgccaacagtttagaagccaaactcaaggagatgcaaaaattctttggcctacctataactggaatgttaaactcccgcgtcatagaaataatgcagaagcccagatgtggagtgccagatgttgcagaatactcactatttccaaatagcccaaaatggacttccaaagtggtcacctacaggatcgtatcatatactcgagacttaccgcatattacagtggatcgattagtgtcaaaggctttaaacatgtggggcaaagagatccccctgcatttcaggaaagttgtatggggaactgctgacatcatgattggctttgcgcgaggagctcatggggactcctacccatttgatgggccaggaaacacgctggctcatgcctttgcgcctgggacaggtctcggaggagatgctcacttcgatgaggatgaacgctggacggatggtagcagtctagggattaacttcctgtatgctgcaactcatgaacttggccattctttgggtatgggacattcctctgatcctaatgcagtgatgtatccaacctatggaaatggagatccccaaaattttaaactttcccaggatgatattaaaggcattcagaaactatatggaaagagaagtaattcaagaaagaaatagaaacttcagcagaacatccattcattcattcattggattgtatatcattgttgcacaatcagaattgataagcactgttcctccactccatttagcaattatgtcacccttttttaattgcagttgg

SEQ ID NO: 227737 - DNA, 678 bp, Homo Sapiens
ctttgtacaaaaaagttggtgcatcctgggttggcgtagccatggcgtctcgtgtcctttcagcctatgtcagccgcctgcccgcggcctttgcgccgctgccccgggtccggatgctggccgtggcccggcctctcagcaccgctctctgctccgcggggacccagacgaggctcgggactttgcagccggccttagtgctcgcgcaggttcctggtagagttacacagttgtgccgccagtatagcgacatgcctcctttgacgttagagggcatccaggaccgtgttctttacgtattgaaactctatgacaagattgacccagagaagctttcagtaaattctcattttatgaaagacctgggcttagacagtttggaccaagtggagattatcatggccatggaagacgaatttgggtttgaaattcctgatatagatgctgaaaagttaatgtgtccacaagaaattgtagattacattgcagataagaaggatgtatatgaataaagtatcagaccctttggctttgctgagagaggactcagatgatagtgacgaatgtctggcagtgaggacacattttggcattcttgctgactctgacagagtgattctgatggacttgtatttaaattgtatgtgttttactctttgaaaataaatctataaaacc

SEQ ID NO: 227738 - DNA, 945 bp, Homo Sapiens
ttggcaggatgagcaggaggaagtgctgaatgtgaatctcgaggggaacttgaccctggagggagtgacccggggccagagcgggacctatggctgcagagtggaggattacgacgcggcagatgacgtgcagctctccaagacgctggagctgcgcgtggcctatctggaccccctggagctcagcgaggggaaggtgctttccttacctctaaacagcagtgcagtcgtgaactgctccgtgcacggcctgcccacccctgccctacgctggaccaaggactccactcccctgggcgatggccccatgctgtcgctcagttctatcaccttcgattccaatggcacctacgtatgtgaggcctccctgcccacagtcccggtcctcagccgcacccagaacttcacgctgctggtccaaggctcgccagagctaaagacagcggaaatagagcccaaggcagatggcagctggagggaaggagacgaagtcacactcatctgctctgcccgcggccatccagaccccaaactcagctggagccaattggggggcagccccgcagagccaatccccggacggcagggttgggtgagcagctctctgaccctgaaagtgaccagcgccctgagccgcgatggcatctcctgtgaagcctccaacccccacgggaacaagcgccatgtcttccacttcggcaccgtgagcccccagacctcccaggctggagtggccgtcatggccgtggccgtcagcgtgggcctcctgctcctcgtcgttgctgtcttctactgcgtgagacgcaaagggggcccctgctgccgccagcggcgggagaaaggggctccgccgccaggggagccagggctgagccactcggggtcggagcaaccagagcagaccggccttctcatgggaggtgcctccggaggagccaggggtgg

SEQ ID NO: 227739 - DNA, 976 bp, Homo Sapiens
ttggcggatggcggctacggcggctcattgttttccgctgcaggggtgctgaaggggggacgcgggtcggacgcgtccggctgtggaagagagcggcggccgctcacaacatgcacagcctggcgacggctgcgcctgtgcctactacactggcacaagtggatagagaaaagatctatcagtggatcaatgagctgtccagtcctgagactagggaaaatgctttgctggagctaagtaagaagcgagaatctgttcctgaccttgcacccatgctgtggcattcatttggtactattgcagcacttttacaggaaattgtaaatatttatccatctatcaacccacccaccttgacagcacaccagtctaacagagtttgcaatgctctggcattactgcaatgtgtagcatcacatccagaaaccaggtcagcgtttctcgcagcacacatcccactttttttgtacccctttttgcacactgtcagcaaaacacgtccctttgagtatctccggctcaccagccttggagttattggggccctggtgaaaacagatgaacaagaagtaatcaactttttattaacaacagaaattatccctttatgtttgcgaattatggaatctggaagtgaactttctaaaacagttgccacattcatcctccagaagatcttgttagatgacactggtttggcttatatatgtcagacgtatgagcgtttctcccatgttgccatgatcttgggtaagatggtcctgcagctatccaaagagccttctgcccgtctgctgaagcatgtagtgagatgttaccttcgactttcagataaccccaggttttcagatttgactttctgctggtcatcttttcaaagaaaatgaaacgtttaaaagttcatctgataatactgctaccatagttttgttttcactgctcatctcttattagggttttaaaccataaaactgaa

SEQ ID NO: 227740 - DNA, 1542 bp, Homo Sapiens
  misc_feature (720)..(739): n is a, c, g, or t
  misc_feature (1290)..(1299): n is a, c, g, or t
ttggatgagagccagttggagaatgtatgtctgagttggcagaatgagacatcaagtggaaacctagagtcctgcgctcaagctcgaagagtaactggtgggttactagatcgactggatgacagccctgaccagtgtagagattccattacctcatatctcaaaggagaagctggcaaatttgaagcaaatggaagccatacagaaatcactccagaagcaaagacaaaatcttactttccagaatcccaaaatgatgtaggaaaacagagtaccaaggaaactctgaaaccaaaaatacatggatctggtcatgttgaagaaccagcatcaccactagcagcatatcagaaatctctagaagaaaccagcaagcttataatagaagagactaaaccctgtgtgcctgtcagtatgaaaaagatgagtaggacttctccagcagatggcaagccaaggcttagcctccatgaagaagaggggtccagtgggtctgagcaaaagcagggagaaggttttaaggtgaaaacgaagaaagaaatccggcatgtggaaaagaagagccactcgtaacagcgaacggtcagtcaaggatcataagtttttactgccagtattgagaaattcgtggaagaaatgtcagcaggaagtaaaaattcaccgagaagtgtgtgtgtgttcgctgcttccacacattaatggcatgattttttttatgcnnnnnnnnnnnnnnnnnnnnccacccacattttaatttagcatgagccaatttacagagcatggaaatcactttcatttccggattggcgcgtgtgcaattagcaatgcagtgtatatacaagaagccatgctgttaacagtttatctcaagtaatttggtgtcatttacaaaaggaagaaattcctgccatcagaagggacagaaggagatggaatgatcaaatcacagagaaacactaaaattactaaatctacaacagctcgccttatttttcttggacccaaactgtcagggtataaacactatttgtttcttttttaaaacatcgatagttttgctgtaaataataacactgtataaattctaacagaaaaatagaataaaatgttgataaggcactgcctcttagaacacaaacagaatattgcaaatgcatttaacaaataggggtctcaagtgacttcaccctagaagaggagggagggattctgggtgggggtgactcttcactgattcttgtatattagcaattataatgtttgtatatgcaaaactgctagcttgatttnnnnnnnnnncaaatctttaaaatctgctgcaaatttaaataattcccaaaatgaggaattctgtagttctgtgaaaaatttttttcttcagaatactaatattttgatgcatgtgtatcaccttattttgattaaatcttttccaattttgcaaacactacagtatactgcaacacaaaagattttatctgtaaacacaaagcccttcatctaatatttgttgctattgccaatttttcaatgaaatgacct

SEQ ID NO: 227741 - DNA, 963 bp, Homo Sapiens; identical to SEQ ID NO: 194222

SEQ ID NO: 227742 - DNA, 1285 bp, Homo Sapiens
  misc_feature (94)..(153): n is a, c, g, or t
ttggcgctgcgatcccgcagggcagcgacgcgactctggtgcgggccgtcttcttccccccgagctgggcgtgcgcggccgcaatgaactgggnnnnnnnnnnnnnnnnnnnnnnnnnnnnnnnnnnnnnnnnnnnnnnnnnnnnnnnnnnnngcttcctgagggctgacggcgacctgacgctactatgggccgagtggcagggacgacgcccagaatgggagctgactgatatggtggtgtgggtgactggagcctcgagtggaattggtgaggagctggcttaccagttgtctaaactaggagtttctcttgtgctgtcagccagaagagtgcatgagctggaaagggtgaaaagaagatgcctagagaatggcaatttaaaagaaaaagatatacttgttttgccccttgacctgaccgacactggttcccatgaagcggctaccaaagctgttctccaggagtttggtagaatcgacattctggtcaacaatggtggaatgtcccagcgttctctgtgcatggataccagcttggatgtctacagaaagctaatagagcttaactacttagggacggtgtccttgacaaaatgtgttctgcctcacatgatcgagaggaagcaaggaaagattgttactgtgaatagcatcctgggtatcatatctgtacctctttccattggatactgtgctagcaagcatgctctccggggtttttttaatggccttcgaacagaacttgccacatacccaggtataatagtttctaacatttgcccaggacctgtgcaatcaaatattgtggagaattccctagctggagaagtcacaaagactataggcaataatggagaccagtcccacaagatgacaaccagtcgttgtgtgcggctgatgttaatcagcatggccaatgatttgaaagaagtttggatctcagaacaacctttcttgttagtaacatatttgtggcaatacatgccaacctgggcctggtggataaccaacaagatggggaagaaaaggattgagaactttaagagtggtgtggatgcagactcttcttattttaaaatctttaagacaaaacatgactgaaaagagcacctgtacttttcaagccactggagggagaaatggaaaacatgaaaacagcaatcttcttatgcttctgaataatcaaagactaatttgtgattttactttttaatagatatgactttgcttccaacatggaatgaaataaaaaataaataataaaagattgccatgaatcttgc

SEQ ID NO: 227743 - DNA, 512 bp, Homo Sapiens; identical to SEQ ID NO: 194223

SEQ ID NO: 227744 - DNA, 895 bp, Homo Sapiens
ctttgtacaaaaaagttggactgctattccctcgacctctcagagcgagtggcgctgaagctcgatcagaccttccccttcagcctgatgaggaggatatccgtgttcaagtacgtctcagggtcttcagccgagaggagggcagcccagagccggaaactgaacccggtgcctggctcctaccccacacagagctgccaccctcacctgtccccaagccaccctgtgtcccagacgcagcacgccagtggtcagaagctggcctcctggccctcctgcacccccgggcacatgcccaccttgcctccgtaccagcctgcctccggcctgtgctatgtgcagaaccactttggtccaaaccccacctcctccagtgtctacccagcttctgcgggcacctccctgggcatccagccccccacgcctgtgaacagccctggcacggtgtattctggggccttgggcacaccaggggctgcaggctccaaggagtcctccagggtccccatgccctgagagaatttctagggaagtcatctcacttggccttctgaaggtcctccctaagagtctcctgacaaaagttacttattgaacacctctatgtgccaggctctgtgttgggtactttgatcaatgcccctgtttcagtctcatctgtactcacggcagccctgtggagtacggtgtactggcccagcttacagatgcagaaagcgagacgttctgccatcagataaagtcacgtggctctttagtaacacggacaaggctcctcgccaaggaactcgtggcagaagagggcagcagttgggcagtagctgccgatgtctgtccccagctcccaccattccctccctgtgggctgtgccgtgctcgtgggtttcagtgtccc

SEQ ID NO: 227745 - DNA, 923 bp, Homo Sapiens
ttggcttagtaacctgggcgatagctgtggatgtttccaaggattgtcttcagtcatggccttgggattaaagtgcttccgcatggtccaccctacctttcgcaattatcttgcagcctctatcagacccgtttcagaagttacactgaagacagtgcatgaaagacaacatggccataggcaatacatggcctattcagctgtaccagtccgccattttgctaccaagaaagccaaagccaaagggaaaggacagtcccaaaccagagtgaatattaatgctgccttggttgaggatataatcaacttggaagaggtgaatgaagaaatgaagtctgtgatagaagctctcaaggataatttcaataagactctcaatataaggacctcaccaggatcccttgacaagattgctgtggtaactgctgacgggaagcttgctttaaaccagattagccagatctccatgaagtcgccacagctgattttggtgaatatggccagcttcccagagtgtacagctgcagctatcaaggctataagagaaagtggaatgaatctgaacccagaagtggaagggacgctaattcgggtacccattccccaagtaaccagagagcacagagaaatgctggtgaaactggccaaacagaacaccaacaaggccaaagactctttacggaaggttcgcaccaactcaatgaacaagctgaagaaatccaaggatacagtctcagaggacaccattaggctaatagagaaacagatcagccaaatggccgatgacacagtggcagaactggacaggcatctggcagtgaagaccaaagaactccttggatgaaagtccactggggccagcaatactccagagcccagtttctgctggatcccatgggtggcacattgggacttctctccct

SEQ ID NO: 227746 - DNA, 923 bp, Homo Sapiens
ttggcgcacgctgagctctgtgatgtagccgcttgcggagactgcaagcagccgcggcgcgcccggccctccctcttccgctgccgccgtgggaatggaaacatctgccccacgtgccggaagccaagtggtggcgacaactgcgcgccactccgcggcctaccgcgcagatcctctacgtgtgtcctcgcgagacaagctcaccgaaatggccgcgtccagtcaaggaaactttgagggaaattttgagtcactggaccttgcggaatttgctaagaagcagccatggtggcgtaagctgttcgggcaggaatctggaccttcagcagaaaagtatagcgtggcaacccagctgttcattggaggtgtcactggatggtgcacaggtttcatattccagaaggttggaaagttggctgcaacagctgtgggaggtggattttttctccttcagcttgcaaaccatactgggtacatcaaagttgactggtaacgagtggagaaggacatgaagaaagccaaagagcagctgaagatccgtaagagcaatcagatacctactgaggtcaggagcaaagctgaggaggtggtgtcatttgtgaagaagaatgttctagtaactgggggatttttcggaggctttctgcttggcatggcatcctaaggaagatgacctcatgttcattgttcctggttttttccagccagcagcctctacactccatcataggacatcgagtccctcctcctcttctcccatgccttcttccctgccatggcaaatctgagtggcttctctaagcatctgctggtacaagtcaatgtggcaccatgagcttcatggtggcagaagagacaatagtccttagctctcctcccagtacaccccctacttggccagtctgtaaggccaacaagaaagg

SEQ ID NO: 227747 - DNA, 1050 bp, Homo Sapiens; identical to SEQ ID NO: 194226

SEQ ID NO: 227748 - DNA, 1059 bp, Homo Sapiens
  misc_feature (323)..(506): n is a, c, g, or t
ttgggtaataatgagcacactagggagcatctctgtaaacacagtggctggggaaacccttcctagtctcacttgattcctcatgacggaaatcacactaaagagagaaatcagtgaagtaaggaacgtggaaggtcatgaatgggccgcaaaccacggccagctgcttgtctttgtatggcttgccagctaacaatagtggttccatctttaaggaagaagaatgtttgatggagaaaatttgtggccaatgaagtctgaaatacttcctgtcatctgcccctttccagaaaaacttggccgacccttggtctacagcacgnnnnnnnnnnnnnnnnnnnnnnnnnnnnnnnnnnnnnnnnnnnnnnnnnnnnnnnnnnnnnnnnnnnnnnnnnnnnnnnnnnnnnnnnnnnnnnnnnnnnnnnnnnnnnnnnnnnnnnnnnnnnnnnnnnnnnnnnnnnnnnnnnnnnnnnnnnnnnnnnnnnnnnnnnnnnnnnnnnnnnnnnactgttgctgaggttgaaaataatcatgcagtcattcctcaattactgcctgcagcaattcctccatttttatgaatcttgtgagcacttacgctaggagaaatttcttttacaaaacttttaaaatacaattagtgctgataattcctatgtggaaatgattccagccatggtcccctcacttgagcatgtgaatattctcacggagagaagccccagcgagattttccggtgaatacgggattgcacttactctttcatcacggaaacagacccccgagagaagccccaacgagattttccggtgaatacgggactgcacgtactctctcatcatgaaaacagagccccgttcataaatttttcatctttatttttaaggttatactcctctaaataacccttaagcctcatcaagaaaggtttgtttatagtatttttactatagcttcatccttgataacgtcctaatttccttctggacaacctccttgaccaatggcatattgagatctatgtgacatgagatatttctcagtaccactttgttact

SEQ ID NO: 227749 - DNA, 1476 bp, Homo Sapiens; identical to SEQ ID NO: 194228

SEQ ID NO: 227750 - DNA, 1309 bp, Homo Sapiens
tttgtacaaaaaagttggggccgtgccccggcgccatcatggacgaggactactacgggagcgcggccgagtggggcgacgaggctgacggcggccagcaggaggatgattctggagaaggagaggatgatgcggaggttcagcaagaatgcctgcataaattttccacccgggattatatcatggaaccctccatcttcaacactctgaagaggtattttcaggcaggagggtctccagagaatgttatccagctcttatctgaaaactacaccgctgtggcccagactgtgaacctgctggccgagtggctcattcagacaggtgttgagccagtgcaggttcaggaaactgtggaaaatcacttgaagagtttgctgatcaaacattttgacccccgcaaagcagattctatttttactgaagaaggagagaccccagcgtggctggaacagatgattgcacataccacgtggcgggaccttttttataaactggctgaagcccatccagactgtttgatgctgaacttcaccgttaagcttatttctgacgcagggtaccagggggagatcaccagtgtgtccacagcatgccagcagctagaagtgttctcgagagtgctccggacctctctagctacaattttagatggaggagaagaaaaccttgaaaaaaatctccctgagtttgccaagatggtgtgccacggggagcacacgtacctgtttgcccaggccatgatgtccgtgctggcccaggaggagcaggggggctccgctgtgcgcaggatcgcccaggaagtgcagcgctttgcccaggagaaaggtcatgacgccagtcagatcacactagccttgggcacagctgcctcctaccccagggcctgccaggctctcggggccatgctgtccaaaggagccctgaaccctgctgacatcaccgtcctgttcaagatgttcacaagcatggaccctcctccggttgaacttatccgcgttccagccttcctggacctgttcatgcagtcactctttaaaccaggggctcggatcaaccagggaccacaagcacaaatacatccacatcttggcgtacgcagcaagcgtggttgagacctggaagaagaacaagcgagtgagcatcaataaagatgagctgaagtcaacgtcaaaagctgtcgaaaccgttcacaatttgtgttgcaacgagaacaaaggggccttctgaactagtggcagaatttgagcacactttatcagtgtataaggtttccagtggtagcaatgggtgtgctgaattgggtgga

SEQ ID NO: 227751 - DNA, 1594 bp, Homo Sapiens; identical to SEQ ID NO: 194229

SEQ ID NO: 227752 - DNA, 1189 bp, Homo Sapiens
ctttgtacaaaaaagttggccatttcccaccccccaggttccttgatggagccggtggagaaggaacgagcatctactccctacatagagaagcaggtggaccacctcatcaagaaggccacaaggccagaggagctcctggagctacttggtggcagtcacgacttggacagcaatcaagcagcaatggtacttatccggctctctcacttgctgtctgagaagccagaagataaaggcttgctcatacaggatgcccactttcatcaacttctctgtctgctcaacagtcagattgcctcggtctggcatggtaccctctcgaagctgctgggaagcctgtatgctctgggcatccccaaggcctccaaggagctgcagtcggtggagcaggaggtccgctggcgcatgcggaagctcaagtacaagcacctggccttcctggcagagtcctgtgccaccctctcacaggagcagcactcgcaggagctgctggctgagctgcccacacacctggaaaggcgttggacagaaattgaagattcccacacattagtgaccgtcatgatgaaggtgggacacctctcggagccactaatgaaccgcctggaagacaagtgcctggagttggtggagcactttggccccaatgagctgcggaaggtgctggtgatgctggcagctcagagccggcggtccgtgcccttgctgcgggccatctcctaccacctggtgcagaagcccttctctctgacgaaagatgtgctcttggacgtggcctatgcctatggcaaactcagctttcaccagacccaggtgtcccagcgcctggccaccgacctgctatccctcatgcccagcctgacttctggtgaggtggcccactgtgccaagtccttcgccttactcaagtggctcagcctgcccctgtttgaggcctttgcccagcacgtcctgaacagagcgcaggacatcaccctgccccacctgtgcagcgtacttctgggcttttgcgcgtctgaacttccatccagaccaagaagatcagttcttcagcctggtacatgagaagctggggtcaaagctgcccaggcctggaaccagccctgcaggtggacctggtgtgggccctgtgtgtgctgcagcagcacgggaagcagagctgcaagccgtcctccaccctgaattt

SEQ ID NO: 227753 - DNA, 945 bp, Homo Sapiens; identical to SEQ ID NO: 194231

SEQ ID NO: 227754 - DNA, 921 bp, Homo Sapiens
ttggcgaagaggggagcctgacgactcggaaatttgaataccacagtagcatggagtgtgacctcatggagactgacatcttggagtcgttggaagatctaggttacaagggcccattgttggaagatggagcgctctctcaggcagtctctgctggagccagttcccccgagtttaccaaactctgtgcttggctggtgtctgaattaagagtgctctgtaaactagaggaaaacgtgcaagcaactaacagtccgagtgaagctgaagaattccagcttgaggtgagtgggctactaggggagatgaactgcccgtatctttcactgacatctggggatgtgaccaagcgccttctcattcagaagaactgcctcctcttgctcacatacctcatctcagaactagaagctgccagaatgctctgtgtgaatgctcctccaaaaaaagctcaagaaggaggcggtagtgaggtctttcaagagttgaaaggcatatgtattgctctaggaatgtccaaacctccagccaatataactatgttccaattcttcagcgggattgaaaaaaaattaaaggaaacattagcaaaagttccacctaatcatgtgggaaagcctttactgaagaagccaatgggaccagcccactgggaaaagatagaagcaattaaccaagccatagccaatgaatatgaagtccggagaaagctgctaataaaacgtttggatgtcactgtacaatcctttggctggtctgacagagctaagagccagacagaaaaattagccaaggtttaccagccgaaacgttcagtcttatcccctaaaactactatttctgttgcccatcttttggctgcaagggcagacttgtcaaagattttaagacaagcagcggctctataagagaaaagactgc

SEQ ID NO: 227755 - DNA, 1293 bp, Homo Sapiens
ttggagctgtgtgtcgtctgaggctcggccgcctgagccgcggacggtttgctgagcccgttagtgcgcccggccgagacacgccgccgccatgtcccgctacctgcgtccccccaacacgtctctgttcgtcaggaacgtggccgacgacaccaggtctgaagacttgcggcgtgaatttggtcgttatggtcctatagttgatgtgtatgttccacttgatttctacactcgccgtccaagaggatttgcttatgttcaatttgaggatgttcgtgatgctgaagacgctttacataatttggacagaaagtggatttgtggacggcagattgaaatacagtttgcccagggggatcgaaagacaccaaatcagatgaaagccaaggaagggaggaatgtgtacagttcttcacgctatgatgattatgacagatacagacgttctagaagccgaagttatgaaaggaggagatcaagaagtcggtcttttgattacaactatagaagatcgtatagtcctagaaacagtagaccgactggaagaccacggcgtagcagaagccattccgacaatgatagattcaaacaccgaaatcgatctttttcaagatctaaatccaattcaagatcacggtccaagtcccagcccaagaaagaaatgaaggctaaatcacgttctaggtctgcatctcacaccaaaactagaggcacctctaaaacagattccaaaacacattataagtctggctcaagatatgaaaaggaatcaaggaaaaaagaaccacctagatccaaatctcagtcaagatcacagtctaggtctaggtcaaaatctagatcaaggtcttggactagtcctaagtccagtggccactgatagtataaaccatggtcatttttaggcatgtatcattcatttactcatagtttggtttacttaaattatcaggaatacaatgttgcaatgatgcttaaaaaacacttgttagttttccctgtaccaggcaatggttataattaaaatgatatgctgttgagaagccactcttaagagtccagtttgtttaatgttatgggcagctaccaatttgtggtgtctctgtatatttttgtaaagattctcattttttatgcttgaagtatttggtgaaaagatgttggttgaccataatttgcaacattgtctcattaaaaataaactttcatattcatatttggtagaactgttaaccctagaaatgtagcttgctaataagatagaatgatacaaaagtgaagtagtagccacag

SEQ ID NO: 227756 - DNA, 1493 bp, Homo Sapiens
ttggcttccccagaaggagagattcctctgccatggagtcctacgatgtgatcgccaaccagcctgtcgtgatcgacaacggatccggtgtgattaaagctggttttgctggtgatcagatccccaaatactgctttccaaactatgtgggccgacccaagcacgttcgtgtcatggcaggagcccttgaaggcgacatcttcattggccccaaagctgaggagcaccgagggctgctttcaatccgctatcccatggagcatggcatcgtcaaggattggaacgacatggaacgcatttggcaatatgtctattctaaggaccagctgcagactttctcagaggagcatcctgtgctcctgactgaggcgcctttaaacccacgaaaaaaccgggaacgagctgccgaagttttcttcgagaccttcaatgtgcccgctcttttcatctccatgcaagctgtactcagcctttacgctacaggcaggaccacaggggtggtgctggattctggggatggagtcacccatgctgtgcccatctatgagggctttgccatgccccactccatcatgcgcatcgacatcgcgggccgggacgtctctcgcttcctgcgcctctacctgcgtaaggagggctacgacttccactcatcctctgagtttgagattgtcaaggccataaaagaaagagcctgttacctatccataaacccccaaaaggatgagacgctagagacagagaaagctcagtactacctgcctgatggcagcaccattgagattggtccttcccgattccgggcccctgagttgctcttcaggccagatttgattggagaggagagtgaaggcatccacgaggtcctggtgttcgccattcagaagtcagacatggacctgcggcgcacgcttttctctaacattgtcctctcaggaggctctaccctgttcaaaggttttggtgacaggctcctgagtgaagtgaagaaactagctccaaaagatgtgaagatcaggatatctgcacctcaggagagactgtattccacgtggattgggggctccatccttgcctccctggacacctttaagaagatgtgggtctccaaaaaggaatatgaggaagacggtgcccgatccatccacagaaaaaccttctaatgtcgggacatcatcttcacctctctctgaagttaactccactttaaaactcgctttcttgagtcggagtgtttgcgaggaactgcctgtgtgtgagtgcgtgtgtggatatgagtgtgtgcgcacatgcgagtgccgtgtggccctgggaccctgggcccagaaaggacgatgaactacccgcagtggtgatggcctgaggcctggggttgaccactaactgggctcctgacagggaagagcgctggcagaggctgtgctccctcctcagtggcctctggctgggctgtggggggactccgtttactaccacaggcagacagagggaag

SEQ ID NO: 227757 - DNA, 978 bp, Homo Sapiens
ttggccaagggtcagcacctcccctccggctccctccgctaccgcgggccggaacttttgtcgataggaacgggtttgcacagttgagtgttgtcggccggcgtgaaggagactagggggccatcctcttcctttcgccgtcgccgccgcggagcggagtcgagccgagctgatttgatcgaggagcgcggttaccggacgggctgggtctatggtcgctccgcgggccgctccgccggctggtgcttttttatcagggcaagctgtgttccatggcagggaacttttggcagagctcccactatttgcaatggattttggataaacaagatctgttgaaggagcgccaaaaggatttaaagtttctctcagaggaagaatattggaagttacaaatattttttacaaatgttatccaagcattaggtgaacatcttaaattaagacaacaagttattgccactgctacggtatatttcaagagattctatgccaggtattctctgaaaagtatagatcctgtattaatggctcctacatgtgtgtttttggcatccaaagtagaggaatttggagtagtttcaaatacaagattgattgctgctgctacttctgtattaaaaactagattttcatatgcctttccaaaggaatttccttataggatgaatcatatattagaatgtgaattctatctgttagaactaatggattgttgcttgatagtgtatcatccttatagacctttgctccagtatgtgcaggacatgggccaagaagacatgttgcttccccttgcatggaggatagtgaatgatacctacagaacggatctttgcctactgtatcctcctttcatgatagctttagcttgcctacatgtagcctgtgttgtacagcagaaagatgccaggcaatggtttgctgagctttctgtggatatggaaagattttggaaataatcaggttattttaaaa

SEQ ID NO: 227758 - DNA, 1486 bp, Homo Sapiens; identical to SEQ ID NO: 194236

SEQ ID NO: 227759 - DNA, 1311 bp, Homo Sapiens; identical to SEQ ID NO: 194237

SEQ ID NO: 227760 - DNA, 854 bp, Homo Sapiens
ctttgtacaaaaaagttgggataacggtcgaaaacgcgctcttgtcgatttcctgtagtgaatcaggcaccggagtgcaggttcgggggtggaatccttgggccgctgggcaagcggcgagacctggccagggccagcgagccgaggacagagggcgcgcggagggccgggccgcagccccggccgcttgcagaccccgccatggacccgttcctggtgctgctgcactcggtgtcgtccagcctgtcgagcagcgagctgaccgagctcaagttcctatgcctcgggcgcgtgggcaagcgcaagctggagcgcgtgcagagcggcctagacctcttctccatgctgctggagcagaacgacctggagcccgggcacaccgagctcctgcgcgagctgctcgcctccctgcggcgccacgacctgctgcggcgcgtcgacgacttcgaggcgggggcggcggccggggccgcgcctggggaagaagacctgtgtgcagcatttaacgtcatatgtgataatgtggggaaagattggagaaggctggctcgtcagctcaaaagtctcagacaccaagatcgacagcatcgaggacagatacccccgcaacctgacagagcgtgtgcgggagtcactgagaatctggaagaacacagagaaggagaacgcaacagtggcccacctggtggggggctctcagtcctgccagatgaacctggtggctgacctggtacaagaggttcagcaggccgtgacctccagaacaggagtggggccatgtccccgatgtcatggaactcagacgcatctacctcccgaaagcgtcctgatgggcagctgctttgcgctggtgg

SEQ ID NO: 227761 - DNA, 1090 bp, Homo Sapiens
  misc_feature (906)..(914): n is a, c, g, or t
ttggcttaatttaattaattatcatatgctttttttaatgaagtgcttgatcacttgcaaacatatatacatgtagatgtacatatacatgtacacatacacataaatattattgcaattaagtgatcaagtacagacacaataggggccagttttgtttaaggatcaaagagacaaccactttggggaattagtatcaacttacaatccaagtccaagtatcatcttataatcacttttttctactatattaagatctaatgaattggatttcttttttgaagttttttcttgtaacatctgagattagaagtttaagatgacttgaccccaaacctttgtttatgtaagaatttttaaacataaaagtgtttgtttctgttatgttaccataatttgatgtatatagtgtccagatccatttagaaatttaatatttattaataactgaaactgtttgtcttcctttggtatatagtctcgcatattatattatagcaggccaagataaaattttgacagctctttaagcccacatgcagcagtgggtcagataaccctgtggcagtgacacgggcaaattggcatttgaataaagccctgggaccacctcaacatgcgtagcctcttgtcttaaatgtactccccatggcagcatggaggaggcaagacctgtgggtcaattttgaactggccttactttgatttttaaaacaagagactcagggaaagtactaaaccaaaatctctgattttactttgcgttttctgtagtttttgttttactgagatgcttttgtaaaggaaaataatactgtgacagtttagtaattctacagattcttaatatttctccatcatggccttttacttcacaattttctgaagtctgaattcaattacaannnnnnnnnaccaatttaatctcaaatgttgtttaactgctttaaattcatatacgtagagtattataaactgcagagatgaaaaatgtgttttcacgggatttatattgtgaactaaactaagcctactttttgtgacttatttgtgatgccttgttgataaatatgtgtaataaagtatgttt

SEQ ID NO: 227762 - DNA, 751 bp, Homo Sapiens
  misc_feature (671)..(691): n is a, c, g, or t
ttggcaggagccgaagcagcagcgcaggttgtccccgtttcccctcccccttcccttctccggttgccttcccgggccccttacactccacagtcccggtcccgccatgtcccagaaacaagaagaagagaaccctgcggaggagaccggcgaggagaagcaggacacgcaggagaaagaaggtattctgcctgagagagctgaagaggcaaagctaaaggccaaatacccaagcctaggacaaaagcctggaggctccgacttcctcatgaagagactccagaaagggcaaaagtactttgactcaggagactacaacatggccaaagccaagatgaagaataagcagctgccaagtgcaggaccagacaagaacctggtgactggtgatcacatccccaccccacaggatctgccccagagaaagtcctcgctcgtcaccagcaagcttgcgggtggccaagttgaatgatgctgcccggggctctgccagatcctgagacgcttcccctccctgccccacccgggtcctgtgctggctcctgccccttcctgcttttgcagccaggggtcaggaggtggctcgggtgtgggctggagaggcagaagccctttcctgttggtgtcccagcacatggagccccttgggctgagcaccaagaccttgaacnnnnnnnnnnnnnnnnnnnnnccaaataacagttgggagaaatatcaatgaaattctggggggtgggggtgagggttgaaa

SEQ ID NO: 227763 - DNA, 684 bp, Homo Sapiens; identical to SEQ ID NO: 194241
  misc_feature (606)..(626): n is a, c, g, or t

SEQ ID NO: 227764 - DNA, 1287 bp, Homo Sapiens
tttgtacaaaaaagttggggcaggttgaccagtgagctcaggagagagcttcctgtttctaagtggcctgcaggggccactctctactggtaggaagaggtaccacaggaagccgcctagtgcagagaggttgtgaaaacagcagcaatgcaatgtggaaattgtagcgtttcctttcttccctcatgttctcatgtttgtgcatgtatattactgatttacaagactaacctttgttcgtatataaagttacaccgttgttgttttacatcttttgggaagccaggaaagcgtttggaaaacgtatcacctttcccagattctcggattctcgactctttgcaacagcacttgcttgcggaactcttcctggaatgcattcactcagcatccccaaccgtgcaacgtgtaacttgtgcttttgcaaaagaagttgatctgaaattcctctgtagaatttagcttatacaattcagagaatagcagtttcactgccaacttttagtgggtgagaaattttagtttaggtgtttgggatcggacctcagtttctgttgtttcttttatgtggtggtttctatacatgaatcatagccaaaaacttttttggaaactgttggttgagatagttggttcttttaccccacgaagacatcaagatacacttgtaaataaagctgatagcatatattcatacctgttgtacacttgggtgaaaagtatggcagtgggagactaagatgtattaacctacctgtgaatcatatgttgtaggaaaagctgttcccatgtctaacaggacttgaattcaaagcatgtcaagtggatagtagatctgtggcgatatgagagggatgcagtgcctttccccattcattcctgatggaattgttatactaggttaacatttgtaatttttttctagttgtaatgtgtatgtctggtaaataggtattatattttggccttacaataccgtaacaatgtttgtcattttgaaatacttaatgccaagtaacaatgcatgctttggaaatttggaagatggttttattctttgagaagcaaatatgtttgcattaaatgctttgattgttcatatcaagaaattgattgaacgttctcaaacccctgtttacggtacttggtaagagggagccggtttgggagagaccattgcatcgctgtccaagtgtttcttgttaagtgcttttaaactggagaggctaccctcaaaatattttttttaactgcattctataataaatgggacagtatgctccttac

SEQ ID NO: 227765 - DNA, 1171 bp, Homo Sapiens; identical to SEQ ID NO: 194242

SEQ ID NO: 227766 - DNA, 981 bp, Homo Sapiens; identical to SEQ ID NO: 194244

SEQ ID NO: 227767 - DNA, 973 bp, Homo Sapiens
tgccagaaggagtagcagccatccaccagcttgttgcagcggcctagaaaatcctcctttcaattcgcatctgccggcttgtcacccattgtaataagctcttcaagttcaaggaacgttccctcttgaggattaccagcgcggccaggccacagaaggtatagccaccatgggcttccatccctggtaccccgccaatgccaccttcccagttctgacaccttgctatccattcagcagtgccctcaaagaggtctggagtgatgatgttggtcagcgaggctacggaggcagcacagtatgcgcttctcacatccacctcacctccgacatgcatgagaaaggagccgtcaggttgcttcagggagtacaaatactgaagaagcttctctctgttaatgatgtcataggcctcctcggtgccaatgatgcacaatgcattgactgctgcatatgtgggtgcaaggtgtggatactgaccgggtcctcctccaaagccaccttctgggctctgacacagctccaggaactgacacacatctgtagccactatctgggggatgggttcatctagcagttccaagctgtgcaggatccaatagcagagccatgggcggctggcatccagacactcataggcatctgtcagttgtcgaaggcctcttttcagataatggaagtgcttctccctctgcaaaacaagccttggtacaaggtggttgaacttgtaagaactgaagacctcttggatcttttcttctacttttgcctgttctatggacgtgactgtttccaccgagtcgtcctgcaaccgctctcgcgcgtgctcgggcctcagactgtacagcggctctgaccagacgggggaggaagatggagggcaatagtaggtgaaagaactcggagaagccatgatcaggagagcagcagacagtgtgtaggactctgcttcgttaagcaacaacgcgcccaa

SEQ ID NO: 227768 - DNA, 1555 bp, Homo Sapiens
ttgggtttaagaggcgtaagccaggcgtgttaaagccggtcggaactgctccggagggcacgggctccgtaggcaccaactgcaaggacccctccccctgcgggcgctcccatggcacagttcgcgttcgagagtgacctgcactcgctgcttcagctggatgcacccatccccaatgcaccccctgcgcgctggcagcgcaaagccaaggaagccgcaggcccggccccctcacccatgcgggccgccaaccgatcccacagcgccggcaggactccgggccgaactcctggcaaatccagttccaaggttcagaccactcctagcaaacctggcggtgaccgctatatcccccatcgcagtgctgcccagatggaggtggccagcttcctcctgagcaaggagaaccagcctgaaaacagccagacgcccaccaagaaggaacatcagaaagcctgggctttgaacctgaacggttttgatgtagaggaagccaagatccttcggctcagtggaaaaccacaaaatgcgccagagggttaccagaacagactgaaagtactctacagccaaaaggccactcctggctccagccggaagacctgccgttacattccttccctgccagaccgtatcctggatgcgcctgaaatccgaaatgactattacctgaaccttgtggattggagttctgggaatgtactggccgtggcactggacaacagtgtgtacctgtggagtgcaagctctggtgacatcctgcagcttttgcaaatggagcagcctggggaatatatatcctctgtggcctggatcaaagagggcaactacttggctgtgggcaccagcagtgctgaggtgcagctatgggatgtgcagcagcagaaacggcttcgaaatatgaccagtcactctgcccgagtgggctccctaagctggaacagctatatcctgtccagtggttcacgttctggccacatccaccaccatgatgttcgggtagcagaacaccatgtggccacactgagtggccacagccaggaagtgtgtgggctgcgctgggccccagatggacgacatttggccagtggtggtaatgataacttggtcaatgtgtggcctagtgctcctggagagggtggctgggttcctctgcagacattcacccagcatcaaggggctgtcaaggccgtagcatggtgtccctggcagtccaatgtcctggcaacaggagggggcaccagtgatcgacacattcgcatctggaatgtgtgctctggggcctgtctgagtgccgtggatgcccattcccaggtgtgctccatcctctggtctccccattacaaggagctcatctcaggccatggcattgcacagaaccagctagttatttggaagtacccaaccatggccaacggtggctgaactcaaaggtcacacatcccgggtcctgagtctgaccatgagccaagatggggccacagtggcatccgcagccgccagatgataccctgacgctatgggcgctgttttgagttggaccctgcgcggcggc

SEQ ID NO: 227769 - DNA, 448 bp, Homo Sapiens; identical to SEQ ID NO: 194246

SEQ ID NO: 227770 - DNA, 880 bp, Homo Sapiens
ttggcgctggagtcggcgcgggtgctggcgccatggaggccgagcggggtcccgagtgccggcctgcggagcgtagcagcccgggccagacgccggaggagggcgcgcaggccttggccgagttcgcggcgctgcacggcccggcgctgcgcgcttcgggggtccccgaacgttactggggccgcctcctgcacaagctggagcacgaggttttcgacgctggggaagtgtttgggatcatgcaagtggaggaggtagaagaggaggaggacgaggcagcccgggaggtgcggaagcagcagcccaacccggggaacgagctgtgctacaaggtcatcgtgaccagggagagcgggctccaggcagcccaccccaacagcatcttcctcatcgaccacgcctggacgtgccgtgtggagcacgcgcgccagcagctgcagcaggtgcccgggctgctgcaccgcatggccaacctgatgggcattgagttccacggtgagctgcccagtacagaggctgtggccctggtgctggaggagatgtggaagttcaaccagacctaccagctggcccatgggacagctgaggagaagatgccggtgtggtatatcatggacgagttcggttcgcggatccagcacgcggacgtgcccagcttcgccacggcacccttcttctacatgccgcagcacgtggcctacacgctgctgtggcccctgagggacctggacactggcgaggaggtgacccgagactttgcctatggagagacggaaccccctgatccggaagtgcatgctgctgccctggggcccccaccgacatgctgggacctcagctcttgcacaccccgagccgcccgcccgagcactaccaggcc

SEQ ID NO: 227771 - DNA, 1183 bp, Homo Sapiens
ttgggtgtctgacgtctatcagcttaaggtggacagcagcaccaactcaagccccagcccccagcagagtgagtccctgagcccagcacacacctccgacttccgcacggatgactcccagcccccaacgctgggccaggagatcctggaggagccctccctgccctcctcggaagttgctgatgaacctcctaccctcaccaaggaagaaccagttccactagagacacaggtcgttgaggaagaggaagactcaggtgccccgcccctgaagcgcttctgtgtggaccaacccacagtgccgcagacggcgtcagaaagctagcaccatcccggccctccgcctcctggccctgcctctatttattgcattctggttctggccgcgccgcgttgctggggtaagggcaagcactggggtcaagagcctgcacacatgagccttccgggctggaaggctggcgtaggacttggggctgtagcatcatcttcctgaccttggcacctgtgtctacttgctcccgagaagaggagcgctcatgtcttttttgcaccccaagttggctggagcatcggccaccccaagattcatctgtgacctccaggcagcagtctctgctccagaatctctggacggagctgctggcagcttctgcgagaagagagagatgtggaaggcaccttctagaagagagcgtgcctcaggttacttgaacttgaacggagactgtagactcccggactttcccctaggactgggggccctgtaggctgctgttggaggactgggtagagacattggagggaagggaagggcttttctccacacaagggcagagagtccgtctagatttcttgctgtcctgccagctctgcccatgcctgaggtggtcctacctctctcgggcaccctagctgctgacagccctttgtggccgccgtccccatcccctgccctcagcacacacatctgcacacacgcagctttgttctcacctctacctgtcattccagcatccctgcctcttgtcacaaactgccccaacaagaatttgaggttctgacaacagtacccatcccccacagtaccccttcagctcagtttctagaaagctcccttttctttgaaatctgcatgttgaattgaactttgtgattttattttttgtttcaaaaaagttta

SEQ ID NO: 227772 - DNA, 872 bp, Homo Sapiens
acaaaaaagttggcggaggtcgctgcggcggtgggaaatgctggcgcgcgcggcgcggggcactggggcccttttgctgaggggctctctactggcttctggccgcgctccgcgccgcgcctcctctggattgccccgaaacaccgtggtactgttcgtgccgcagcaggaggcctgggtggtggagcgaatgggccgattccaccggatcctggagcctggtttgaacatcctcatccctgtgttagaccggatccgatatgtgcagagtctcaaggaaattgtcatcaacgtgcctgagcagtcggctgtgactctcgacaatgtaactctgcaaatcgatggagtcctttacctgcgcatcatggacccttacaaggcaagctacggtgtggaggaccctgagtatgccgtcacccagctagctcaaacaaccatgagatcagagctcggcaaactctctctggacaaagtcttccgggaacgggagtccctgaatgccagcattgtggatgccatcaaccaagctgctgactgctggggtatccgctgcctccgttatgagatcaaggatatccatgtgccaccccgggtgaaagagtctatgcagatgcaggtggaggcagagcggcggaaacgggccacagttctagagtctgaggggacccgagagtcggctatcaatgtggcagaagggaagaaacaggcccagatcctggcctccgaagcagaaaaggctgaacagataaatcaggcagcaggagaggccagtgcagttctggcgaaggccaaggctaaagctgaagctattcgaatcctggctgcagctctgacacaacataatggagatgcagcagcttcactgactgtgg

SEQ ID NO: 227773 - DNA, 1067 bp, Homo Sapiens; identical to SEQ ID NO: 194251

SEQ ID NO: 227774 - DNA, 1436 bp, Homo Sapiens
ttggatcagccaggccccgaggctgatgacctcccaaagacagctgctcagctcaagaaagaggcaaagaaacgggagaagctagagaaattccaacagaagcagaagatccaacagcagcagccacctccaggggagaagaaaccaaaaccagagaagagggagaaacgggatcctggggtcattacctatgacctcccaaccccacccggggaaaagaaagatgtcagtggccccatgcccgactcctacagccctcggtatgtggaggctgcctggtacccttggtgggagcagcagggcttcttcaagccagagtatgggcgtcctaatgtgtcagcagcaaatccccgaggtgtcttcatgatgtgcatcccaccccccaatgtgacaggctccctgcacctgggccatgcactcaccaacgccatccaggactccctgactcgatggcaccgcatgcgtggggagaccaccctgtggaaccctggctgtgaccatgcaggtattgccacccaggtggtggtggagaagaagctatggcgtgagcagggactgagccggcaccagctgggccgcgaggcctttctacaggaagtctggaagtggaaggaggagaaaggtgaccggatttaccaccagttgaagaagcttggcagctccttggactgggatcgagcctgtttcaccatggaccctaaactctcagcagctgtgacagaggcctttgtccggcttcacgaggaaggcatcatctatcgcagtacccgccttgttaactggtcctgcaccctcaactccgccatctctgacattgaggtggataagaaggagctgacaggtcgcaccctgctctccgtgcctggctacaaggagaaggtggagttcggggtcctcgtgtcctttgcctataaggtccaaggctcagatagcgacgaggaggtggtggtggcaacaactcggatcgagacaatgctgggagatgtggctgtagctgtgcaccccaaagataccagataccagcacctgaaggggaagaacgtgatccacccattcctgtctcggagccttcccattgtcttcgatgaatttgtggacatggactttggcacaggtgctgtgaagatcacccccgcacatgaccaaaatgactatgaagttgggcagcggcacgggctggaggccatcagcatcatggactcccggggggccctcatcaatgtgcctccgcctttcctgccggtcgaaggacgtggtagagcctctgctgcggccgcagtggtacgttcgctgcggggagatggcccaggctgccagcgccgctgtgactcggggtgacctccgcatcctgcctgaggcccatcagcgcacatggcatgcctggatggacaacatccgggagtggtgcatttccaggcagctgtggtggggtcatc

SEQ ID NO: 227775 - DNA, 931 bp, Homo Sapiens
ttgggacagacagacggatctaacctctcttggatcctccagccatgaggctgctctgggggctgatctgggcatccagcttcttcaccttatctctgcagaagcccaggttgctcttgttctctccttctgtggttcatctgggggtccccctatcggtgggggtgcagctccaggatgtgccccgaggacaggtagtgaaaggatcagtgttcctgagaaacccatctcgtaataatgtcccctgctccccaaaggtggacttcacccttagctcagaaagagacttcgcactcctcagtctccaggtgcccttgaaagatgcgaagagctgtggcctccatcaactcctcagaggccctgaggtccagctggtggcccattcgccatggctaaaggactctctgtccagaacgacaaacatccagggtatcaacctgctcttctcctctcgccgggggcacctctttttgcagacggaccagcccatttacaaccctggccagcgggttcggtaccgggtctttgctctggatcagaagatgcgcccgagcactgacaccatcacagtcatggtggagaactctcacggcctccgcgtgcggaagaaggaggtgtacatgccctcgtccatcttccaggatgactttgtgatcccagacatctcagagccagggacctggaagatctcagcccgattctcagatggcctgaatccaacagcagcacccagtttgaggtgaagaaatatgtccttcccaactttgaggtgaagatcacccctggaaagccctacatcctgacggtgccaggccatcttgatgaaatgcagttagacatccaggccaggtacatctatgggaagccagtgcaagggggtggcatatgtgcgctttgggctcctagatgaggatggtaagagactttcttt

SEQ ID NO: 227776 - DNA, 980 bp, Homo Sapiens
gccaactttgtacaaaaaagttggaaggaatctcactaggggcttgactgcgtgggtctgtagcgctttcactgtaagaaagcaagatgcattttagaaactttaactacagttttagctccctgattgcctgtgtggcaaacagtgatatcttcagcgaaagtgaaaccagggccaaatttgagtccctctttaggacgtatgacaaggacatcacctttcagtattttaagagcttcaaacgagtcagaataaacttcagcaaccccttctccgcagcagatgccaggctccagctgcataagactgagtttctgggaaaggaaatgaagttatattttgctcagaccttacacataggaagctcacacctggctccgccaaatccagacaagcagtttctgatctcccctcccgcctctccgccagtgggatggaaacaagtggaagatgcgaccccagtcataaactatgatctcttatatgccatctccaagctggggccaggggaaaagtatgaattgcacgcagcgactgacaccactcccagcgtggtggtccatgtatgtgagagtgatcaagagaaggaggaagaagaggaaatggaaagaatgaggagacctaagccaaaaattatccagaccaggaggccggagtacacgccgatccacctcagctgaactggcacgcgacgaggacgcattccaaatcatactcacgggaggaatcttttactgtggaggtggctggtcacgacttcttcggaggtggcagccgagatcggggtggcagaaatcccagttcatgttgctcagaagagaatcaaggccgtgtccccttgttctaatgctgcacaccagttactgttcatggcacccgggaatgacttgggccaatcactgagtttgtggtgatcgcacaaggacatttgggactgtcttgaaaaaacagataatgatagtgttttgtacttgttcttt

SEQ ID NO: 227777 - DNA, 944 bp, Homo Sapiens
ccacaaagcaccaagattctgttcttcattcagcaaccacccatgagctctgcttttattccaatcgcatggcaccagccttgaaaacctctctcccttttgagaggaatgctggaatgacactccactctgcccctccctccctcttccttgctcagggtccatgtgaacagcaggccattgttgggaagtgcctgttgcagtcattcttacacccccacagccactgccccacacacccactggtggctaccaaggcccgtcaatagatcttgtgtccaccgagccctggtgtccaggtccagcagccagacaggctgaaggttccctcctgccatcacagagtagccaagcactacaaagaggttttcatggccagattcctgacggctggccccttacagggcagatcctgtccttacaggtgtcaaggttggagggtcctgggtcctccatgaccctggggggttgctggtcccccatcttggttcttgagtctcatcctttcaagatgaccttgagagctttaagctcatcctggttgagggggttcaagttaaaacccttcagctccggtttgccttgggcctcaaaaaggcggttgaccttcactttaagttgcttccgcagtttttctatttctttatccagatgatcttgatctttttcaatcatttcctttgtctcagggtgaggcatcttgataaacatgttcccgaagcaaaccatcacatcttcagagaggctgagatccttctgcagggccctcaggccctctcgattctgattccttttagtgtccaggtccacaatctgccgcttgtccgccagcacctcctcggcgagctcctccacttctacaaggtaccgcagcactcgctctgcctcgggtgatagcatagcgcccaccaactccgcttgcggctctcgcgcgaccccgccaa

SEQ ID NO: 227778 - DNA, 1054 bp, Homo Sapiens
ttggctccatccccggtgaaaactgcgggctccgagctgggtgcagcaaccggaggcggcggcgcgtctggaggaggctgcagcagcggaagaccccagtccagatccaggactgagatcccagaaccatgaacctggccatcagcatcgctctcctgctaacagtcttgcaggtctcccgagggcagaaggtgaccagcctaacggcctgcctagtggaccagagccttcgtctggactgccgccatgagaataccagcagttcacccatccagtacgagttcagcctgacccgtgagacaaagaagcacgtgctctttggcactgtgggggtgcctgagcacacataccgctcccgaaccaacttcaccagcaaatacaacatgaaggtcctctacttatccgccttcactagcaaggacgagggcacctacacgtgtgcactccaccactctggccattccccacccatctcctcccagaacgtcacagtgctcagagacaaactggtcaagtgtgagggcatcagcctgctggctcagaacacctcgtggctgctgctgctcctgctctccctctccctcctccaggccacggatttcatgtccctgtgactggtggggcccatggaggagacaggaagcctcaagttccagtgcagagatcctacttctctgagtcagctgaccccctccccccaatccctcaaaccttgaggagaagtggggaccccacccctcatcaggagttccagtgctgcatgcgattatctacccacgtccacgcggccacctcaccctctccgcacacctctggctgtctttttgtactttttgttccagagctgcttctgtctggtttatttaggttttatccttccttttctttgagagttcgtgaaaagggaaacccagaattggggacctgatggagagtgagagcatgtgaggggtagttgggatggtggggtaccagccactggaggggtcatccttgcccatcgggaccagaaaccttgggagagacttggatgaggagtggttgggctgtgcct

SEQ ID NO: 227779 - DNA, 731 bp, Homo Sapiens
ctttgtacaaaaaagttggctgagtatgagcacaatagcatgacggagatcatgtccatgggctatgagcgagagcgggtcgtggccgccctgagagccagctacaacaacccccaccgagccgtggagtatctgctcacgggaattcctgggagccccgagccggaacacggttctgtccaggagagccaggtatcggagcagccggccacggaagcaggagagaaccccctggagttcctgcgggaccagccccagttccagaacatgcggcaggtgattcagcagaaccctgcgctgctgcccgccctgctccagcagctgggccaggagaaccctcagcttttacagcaaatcagccggcaccaggagcagttcatccagatgctgaacgagccccctggggagctggcggacatctcagatgtggagggggaggtgggcgccataggagaggaggccccgcagatgaactacatccaggtgacgccgcaggagaaagaagctatagagaggttgaaggccctgggcttcccagagagcctggtcatccaggcctatttcgcgtgtgaaaaaaatgagaacttggctgccaacttcctcctgagtcagaactttgatgacgagtgatgccaggaagccaggccaccgaagcccccaccctacccttattccatgaaagttttataaaagaaaaaatatatatatattcatgtttatttaagaaatgg

SEQ ID NO: 227780 - DNA, 902 bp, Homo Sapiens; identical to SEQ ID NO: 194255

SEQ ID NO: 227781 - DNA, 1188 bp, Homo Sapiens; identical to SEQ ID NO: 194256

SEQ ID NO: 227782 - DNA, 983 bp, Homo Sapiens
ctttgtacaaaaaagttggatcagcaggacgctgcgcacaacatgggcaaccacctgccgctcctgcctgcagagagtgaggaagaagatgaaatggaagttgaagaccaggatagtaaagaagccaaaaaaccaaacatcataaattttgacaccagtctgccgacatcacatacatacctaggtgctgatatggaagaatttcatggcaggactttgcacgatgacgacagctgtcaggtgattccagttcttccacaagtgatgatgatcctgattcccggacagacattacctcttcagctttttcaccctcaagaagtcagtatggtgcggaatttaattcagaaagatagaacctttgctgttcttgcatacagcaatgtacaggaaagggaagcacagtttggaacaacagcagagatatatgcctatcgagaagaacaggattttggaattgagatagtgaaagtgaaagcaattggaagacaaaggttcaaagtccttgagctaagaacacagtcagatggaatccagcaagctaaagtgcaaattcttcccgaatgtgtgttgccttcaaccatgtctgcagttcaattagaatccctcaataagtgccagatatttccttcaaaacctgtctcaagagaagaccaatgttcatataaatggtggcagaaataccagaagagaaagtttcattgtgcaaatctaacttcatggcctcgctggctgtattccttatatgatgctgagaccttaatggacagaatcaagaaacagctacgtgaatgggatgaaaatctaaaagatgattctcttccttcaaatccaatagatttttcttacagagtagctgcttgtcttcctattgatgatgtattgagaattcagctccttaaaattggcagtgctatccagcgacttcgctgtgaattagacattatgaataaatgtactttccttttgctgtaaacaatgtc

SEQ ID NO: 227783 - DNA, 1410 bp, Homo Sapiens; identical to SEQ ID NO: 194259
  misc_feature (851)..(860): n is a, c, g, or t

SEQ ID NO: 227784 - DNA, 1233 bp, Homo Sapiens; identical to SEQ ID NO: 194260

SEQ ID NO: 227785 - DNA, 886 bp, Homo Sapiens
gatcagactgagtattcccctagactactctagggaagcccatagctgaggcaaaatccccaaacagacttggcattagtggggctaggattctccattagtggagtgagggctttgatgtgagttgtctagaagagcaagttcatggtcagataattccaagagacagttgttttcccaggaaaaagaaaagcttcctcctattcagcagagtgaatttaaatgtccaaacaaagtgtggtgtcatcgctcagtctgcaaggacgttctgttaatcccgtggacgttttagtggatcttccgtttgtcatccagatggcaaacgttggaagctgcttttggggaccaataattggagctttcaaagagcatttcccccttggcctggcgcctgtgcatcagtggtaatagatgctgaaggcatggagaatgtagagcagcgtggcgatgaaggcgaagaacgaggctgccgaattaatgtagtaaattcttgggtccagcagtttctcagaaacaatcgtggcatgtacttgtaggacggcagcgctcatgtacaggatgccagtggtcccgtggtacaggctgtccagaactctccaggattcaaatcttttgtaaaatccaaacaagtaagacaacaggaacatcaaggagatgagaaacgaggtgagcgagacatacatcacccatccttgcagcaaggggtatactatgtgggtggcggctaccatggtccagaccaagaacccaaatatcagctcgggcaggaagaaggcgaaagggatggtgaggaacagcgcgacccccgagggcacgtcggacggggcgtagctggtggcgggcgggtcgggcgaggccatgctgtcagcccctgccgggtgcccaa

SEQ ID NO: 227786 - DNA, 689 bp, Homo Sapiens
ttggggccgctcttcctggggttgtttctccgtgtgacgtgtggcctttgagatcaactctcctgtaccagcgtaggccgcatgagtggggggcgggctcccgcggtcctgctcggcggagtggtgagtgaccggccccgccccgccccttccggtcctcaaagcctcgaccgctacccgcaccctaaatcccagaggttggccccctgaggtgtgagtgaaatgagcttttgctttattttccaagtttctctctcaccttcaggggcattcttcgggggtgcatcagagggagggcagagcctgaggatctaagcgaaggcttccccgggtgtaatttcctgggctgtttgtgaggagagatcgaattcgcctcctgctctcaggcctctctgctcctgtcttttgtttggatgccggcgctgctgcctgtggcctcccgccttttgttgctaccccgagtcttgctgaccatggcctctggaagccctccgacccagccctcgccggcctcggattccggctctggctactttccgggctcggtctctgcagcctttgttacttgccccaacgagaaggtcgccaaggagatcgccagggccgtggtggagaagcgcctagcagcctgcgtcaacctcatccctcacattacatccttctatgagtggaatgggaagatcgaggaa

SEQ ID NO: 227787 - DNA, 569 bp, Homo Sapiens; identical to SEQ ID NO: 194263

SEQ ID NO: 227788 - DNA, 980 bp, Homo Sapiens
gtgggggccccttgcagggatgggaacacggcaaagttgattcggtcctcaaatgtgtaagggatctcccggccagtcttggggtccacagccttcacccctttccggtagaagatgagccctgacctggcccctcgaagagtcttgtgagtagtggtggtgacgatgtccgcgtgcttgaaaggcgagggaatcaccttggcagccaccaggccactgatgtgggccatgtctgccagcaggtgtgctttgacttcatcacacacctctctcatgcgggcgtagtcaatgaggcgagcataggcgctggtgccagctatgatgagccgtggccggaaaagtcgagcagtcagtgccagctggttgtagtcaatgaggccagttttggggttgagcttatagggcatagactcgaagaagatggacgtggctgatatccgcttgacgtcagacatgtagccgtgggtgagatggcccccatcgggcaggtccagccccatgatccggtcgtgaggttgcagaagggctgtgtagacggccaggttggctggggacccggagtagggctggacattgactccccactgtgcaggatccaggtcaaaggcttccaaggcccggcgctggcacagcagctcaatttcatccaccacctctgctcccccatagtatctcttgccaggataaccctccgagtacttgttgttcagacaggaccccagggcctccagcgcagctcggctgcagaagttctctgaggcaatgagctccaggccacgacactgcctgtccttctccctctgcagcaactcccacatctcaggatcactgtccgacaggctctcctggcctgtccagcccctgtttgcttccccagtctgagtctgggctgcgttgctgtgctgagcccgaatggccatcctgaccagctgcccacatctctgcagaggccgagccgcccaaaacaaagagcaagccaa

SEQ ID NO: 227789 - DNA, 660 bp, Homo Sapiens
actgtacccggcctgctctaccgcttttaaggacgcttatgatcacattgcgcctacccagagaacccaggtcgtctttctattttcaggtcagctgattagccaccttagttccatctgcaactttagttcccactggctgtgtaacctaacatagtcacaggctctggggactgtcacgtggacatctttgggaggccgttattctgcccaccgcaccctccgttcatcccctgccctgccgggcacctcgctctaccccaggaaaatgtgagctcgttttcctgctcggcatgtgctccccctaaggctctgctcctccctgggcctgaaagttccttctcagcctgagagggggcccttcgatctcaggcatgactcagcccggctgatgcctctgcagtgctgagtcaggatttggggccggctctcttgggtccttccccttttcccaggtactgccttacaaagctgtggccaggaagtggccggtataaaggatgcccaaggtctttgtacgtgtataggagttaacgtgtttgatattgttaatataataataattattttttagagtactgcttttgtatgtatgttgaacaggatcccaggtttttatagcttgatatataacagaattcaaacaaaacgagcaacaac

SEQ ID NO: 227790 - DNA, 925 bp, Homo Sapiens; identical to SEQ ID NO: 194268

SEQ ID NO: 227791 - DNA, 759 bp, Homo Sapiens
  misc_feature (73)..(81): n is a, c, g, or t
  misc_feature (383)..(410): n is a, c, g, or t
ttggcatctatttttgtttgggaagaggaaactccgaaatgggatcgcggaagacttaaagggccaggctgannnnnnnnncctactggtctctgaggctgtggttgctacagggtcaccacgagcttggcttacttgtctcatccttcccttgcctggtatcattttctcagttctcccaaaagccatgtcccggcccttgctcatcaccttcaccccagccactgaccccagcgacctctggaaggatgggcagcagcagccacagcccgagaagccagagtccaccctggatggggctgcagcccgagctttctatgaggccctgattggggatgagagcagcgctcctgactcccagagatctcagactgaacctgccnnnnnnnnnnnnnnnnnnnnnnnnnnnntaatgaaggcaccagcagcagaacttaggagactgctggaaccgcatgaggcaggaggagctggggggaatatcaacgcccgggatgccttctggtggaccccactgatgtgtgctgctcgagcgggccagggggcagctgtggctatctcctgggccgtggggctgcctgggtgggggtctgtgagctgagtggcagggatgcggctcagctcgctgaagaagctggcttccctgaggtagcccgcatggtcagggagagccatggagagacaaggagccccggaaaaccggtctcctactccctccctccagtactgcgagaactgtgacacccacttccaagattc

SEQ ID NO: 227792 - DNA, 812 bp, Homo Sapiens
tgtacaaaaagttggcagtctccttccacaaaaccatggcgtcgctcaaatgtagcaccgtcgtctgcgtgatctgcttggagaagcccaaataccgctgtccagcctgccgcgtgccctaaacagtgcaaccctgaaactcgtcctgttgagaaaaaaataagatcagctcttcctaccaaaaccgtaaagcctgtggaaaacaaagatgatgatgactctatagctgattttctcaatagtgatgaggaagaagacagagtttctttgcagaatttaaagaatttaggggaatctgcaacattaagaagcttattgctcaatccacacctcaggcagttgatggtcaacctcgatcagggagaagacaaagcaaagctcatgagagcttacatgcaagagcctttgtttgtggagtttgcagactgctgtttaggaattgtggagccatcccagaatgaggagtcttaagatggattattgtgctgcttgctcaagcgtgtgcttgactcctggaacctgcctgctccctctcccagaccagctagtttggggctggggagctcaggcaaaagaggtttccaggatgcagattaggtcatgcaggcctttaccggcattgatgtggctcatgtttcaggcagacttggggtccttaaggtggcaagtcctttatggagagaaaacttgacattcagatgattgtttttaaatgttttacttttggtacagttgatagacatcataaacgatatcaagcttacacttcatatggagttaaacttggtcagtgttaataaaatcaaaacgtg

SEQ ID NO: 227793 - DNA, 1470 bp, Homo Sapiens
  misc_feature (77)..(90): n is a, c, g, or t
cctgtacagagggatcagagtccaggctcctttctatagggttgaatatcagaggggaatagcaaatgaccccgatnnnnnnnnnnnnnnccaaaggctagattctttctgcaaggtggaggacggctagaaggcagtggccacagatgagcaggactttttctagactggtttctacaatttttggctttgttcagggcccacccaagaagaaaatactcctggatccttcaactagccctcaggtagacacatgttagaacagcctgtcacgtcctgaagcatcactcccctgcctagaggagtgaggcagggagactcccaggcaggtggcccctagtgcctggggtccaaagaaatattcttctcagggctttgaagcaccacgtgaacctgattctactcatgatacaatctggggaaagggattagtacagttcatttctagaagttatcttgttcagtttcaaagccttgttctcactggagccacagaaaatcagtggattctactcaagggacagtctaaattctattctgtgtactcctgccctggccatactccaatccagaccaccgggctcagcaacaggctcagctgactacccagccagccaggcacaagttccacaccttctaaacttgttcttctaatgattggtatgtatgtgtctaactggataaggtgtggcatggagatgggtagaggtgggatgaggagtggagaggtgtctaccaagaatggctgacactctcagaaatgtttgtccttctctcttaatggaaaatctctccatgtggtaaccccacatcccagcccctagtaccacagtcctgttgggccagggcttcatgaccctttctgtgaaaagccatattatcaccaccccaaatttttccttaaatatctttaactgaaggggtcagcctcttgactgcaaagaccctaagccggttacacagctaactcccactggccctgatttgtgaaattgctgctgcctgattggcacaggagtcgaaggtgttcagctcccctcctccgtggaacgagactctgatttgagtttcacaaattctcgggccacctcgtcattgctcctctgagataaaatccggagaatggtcaggcctgtctcatccatatggatcttccggcccaaggggcaccagcaggcacagctgcccttggctgtgacatccctcagaggcatcacagccagccctagcacgcgatcttcccgggcaaagcagtaatccttcacgcatatctgcaactcataggactcgggcccctcctcatttcccaggaggaagtggaatgtctcattgtacttgggggcccagttgttgcttttggatttggttgtgaacttcctcttcttatcactttggtgtgggccaaccatagtcacctccacgaaaggccggaacatacccgctgtctgccacttgaggtcattggcccaa

SEQ ID NO: 227794 - DNA, 924 bp, Homo Sapiens
cctcagcagcgagggcagggagagaagtcagccacgccctcacggaagattctggaccctaacactggggagccagctcccgtgctgtcctccccacctcctgcagacgtctccaccttcctggcttttccctctccagagaagctgctgcgcctagggcccaagagctccgtgctgatagcccagcagactgacacgtctgaccccgagaaggtggtctctgccttcctaaaggtgtcatctgtgttcaaggacgaagctactgtgaggatggcagtgcaggatgcagtagatgccctgatgcagaaggctttcaactcctcgtccttcaactccaacaccttcctcaccaggctcctcgtgcacatgggtctgctcaagagtgaagacaaggtcaaggccattgccaacctgtacggccccctgatggcgctgaaccacatggtgcagcaggactatttccccaaggcccttgcacccctgctgctggcgttcgtgaccaagcccaacagcgccctggaatcctgctccttcgcccgccacagtctgctgcagacgctgtacaaggtctagactcaaagcctctcccatcccttggcctggaccagtgagctggggagggactcggatgaactgaggcgcagcctacgccattgccttggacaggactctggccacaggcagggcgggtctgtgtcccatgtgtcctgtcagtcccctgagtatgtgtgtgggtgtggcgcatgtgcaggtctgtgcctcctgtcgggatttgggttttaacgtcttctgctggcccagccctgctctgttgtggggagttggcccccaggggaaagggctgtgagctgctccgccattaaactcacctccacctgagggcgctctgctgatctccgcctgggccctgatgggcgtccccac

SEQ ID NO: 227795 - DNA, 956 bp, Homo Sapiens
actttgtacaaaaaagttggccatggccagctatccttaccggcagggctgcccaggagctgcaggacaagcaccaggagcccctccgggtagctactaccctggaccccccaatagtggagggcagtatggtagtgggctaccccctggtggtggttatgggggtcctgcccctggagggccttatggaccaccagctggtggagggccctatggacaccccaatcctgggatgttcccctctggaactccaggaggaccatatggcggtgcagctcccgggggcccctatggtcagccacctccaagttcctacggtgcccagcagcctgggctttatggacagggtggcgcccctcccaatgtggatcctgaggcctactcctggttccagtcggtggactcagatcacagtggctatatctccatgaaggagctaaagcaggccctggtcaactgcaattggtcttcattcaatgatgagacctgcctcatgatgataaacatgtttgacaagaccaagtcaggccgcatcgatgtctacggcttctcagccctgtggaaattcatccagcagtggaagaacctcttccagcagtatgaccgggaccgctcgggctccattagctacacagagctgcagcaagctctgtcccaaatgggctacaacctgagcccccagttcacccagcttctggtctcccgctactgcccacgctctgccaatcctgccatgcagcttgaccgcttcatccaggtgtgcacccagctgcaggtgctgacagaggccttccgggagaaggacacagctgtacaaggcaacattcggctcagcttcgaggacttcgtcaccatgacagcttctcggatgctatgacccaaccatctgtggagagtggagtgcaccagggacctttcctggcttcttagagtgagagaagtatgtggacatctct

SEQ ID NO: 227796 - DNA, 837 bp, Homo Sapiens; identical to SEQ ID NO: 194274
  misc_feature (538)..(593): n is a, c, g, or t
  misc_feature (674)..(712): n is a, c, g, or t

SEQ ID NO: 227797 - DNA, 1003 bp, Homo Sapiens; identical to SEQ ID NO: 194278

SEQ ID NO: 227798 - DNA, 1553 bp, Homo Sapiens
  misc_feature (155)..(218): n is a, c, g, or t
  misc_feature (251)..(311): n is a, c, g, or t
ttgggtctggggacaactatcctccccccaaccctggatatccgggggggccccagccacccatgcccccctatgctcagcctccctaccctggggccccttacccacagccccctttccagccctccccctacggtcagccagggtacccccannnnnnnnnnnnnnnnnnnnnnnnnnnnnnnnnnnnnnnnnnnnnnnnnnnnnnnnnnnnnnnncagggcccctacccacaagagggctacccacannnnnnnnnnnnnnnnnnnnnnnnnnnnnnnnnnnnnnnnnnnnnnnnnnnnnnnnnnnnnaacccctatggacagccacaggtcttcccaggacaagaccctgactgtgagtctcaggaagggaggggtggggtggccgggagggcagggggaggtgcttgtgagtggcgctgacccagcctgtctgcttctcagcaccccagcatggaaactaccaggaggagggtcccccatcctactatgacaaccaggacttccctgccaccaactgggatgacaagagcatccgacaggccttcatccgcaaggtgttcctagtgctgaccttgcagctgtcggtgaccctgtccacggtgtctgtgttcacttttgttgcggaggtgaagggctttgtccgggagaatgtctggacctactatgtctcctatgctgtcttcttcatctctctcatcgtcctcagctgttgtggggacttccggcgaaagcacccctggaaccttgttgcactgtcggtcctgaccgccagcctgtcgtacatggtggggatgatcgccagcttctacaacaccgaggcagtcatcatggccgtgggcatcaccacagccgtctgcttcaccgtcgtcatcttctccatgcagacccgctacgacttcacctcatgcatgggcgtgctcctggtgagcatggtggtgctcttcatcttcgccattctctgcatcttcatccggaaccgcatcctggagatcgtgtacgcctcactgggcgctctgctcttcacctgcttcctcgcagtggacacccagctgctgctggggaacaagcagctgtccctgagcccagaagagtatgtgtttgctgcgctgaacctgtacacagacatcatcaacatcttcctgtacatcctcaccatcattggccgcgccaaggagtagccgagctccagctcgctgtgcccgctcaggtggcacggctggcctggaccctgcccctggcacggcagtgccagctgtacttcccctctctcttgtccccaggcacagcctagggaaaaggatgcctctctccaaccctcctgtatgtacactgcagatacttccatttggacccgctgtggccacagcatggcccctttagtcctcccgcccccgccaaggggcaccaaaggccacgtttccgtgccacctcctgtctactcattgttgcatgagccctgtctgccagcccaccccacggactggggggcagcccaggtcccgggggagagggattgagcccagaggtgagggtgcacgtcttccctcc

SEQ ID NO: 227799 - DNA, 403 bp, Homo Sapiens; identical to SEQ ID NO: 194279

SEQ ID NO: 227800 - DNA, 749 bp, Homo Sapiens; identical to SEQ ID NO: 194280

SEQ ID NO: 227801 - DNA, 888 bp, Homo Sapiens
ttggatcatggcaaccgttacagccacaaccaaagtcccggagatccgtgatgtaacaaggattgagcgaatcggtgcccactcccacatccggggactggggctggacgatgccttggagcctcggcaggcttcgcaaggcatggtgggtcagctggcggcacggcgggcggctggcgtggtgctggagatgatccgggaagggaagattgccggtcgggcagtccttattgctggccagccgggcacggggaagacggccatcgccatgggcatggcgcaggccctgggccctgacacgccattcacagccatcgccggcagtgaaatcttctccctggagatgagcaagaccgaggcgctgacgcaggccttccggcggtccatcggcgttcgcatcaaggaggagacggagatcatcgaaggggaggtggtggagatccagattgatcgaccagcaacagggacgggctccaaggtgggcaaactgaccctcaagaccacagagatggagaccatctacgacctgggcaccaagatgattgagtccctgaccaaggacaaggtccaggccggggacgtgatcaccatcgacaaggcgacgggcaagatctccaagttgggccgctccttcacacgcgcccgcgactacgacgctatgggctcccagaccaagttcgtgcagtgcccagatggggagctccagaaacgcaaggaggtggtgcacaccgtgtccctgcacgagatcgacgtcatcaactctcgcacccagggcttcctggcgctcttctcaggtgacacaggggagatcaagtcagaagtccgtgagcagatcaatgccaaggtggctgagtggcgcgaggagggcaaggcggagatcatccctgg

SEQ ID NO: 227802 - DNA, 923 bp, Homo Sapiens; identical to SEQ ID NO: 194281

SEQ ID NO: 227803 - DNA, 745 bp, Homo Sapiens
ttggtgattttcttgcctgagtgttggccggagggactgctggcccggcctcccttccgtccaggcagccgtgctgcagacagacctagtgctgagggatggacaggcgaggtggcagcgtggagggctcggcgtggatggcagcctcaggacacacacccctgcctcaagggcctttccaagcccctatttgagctgctccttcctgtgtgtgctctggaccctgcctcggcctcctgcgccaatactgtgacttccaaacaatgttactgctgggcacagctctgcgttgctcccgtgctgcctgcgccagccccaggctgctgaggagcagaggccagaccagggccgatctgggtgtcctgaccctcagctggccctgcccagccaccctggacatgaccgtatccctctgccacaccccaggccctgcgaggggctatcgagaggagctcactgtgggatggggttgacctctgccgcctgcctgggtatctgggcctggccatggctgtgttcttcatgtgttgattttatttgacccctggagtggtgggtctcatctttcccatctcgcctgagagcggctgagggctgcctcactgcaaatcctccccacagcgtcagtgaaagtcgtccttgtctcagaatgaccaggggccagccagtgtctgaccaaggtcaaggggcaggtgcagaggtggcagggatggctccgaagccagaaatgccttaaactgcaacg

SEQ ID NO: 227804 - DNA, 662 bp, Homo Sapiens; identical to SEQ ID NO: 194282

SEQ ID NO: 227805 - DNA, 913 bp, Homo Sapiens
ttgggtctgacatggaggatgatttcatgtgcgatgatgaggaggactacgacctggaatactctgaagatagtaactccgagccaaatgtggatttggaaaatcagtactataattccaaagcattaaaagaagatgacccaaaagcggcattaagcagtttccaaaaggttttggaacttgaaggtgaaaaaggagaatggggatttaaagcactgaaacaaatgattaagattaacttcaagttgacaaactttccagaaatgatgaatagatataagcagctattgacctatattcggagtgcagtcacaagaaattattctgaaaaatccattaattctattcttgattatatctctacttctaaacagatggatttactgcaggaattctatgaaacaacactggaagctttgaaagatgctaagaatgatagactgtggtttaagacaaacacaaagcttggaaaattatatttagaacgagaggaatatggaaagcttcaaaaaattttacgccagttacatcagtcgtgccagactgatgatggagaagatgatctgaaaaaaggtacacagttattagaaatatatgctttggaaattcaaatgtacacagcacagaaaaataacaaaaaacttaaagcactctatgaacagtcacttcacatcaagtctgccatccctcatccactgattatgggagttatcagagaatgtggtggtaaaatgcacttgagggaaggtgaatttgaaaaggcacacactgatttttttgaagccttcaagaattatgatgaatctggaagtccaagacgaaccacttgctaaatatttggtcttagcaaatatgcttatgaaatcgggaataaatccatttgactcacaggaggccaagccgtacaaaaatg

SEQ ID NO: 227806 - DNA, 1529 bp, Homo Sapiens; identical to SEQ ID NO: 194286
  misc_feature (1220)..(1260): n is a, c, g, or t

SEQ ID NO: 227807 - DNA, 866 bp, Homo Sapiens
ttggcgtatctgtgataggatggatggtgatgatggctgatgaccctgaacatcctgatctcttcctgctgactgactctgagaaaggaaattcgtacaagtttcaagctggcaatagaatgaatgcaatgttatggtttaagcatttgagtgcagcctgccaaagtaacaaacaacaggttcctacaaacttgatgacttttgagtagaagcctgagaaaaaaagagaggtgaactgttgcttctacgtgagcatgaggacctgataaaagagcgccagctataaaccatcctgtgccaggaagagcccagaggctctgtctcagtcgttggagttctcaaccaaaaaagcactaatttcagggaatgatttgagatattcccagagaacaaattggagttgcaaaacaaactgccatgaaccgtgcttcttatctcagaactgacctgtggaaaccactgccttaaaagaatgaaaggaaaaccaacatgaaacaccaaatagcgtgtgtgaatcttctggcggtgctgtgcttggaatagatcgtagctaatttgcatttcttttaactttgtaataattttagaggggggaattgccttttttagatatgctttaaaaaggaaaaacatactcttgtggattccatcaggagctggttttgaaccgaggtgaagagacttagcagggattgtaccagcagcccacctgcaaggtttgttctccctctagtagtctgcaacctcactggctttctcacagcaagagtgtaggaatgagaaatgttagtcatgtgagttcttgggtttgtttgggattgggtgggggtgtttgttttgttttggatgaggggagaattttttta

SEQ ID NO: 227808 - DNA, 912 bp, Homo Sapiens
tttgtacaaaaaagttggcttccggcagcgtctgcggtggtgaaggccgatgctgtgggggtgggcgtggagagaattcttctgtgggtcctctggtgttgagtggtcggcttggtgtggtgtgcggaggagctccaggcccgtcggcgcggagtggtctcacgtgtgaaacatggctacagattggctgggaagtattgtgtccatcaattgtggagatagcttgggtgtctatcagggaagagtgtcagctgtggatcaggtcagccagaccatttctctcacccggcctttccataatggagtgaagtgtcttgttccagaagtcaccttcagggcaggtgacattacggagttaaaaattctggagataccaggacctggagacaaccaacattttggagaccttcatcaaacagaattaggcccctctggtgctggctgccaagtgggcatcaatcagaatggcacaggcaagtttgtcaagaagccagcctcttccagcagtgcccctcagaatatccctaagaggacagatgtgaagagccaggatgttgccgtttccccgcagcagcaacagtgctcaaagagctatgtcgacaggcacatggaatccttgagtcagtccaaaagtttccgtcgtcggcacaactcctggtcatctagtagcaggcacccaaatcaggcaactcccaagaaaagtggtttaaagaatggccagatgaagaataaagatgacgagtgcttcggggatgatattgaggagatcccagacacagattttgattttgaagggaacctggctctttttgacaaggcagctgtgtttgaggagattgatacctatgaaaggagaagtggtacccgttcccggggcatcccaaatgaaaggcccactcggtaccgccatga

SEQ ID NO: 227809 - DNA, 345 bp, Homo Sapiens
ttgggtctcgacacccggactagccgggttgtatttggaaacgcggagtgagtttttccgtgctgtgtaggggctaacaatggacacccagaaggacgttcaacctccaaagcagcaaccaatgatatatatctgtggagagtgtcacacagaaaatgaaataaaatctagggatccaatcagatgcagagaatgtggatacagaataatgtacaagaaaaggactaaaagattggtcgtttttgatgctcgatgaatgctgggaattcagaggaatgtcttcacttatacttggatttgctctcttcccatttctgattgttgtatagctttcgattttgctta

SEQ ID NO: 227810 - DNA, 349 bp, Homo Sapiens; identical to SEQ ID NO: 194291

SEQ ID NO: 227811 - DNA, 923 bp, Homo Sapiens
ttggggagtcccaaacgaggtgcgggacggaagagggggtgaaggccagaggctcggggcttcaagaccgctgtctggagtccccctttccaggccatgtcggggcccacctggctgcccccgaagcagccggagcccgccagagcccctcaggggagggcgatcccccgcggcaccccggggccaccaccggcccacggagcagcactccagccccaccccagggtcaatttttgcccccttccatctgagcagtgttaccaggccccagggggaccggaggatcgggggccggcgtgggtggggtcccatggagtactccagcacacgcaggggctccctgcagacagggggggccttcgccctggaagcctggacgccgagatagacttgctgagcagcacgctggccgagctgaatgggggtcggggtcatgcgtcacggcgaccagaccgacaggcatatgagcccccgccacctcctgcctaccgcacgggctccctgaagccaaatccagcctcgccgctcccagcgtctccctatgggggccccactccagcctcttacactaccgccagcaccccggctggcccagccttccccgtgcaagtgaaggtggcacagccagtgaggggctgcggcccacccaggcggggagcctctcaggcctctgggcccctcccgggcccccactttcctctcccaggccgaggtgaagtctgggggcctggctataggagccagagagagccagggccaggggcccaagaggaagctgctggggtctctggccctgcaggaaaggaaaagaggcgagcacgggctcccaggtgctcctgagctagcctccagaggatgagctgggatagcttgacaaataaacctggttcacgacttgaaccaccccgcccagcggggaagta

SEQ ID NO: 227812 - DNA, 878 bp, Homo Sapiens
  misc_feature (790)..(805): n is a, c, g, or t
ttggtgaggattttgtggtgcctgagatggccgagggcacagggagtgagctgtatgtgtgaggaatttggtgagcgagataaaagtccacggtgtcaacccctaaaacatgggtgaccgtacatttttatacatctccactctacggccttttacaggctttccgattttacaggcctttccaagtttccattctccttagagagagaactgtgcttccaaacagaaatcaggagtgaccacaaagcctgaaaacactttgccacccagcaaagaactggcacaattggtttgggtctgcattgccatagtgcccgagttaaaactgcaggccactctgccttgcagtggcctctgatttcattgtgggtgcatccacaggtggcccgagctgttctttcagctgctccaaggattgagacccaagtcatcatgaaaaaggcccaagtacagtcttaatgcgataaatccactagctaagacgtcgagtgccaagaccagccttccagccgaggtttggacaaagtctcaggttcccgtgactcagggtaaggtgctggggctgccagaggacctgccccagcaagatttttgtcaagagcgagactccatcagcccaggcagacgggagcaggttcttggccagcgtagacagcagcaaacagcagcagggaagccattctcactgcatcctccctgcagtagccacggccaggcccttaggaggagcagtgaccgggggtgtccagaaatatcctgtccctggatggaaactaggtctcgtttggannnnnnnnnnnnnnnngccgtgttaggaaaatatttattaatttacaagacagggttttaactcagccgacgtggggaaatggtgtccc

SEQ ID NO: 227813 - DNA, 939 bp, Homo Sapiens
cagaaaagttctcccgagcctggcctaggcctcgcctggtcgccagcttctgtcccatccctcacaactttcctgagctgtggctcctgccaggcagacccctaagggaaactgtcgccacctttttacctctctatcctctccagtggtctgaacatagagaacctccttctctgctctgttggaacaaaggctccttgttcctagggttccagggttccctgcaaagctctggaggccccaccccgcccagccctcactcatgccatcagctctgctctgttgatgagcagttgggtatgtgagactgtttcatctacttcgggggaaaggagacacaaggagacaaaggcacagggccccacagccgtgcagagcccttgaagccccccgaggtccctgcccagaaggctgtcccctcagtgggcaggaccttagcgaccctgctccctgggtcacaggaggctggttaggaatttctcaagagtccctgattcactctcctggggcctccccaggaaggtcacctaattcccagagcaagaccatcctcggggctgtggctcccctggctgggctgcccaggggcctctgctgccccaagctctcccccagaagccaagggcacaccacataagcactggttctcaaacaagtgctgagttctcagcaagtctaggaaatgaggccactctggattctggggcctggagggtgacatgggctgagctctgggaggaaagtcaagtcctcacctccctcttcccttgggcgtggccagggactggggctgcggagggactgccatgggggtggtggggagcacagcaatattaggaaagcttcagggagcacaagaatgagggccacagggaaacaaggtttgtccttcagcagggaaaggaggtgcctcaatccgtcatggccaacttttttgta

SEQ ID NO: 227814 - DNA, 659 bp, Homo Sapiens
ttggcgggcaccggggcggcgggttggtctacgctgtgcgcggcggacgtcggaggcagcggggagcggagcggggccgccggggcctctccagggccgcagcggcagcagttgggccccccgccccggccggcggaccgaagaacgcaggaagggggccggggggacccgcccccggccggccgcagccatgaactccaacgtggagaacctacccccgcacatcatccgcctggtgtacaaggaggtgacgacactgaccgcagacccacccgatggcatcaaggtctttcccaacgaggaggacctcaccgacctccaggtcaccatcgagggccctgaggggaccccatatgctggaggtctgttccgcatgaaactcctgctggggaaggacttccctgcctccccacccaagggctacttcctgaccaagatcttccacccgaacgtgggcgccaatggcgagatctgcgtcaacgtgctcaagagggactggacggctgagctgggcatccgacacgtactgctgaccatcaagtgcctgctgatccaccctaaccccgagtctgcactcaacgaggaggcgggccgcctgctcttggagaactacgaggagtatgcagctcgggcccgtctgctcacagagatccacgggg

SEQ ID NO: 227815 - DNA, 547 bp, Homo Sapiens; identical to SEQ ID NO: 194295

SEQ ID NO: 227816 - DNA, 1157 bp, Homo Sapiens
ttgggttctggggcttagataagaaactagctcaacgtaagcatttcccctctgtcaattggctcatcagctacagcaagtatatgcgtgccttggatgaatactatgacaaacacttcacagagttcgttcctctgaggacgaaagctaaggaaattctgcaggaagaagaagacctggcagaaattgtacagcttgtgggaaaggcttctttggcagaaacagataaaatcactctggaggtagcaaaacttatcaaagatgatttcctacaacaaaatggatatactccttatgacaggttctgcccattctacaagacagtagggatgctgtccaacatgattgcattttatgatatggctcgtagagctgttgaaaccactgcccagagtgacaataaaatcacatggtccattattcgtgagcacatgggagacatcctctataaactttcctccatgaaattcaaggatccactgaaagatggtgaggcaaagatcaaaagcgactatgcacaacttcttgaagacatgcagaatgcattccgtagccttgaagattagaagccttgaagattacaactgtgatttccttttcctcagcaagctcctatgtgtatattttcctgaatttctcatctcaaaccctttgcttctttattgtgcagctttgagactagtgcctatgtgtgttatttgtttccctgtttttttggtaggtcttatataaaacaaacattcctttgttctagtgttgtgaagggcctccctcttcctttatctgaagtggtgaatatagtaaatatacattctggttacactactgtaaacttgtatgtagggtgatgaccctctttgtcctaggtgtaccctttcctcatctctattaaattgtaaacaggactactgcatgtactctctttgcagtgaatttggaatggaaggccaggtttctataacttttgaacaggtactttgtgaaatgactcaatttctattgtggtaagctcattggcagcttagcattttgcaaaggaattgctttgcaggaaatatttaattttcaaaaacataatgattaatgttccaattatgcatcacttcccccagtataaatcaagaatgttttgtgagaaacattggggaactatactc

SEQ ID NO: 227817 - DNA, 960 bp, Homo Sapiens
  misc_feature (141)..(155): n is a, c, g, or t
ttgggtccctggcctctaagaagtcccgactgtcctcctcttctagcaatgacagtgggaataaggttggcatccagcttcccgaggtggagctgtcagtttccacaaagaaagagtagcaggcctttgtatgtgtgtacnnnnnnnnnnnnnnnacaaaacatcagccttgggtggtgtgttcctatataaactccaaagggaaacacaccgactgcctcagcaatcatgcaaagaccttgcctggcccggtggcaagcgctgaaaaaccgaccgcctgtaggctcctggaactatacagataggtaaagagttccaagttcgtccagcccatgtgcaaagtcaacagtatttgccttaagatttcatatatatatatttttttgcattgactgctgagagctcctgtttactaagcaagcttttgtgtttattatcctcatttttactgaacattgttagttttggggtaatggaaacccactttttcattgtaatgactttgggggcttttgttagtaagggtgggtggggtgatgggttgcagacggaggtcaggtcttcctctttcctgagactggatctgttcaaacagcaaacgcccacagatggcccagaggtggtggtagtcagggtgtgtgggtgtttttagggttctttagtgttgtttctttcacccaggggtggtggtcccagccagtttggtgctgacggtgagaggaaattagaatctgtttgcaaattgtccaacccaccccctcaacatgaggggcttccattttctgtgttttgtaagggaactgtttccttcatgccgccatgttcctgatattagttctgatttctttttaacaaatgttatcatgattaagaaaatttccagcactttaatggccaattaactgagaatgtaagaaaattgatgctgtacaaggcaaataaagctgtttattaaccttg

SEQ ID NO: 227818 - DNA, 381 bp, Homo Sapiens
aaatataaatctgatcacccccctgcttagaacccttctgctttctattacccctcatttaaaatgtaaactcttcaccttggtttatgagaactggttcttgccttccccttgaacctcattaaatggtgatttcttgctaagctccaccccgaaaggtctcctctcagcttctaattttgtgctctttcctgcccttttcctgggccttctcaactctccacccccaccactcttgactcaggtggtgtccttcttcctcaagtcttgacaattcccgggcccttcagtccctgagcagtctacttctgtgtctgtcaccacatcttgtcttttcccctcattgcatttattgcagtttatatatatgctacttttact

SEQ ID NO: 227819 - DNA, 1615 bp, Homo Sapiens
tgattgttacatggggatggagtctcatgctgccctaagctgagagctttactcccaattcactccttccctcgcagtgactttctcattctccctgagtacatcgacttcactgcagaccaggtggtgagtatgatcaggaattgggtcctgaacatcaaggtgagctaaggtgctactatcacctggtctctgggctaactcaccagattgggcttgggggtggattttataggatcatgttgcttgttagcatgcaggtcatacaaaagtgcctttttgtgggggactcagtaacaccttgaggtgtaagggatgctttcccacactggttgacgtttgtctcctcaggacctgacttctgctctgaccaagaaaatcactcttaagaccccactggtttcctctcccatggacacagtcacagaggctgggatggccatagcaatggcggtgagccccatggggtgtgggggaaggagcaaggactccatcgcctttccccaaaggcattcagtcctgcttcttgtcacttagtagtagtctctttttatcctgtagcttacaggcggtattggcttcatccaccacaactgtacacctgaattccaggccaatgaagttcggaaagtgaaggtcagaagggcaacgatcattagcaagcgctcctgggaattgcactgaggtggggtggggtgggagtaggggtttattctaatttagtattctttcttcccaccatggggttcagttactgagaagaccctgagattctgtttcttaaagcagcagcaatagaccaggtgtacagtgcctccagcctacccatgtctctaagatgtgttggtgtgatttggtcttgtggcactgccaaagggatcgataagcagagaccccatgcttcagatcaagagcctgatgaaagtagttcaaagatgcgatgccctttctcaccatccctttccagaaatatgaacagggattcatcacagaccctgtggtcctcagccccaaggatcgcgtgcgggatgtttttgaggccaaggcccggcatggtttctgcggtatcccaatcacagacacaggccggatggggagccgcttggtgggcatcatctcctccagggacattgattttctcaaagaggaggaacatgactgtttcttggaagagataatgacaaagagggaagacttggtggtagcccctgcaggcatcacactgaaggaggcaaatgaaattctgcagcgcagcaagaagggaaagttgcccattgtaaatgaagatgatgagcttgtggccatcattgcccggacagacctgaagaagaatcgggactacccactagcctccaaagatgccaagaaacagctgctgtgtggggcagccattggcactcatgaggatgacaagtataggctggacttgctcgcccaggctggtgtggatgtagtggttttggactcttcccagggaaattccatcttccagatcaatatgatcaagtacatcaaagacaaataccctaatctccaagtcattggaggcaatgtggtcactgctgcccaggccaagaaacctcattgatgcaagtgtggatgccctgcgggtggg

SEQ ID NO: 227820 - DNA, 894 bp, Homo Sapiens; identical to SEQ ID NO: 194301

SEQ ID NO: 227821 - DNA, 1623 bp, Homo Sapiens; identical to SEQ ID NO: 194302

SEQ ID NO: 227822 - DNA, 1195 bp, Homo Sapiens; identical to SEQ ID NO: 194306
  misc_feature (278)..(286): n is a, c, g, or t

SEQ ID NO: 227823 - DNA, 1125 bp, Homo Sapiens
ttggctttattctaaccgcaaggagtagcggaggggaggtcgtgatggcggcgccggaggcggaggttctgtcctcagccgcagtccctgatttggagtggtatgagaagtccgaagaaactcacgcctcccagatagaactacttgagacaagctctacgcaggaacctctcaacgcttcggaggccttttgcccaagagactgcatggtaccagtggtgtttcctgggcctgtgagccaggaaggctgctgtcagtttacttgtgaacttctaaagcatatcatgtatcaacgccagcagctccctctgccctatgaacagcttaagcacttttaccgaaaaccttctccccaggcagaggagatgctgaagaagaaacctcgggccaccactgaggtgagcagcaggaaatgccaacaagccctggcagaactggagagtgtcctcagccacctggaggacttctttgcacggacactagtaccgcgagtgctgattctccttgggggcaatgccctaagccccaaggagttctatgaactcgacttgtctctgctggccccctacagcgtggaccagagcctgagcacagcagcttgtttgcgccgtctcttccgagccatattcatggctgatgcctttagcgagcttcaggctcctccactcatgggcaccgtcgtcatggcacagggacaccgcaactgtggagaagattggtttcgacccaagctcaactatcgagtgcccagccggggccataaactgactgtgaccctgtcatgtggcagaccttccatccgaaccacggcttgggaagactacatttggttccaggcaccagtgacatttaaaggcttccgcgagtgaatgagtgcttcttaatcctaaaaacacaatggctgaattatctttctccatgtggcgctgaatcacccatctggtttggagctagagttgcttcctggtgagagaggaagcaactctccttctggttgtctgcctcccctcagatttcctgatagttttatggcatgtggctgtgactgtgactgtaatcattgctgaacaacatctctttgaatcaaaggttgattttcccacagggtgctgggtcaggcatttc

SEQ ID NO: 227824 - DNA, 1525 bp, Homo Sapiens
ttggcgagtagctgggactacaggttccttcaagatatctgctttgaaattctgcctttatttagctgagagatggctacagaatatcccatcgcaggacgaaaaacgtgaaaaagccgaggctttgttgaagaagcttcatatccagtaccggcgatcgggcacagaagctgtgctcatagcccacaagctgaacactgaggaatatttaagagtgatcggaaagccagcacatcttattgtcagtctctacgaacatcctagcatcaatcaaagaattcagaattcatctggcacagattatcctgatattcatgcagcagctaaagaaatagccgaagtcaatgaaattaatttggaaaaagtctgggacatgttgttggaaaaatggctatgcccttcaacaaaacctggtgaaaaaccatcagaattatttgaacttcaagaagatgaagccctacgaagagtgcagtatctcctcctgtctcgtccaattgattatagttcaagaatgctgtttgtatttgcaacatcaactacaaccacattaggtatgcatcagttaacttttgcccatagaactcgagctcttcagtgtctcttctatttggctgacaaggaaactatagaatctctctttaaaaaacccattgaagaagtgaaatcttatttgagatgtataacttttctggcatcatttgagactttgaatatccccatcacatatgaattattttgcagcagtcctaaagaaggaatgattaagggtctgtggaaaaaccacagccacgagtccatggcagtaagattggtgactgagctgtgtttagaatacaaaatctatgacctgcagctttggaatggactcttgcaaaagcttctgggcttcaatatgattccttatctaaggaaagttttaaaagccatctccagtatccattctttatggcaggttccctacttcagcaaagcgtggcagcgtgggatacagataccactgctttcagcctcttgtcctttaagtcctgatcagctgtcagattgttctgagagtctcatcgctgtcctcgaatgtccagtctcaggtgatcttgacctgatcggagtcgccaggcagtatatccagttagaacttccggcttttgcattagcttgtctgatgctcatgccccactcagagaaaagacaccagcaaattaagaattttctgggttcctgtgaccctcaggttattttaaagcaattggaagagcatatgaacacgggccagctagcaggattttcacatcaaattagaagtctgattttgaataatatcatcaataagaaggagtttgggattttggcaaagaccaaatactttcaaatgttgaagatgcatgcgatgaataccaacaatatcactgagctagtgaactatttggcaaatgacttaagatgtttcttagtggattatcgtaaatcactgaacttttttttcaagagggacaagaattttggagtctgctattatggaccatattta

SEQ ID NO: 227825 - DNA, 1391 bp, Homo Sapiens
tctcctctccccctacttcttctcctccggggctttctcagtgattcccaggggcaaagggtccccacgagcccacgtgacaggtgtgttctgggccacatattccaccatgtggtccagggcctcgcgggcgctggcgacacgctcacggctctgggccagaatgctgctggacaggtcctggaaggagtggatgctggaaaacgtggccctggaggtcctccacctggcggcgggcctgctgcacctggtccttcacattggtggggaggccctgaatgctggaccccagggaggtacaggtggcctgcagttgctgggcaatgtcccggaacatggtgagcgcccgggactcgacctgctctggcttgggcggctccttctcggggccctggagctgcttctggttccagctgagccacatctggtgcagcttctcctggccttccaccagcttctgatcaacgccttgcttgacagtttccatcaggcttaggacctgcgacagctgcagcagagcctcctgtgccctctgcttggtggctcgaagcttgcccagcgagtgctcataggcgtgctgccgcagcctctccgacagggagcccagacgtacgaagtagctctgttcctgccgctgctgctgcacggacgcgacgtcaaagccatccagggatgtggcgatgcgggccagttcggcatccgtaaggggcaggtggttgtccgcccactcctccgacttccccagcaccgtgtcgaccccactcagcaccatctggcccaagcgggagcccatgaccgattggacgccgccggtcactacggactttgtcttgtccacgccgctctgcacagcaccgcgggtcgcgtccaccgcctccgacaattgggtggccaccgtgtccttggcgctagacaccatctcttgggcccccgacaccttagacgacacaagctccttggtgtccgccaggaccttctccgtgggctgctgcaggatggggaggttctcctccaacttgtccagccccctgtgggcgtattcgctggctgatgcaatctggggctccagcttggagaggatcggctgagccccgctgacagcagccgccgtgagggtcctcactcccttctctgctgcgtcgcagacagtcttgacgtgcgggtagctctccttggtggaggcataggctgcggacaccatgtcgcaggtggagctgatcagaggcatgctggccacacggtccaccacactgggctgctgtaccggttcttccactgtcacctgggtgctgccatcagcctctgccccgtcggcagacatggtctctgcagcagacgcgcggtcaaccggacgtcccaggaacagcggccgcgacttcaaaaccagccaa

SEQ ID NO: 227826 - DNA, 1317 bp, Homo Sapiens
  misc_feature (46)..(68): n is a, c, g, or t
  misc_feature (1202)..(1217): n is a, c, g, or t
gagcaatgcttttttataatagccaactttgtacaaaaaagttggnnnnnnnnnnnnnnnnnnnnnnnggatcaaaaaatgtttattctgaattctttaatttaaaaaaatcatacctatgaggtgtgctacaggaattcagatacaataagttgcatataaaacccgacctcattgctcattgtggtaaagcaaggatgatgaaaaaatgcacctcaggagcaaaaacacgcttcacgggcactccgggacccaagtcccgagacatttccacgtgaccttctggaaagacacaccgcccacctgactgcacgacgggactggtccagcctcccggctcctcaggaaggagatgagtttcctacaaagtgagtggccacaaatgccaggacagcggtgtcctggagctgtggggggaccttggggaagaacacacactcatctgcacttcacacttctagccttcaactgatcaaactactgaaattgaacatgatattttggcaaaaatactacacccccattgacaggaggagggttcctggcggctcacagcagagcaggcactgccttccttcccaaggccgagaggccatgctgtgacatggcacacacaccgccccaggctgcccggtggcccagggaccatatgggtgacagttaagacatcagcctttgtgaaaagccaagcccgacgcagacctcaactgcactgtgcgtcccaatccagagacccgcggggcaggggaggatttcaaggactcagtgacactgcccggcggggacaggagaggctcccagcagccctcccggtgacctgggcatcaggggatgggtagagatgaggacaagccggagtgggcacaggaaaaaaaccagggtctctgctagaagtcacctgatcctgcgggctgtcacggtatgacataggcagatttcccatctgacatggcagctcctgtgctctgggtgacttagctccgggttaacttccatcaggcccagtcctctcctccccagcagtgagactctagaggaagcccctcgtctgggacagtccttcctgcctacccgccacagggccgacctgaggcctcgtgcttgtcctgggaggtcccgactgcacttgatgggcacgagggcaacacgaacacaagagaatgcgagctccctgaagctgccgcgtgacagtcaatttggcnnnnnnnnnnnnnnnnccatcaatgcataaaaccaattaccaaagtcctcctaaggaatgtgattacaatatattagcaaattctgtggcataaacattttcaaaagcatcaccaa

SEQ ID NO: 227827 - DNA, 809 bp, Homo Sapiens; identical to SEQ ID NO: 194309

SEQ ID NO: 227828 - DNA, 912 bp, Homo Sapiens
ttgggtcagatctgaggcgaggctaggtgagccgtgggaagaaaagagggagcagctagggcgcgggtctccctcctcccggagtttggaacggctgaagttcaccttccagcccctagcgccgttcgcgccgctaggcctggcttctgaggcggttgcggtgctcggtcgccgcctaggcggggcagggtgcgagcaggggcttcgggccacgcttctcttggcgacaggattttgctgtgaagtccgtccgggaaacggaggaaaaaaagagttgcgggaggctgtcggctaataacggttcttgatacatatttgccagacttcaagatttcagaaaaggggtgaaagagaagattgcaactttgagtcagacctgtaggcctgatagactgattaaaccacagaaggtgacctgctgagaaaagtggtacaaatactgggaaaaacctgctcttctgcgttaagtgggagacaatgtcacaagttaaaagctcttattcctatgatgccccctcggatttcatcaatttttcatccttggatgatgaaggagatactcaaaacatagattcatggtttgaggagaaggccaatttggagaataagttactggggaagaatggaactggagggctttttcagggcaaaactcctttgagaaaggctaatcttcagcaagctattgtcacacctttgaaaccagttgacaacacttactacaaagaggcagaaaaagaaaatcttgtggaacaatccattccgtcaaatgcttgttcttccctggaagttgaggcagccatatcaagaaaaactccagcccagcctcagagaagatctcttaggctttctgctcagaagatttggaacagaaagaaaagcatcatgtaaaaatgaaagccagagatgtgc

SEQ ID NO: 227829 - DNA, 1200 bp, Homo Sapiens
ttggctgcaggagaagatggcggtctccacaggagttaaagttcctcgtaattttcgcttgttggaagaacttgaagaaggacaaaaaggagtaggcgacggtacagttagctggggccttgaagatgatgaagatatgacacttacaaggtggacaggcatgattattgggccaccaaggacaaattatgaaaacagaatatatagcctgaaagtagaatgtggacctaaatacccagaagctcctccgtcagttagatttgtaacaaaaattaatatgaacggaataaataattccagtgggatggtggatgcccggagcataccagtgttagcaaaatggcaaaattcatatagcattaaagttgtacttcaagagctaagacgtctaatgatgtccaaagaaaatatgaagcttccacagccaccagaaggacaaacatacaacaattaattttagtggatctcaaacttgtcttaaatcaacaaccttctactcatgttaatgtcttgattaaatatcacaatgcaaaatacacattaagtaaaagaattccagctggtaaacatgacctggacatttgtaagaatatatttaatatatgtacacccattatgttttcaggtaacaggaggaaaaatgcagcacaattttttttctcttgaaaggcactgtcatttaaacataaacctggagtactcgaaatagaattcaggtttacaagatgaaagcgtgtggagaagtgtcagatggcagtggaagcatgtgtgtttctaaaaagtaaaaatctcaagaaaacagaaatggcatgctttacccatcttacttagtgaaagagagctgcagttgaaattgtttaaaaagtagcaggtacaatgaatattgtcacagatgtgttaatttttgaagcaatgtgggtgctgactactagtagtatcaaaatatgttcaggattgttttgatacctgtatttataataaaaaatgttgggggggagttgatgaattcctgtttaaaagctgttctttgtgtgttacatgtaacagacatggtaaatatttgtttacagtctttgtttaacaaaccatgcatttaagtttaagtgaattcaccaaaaagggaaatagtgtatggataggtgattttgagattaaggtaagtcttaaaatgtaaataaaatgtgaaacgtgtcctccaaa

SEQ ID NO: 227830 - DNA, 722 bp, Homo Sapiens; identical to SEQ ID NO: 194312

SEQ ID NO: 227831 - DNA, 1404 bp, Homo Sapiens; identical to SEQ ID NO: 194313

SEQ ID NO: 227832 - DNA, 1034 bp, Homo Sapiens; identical to SEQ ID NO: 194314

SEQ ID NO: 227833 - DNA, 1340 bp, Homo Sapiens
ctttgtacaaaaaagttgtgggtgtcgagccctctggcagagggttaacctgggtcaaatgcacggattctcacctcgtacagttacgctctcccgcggcacgtccgcgaggacttgaagtcctgagcgctcaagtttgtccgtaggtcgagagaaggccatggaggtgccgccaccggcaccgcggagctttctctgtagagcattgtgcctatttccccgagtctttgctgccgaagctgtgactgccgattcggaagtccttgaggagcgtcagaagcggcttccctacgtcccagagccctattacccggaatctggatgggaccgcctccgggagctgtttggcaaagatgaacagcagagaatttcaaaggaccttgctaatatctgtaagacggcagctacagcaggcatcattggctgggtgtatgggggaataccagcttttattcatgctaaacaacaatacattgagcagagccaggcagaaatttatcataaccggtttgatgctgtgcaatctgcacatcgtgctgccacacgaggcttcattcgttatggctggcgctggggttggagaactgcagtgtttgtgactatattcaacacagtgaacactagtctgaatgtataccgaaataaagatgccttaagccattttgtaattgcaggagctgtcacgggaagtctttttaggataaacgtaggcctgcgtggcctggtggctggtggcataattggagccttgctgggcactcctgtaggaggcctgctgatggcatttcagaagtactctggtgagactgttcaggaaagaaaacagaaggatcgaaaggcactccatgagctaaaactggaagagtggaaaggcagactacaagttactgagcacctccctgagaaaattgaaagtagtttacaggaagatgaacctgagaatgatgctaagaaaattgaagcactgctaaaccttcctagaaacccttcagtaatagataaacaagacaaggactgaaagtgctctgaacttgaaactcactggagagctgaagggagctgccatgtccgatgaatgccaacagacaggccactctttggtcagcctgctgacaaatttaagtgctggtacctgtggtggcagtggcttgctcttgtctttttcttttctttttaactaagaatggggctgttgtactctcactttacttatccttaaatttaaatacatacttatgtttgtattaatctatcaatatatgcatacatgaatatatccacccacctagattttaaagcagtaaataaaacatttcgcaaaagattaaagtttgaatttt

SEQ ID NO: 227834 - DNA, 1368 bp, Homo Sapiens; identical to SEQ ID NO: 194317

SEQ ID NO: 227835 - DNA, 801 bp, Homo Sapiens
ctttgtacaaaaaagttggttgtcacacgtccggaggcctagccgtcgcgtacctaggatgccgcgtggaagccgaagccgcacctcccgcatggcccctccggccagccgggcccctcagatgagagctgcacccaggccagcaccagtcgctcagccaccagcagcggcacccccatctgcagttggctcttctgctgctgcgccccggcagccaggtctgatggcccagatggcaaccactgcagctggcgtggctgtgggctctgctgtggggcacacattgggtcacgccattactgggggcttcagtggaggaagtaatgctgagcctgcgaggcctgacatcacttaccaggagcctcagggaacccagccagcacagcagcagcagccttgcctctatgagatcaaacagtttctggagtgtgcccagaaccagggtgacatcaagctctgtgagggtttcaatgaggtgctgaaacagtgccgacttgcaaacggattggcctaatgaagaagttcaacctggagagatggaaaatcagctctcataactaagttaatttagtataaaaatagaattgatagtgagggtataaagtgtaaccatcagttaaacctctcctgtcattcctagcttccttgcttcagaattgaaatggaagtgggggtgtccctactctgtagaatctgggactgggcaaatgtttgtgtggcctccttaaactagctgttatgttatgattttattctttgtgagttaattagaataaagtcattttcttccaaggtatggtt

SEQ ID NO: 227836 - DNA, 732 bp, Homo Sapiens; identical to SEQ ID NO: 194318

SEQ ID NO: 227837 - DNA, 645 bp, Homo Sapiens; identical to SEQ ID NO: 194319

SEQ ID NO: 227838 - DNA, 1341 bp, Homo Sapiens; identical to SEQ ID NO: 194320
  misc_feature (1105)..(1135): n is a, c, g, or t

SEQ ID NO: 227839 - DNA, 330 bp, Homo Sapiens; identical to SEQ ID NO: 194321
  misc_feature (103)..(133): n is a, c, g, or t

SEQ ID NO: 227840 - DNA, 836 bp, Homo Sapiens
ttgggtgatcaaagcgaatattccatctgtggatagaacccctggcagtgttgtcagctcaacctggtgggttcagttctgtcctgaggcttctgctctcattcatttagtgctacgctgcacagttctacactgtcaagggaaaagggagactaatgaggcttaactcaaaacctgggcatggttttggttgccattccataggtttggagagctctagatctcttttgtgctgggttcagtggctcttcaggggacaggaaatgcctgtgtctggccagtgtggttctggagctttggggtaacagcaggatccatcagttagtagggtgcatgtcagatgatcatatccaattcatatggaagtcccgggtctgtcttccttatcatcggggtggcagctggttctcaatgtgccagcagggactcagtacctgagcctcaatcaagccttatccaccaaatacacagggaagggtgatgcagggaagggtgacatcaggagtcagggcatggactggtaagatgaatactttgctgggctgaagcaggctgcagggcattccagccaagggcacagcaggggacagtgcagggaggtgtggggtaagggagggaagtcacatcagaaaagggaaagccacggaatgtgtgtgaagcccagaaatggcatttgcagttaattagcacatgtgagggttagacaggtaggtgaatgcaagctcaaggtttggaaaaatgacttttcagttatgtctttggtatcagacatacgaaaggtctctttgtagttcgtgttaatgtaacattaataaatttattgattccattgcttt

SEQ ID NO: 227841 - DNA, 1165 bp, Homo Sapiens
  misc_feature (806)..(814): n is a, c, g, or t
tttgtacaaaaaagttggcgcatccccaagacttagaagaaaaagttaaggacagttgtggcaaaggagaaatggccacagggaatgggcggcggctccacctggggattcctgaggccgtgtttgtggaagatgtagattccttcatgaaacagcctgggaatgagactgcagatacagtattaaagaagctggatgaacagtaccagaagtataagtttatggaactcaaccttgctcaaaagaaaagaaggctaaaaggtcagattcctgaaattaaacagactttggaaattctaaaatacatgcagaagaaaaaagagtccaccaactcaatggagaccagattcttgctggcagataacctgtattgcaaagcttcagttcctcctaccgataaagtgtgtctgtggttgggggctaatgtaatgcttgaatatgatattgatgaagctcaggcattgttggaaaagaatttatcgactgccacaaagaatcttgattccctggaggaagaccttgactttcttcgagatcaatttactaccacagaagtcaatatggccagggtttataattgggatgtaaaaagaagaaacaaggatgactctaccaagaacaaagcataatgctggcaattaaaaatgtggtttagttttccaaacatgttatcttaaatacccctttatccttacaggttgacataactttgaatgttttaacagcaagaattttaagaaaagataaacaccattttatttatttataaaaacaaaattagtttcaaatatttttgacattgtgannnnnnnnnccacatttctcagcaaagctaatggtattttaatcattatttttgcctgtcataagaaaactcttagctgaaatggccgaaaactgtgagacatgctatggaagctgaatgccggacgctagcacagtttactttttccctttctaatcggctgatgttactctcacttgatgtggttaaaccgtcttataggtagacaagatcgatcgtttgaatatttgtgaacttgtatttctttggtagatttaggacttaatgatcctctgttgctattgtcttctataaaaggagattcatgacatactgcttaacgaaaaaactaactactatgatattctggacatgtttagg

SEQ ID NO: 227842 - DNA, 691 bp, Homo Sapiens; identical to SEQ ID NO: 194325

SEQ ID NO: 227843 - DNA, 981 bp, Homo Sapiens
ctttgtacaaaaaagttggcattaaggagcggaggcttttggagctgctaaaatgccggattacctcggtgccgatcagcggaagaccaaagaggatgagaaggacgacaagcccatccgagctctggatgagggggatattgccttgttgaaaacttatggtcagagcacttactctaggcagatcaagcaagttgaagatgacattcagcaacttctcaagaaaattaatgagctcactggtattaaagaatctgacactggcctggccccaccagcactctgggatttggctgcagataagcagacactccagagtgaacagcctttacaggttgccaggtgtacaaagataatcaatgctgattcggaggacccaaaatacattatcaacgtaaagcagtttgccaagtttgtggtggaccttagtgatcaggtggcacctactgacattgaagaagggatgagagtgggcgtggatagaaataaatatcaaattcacattccattgcctcctaagattgacccaacagttaccatgatgcaggtggaagagaaacctgatgtcacatacagtgatgttggtggctgtaaggaacagattgagaaactgcgagaagtagttgaaaccccattacttcatccagagaggtttgtgaaccttggcattgagcctcccaagggcgtgctgctctttggtccacccggtacaggcaagacactctgtgcgcgggcagttgctaatcggactgatgcgtgcttcattcgagttattggatctgagcttgtacagaaatacgtcggtgagggggctcgaatggttcgtgaactctttgaaatggccagaacaaaaaaagcctgccttatcttctttgatgaaattgatgctattggaggggctcgttttgatgatggtgctggaggtgacaatgaagtgcagagaacaatgttggaactgatcaatcagcttgatggttttga

SEQ ID NO: 227844 - DNA, 1468 bp, Homo Sapiens; identical to SEQ ID NO: 194326

SEQ ID NO: 227845 - DNA, 855 bp, Homo Sapiens; identical to SEQ ID NO: 194327

SEQ ID NO: 227846 - DNA, 955 bp, Homo Sapiens; identical to SEQ ID NO: 194329
  misc_feature (110)..(168): n is a, c, g, or t
  misc_feature (816)..(824): n is a, c, g, or t

SEQ ID NO: 227847 - DNA, 368 bp, Homo Sapiens
ctttgtacaaaaaagttggcatggaacgggcctaccggagggatccatggtattcaaccgtgggcctgttacctccagtacgagccatgagccagcggaatctgaatgcaaagacagaacaagggccgaccggagtcacaatgacatccaaccccataacatggggacagatcaagaaaacgacacaagaagctgagaaactactggagcgccagggtcaggcaaaaacccctgactccatgttcttggccatgctagctgtagtgtcctgtgcgtctataggatcgggtgaaccaccaaccggcaattgaaagctgcacagcctgaaattacctttattcaattaatgcaaaaacaaaaggggagat

SEQ ID NO: 227848 - DNA, 623 bp, Homo Sapiens
ttggcgcagacggcggcagtgcggcttgctcttggaagttcaggctcggttgtcttttgggagccatggagagtgacttttatctgcgttactacgtggggcacaagggcaagttcggccacgagttcctggagtttgagtttcgaccggacgggaagttaagatatgccaacaacagcaattacaagaatgatgtcatgatcagaaaagaggcttatgtacataaaagcgtgatggaggaactgaagagaataattgacgacagtgaaattaccaaagaggatgatgcattgtggcctcctcctgaccgagtgggccggcaggagcttgaaatcgtcattggagatgaacacatttcttttacaacatcaaaaattggttcccttattgatgtcaatcaatccaaggatccagaaggcttacgagtattttattatcttgtccaggacctgaagtgtttggtcttcagtcttattggattacacttcaagattaaaccaatctagactgaatattggtgtggacatggggggtgggtgggagtagaaaattttgtgtatatcagggcagtatttttttatgaactataaatgattgtctttaataaatatgtgataaaatcc

SEQ ID NO: 227849 - DNA, 917 bp, Homo Sapiens
ttggggaggacgctgaggggcggaggcgggagaggcgagctcgcgatgagtggtctcggcaggctcttcgggaaggggaagaaggagaaagggccaacccctgaagaagcaatacagaaactgaaggagacagagaagatactgatcaagaaacaggaatttttggagcagaagattcaacaggagctacaaacagccaagaagtatgggaccaagaataagagagctgccctacaggctttgcggaggaagaaaagattcgaacagcagctggcacaaactgacgggacattatccaccctggagtttcagcgtgaggccattgagaatgccactaccaatgcagaagtccttcgtaccatggagcttgctgcccaaagcatgaagaaggcctaccaggacatggacattgacaaggtagatgaactgatgactgacatcacggaacaacaggaggtggcccagcagatctcagatgccatttctcggcctatgggctttagagatgatgtggatgaggatgaactgctggaggagctagaggagctggagcaggaggaattggcccaggagttgttaaatgtgggcgacaaggaagaagaaccctcagtcaaattgcctagtgtaccttctactcatctgccggcagggccagctcccaaagtggatgaagatgaagaagcactaaagcagttggctgagtgggtatcctgataaatctgggcttgtcttcctaatgctacctttgttggtcctttcttccttaagtgccaagtgctgagctaaaggaggataactttttggggaagtcatgctgagggtggtagtgtgaccctgcctgaaaaagggtctcttaccctcccagccctggctcactctgaaaaggatcttgctacagaaaggagcccttgggctcc

SEQ ID NO: 227850 - DNA, 819 bp, Homo Sapiens
ttggcacctcctcgccagcagccgtccggagccagccaacgagcggaaaatggcagacaatttttcgctccatgatgcgttatctgggtctggaaacccaaaccctcaaggatggcctggcgcatgggggaaccagcctgctggggcagggggctacccaggggcttcctatcctggggcctaccccgggcaggcacccccaggggcttatcctggacaggcacctccaggcgcctaccctggagcacctggagcttatcccggagcacctgcacctggagtctacccagggccacccagcggccctggggcctacccatcttctggacagccaagtgccaccggagcctaccctgccactggcccctatggcgcccctgctgggccactgattgtgccttataacctgcctttgcctgggggagtggtgcctcgcatgctgataacaattctgggcacggtgaagcccaatgcaaacagaattgctttagatttccaaagagggaatgatgttgccttccactttaacccacgcttcaatgagaacaacaggagagtcattgtttgcaatacaaagctggataataactggggaagggaagaaagacagtcggttttcccatttgaaagtgggaaaccattcaaaatacaagtactggttgaacctgaccacttcaaggttgcagtgaatgatgctcacttgttgcagtacaatcatcgggttaaaaaactcaatgaaatcagcaaactgggaatttctggtgacatagacctcaccagtgcttcatataccatgatataatctgaaaggggcagatt

SEQ ID NO: 227851 - DNA, 381 bp, Homo Sapiens; identical to SEQ ID NO: 194331

SEQ ID NO: 227852 - DNA, 1427 bp, Homo Sapiens
  misc_feature (997)..(1024): n is a, c, g, or t
ttggcgcccgtgccccgaccggtccccgcctttttgtaaaacttaaagcgggcgcagcattaacgcttcccgccccggtgacctctcaggggtctccccgccaaaggtgctccgccgctaaggaacatggcgaaggtggagcaggtcctgagcctcgagccgcagcacgagctcaaattccgaggtcccttcaccgatgttgtcaccaccaacctaaagcttggcaacccgacagaccgaaatgtgtgttttaaggtgaagactacagcaccacgtaggtactgtgtgaggcccaacagcggaatcatcgatgcaggggcctcaattaatgtatctgtgatgttacagcctttcgattatgatcccaatgagaaaagtaaacacaagtttatggttcagtctatgtttgctccaactgacacttcagatatggaagcagtatggaaggaggcaaaaccggaagaccttatggattcaaaacttagatgtgtgtttgaattgccagcagagaatgataaaccacatgatgtagaaataaataaaattatatccacaactgcatcaaagacagaaacaccaatagtgtctaagtctctgagttcttctttggatgacaccgaagttaagaaggttatggaagaatgtaagaggctgcaaggtgaagttcagaggctacgggaggagaacaagcagttcaaggaagaagatggactgcggatgaggaagacagtgcagagcaacagccccatttcagcattagccccaactgggaaggaagaaggccttagcacccggctcttggctctggtggttttgttctttatcgttggtgtaattattgggaagattgccttgtagaggtagcatgcacaggatggtaaattggattggtggatccaccatatcatgggatttaaatttatcataaccatgtgtaaaaagaaattaatgtatgatgacatctcacaggtcttgcctttaaattacccctccctgnnnnnnnnnnnnnnnnnnnnnnnnnnnnaatataatgtaacgatcttttagaaagttaaaaatgtatagtaactgattgagggggaaaagaatgatctttattaatgacaagggaaaccatgagtaatgccacaatggcatattgtaaatgtcattttaaacattggtaggccttggtacatgatgctggattacctctcttaaaatgacacccttcctcgcctgttggtgctggcccttggggagctggagcccagcatgctggggagtgcggtcagctccacacagtagtccccacgtggcccactcccggcccaggctgctttccgtgtcttcagttctgtccaagccatcagctccttgggactgatgaacagagtcagaagcccaagggaattgcactgtggcagcatcatacgtactcttcataa

SEQ ID NO: 227853 - DNA, 650 bp, Homo Sapiens
tttgtacaaaaaagttggcgcgtctccgccccccacccaccagtcccgctgcattctcggccgggctctaggcgccatggctccccgcgggaggaagcgtaaggctgaggccgcggtggtcgccgtagccgagaagcgagagaagctggcgaacggcggggagggaatggaggaggcgaccgttgttatcgagcattgcactagctgacgcgtctatgggcgcaacgccgcggccctgagccaggcgctgcgcctggaggccccagagcttccagtaaaggtgaacccgacgaagccccggaggggcagcttcgaggtgacgctgctgcgcccggacggcagcagtgcggagctctggactgggattaagaaggggcccccacgcaaactcaaattccctgagcctcaagaggtggtggaagagttgaagaagtacctgtcgtagggagatttgggtagaagccctcatgctgagctttgtgtccctggtgatgttggaacattaatgatggaacatggccaaacttcagtcatgatcctgaagccatggtttcttccctgccagaaatgaaggttcagttatgaggcaaccctctagtaaggcattgtaaaagttactggatttggtttaataaaagttgaaataaagt

SEQ ID NO: 227854 - DNA, 1208 bp, Homo Sapiens; identical to SEQ ID NO: 194335

SEQ ID NO: 227855 - DNA, 1366 bp, Homo Sapiens; identical to SEQ ID NO: 194337
  misc_feature (1200)..(1212): n is a, c, g, or t

SEQ ID NO: 227856 - DNA, 1240 bp, Homo Sapiens; identical to SEQ ID NO: 194338
  misc_feature (347)..(358): n is a, c, g, or t

SEQ ID NO: 227857 - DNA, 501 bp, Homo Sapiens
ttggccttttttcctctcaaaggaactaatgctctgaaaagggatctgggcacaaaagtttcaatgagtgcttttgagcacacttttatttttatatagtaactaatggttaagattgatggtggcctggattagcaaagaggaagacagcttttaacacagttccctgccttcacaagaggtgtcagattaagatgtgaaagctgcaagaatgttgcagtgaacaccatttcagagctctcagtgtgcagttcaggaattaagatacttggaatagctgtggaggaagaacctaaattgcaaagatctgctattgccagctctcaacccaagtcagtgaattgtcaacctgcttatcctaaaaatgtcaaaatgctgcatctggttaaatgtcggggtaggggggaagctgaaggtctcgcttcatttgccttgtttactcatcctgccctgtaatgtctgtaatcctgaacatggaataaattgtaacatttagtttct

SEQ ID NO: 227858 - DNA, 958 bp, Homo Sapiens; identical to SEQ ID NO: 194340

SEQ ID NO: 227859 - DNA, 1230 bp, Homo Sapiens
ttggcgcgcggagaaggggtgcgagcagcggcggcggcggaggctgccatggacgacgaggaggagacgtaccggctctggaaaatccgcaagaccatcatgcagctgtgccacgaccgtggctatctggtgacccaggacgagcttgaccagaccctggaggagttcaaagcccaatttggggacaagccgagtgaggggcggccgcggcgcacggacctcaccgtgctggtggcccacaacgatgaccccaccgaccagatgtttgtgttctttccagaggagcccaaggtgggcatcaagaccatcaaggtgtactgccagcgcatgcaggaggagaacatcacacgggctctcatcgtggtgcagcagggcatgacaccctccgccaagcagtccctggtcgacatggcccccaagtacatcctggagcagtttctgcagcaggagctgctcatcaacatcacggagcacgagctagtccctgagcacgtcgtcatgaccaaggaggaggtgacagagctgctggcccgatataagctccgagagaaccagctgcccaggatccaggcgggggaccctgtggcgcgctactttgggataaagcgtgggcaggtggtgaagatcatccggcccagtgagacggctggcaggtacatcacctaccggctggtgcagtagctaccgcctgacagcccctagaggcggacacacagcgacccccatccctgcaggacaaacgcccctgccctgccagaatccggcccccacagctctcacggctgctgctcctctggactccccaaggcaggtggcctccacccacgttctcccgtcctggggtgaggcttcctgtggcccagcccgccccattcacctgtggatttgtgcgagatgcagcctcagaaggaacaaggcccccagagggaggtcacctgggggcagctggtgccgggtcttcacccagaccacgctgggtcccctctgttgggggtttggggtccgggtctcccaccagccactgcttcctcctgggccctcggccttccacccctcgtcttccctccctcgggggccctgatgcgtggcggcccccgcccggcctcggctctttactccattcacagccgtgcacgcgctcaagccaccagggtgcgagatgccagctctggagttctcgggttgttgtaggaggttgggtgttttcaaatggtaaagatgttttgagca

SEQ ID NO: 227860 - DNA, 1057 bp, Homo Sapiens; identical to SEQ ID NO: 194343

SEQ ID NO: 227861 - DNA, 915 bp, Homo Sapiens
ccaaacttcttgatggagtagatgcccatgatggtaaccctgttcccagggacgaccttgtcacacaggtacctgtcgcagtagagctgcatgtgtctgggcatctccccgtgggggactgcatcaggcagctcctgcagcttcagggtctggaagtccacgcatttgcatttgtcgggcatgatgaagtacgggtccaatgggcatttggggcgcccagcctgatctgtgttgcacttcctgggcagggcatagccctcgaggccagggcgcatggcaatgttggtgagggtgttgcggcagctgcggcactggatagagatgcgggtggccttggcacggaccgcagaggccgcgatgatgatgccagggatcttcaccaggtgtgacatcatgtccgacttcaggctacgaatgctggaagggctggcgtccgacttgagcatgacctggatgtcctggagcacctcctccccagaaggccggggccgggtcacctcatcagctacctccttggcagcttcctccagcagctgcaggtgctcggctggctgcttgtacaagtagtcggccaggtcctcatcaaagctggccagatcctccatctccacctcaatccagtactcccccaggttgtaatgccgcttgagttcatccctgtatttgaaggtgaagcccgtgcggtcggtgcccactcggtactgccgcaggaactccttgaagcgcctctgcagctgcgatttgcgggcctgcccctcgtcggcctgggcgtcgcccccgaagctgtcgctgtagaaaatgccaggatcgtcgaatcccgacatgactgcgcctctggttttccgcacttcacaaaccaggggagacaagaacctccacgctcagccgccgagtttcgcgggaaaaacaagccaa

SEQ ID NO: 227862 - DNA, 948 bp, Homo Sapiens
ttttatgagtcaactagaaaactaacctgtaatactgacaggctccatccagattattaaatactacaaaatgagaactgtttcaacaactattcagcataacgtttatggacaaaatgtatatagtatatcttatattctatatgtattttatcacatagtaaggaatgctgaggtgcttaagccatccaataaattgaaaatacaaactttacatttctacgtttgtcagtatacaggattctgaagatgaatcttgaactcagagtgataaatcagttttcaaggaaagccacataatccgtcagtctggctaactgctgttcattgggtattgggggaactggagcaggctctgataagggaataaacttgttaaaggaaacatccagggcccctgcaactggctttctgggcagaaccattcttgtggtggaatcagcttgccatccttgttctaatatgcctttcacagcctcttctacaggaagtccaacaaaggctgcaaaatcatcggcgatgattgaagtatacgcttgagagaccagggcaaaggcgcgtctccttgttgcatctctaagtgcttccataattggctggaccgtctcagaccactggtgagcgttgatggttgtatagatcccagggaaatctctctgccagattctttgtcctactgaccaaattcccccaagttcagaatttgcagattttatagcaggtggtattcttttccaaagatatcttgcattattcatgtcattatggagcaaatataaagctagaagctgaccatacactgggggtgtagcaattcctccaggggcctcgagctcctggttctcgcactgatccagcaactttttgaaactaaaggcgctttccgccatcaccgccactggcatcttcgcggccggcctcgccgctgcaccgtccggacagccccaa

SEQ ID NO: 227863 - DNA, 925 bp, Homo Sapiens
ctttgtacaaaaaagttggctgaattcctacctagttccttaaataagcagtactagttacaaatcacagtataagatttaagtgcctgggggaaggatacaatttttagaaattacatattgggtcagttttgttttgtttttggtgaggaaaaggtggtaaataggaaaccatgaatgggaaggatggcaataagtagcaactatactttccaatgactaaagaaagaaaatctcagtatattcgttctcatgaagacacagtcagacactggacaatgtaatgtatgcaactgcaaacgttacaactgcagccagaacaatggctgggtggatcgcacgtaaagcttgccactaaaaatcaaagcagaggttaacaggaaacctggggggagtgtggaaaagggaaaactgttttagctgaataaaggtgaattatataatttataatagctgtggatgagcacaggagagagaggaaagaaaagaacagtcgaaatgagcaactcaccttaccctctgaccctgattagacaggatcaattgtaaagtgagggcttctccatgacaccatagttctgcccaatactgcatttgggataagaaattctacacttggatgtctcgcttcacaataaaacacagcttaaaaataaaataactgaaagaaatagaattcagcaaatagttattttttgcacttgaactgaaacgtactgtactgtaaattatgactcattttaagtgacctttaaaatcagatgtatttattatgcttgtgtaattatagaaataaagaaatgggtgacaggcttaacctcacctatgaatgtacagtatgtggatttgtgaaactgactgtaggaagtcaaaaacttgtactgtatcttgtgtttacagttctgatttattcctttgaaaagcc

SEQ ID NO: 227864 - DNA, 963 bp, Homo Sapiens
ctttgtacaaaaaagttggcacggttagcaaccttcgaaaatcaatgaggctggcgtccgtgtgctgtgccagggcctgaaggactccccctgccagctggaggcgctccagctggagagctgcggtgtgacatcagacaactgccgggacctgtgcggcattgtggcctccaaggcctcgctgcgggagctggccctgggcagcaacaagctgggtgatgtgggcatggcggagctgtgcccagggctgctccaccccagctccaggctcaggaccctgtggatctgggagtgtggcatcactgccaagggctgcggggatctgtgccgtgtcctcagggccaaggagagcctgaaggagctcagcctggccggcaacgagctgggggatgagggtgcccgactgctgtgtgagaccctgctggaacctggctgccagctggagtcgctgtgggtgaagtcctgcagcttcacagccgcctgctgctcccacttcagctcagtgctggcccagaacaggtttctcctggagctacagataagcaacaacaggctggaggatgcgggcgtgcgggagctgtgccagggcctgggccagcctggctctgtgctgcgggtgctctggttggccgactgcgatgtgagtgacagcagctgcagcagcctcgccgcaaccctgttggccaaccacagcctgcgtgagctggacctcagcaacaactgcctgggggacgccggcatcctgcagctggtggagagcgtccggcagccgggctgcctcctggagcagctggtcctgtacgacatttactggtctgaggagagaggaccggctgcaagccctggagaaggacaagccatccctgagggtcatctcctgaggctcttcctgctgctgctctccctggacgaccggcctcgaggcaaccctggggcccaccagcccctgccatgctctcaccc

SEQ ID NO: 227865 - DNA, 717 bp, Homo Sapiens
ttggcgcctcgctggcctactctctcctcccgtacggcgccggaatcccagctccacttaccaggccgcggctaccccgccgtcccccccgactcccgccaccccgctctctcaggctcttcaggatccaagtccgtaggccctttaaggggtctagttgccgtttgcgaggccctgggactttggtcccagacagcggggatccggatggcttccgtgcggatccgagaggccaaggagggagactgtggagatatcctgaggctgattcgggtgaagactgcaggccggagctagccgaattcgaaaaactctcggatcaggtgaagatcagtgaagaagccctgagagcagatggctttggagacaatcctttctatcactgtttggtagcagagattcttccagcgcccgggaagctactgggtcaagggattggttccaaaataatcaaaaaggtggctgaggtggccttggataagggctgctcccaattccgcctggccgtcctggactggaaccagagggccatggacttgtacaaggccctaggagcccaagatctgacggaagctgagggctggcacttcttctgctttcaaggataggcagcgagaaagttggcaggaaagtgacgccatgcctaggaggatctctgtcttgagtttctccttcgccatcagctgaagcactcttcagagactacgtccacagaca

SEQ ID NO: 227866 - DNA, 776 bp, Homo Sapiens
actttgtacaaaaaagttggcgccactacagcctcctgacaaggtgatccgggcgggccccgcaggaattttatcccctcaccggcctcacactagtatcgcatgtccactatccagaacctccaatctttcgacccctttgctgatgcaactaagggtgacgacttactcccggcagggactgaggattacattcatataagaatccagcaacggaacggcagaaagacactgactactgttcagggcattgcagatgattatgacaaaaagaaacttgtgaaagctttcaaaaagaaatttgcctgtaatggtactgtgattgaacatcctgaatacggagaggttattcagcttcaaggtgaccaaagaaaaaacatctgccagtttctcttggaggttggcattgtaaaggaggaacagcttaaggttcatggattctaaaatgaacctaaatacgtggagaatttcttgaatagttttgttctctaaacccggtttggctgccttgtgaaatgattccctgcagtaaacggacttttcatttatttaatcattcaaacttccattcacatctgcatgattacagaaaacatggggtatgtagactagtaacacataagaaaattgcagtaagatggtaacaaaacctcatattgtctttacatgtttccaatggaaaatgttttgagtgtttattgttcagtttattacgtttcacttgattaaattttttttgttgttgtattaaaccatgtacgttgcagcttaacaat

SEQ ID NO: 227867 - DNA, 848 bp, Homo Sapiens; identical to SEQ ID NO: 194350

SEQ ID NO: 227868 - DNA, 1100 bp, Homo Sapiens
  misc_feature (237)..(248): n is a, c, g, or t
tttaagggatcataatttactatactcaaactccaaggtttaggccaggacaaacaaaatgataaaaagaaaaaattactgcaaacagggcatgactgccctttagtttctttagacaaattcactagtgcaagagcatcatttacctgaaagatcctaagagtcacaattaaagtactcatacaaaactatttcctttgttctttaaaaagtgccacatactatacttttcatttnnnnnnnnnnnngaacccaacacaaataaactaatgaaagaccgtttgtctccatctcttgtcaatgaggaaaggccaaagtgattctttgattccaattcgaaatggtgttcgttggccaatgcccaaggtctccaatttggagcagtcaagctgagcatttctcggacgttgtgctcctaggacagggctgtcagtaataggtcttaagtgactgctggggaggttgaaggcatctgcaattgcacatgccatttcatacttagtcatctgttcattgccagaccagtgaaaggttcccttaattgatggatccagcattctcttctctgctagctgccggcacacagtggccacatctttgacatgtgtggggaacctctgctgccagtgatccatgtttgctgacttgttgctgaactgcactttatcaaacataacagtcacagcactttcttcgagcttttcaacttccccatacagaataggaatcctcaaaacagcagctcccagattgttctccaggacagccttttctccatctaattttgttttgccatacaaatttaggggagctggtatgtcttcctctctgtaaggtggatttgttccatcaaatacataatctgagctaatgtagatgagaaatgctccaacagcagctgcttcctttgctaaattcccagaagcatccacattaagttgagaggcagcatctggctgattttctacaacatctggtcttctctctgctgcacaatgtactataacatggggctgaaaatcatgaatgatgtgatgaactgcattagaatccaacagattaacctgttcaaattttggtcttgctcttctgaaacccaa

SEQ ID NO: 227869 - DNA, 1028 bp, Homo Sapiens
ttggctcatgtgacaagttccaatttcttttcaagtcaattgaactgaaatctccttgttgctttgaaatcttagaagagagcccactaattcaaggactcttactgtgggagcaactgctggttctatcacaatgaaacggctggtttgtgtgctcttggtgtgctcctctgcagtggcacagttgcataaagatcctaccctggatcaccactggcatctctggaagaaaacctatggcaaacaatacaaggaaaagaatgaagaagcagtacgacgtctcatctgggaaaagaatctaaagtttgtgatgcttcacaacctggagcattcaatgggaatgcactcatacgatctgggcatgaaccacctgggagacatgaccagtgaagaagtgatgtctttgatgagttccctgagagttcccagccagtggcagagaaatatcacatataagtcaaaccctaatcggatattgcctgattctgtggactggagagagaaagggtgtgttactgaagtgaaatatcaaggttcttgtggtgcttgctgggctttcagtgctgtgggggccctggaagcacagctgaagctgaaaacaggaaagctggtgtctctcagtgcccagaacctggtggattgctcaactgaaaaatatggaaacaaaggctgcaatggtggcttcatgacaacggctttccagtacatcattgataacaagggcatcgactcagacgcttcctatccctacaaagccatggatcagaaatgtcaatatgactcaaaatatcgtgctgccacatgttcaaagtacactgaacttccttatggcagagaagatgtcctgaaagaagctgtggccaataaaggcccagtgtctgttggtgtagatgcgcgtcatccttctttcttcctctacagaagtggtgtctactatgaaccatcctgtactcagaatgtgaatcatggtgtacttgtggttggctatggtgatcttaatgggaaagaatactggccttgtgaaaaac

SEQ ID NO: 227870 - DNA, 1346 bp, Homo Sapiens
ttggcgaattcctgcgactcaagcagtctgcccacctcagactcccaaagcggtggaattagaggcgtgagcccccatgcttggccttacctttctacttttataattctgtatgttattattttatgaacatgaagaaactttagtaaatgtacttgtttacatagttatgtgaatagattagataaacataaaaggaggagacatacaatgggggaagaagaagaagtcccctgtaagatgtcactgtctgggttccagccctccctcagatgtactttggcttcaatgattggcaacttctacaggggccagtcttttgaactggacaaccttacaagtatatgagtattatttataggtagttgtttacatatgagtcgggaccaaagagaactggatccacgtgaagtcctgtgtgtggctggtccctacctgggcagtctcatttgcacccatagcccccatctatggacaggctgggacagaggcagatgggttagatcacacataacaatagggtctatgtcatatcccaagtgaacttgagccctgtttgggctcaggagatagaagacaaaatctgtctcccacgtctgccatggcatcaagggggaagagtagatggtgcttgagaatggtgtgaaatggttgccatctcaggagtagatggcccggctcacttctggttatctgtcaccctgagcccatgagctgccttttagggtacagattgcctacttgaggaccttggccgctctgtaagcatctgactcatctcagaaatgtcaattcttaaacactgtggcaacaggacctagaatggctgacgcattaaggttttcttcttgtgtcctgttctattattgttttaagacctcagtaaccatttcagcctctttccagcaaacccttctccatagtatttcagtcatggaaggatcatttatgcaggtagtcattccaggagtttttggtcttttctgtctcaaggcattgtgtgttttgttccgggactggtttgggtgggacaaagttagaattgcctgaagatcacacattcagactgttgtgtctgtggagttttaggagtggggggtgacctttctggtctttgcacttccatcctctcccacttccatctggcatcccacgcgttgtcccctgcacttctggaaggcacagggtgctgctgcctcctggtctttgcctttgctgggccttctgtgcaggacgctcagcctcagggctcagaaggtgccagtccggtcccaggtcccttgtcccttccacagaggccttcctagaagatgcatctagagtgtcagccttatcagtgtttaaga

SEQ ID NO: 227871 - DNA, 951 bp, Homo Sapiens
taaaatcttgccgggcccacttggggaaacttggcttgtaatcaggcatagaagtaactcctggccacaccacctcatctggggtccccagagtccgaaagatccggaagagctggtcaatctcagaatctccagggaatagggcccggcgagtcaccatctcagcaaagatgcagcccaggctccagatgtccacagctgtggaataatatttgcagcccaggaggatttcaggagctcggtaccacagggtcaccacctcatgggtgtaagtacgaacagggactccaaaagctctggctagtccaaagtctgctagcttgatggccccctctgtgttaataagcagattctgaggtttaaggtctcggtggaggacccgatgagaatggcagaaagctaggccctggagcagctggaacagatagctcttgatgaggggaagaggaatgccagtgagagcagaggcatccatgaatttcttgagatcttggtgcagaaattcaaaaaccaggtagagtttattttctgtgtgaatgacatccagcagcttgacaatattaggatggttaagctccttaagcagagagatctctcggatggcagtactgggcacaccctcagtctcagtgtccaggcggattttcttaagcgccaccacctctcccgtcaacttgtttctggctttgtacacaactccgtacgtgccctctccgatcttttccaccttttggaagttctccatgaagcgccagcgagtcgggtcagcccggccctggagcgggggcctgggaaccctgcagaaggcggaccctggctctcgggggccgaggagggggaaacagggcccagtaccgtggccccgggtcgggatggaacgcagtatacctctcgctcttgtcaatctaaccaacttgaaacaatgttgccgcctcccaccgagttccccaa

SEQ ID NO: 227872 - DNA, 974 bp, Homo Sapiens
ttgggccacagatctcttaagaactttctgtctccaaaccgtggctgctcgataaatcagacagaacagttaatcctcaatttaagcctgatctaacccctagaaacaggaattaaggataacctagacgacataaagaggataattaaagccagagagcacagaaataggcttctagcagacatcagagactataggccctatgcagacttggtttcagaaattcgtattcttttggtgggtccagttgggtctggaaagtccagttttttcaattcagtcaagtctatttttcatggccatgtgactggccaagccgtagtggggtctgatatcaccagcataaccgagcggtataggatatattctgttaaagatggaaaaaatggaaaatctctgccatttatgttgtgtgacactatggggctagatggggcagaaggagcaggactgtgcatggatgacattccccacatcttaaaaggttgtatgccagacagatatcagtttaattcccgtaaaccaattacacctgagcattctacttttatcacctctccatctctgaaggacaggattcactgtgtggcttatgtcttagacatcaactctattgacaatctctactctaaaatgttggcaaaagtgaagcaagttcacaaagaagtattaaactgtggtatagcatatgtggccttgcttactaaagtggatgattgcagtgaggttcttcaagacaactttttaaacatgagtagatctatgacttctcaaagccgggtcatgaatgtccataaaatgctaggcattcctatttccaatattttgatggttggaaattatgcttcagatttggaactggaccccatgaaggatattctcatcctctctgcactgaggcagatgctgcgggctgcagatgattttttagaagatttgcctcttgaggaaactggtgcatttgaaagagcgtt

SEQ ID NO: 227873 - DNA, 1130 bp, Homo Sapiens; identical to SEQ ID NO: 194353

SEQ ID NO: 227874 - DNA, 1509 bp, Homo Sapiens
ttggctgatcagggccgagttgtctcggcggcgctgccgaggcctccacccggggagggtggttaccgctgaggagctgcagtctctgtcaagatgatagaggtactgacaacaactgactctcagaaactgctacaccagctgaatgccctgttggaacaggagtctagatgtcagccaaaggtctgtggtttgagactaattgagtctgcacacgataatggcctcagaatgactgcaagactaagggactttgaagtaaaagatcttcttagtctaactcagttctttggctttgacacagagacattttctctagctgtgaatttactggacagattcctgtctaaaatgaaggtacagcccaagcaccttgggtgtgttggactgagctgcttttatttggctgtaaaatcaatagaagaggaaaggaatgtcccattggcaactgacttgatccgaataagtcaatataggtttacggtttcagacttgatgagaatggaaaagattgtattggagaaggtgtgttggaaagtcaaagctactactgcctttcaatttctgcaactgtattattcactccttcaagagaacttgccacttgaaaggagaaatagcattaattttgaaagactagaagctcaactgaaggcatgtcattgcaggatcatattttctaaagcaaagccttctgtgttggcattgtctatcattgcattagagatccaagcacagaagtgtgtagagttaacagaaggaatagaatgtcttcagaaacattccaagataaatggcagagatctgaccttctggcaagagcttgtatccaaatgtttaactgaatattcatcaaataagtgttccaaaccaaatgttcagaagttgaaatggattgtttctgggcgtactgcacggcaattgaagcatagctactacagaataactcaccttccaacaattcctgaaatggtcccttaactggattattacagcaccaaaaaacttctctgaagcctttctccacaaccttgttctatggattccataatgttacaatggatttaagctatgaagcctcaaaacatcacgagataagcatgatggtctcagacttgggaaaactgcctaatattatgctgtagtggaattatgtttagatttgaattcatctgtgaagcattcaaatcaaagctaaaagcctaaatgtgaaatgctaatgacaagcctgagaagaaaactgtgaatcttcatttctatcattgatctaactttagatattggatcaatatatttaggtggtattgaaaatgctattggaggagtcacactaatactatcaactatcagtcttcccacagcttcaatcactgtcattattctaatcctactcctacttaaattttaagttatgaggtttatgtcaaaagcaacatttcacaaatgtacttttaatgcatataagggttaacattctaggcagtataaacacaccccataatgcagtaa

SEQ ID NO: 227875 - DNA, 945 bp, Homo Sapiens
ttggggatccgtcccggataagacccgctgtctggccctgagtagggtgtgacctccgcagccgcagaggaggagcgcagcccggcctcgaagaacttctgcttgggtggctgaactctgatcttgacctagagtcatggccatggcaaccaaaggaggtactgtcaaagctgcttcaggattcaatgccatggaagatgcccagaccctgaggaaggccatgaaagggctcggcaccgatgaagacgccattattagcgtccttgcctaccgcaacaccgcccagcgccaggagatcaggacagcctacaagagcaccatcggcagggacttgatagacgacctgaagtcagaactgagtggcaacttcgagcaggtgattgtggggatgatgacgcccacggtgctgtatgacgtgcaagagctgcgaagggccatgaagggagccggcactgatgagggctgcctaattgagatcctggcctcccggacccctgaggagatccggcgcataagccaaacctaccagcagcaatatggacggagccttgaagatgacattcgctctgacacatcgttcatgttccagcgagtgctggtgtctctgtcagctggtgggagggatgaaggaaattatctggacgatgctctcgtgagacaggatgcccaggacctgtatgaggctggagagaagaaatgggggacagatgaggtgaaatttctaactgttctctgttcccggaaccgaaatcacctgttgcatgtgtttgatgaatacaaaaggatatcacagaagatattgaacagagtattaaatctgaaacatctggtagctttgaagatgctctgctggctatagtaaagtgcatgaggaacaaatctgcatattttgctgaaaagctctataaatcgatgaagggcttgggcaccgatgataacaccctc

SEQ ID NO: 227876 - DNA, 636 bp, Homo Sapiens
aactttgtacaaaaaagttggcatgaagtccagcggcctcttccccttcctggtgctgcttgccctgggaactctggcaccttgggctgtggaaggctctggaaagtccttcaaagctggagtctgtcctcctaagaaatctgcccagtgccttagatacaagaaacctgagtgccagagtgactggcagtgtccagggaagaagagatgttgtcctgacacttgtggcatcaaatgcctggatcctgttgacaccccaaacccaacaaggaggaagcctgggaagtgcccagtgacttatggccaatgtttgatgcttaacccccccaatttctgtgagatggatggccagtgcaagcgtgacttgaagtgttgcatgggcatgtgtgggaaatcctgcgtttcccctgtgaaagcttgattcctgccatatggaggaggctctggagtcctgctctgtgtggtccaggtcctttccaccctgagacttggctccaccactgatatcctcctttggggaaaggcttggcacacagcaggctttcaagaagtgccagttgatcaatgaataaataaacgagcctatttctctttgcaaaataaaaaagagaaatactcccaactttctagtaaaat

SEQ ID NO: 227877 - DNA, 556 bp, Homo Sapiens; identical to SEQ ID NO: 194357

SEQ ID NO: 227878 - DNA, 897 bp, Homo Sapiens
acaaagtactggaacatcatggaggcttggggcgcagtgacattggtgtggtccagggggttcacaatgcctggatagtcctccccaaatgacaggtgctggatgtagtgggtcatgttgatgttgtcaaggccaaagctctgcaagtcatggacgtgcacatgggactgctggaagctcttcccaggggcaaagtggaagtttccggccaccttattgacttccaagaagccatacacctggcagccttcattcttctgctcctgcatcttctggctgaagccctctcgccggcactgctcaatagtatctgggttcttgaaggcccagcctctacggcgatatgcctcccgcacatcttcacaggtgttacagcacttgatatcttctgcctcagcaccatagcagctctcacagcgatcagggtccagggagtcagggtcaaacaccgtcacctcgactttcccaagctcatgccgctcagcctctgagctcacggggatgccatctttatctagtcgttgcttgaacaggttgtgttccacatccagctgctgttctccggccacatccatggcatcaatactcagataggcacaaggcatgtgcggaaaaagtacatcgatgttgatcttcagtttatctccccgcgacttgtccacgtagagctcaggatgcacctccgtggtgaggtaatactgcagctcggacaggaacagtagcagcatgagaaggccactgacaatggtcacggtggcgcccccgcaggtcttgacccggaagtcctccaaagtcttggggtaggcatcgaactgcttcagcttccccagcgcctccatggggaccggccggaaaggggacgccagccggccgggccccttcagccaacttttttgt

SEQ ID NO: 227879 - DNA, 1275 bp, Homo Sapiens; identical to SEQ ID NO: 194358

SEQ ID NO: 227880 - DNA, 1413 bp, Homo Sapiens; identical to SEQ ID NO: 194359

SEQ ID NO: 227881 - DNA, 895 bp, Homo Sapiens
ttgggtgtctcttgcgtgcgtgggccggaggttagtgtgcggggcccgccgggcggttgaaaagtccgagagaatcaggatggaggccgtggcgacggcgacggcggcgaaggaacccgataagggctgcatagagcctggacctgggcactggggtgagctgagccggacaccagtcccatctaaaccccaggacaaagtggaagcagctgaggcaacaccagtggccctggacagtgacacctccggggctgaaaatgcagcagtgagtgctatgctgcacgctgtagccgccagccgcctgcctgtttgcagccagcagcagggtgaacccgacttgacagagcatgagaaagtggccatcctggcccagctgtaccacgagaagccactggtgttcctggagcgcttccgcacaggcctccgtgaggagcatctggcctgctttggccacgtgcgtggcgaccaccgtgcagacttctactgtgctgaggtggcccggcagggcactgcccggccccgcaccctgcgtacccgcctgcgtaaccggcgctatgctgccctgcgagagctgatccaagggggcgagtacttcagtgatgagcagatgcggttccgggcccccctgctatatgagcagtacatcgggcagtatctcacccaggaggagctcagtgcccgcaccccaacccaccagccccccaagcccgggtcccccgggagacctgcttgcccgctctccaacttgctgctccagtcctacgaggagcgggagctacagcagcgtctgctccaacagcatgaggaggaggacgcctgcttggatgaagaggaagagaggaggacagtgacgagaagaccagaggtcagcaaggactcggaggcctgggttccc

SEQ ID NO: 227882 - DNA, 1003 bp, Homo Sapiens
actttgtacaaaaaagttgggtcacaactctgggaaggatacagagcccccacccttcactgagttctctggatttgttctcagtgccttagcaacgaaaacctgtgcttgtgtgtgtgtggcggcggggagggaggatcctgtttcccacctccttctcctcccctgtactccccagtgccttccttgttctggtggagctggggtttctctcctccccagtcccacaacactgccaaaaatctgtgtatgtgccattgggtggggcagccccaagcctcctggggaggcagggcaaaaacaggtgccctcatcgtggtctgtgccatgtcccgtctctatggtggttgaggagaaaggcggggaagcttcctcagccttgcagatatgtgtggcatttactagccagagctctgaaaggcagtgctgtctgtttcttgtactgggaccaaagtaaaaatccaagcacattccccttgcagttaggggaggccctactgccttctcaaagcagagaggcagcttatcaaactcagcccaaaactctgtttacatgggtggggagatggagcagggaagtacagagtgggatggtcaggacctgggccattgcaaccaaaatggggacttcctgggtagggaggtcactccctctactcactgagctaggattataggagggttattgccccaaccattgcaatgggaggtggagggacaggctcagcctcctcattgtctaaatgaggcctaaatgtgtgaagtgcgatttctgcttttgtgtaccccaccaccccattaccacagctgcctttgtgtgtttgtgtcaataaaaagccaaaccctgggtcctgcttgttgcctctgagagtggagggaaggtgagctcctggaaggctagtgctgccagcagaaaatctgggctgcttcctgccccctgcctctttccatgcccaaatcacgtttccttttctctttttgaaatgaggaagaacatcctggc

SEQ ID NO: 227883 - DNA, 1096 bp, Homo Sapiens; identical to SEQ ID NO: 194360

SEQ ID NO: 227884 - DNA, 1098 bp, Homo Sapiens; identical to SEQ ID NO: 194361

SEQ ID NO: 227885 - DNA, 378 bp, Homo Sapiens
ttgggttgcgtagaccttggccaccagaccctgcctgcctgaggaggcctcggttggatgcgaaggagctgcagcatccaggggacaagatgccaactggcaagcagctagctgacattggctataagaccttctctacctccatgatgcttctcactgtgtatggggggtacctctgcagtgtccgagtctaccactatttccagtggcgcagggcccagcgccaggccgcataagaacagaagacctcaggaatcatgtaaaactggggggctttttctcctgagcacaaaggcccaaggcctgctgtggagagacttcaccagccaccatttccaggtcttttattattatagcgttgatggttttcaaaccctg

SEQ ID NO: 227886 - DNA, 1341 bp, Homo Sapiens; identical to SEQ ID NO: 194362

SEQ ID NO: 227887 - DNA, 486 bp, Homo Sapiens
ttggccatgagcacccctcaccctcccgagttgaaaaaatttatggacaagaagttatcattgaaattaaatggtggcagacatgtccaaggaatattgcggggatttgatccctttatgaaccttgtgatagatgaatgtgtggagatggcgactagtggacaacagaacaatattggaatggtggtaatacgaggaaatagtatcatcatgttagaagccttggaacgagtataaataatggctgttcagcagagaaacccatgtcctctctccatagggcctgttttactatgatgtaaaaattaggtcatgtacattttcatattagactttttgttaaataaacttttgtaatagtcaaaaatgctttctcagatgttctgaatatagaatatcagctctcattccagttttttctaacatgaattttcctggttgacattgatttcaaagggttttatgcattaaagtgaaagaatctta

SEQ ID NO: 227888 - DNA, 698 bp, Homo Sapiens; identical to SEQ ID NO: 194365
  misc_feature (155)..(163): n is a, c, g, or t
  misc_feature (317)..(333): n is a, c, g, or t

SEQ ID NO: 227889 - DNA, 642 bp, Homo Sapiens
taaaagccaactttgtacaaaaaagttgggtcagatgtgggccgaatttgaatgggaaaacaaagtgacagttaacaccaacatggttgatttaaatgactacttacagcacatattaaagtcaaccaatatgaaatgcctgactccagaaaaggccctttctggttactgtggctttatggcagccaacctttatgctcgttccatatttggtgaagatgcacttgcaaatgtcagcattgagaagccaattcaccagggaccagatgctgctgttaccggccatataagaattcgtgcaaagagccagggaatggccttaagtcttggagataaaatcaacttgtcacagaagaaaactagtatataaaaataaacaaaaagtccttgaagctttacagttaatttaggtatgggcttactggactccaacatcttttgtactctttcatgcttatatagaatctgagttcatgctgaatacttttcagccaataatttatagcctttcccttaaatcaagattgagtttaaaattatagtttgtcttttgtcttaacagttctgaatgctgtcctcaaagtatataatgtttcatgtaccaagacccttttcacagtacaataaacagatttattcata

SEQ ID NO: 227890 - DNA, 955 bp, Homo Sapiens; identical to SEQ ID NO: 194366

SEQ ID NO: 227891 - DNA, 896 bp, Homo Sapiens; identical to SEQ ID NO: 194368

SEQ ID NO: 227892 - DNA, 568 bp, Homo Sapiens; identical to SEQ ID NO: 194370

SEQ ID NO: 227893 - DNA, 924 bp, Homo Sapiens
ggaaactcatctaaaaatcggaggacaacctgatgcacccaagtgacaatggacccaggcagctgtgcacaccaggtgggaggcgtttggaacagttagactcatcagtggataggtttttctagcacaaatggaatgtggtgtctcatgtccctagggagacaaagggcaggtttcttatctggtctttccaagctttcaactctctggctcaagtgtcccagaatgaactagaagtctattcctccaccctggtccgtggtcacttccagaactctgaagtggctcaggaggtgactcctgaaaggcagcccttgcttgatctcctggtggagcctgtctgggctgaggcgatgctgggcttgccgtgccgagatctcatgccagaagtcctccctcggagctacctgtctccagcctcattcttcggcatgttgactcctggaattgaggggctatttctaagatgcatgctttttcggcttttctcatgggtgcctcatcagcctgcacaggatcccccatctcacgagagagggaaatttggcattgctgttccctgcctctaaggtcctttatgaggggccgcccaaactcattcccttagttcttactctcccacaggtgttgagattttattggcccatactaaaaagcatgcaatgactgaggttttctcctaaccttaatctcatcttctcaaatgtgtgccttcttgtttttaagaccatagacaaggacgtcaggtgactgctgaaatagaactaaagctaaaatttttctcggatcttggcaaattctgctaatggcacctctaggggcacaatgatcctcaaatgacatccaaccagactccccataaacaaggtttgggctggagctgtttctagttttaaatatggaaatgtaaggcaaaggacccaa

SEQ ID NO: 227894 - DNA, 1061 bp, Homo Sapiens; identical to SEQ ID NO: 194373

SEQ ID NO: 227895 - DNA, 1501 bp, Homo Sapiens
ttgggatgtatacagtagtgattatttcagttttgttttgtctttagcttcattgaatgctactaaattaaagcatccatattatccttgcatggcaaaggtgagcttacagcttgctattcaattcctttttcaaacttatctacggacaaagaagaaactcagggttgatactgaagaatggattgctaccattgaagcattgctttcaaaaagttttgatgcttgtcagtggttagttgaatattttattagttctgaaggacgagaattgataaagattttcttactggagtgcaatgtgagagaagtacgagttgctgtggccaccattctggagaaaaccctagacagtgccttgttttatcaggataagttaaaaagccttcatcagttactggaggtactacttgctctgttggacaaagacgtcccagaaaattgtaaaaactgtgctcagtactttttcctgttcaacacttttgtacaaaagcaaggaattagggctggagatcttcttctgaggcattcagctctgcggcacatgatcagcttcctcctaggggccagtcggcaaaacaatcagatacgtcgatggagttcagcacaagcacgagaatttgggaatcttcacaatacagtggcgttacttgttttgcattcagatgtctcatcccaaaggaatgttgctcctggcatatttaagcaacgaccacccattagcattgctccctcaagccctctgttgcccctccatgaggaggtagaagccttgttgttcatgtctgaagggaaaccttacctgttagaggtaatgtttgctttgcgggagctgacaggctcgctcttggcactcattgagatggtagtgtactgctgtttctgtaatgagcatttttccttcacaatgctgcatttcattaagaaccaactagaaacggctccacctcatgagttaaagaatacgttccaactacttcatgaaatattggttattgaagatcctatacaagcagagcgagtcaaatttgtgtttgagacagaaaatggattactagctttgatgcaccacagtaatcatgtggacagtagtcgctgctaccagtgtgtcaaatttcttgtcactcttgctcaaaagtgtcctgcagctaaggagtacttcaaggagaattcccaccactggagctgggctgtgcagtggctacagaagaagatgtcagaacattactggacaccacagagtaatgtctctaatgaaacatcaactggaaaaacctttcagcgaaccatttcagctcaggacacgttagcgtatgccacagctttgttgaatgaaaaagagcaatcacgaagcagtaatgggtcggagagtagtcctgccaatgagaacggagacaggcatctacagcagggttcagaatctcccatgatgattggtgagttgagaagtgaccttgatgatgttgatccctagaggaacatgcccagcctgagaggagtc

SEQ ID NO: 227896 - DNA, 1041 bp, Homo Sapiens
ctttgtacaaaaaagttggtgccaggcttccgtgaattacaggacatttgagacaatcgtgaaacagcaaatcaaggcactggaagagccggctgtggatatgctacacaccgtgacggatatggtccggcttgctttcacagatgtttcgataaaaaattttgaagagttttttaacctccacagaaccgccaagtccaaaattgaagacattagagcagaacaagagagagaaggtgagaagctgatccgcctccacttccagatggaacagattgtctactgccaggaccaggtatacaggggtgcgttgcagaaggtcagagagaaggagctggaagaagaaaagaagaagaaatcctgggattttggggctttccagtccagctcggcaacagactcttccatggaggagatctttcagcacctgatggcctatcaccaggaggccagcaagcgcatctccagccacatccctttgatcatccagttcttcatgctccagacgtacggccagcagcttcagaaggccatgctgcagctcctgcaggacaaggacacctacagctggctcctgaaggagcggagcgacaccagcgacaagcggaagttcctgaaggagcggcttgcacggctgacgcaggctcggcgccggcttgcccagttccccggttaaccacgctctgtccagccccgtagacgtgcacgcacactgtctgcccccgttcccgggtagccactggactgacgacttgagtgctcagtagtcagactggatagtccgtctctgcttatccgttagccgtggtgatttagcaggaagctgtgagagcagtttggtttctagcatgaagacagagccccaccctcagatgcacatgagctggcgggattgaaagatgctgtcttcgtactgggaaagggattttcagccctcagaatcgctccaccttgcagctctccccttctctgtattcctagaaactgacacatgctgaacatcacagcttatttcctcattttataatgtccctttcacaa

SEQ ID NO: 227897 - DNA, 1308 bp, Homo Sapiens
actttgtacaaaaaagttggcaagcatggtctgaaacattctttgagcaatatttattgagtgcctactatgtgttaggtactgtgccaggcactgataagccagtggtaagggaaacacagctctaacctcacctcattctccaggttacaaaggccatgtgcccctttgaatctggcagagaaagtttcctcgttgtaagtatttgcatctacttcaagccagattcttctgcctctttctcctttccagacccctactctgtgcagtgctgaccacagctagagccaccgccccattgctcaaccagtatttatttccctaaacgacccttcctcacattcccttccctccacctctccttaccaagcacccaaaagaggatttagaactagcagggtggacatcatctggttgtttctacttttctctgcctagcacaaaattgggagaaaactggagcctccatccgcagtcacacgtgtacagatctggggatttggatgtaggctttttctaacttctctctcagaagcttctacagaaacccttccatctgtagcctcaagggcccacctccaagggaaggcttaggcaatgatcctgtttctaccaacactgcaccttatcccaggaacctgccctagacctccagagaccatattttctctccctccatttctacccagacctccaggcctccttctggaatcatagaaccgtagaattggaaggaattttagaggttttctagttggagttgtgtccaacagaattcattaacaccagcctgggcttgtttttcctcctccctctggacttttttcatcttttcctccacctcaaaaaatacttacacacagattcttcttgtacaggcatcaaaaccaactcctctgcccctaaggctgtgtccctgtggtctccagccacccctaccccagtcactcgccccttcctcatctctggaatttggccaggcagtcccagaagactctggagtgacctcctttgcctaaaaagcagacagataggcatgccccaggccctgagtgagcagaggaggactgtagggtgagagggaaagaaaatgaaggtgactttcatggaagtttcatttcttttccccgattgtaccaactgcatgtacttttggcctggctgcaaggagcaatattggtttactctcgtatccttaaaaagttacagaactgtgtcttaaagagaattatttatagttactataaactgaatttgacaaatgtcaacttaactgataaatttatatttgggtaaaataaaagagga

SEQ ID NO: 227898 - DNA, 1382 bp, Homo Sapiens; identical to SEQ ID NO: 194386

SEQ ID NO: 227899 - DNA, 749 bp, Homo Sapiens
cctgcctgtggtctggtcagctgtccctgccgccgctacttttctggtatggggctgtagccttggtcaggttcccagcttccctcttgagaacgctgagcaaagtctgggagctctccaggatcttgaggtaggcggcctccgtctccgcgatggtccggtcgaactcgttgcgagaggcaatcttgcgtgccaggttctcgttgacgcgggccagcttctctgtcagctgcctcacctcattctgcagccgctgcttctcgtcctcctcctcctggatctgccggcacagctcctcccgcttctggcacagctcctctatgcctgggggccgggaggggcggcgctgtgggcccagggcaggagcgcggcggcggagggcgggcctccttccacccgaggaagccagagtcaggcaccacccccgagcgcccggcgcggggcctgcgagccagcgagggctcgggccacggacacccggcctccggcacggagggctctgctcagccgcgcgatgcccgcagcgaggcgggtccaggggcaccccgctgcgagccgggaacccggccctgcggccctcccgacctccccgtcccggctgcgccgctcacacttgaccagctcgttgttgtagttctgcagcgccgcgccctgctgggtcatggtcaacgccgcccggggccccaccaccccaaccgccgcggaagcagcgctgtccgcgcctgcgcacgactgccccacggcgccaa

SEQ ID NO: 227900 - DNA, 932 bp, Homo Sapiens
ctttgtacaaaaaagttggccaaacgaagtcgtggaggtggcgaaacgaggaggagataacgcggccttgggctctggtgtctcccagtctgctaaagccctaaggccatcaccatggacttccagcatcgccccgggggcaagaccgggagcgggggcgtggcctcctcctccgagagcaaccgtgaccgcagggagcgcctccggcagctggccctggagaccatcgacatcaacaaggacccgtacttcatgaagaaccacctgggctcctatgaatgcaaactctgcctgacacttcacaacaatgaggggagctacctggcacatacgcaggggaagaagcaccagaccaacctggcccggcgagcagccaaggaggccaaggaggcccctgcccagcccgcgcctgagaaggtcaaggtggaggtgaagaagtttgtgaagatcggccgcccgggctacaaagtgaccaagcagagagactcggagatgggccagcagagcctcctcttccagattgactaccctgagatcgccgagggcatcatgccacgtcaccgcttcatgtctgcgtacgagcagaggatcgagcctccggaccggcgctggcagtacctgctcatggccgccgagccctacgagaccattgccttcaaggtgccgagcagagagatcgacaaggcggagggcaagttctggacacactggaaccgggagaccaagcagttcttcctccagttccactttaagatggagaagcccccggctccacccagcctccctgctggcccccctggggtgaagcggcctccacccccgctgatgaacggtctgccccctcggcccgctgcctgagtctttgccaccgcccccgccaggaggcctgcctctgccacccatgccccccacagggcctgcgccctcagggc

SEQ ID NO: 227901 - DNA, 878 bp, Homo Sapiens
gtttgtgattgagggggtgcgatgaatggccaatgaagctgtgctaaaatttcctcaaaatcacttgtaagcttgtccttgagaatttttatgccagaatttaactgtggctctcatgaaaccaagaagatgagtacaagatgattcctgaagtttaatgtcaagttctgccatagacactagagtggaggctgcctccggtacattattggtcatcagatattgctgaatgttatcacttagttcttcaatttgtgaaatccatttaaggtaagcaagatgacgttcgatctcttcaatctggctaatcatggttccaagatcgtccatccaaggttgcgcagtcagcaaatggctgttaatggcgctgaagagatgagtttcctgctccagaaactgattaagaaattgctttgattcttctgcattttttaaggcacttcgaattcttttaggaatttctgatgaaattgtaagtacctgttcttctaactgcattttacttactgtcctctgttctatgagtttatcaagtttctttaaagatttaaggtcatttccaacttccttttctatgaatgcagacacataagaagggagatcaccattatctgtaccttcactgacttgtttacttccaataagaactgtaacatttatgtcacttttctcctcgaggttcttcctttcgtcaccactttcagagcagcacggggctgcaggagaggcgccgatctcgccggctggtagcatctcgcctccgcgcgagtcctcggctccattcgcagccagcgtggcctgtggagtctggctaaggccagcgacacactcactacccagcctcggaggccgtaggactgagtgccacagcgacccaa

SEQ ID NO: 227902 - DNA, 629 bp, Homo Sapiens
actttgtacaaaaaagttggccatgatccgcccttatcctcatccagaaccgggcaggcaagacgcgcctggccaagtggtacatgcagtttgatgatgatgagaaacagaagctgatcgaggaggtgcatgccgtggtcaccgtccgagacgccaaacacaccaactttgtggagttccggaactttaagatcatttaccgccgctatgctggcctctacttctgcatctgtgtggatgtcaatgacaacaacctggcttacctggaggccattcacaacttcgtggaggtcttaaacgaatatttccacaatgtctgtgaactggacctggtgttcaacttctacaaggtttacacggtcgtggacgacatgttcctggctggcgaaatccgagagaccagccagacgaaggtgctgaaacagctgctgatgctacagtccctggagtgagggcaggcgagccccaccccggccccggcccctcctggactcgcctgctcgcttccccttcccaggcccgtggccaacccagcattccttccctcagctgcctaggaggaagggacccagctgggtctgggccacaagggaggagactgcaccccactgcctctgggccctggctgt

SEQ ID NO: 227903 - DNA, 925 bp, Homo Sapiens
caactttgtacaaaaaagttggcattttctttgttttgacatcagaaacttgaactttacctgatttctgtatgttgtcatcttgcgtacgcccagtccccacgacagtccggtttgtagattccctgatctgcaattcttcccgttccttcatggatttgaaggctctcctttcttccttgaatgactttgcatccctctcgtttgctgagagttgggacaatgttggattactggtggaaccaagcccaccacatactgtaaatacactcttcctgaccaatgacctgactgaggaagtgatggaggaggtgctgcaaaagaaggcagacctcattctctcctaccatccgcctatcttccgacccatgaagcgcataacctggaacacatggaaggagcgcctggtgatccgggctctggagaacagagtcggtatctactctcctcatacagcctatgatgctgcgccccagggcgtcaacaactggttggctaaagggcttggagcttgtacctccaggcccatacatccttccaaagctcccaactaccctacagagggaaaccaccgagtagaattcaacgttaactacacccaagacctggacaaagtcatgtctgcagtgaaaggaattgacggtgtttctgtcacttctttttctgctaggactggtaatgaggaacaaacacggattaatctgaattgtactcagaaggctttgatgcaagtggtagattttctttcccggaacaaacaactttatcagaagacggaaattctgtcactggagaagcctttgcttctacatactggaatgggacggttatgcacactggatgaatctgtctccctggcaaccatgaattgatcaataaaaaacacctaaaactatctcatattcccttagcccttggggtgggg

SEQ ID NO: 227904 - DNA, 1167 bp, Homo Sapiens
  misc_feature (655)..(656): n is a, c, g, or t
ttggcaccctttcggatgcctcccctagaaccctaccactttccacccctttccgtctgttatttctcccaaacttgcgcccgcacaggcccctctggaacactcctgccccgtagtgcccctcgtccccgctccgtagagaaagagcgtgcgtgccgcgcatttctggcctggggagcgggtggagtaaacctgcgggaaccattttacgacaacgtgcggctgtgcggtgtggctgacggcaacgccgctgctcttggagaggtcactccggagacggcgttggttttggggtgtggggggttggtggcactatgtggcgcgtctgtgcgcgacgggctcagaatgtagccccatgggcgggactcgaggctcggtggacggccttgcaggaggtacccggaactccacgagtgacctcgcgatctggcccggctcccgttcgtcgcaacagcgtgactacagggtatggcggggtccgggcactgtgcggctggacccccagttctggggccacgccgcggaaccgcttactgctgcagcttttggggtcgcccggccgccgctattacagtcttcccccgcatcagaaggttccattgccttctctttcccccacaatgcaggcaggcaccatagcccgttgggaaaaaannagagggggacaaaatcaatgaaggtgacctaattgcagaggttgaaactgataaagccactgttggatttgagagcctggaggagtgttatatggcaaagatacttgttgctgaaggtaccagggatgttcccatcggagcgatcatctgtatcacagttggcaagcctgaggatattgaggcctttaaaaattatacactggattcctcagcagcacctaccccacaagcggccccagcaccaacccctgctgccactgcttcgccacctacaccttctgctcaggctcctggtagctcatatccccctcacatgcaggtactggcagagatagaaactgacaaagccactataggttttgaagtacaggaaagaaggttatctggcaaaaatcctggtccctgaagcacaagagatgtccctctaggaaccccactctgtatcattgtagaaaaagaggcagatatatcagcattttgctgactataagccaaccgaagtaacagattt

SEQ ID NO: 227905 - DNA, 880 bp, Homo Sapiens
acaaaaaagttggggaagcctggcgcacgtccggaggtgccgaggacccaaccagcccaaactctgggggaaatgactcccctctgccctcgccccgcgctctgctaccatttccttacgtctctgcttcgctcagcgatgcaaaacgcgcgaggcgcacggcagagggccgaagccgcggtactctccgggccaggcccgcccctcggccgcgccgcgcagcacgggattccccggccgctgtccagcgctggccgcctgagccaaggctgccgcggagccagtacagtcggggccgctggctggaagggcgagcttcctaaggcggggggaagcccggcgccggggccggagacacccgccatttcacccagtaagcgggcccggcctgcggaggtgggcggcatgcagctccgctttgcccggctctccgagcacgccacggcccccacccggggctccgcgcgcgccgcgggctacgacctgtacagtgcctatgattacacaataccacctatggagaaagctgttgtgaaaacggacattcagatagcgctcccttctgggtgttatggaagagtggctccacggtcaggcttggctgcaaaacactttattgatgtaggagctggtgtcatagatgaagattatagaggaaatgttggtgttgtactgtttaattttggcaaagaaaagtttgaagtcaaaaaaaggtgatcgaattgcacagctcatttgcgaacggatttttttatccagaaatagaagaagttcaagccttggatgacaccgaaaaggggtttcaagaggttttggttcccctggaaagaattaaaatttatgccaagaacagaaaacaggaagtccatacctttttctt

SEQ ID NO: 227906 - DNA, 1303 bp, Homo Sapiens; identical to SEQ ID NO: 194391
  misc_feature (318)..(337): n is a, c, g, or t
  misc_feature (1220)..(1231): n is a, c, g, or t

SEQ ID NO: 227907 - DNA, 1000 bp, Homo Sapiens
ttggatcagatttatagataatatgttaatggggtcaggagcttttgtaaagaaaatctctctttctcctttttcaaccactgattctgcatatgaatggaaaatgcccaaaaaatcctccttaggtagtatgccattttcatcagattttgaggattttgactacagctcttgggatgcaatgtgctatctggatcctagcaaagctgttgaagaagatgactttgtggtggggttctggaatccatcagaagaaaactgtggtgttgacacgggaaagcagtccatttcttacgacttgcacactgagcagtgtattgctgacaaaagcatagcggactgtgtggaagccctgctgggctgctatttaaccagctgtggggagagggctgctcagcttttcctctgttcactggggctgaaggtgctcccggtaattaaaaggactgatcgggaaaaggccctgtgccctactcgggagaatttcaacagccaacaaaagaacctttcagtgagctgtgctgctgcttctgtggccagttcacgctcttctgtattgaaagactcggaatatggttgtttgaagattccaccaagatgtatgtttgatcatccagatgcagataaaacactgaatcaccttatatcggggtttgaaaattttgaaaagaaaatcaactacagattcaagaataaggcttaccttctccaggcttttacacatgcctcctaccactacaatactatcactgattgttaccagcgcttagaattcctgggagatgcgattttggactacctcataaccaagcacctttatgaagacccgcggcagcactccccgggggtcctgacagacctgcggtctgccctggtcaacaacaccatctttgcatcgctggctgtaaagtacgactaccacaagtacttcaaagctgtctctcctgagctcttccatgtcattgatgactttgtgcagtttcagcttgagaagaatgaa

SEQ ID NO: 227908 - DNA, 918 bp, Homo Sapiens
ctttgtacaaaaaagttggctccactggcttggctaaactcggagtcgccagatcgtttttatcctgctcaggaccgtgtttcttcgcctcgcctccctggtggtcctgctcttctctctctggaatcagatcacttgtgggggcgactccgaggctgaggactgcaaaacctgtggctacaattacaaacaacttccgtgctgggagactgtcctgggccaggaaatgtacaaacttctgctctttgatctgctgactgtcttggcagtcgcgctgctcatccagtttcctagaaagctcctctgtggcctctgtcctggggcgctgggtcgtctggcggggacccaggagttccaggtgcccgacgaggtgctggggctcatctacgcgcagacggtggtctgggtggggagttttttctgccctttactgcccctgcttaacacggtcaagttcctgctgcttttctacctgaagaagcttaccctcttctccacctgctccccggctgcccgcaccttccgggcctccgcggcgaatttctttttccccttggtccttctcctgggtctggccatctccagcgttcccctgctttacagcatcttcctgatcccgccttctaagctttgtggtccattccgggggcagtcgtccatctgggcccagatccctgagtctatttccagcctccctgagaccacccagaatttcctcttcttcctggggacccaggcttttgctgtgccccttctgctgatctccagcatcctgatggcgtacactgtggctctggctaactcctacggacgcctcatctctgaactcaaacgttcaagacaaacggaaggcgcacaataaagtcttctctggcacggcgcgctgtggcgctgactctcaactaaaccggctctttg

SEQ ID NO: 227909 - DNA, 1246 bp, Homo Sapiens
tacaaaaaagttggctcagagtcgcgaggccggacgcagcgcggcgccgccccactcgccccagccgccgccatgaaggccgtggtgcagcgcgtcacccgggccagcgtcacagttggaggagagcagattagtgccattggaaggggcatatgtgtgttgctgggtatttccctggaggatacgcagaaggaactggaacacatggtccgaaagattctaaacctgcgtgtatttgaggatgagagtgggaagcactggtcgaagagtgtgatggacaaacagtacgagattctgtgtgtcagccagtttaccctccagtgtgtcctgaagggaaacaagcctgatttccacctagcaatgcccacggagcaggcagagggcttctacaacagcttcctggagcagctgcgtaaaacatacaggccggagcttatcaaagatggcaagtttggggcctacatgcaggtgcacattcagaatgatgggcctgtgaccatagagctggaatcgccagctcccggcactgctacctctgacccaaagcagctgtcaaagctcgaaaaacagcagcagaggaaagaaaagaccagagctaagggaccttctgaatcaagcaaggaaagaaacactccccgaaaagaagaccgcagtgccagcagcggggctgagggcgacgtgtcctctgaacgggagccgtagctcaggaggcagaattcagtgtgttatcattgggcagaactggatcctgaaaaattcaagatgctaagcacctacactactttaagaatttggaactgaaacatgaagaggaagacagaaataagaatttgggaacctgaatagctctgcaaaaaacaccaaaggaccgttttatcgttttctgttgttgctgtggtggagtgatgcagtgggcactgccggtgggccagggggcgggtgcgcatgtggtagaaggtgtgcgctcgtgcctcccccacagaaaggctttgttggtttctaccacatcttggcttgcttttggaacaggctggcccagcatcatttgtcatcaagtccactgtggtgtattctgcgtgtccatggcgggggttctccaatacactcacactgtccatgttctttttattgccagggcccgtgttgaagtgtcaagagagcaatcatcaatgataatgtattgtgtgagacctttgcatcttgtaaattttctcttttttctaaaaataaataataataaaatcct

SEQ ID NO: 227910 - DNA, 754 bp, Homo Sapiens
aaaaaagttggagacagcagaccttcagaaagcggcggctaagcagagactgtagtagcggcgacagcgacgacggcagcgatggctggggcggggccagccccgggactcccgggtgcaggaggacccgtggtcccgggtcctggcgctggcatcccgggcaaaagcggcgaggaacgcttgaaggaaatggaggcggagatggccctgtttgagcaggaagttctgggggctccagtacctggaatcccaactgctgtgcctgcggtgcccactgtccccacggtccccacagtagaagcgatgcaggtcccagcggctcctgtgatccgcccaattatcgcgaccaacacataccagcaggtccagcagactctggaggcccgagcagctgctgcagccacagtagttcctcccatggtgggtggccctccttttgtaggccctgttggctttggccctggtgatcggagtcacctggacagcccagaggctcgagaagccatgttcctgcggcgggcagctgtggccccccagagggcccctatcctgcgtccagccttcgtcccccacgtgctacagagagcagattccgctctctcctctgcaacagccggcccccgccctatggccctacggccccctcaccaggccctcgtgggcccacctctgcctgggccccctggaccacccatgatgctgccaccaatggctcgggctctagggcccccgctgggctccatggctgcactga

SEQ ID NO: 227911 - DNA, 821 bp, Homo Sapiens; identical to SEQ ID NO: 194394

SEQ ID NO: 227912 - DNA, 727 bp, Homo Sapiens
ttggcgacagccacgtccgggcccagcaggcctgcattgaggccaagcacgtgagggtgccccccacccacatgtgggtctgtgtgtgtgcacgtggcgtgggagcatccccgccttgtgttgggtctgtgccccatggaggagggaggtggggtgtctcccccaagcacagcactcaactcttcacaggacaagtacatggcggacatggacgagcttttttctcaggtggatgagaagaggaagaagcgagacatccccgactacctgtgtggcaagatcagctttgagctgatgcgggagccgtgcatcacgcccagtggcatcacctacgaccgcaaggacatcgaggagcacctgcagcgtgtgggtcattttgaccccgtgacccggagccccctgacccaggaacagctcatccccaacttggctatgaaggaggttattgacgcattcatctctgagaatggctgggtggaggactactgaggttccctgccctacctggcgtcctggtccaggggagccctgggcagaagcccccggcccctatacatagtttatgttcctggccaccccgaccgcttcccccaagttctgctgttggactctggactgtttcccctctcagcatcgcttttgctgggccgtgatcgtccccctttgtgggctggaaaagcaggtgagggtgggctgggctgaggccattgcccgccactatctgtgt

SEQ ID NO: 227913 - DNA, 1264 bp, Homo Sapiens; identical to SEQ ID NO: 194396

SEQ ID NO: 227914 - DNA, 1107 bp, Homo Sapiens
ttggggctgtctctgccctcccagggcaatagtgaggtcagacaggagaaaagacatgcagacactcagcccctgtgtcagggaatggtgggcgacacagcctctccacagaggaccgaggctgagggggtgggaaggaggtgcagggaggtgagggttctgggaagggagcccggagtggtggagcctcttccccagacttcagcaggaacggtatcttcccacaggtgtgacgagaactgcttgagctgtgcaggctccagcaggaactgtagcaggtgtaagacgggcttcacacagctggggacctcctgcatcaccaaccacacgtgcagcaacgctgacgagacattctgcgagatggtgaagtccaaccggctgtgcgaacggaagctcttcattcagttctgctgccgcacgtgcctcctggccgggtaagggtgcctagctgcccacagagggcaggcactcccatccatccatccgtccaccttcctccagactgtcggccggagtctgtttcaggagcggcgccctgcacctgacagctttatctccccaggagcagcatctctgagcacccaagccaggtgggtggtggctcttaaggaggtgttcctaaaatggtgatatcctctcaaatgctgcttgttggctccagtcttccgacaaactaacaggaacaaaatgaattctgggaatccacagctctggctttggagcagcttctgggaccataagtttactgaatcttcaagaccaaagcagaaaagaaaggcgcttggcatcacacatcactcttctccccgtgcttttctgcggctgtgtagtaaatctccccggcccagctggcgaaccctgggccatcctcacatgtgacaaagggccagcagtctacctgctcgttgcctgccactgagcagtctggggacggtttggtcagactataaataagataggtttgagggcataaaatgtatgaccactggggccggagtatctatttctacatagtcagctacttctgaaactgcagcagtggcttagaaagtccaattccaaagccagaccagaagattctatcccccgcagcgctctcctttgagc

SEQ ID NO: 227915 - DNA, 1604 bp, Homo Sapiens
ccaactttgtacaaaaaagttgggccgacgggcccgcggggccggcgccgccatggcggccgtgtttgatttggatttggagacggaggaaggcagcgagggcgagggcgagccagagctcagccccgcggacgcatgtccccttgccgagttgagggcagctggcctagagcctgtgggacactatgaagaggtggagctgactgagaccagcgtgaacgttggcccagagcgcatcgggccccactgctttgagctgctgcgtgtgctgggcaaggggggctatggcaaggtgttccaggtgcgaaaggtgcaaggcaccaacttgggcaaaatatatgccatgaaagtcctaaggaaggccaaaattgtgcgcaatgccaaggacacagcacacacacgggctgagcggaacattctagagtcagtgaagcacccctttattgtggaactggcctatgccttccagactggtggcaaactctacctcatccttgagtgcctcagtggtggcgagctcttcacgcatctggagcgagagggcatcttcctggaagatacggcctgcttctacctggctgagatcacgctggccctgggccatctccactcccagggcatcatctaccgggacctcaagcccgagaacatcatgctcagcagccagggccacatcaaactgaccgactttggactctgcaaggagtctatccatgagggcgccgtcactcacaccttctgcggcaccattgagtacatggcccctgagattctggtgcgcagtggccacaaccgggctgtggactggtggagcctgggggccctgatgtacgacatgctcactggatcgccgccctttaccgcagagaaccggaagaaaaccatggataagatcatcaggggcaagctggcactgcccccctacctcaccccagatgcccgggaccttgtcaaaaagtttctgaaacggaatcccagccagcggattgggggtggcccaggggatgctgctgatgtgcagagacatccctttttccggcacatgaattgggacgaccttctggcctggcgtgtggacccccctttcaggccctgtctgtcagaggaggacgtgagccagtttgatacccgcttcacacggcagacgccggtggacagtcctgatgacacagccctcagcgagagtgccaaccaggccttcctgggcttcacatacgtggcgccgtctgtcctggacagcatcaaggagggcttctccttccagcccaagctgcgctcacccaggcgcctcaacagtagcccccgggcccccgtcagccccctcaagttctccccttttgaggggtttcggcccagccccagcctgccggagcccacggagctacctctacctccactcctgccaccgccgccgccctcgaccaccgcccctctccccatccgtcccccctcatggacaagaagtccaagagggcccgtgggcgtccagggcgctaggaagcccgggtgggggtgagggtagcccttgagctctgtccctgcggctgtgagagcagcagactctgggccagttcagagacctgggggtgtgtctgggggtgggg

SEQ ID NO: 227916 - DNA, 956 bp, Homo Sapiens; identical to SEQ ID NO: 194398

SEQ ID NO: 227917 - DNA, 963 bp, Homo Sapiens; identical to SEQ ID NO: 194399

SEQ ID NO: 227918 - DNA, 749 bp, Homo Sapiens
  misc_feature (78)..(92): n is a, c, g, or t
  misc_feature (168)..(180): n is a, c, g, or t
  misc_feature (198)..(210): n is a, c, g, or t
ttggcacaatggggaaattgaagtggtgcataacattgccaaaatagtgtgccactagaaatggtgtaaaggctgtcnnnnnnnnnnnnnnnaaagaaaagttattaccatgtattttgtgaggcaggtttacaacactacaagtcttgagttaagaaggaaagaggnnnnnnnnnnnnncaccaatacccagatttnnnnnnnnnnnnncgatcatagtcttaggagttcatttaaaccataggaacttttcacttatctcatgttagctgtaccagtcagtgattaagtagaactacaagttgtataggctttattgtttattgctggtttatgaccttaataaagtgtaattatgtattaccagcagggtgtttttaactgtgactattgtataaaaacaaatcttgatatccagaagcacatgaagtttgcaactttccaccctgcccatttttgtaaaactgcagtcatcttggaccttttaaaacacaaattttaaactcaaccaagctgtgataagtggaatggttactgtttatactgtggtatgtttttgattacagcagataatgctttcttttccagtcgtctttgagaatagaggaaaaaaaatcttcagatgcaatggttttgtgtagcatcttgtctatcatgttttgtaaatactggagaagctttgaccaatttgacttaaagatggaatgtaactttgcttacagaaattgctattaaactcctggttaagg

SEQ ID NO: 227919 - DNA, 490 bp, Homo Sapiens; identical to SEQ ID NO: 194400
  misc_feature (78)..(90): n is a, c, g, or t

SEQ ID NO: 227920 - DNA, 284 bp, Homo Sapiens; identical to SEQ ID NO: 194401

SEQ ID NO: 227921 - DNA, 924 bp, Homo Sapiens
ttggattgactttcactatgacctgtccataatggcatcagagatttttccacctcagttacacccaagcagagtctctgtgatggcagatggcacagaattacagttattagagattctaatgtggttcagttggatgtggactctgaagtgaaccatgtggttggacccctgaatccaaaaccaattgatcacagggagcctgtgtttgttggaggtgttccagaatctctactgacaccacgcttggcccccagcaaacccttcacaggctgcatacgccactttgtgattgatggacacccagtgagcttcagtaaagcagccctggtcagcggcgccgtaagcatcaactcctgtccagcagcctgacatgacagagcacagctgcccaaatacaaagttctttagagcactgaaagaaacacaaagccagccaggaggaacagtaactctttcttcgggtggaagctttcatcgagttgaacaggacttaaacgaatcatcagggaccggatatttcttatttctcatttggattcttaaccttgaatccaaagtgtctgcaatggacaacaattgaaggagtggcaaacttacttgtattgagagcacacgcaattcctactggtgaaattactgtttctgtttctaataaaatagaagggattccaaataaacacttgcacacatttttgaagtgcggctagattctcagattcacctttcttccagggaagataactttcaatctatataaaaatctctgtcctaaaactacctttctttattttgaagagacttactaacttacatataatctaaattagatgatagatttgtttttagctcttttgtttggtctatcagtataagagaatattttaggtttatagctgagttatcaaggtttaataaagtaaa

SEQ ID NO: 227922 - DNA, 1183 bp, Homo Sapiens
  misc_feature (1010)..(1028): n is a, c, g, or t
ttgggttggctgccggtgagttgggtgccggtggagtcgtgttggtcctcagaatccccgcgtagccgctgcctcctcctaccctcgccatgtttcttacccggtctgagtacgacaggggcgtgaatactttttctcccgaaggaagattatttcaagtggaatatgccattgaggctatcaagcttggttctacagccattgggatccagacatcagagggtgtgtgcctagctgtggagaagagaattacttccccactgatggagcccagcagcattgagaaaattgtagagattgatgctcacataggttgtgccatgagtgggctaattgctgatgctaagactttaattgataaagccagagtggagacacagaaccactggttcacctacaatgagacaatgacagtggagagtgtgacccaagctgtgtccaatctggctttgcagtttggagaagaagatgcagatccaggtgccatgtctcgtccctttggagtagcattattatttggaggagttgatgagaaaggaccccagctgtttcatatggacccatctgggacctttgtacagtgtgatgctcgagcaattggctctgcttcagagggtgcccagagctccttgcaagaagtttaccacaagtctatgactttgaaagaagccatcaagtcttcactcatcatcctcaaacaagtaatggaggagaagctgaatgcaacaaacattgagctagccacagtgcagcctggccagaatttccacatgttcacaaaggaagaacttgaagaggttatcaaggacatttaaggaatcctgatcctcagaacttctctgggacaatttcagttctaataatgtccttaaattttatttccagctcctgttccttggaaaatctccattgtatgtgcattttttaaatgatgtctgtacataaaggcagttctgaaataaagaaaattttaaaatatttgttaatagactgttctcttctaatagtcnnnnnnnnnnnnnnnnnnnaagagatgaggtctcactatattgcccaggctggtttcaaactcctgggttcaagtgatcttcccgcctctgcctcctgaagtgctaggattataggcgagagccactgtgcccagccattgtaatacagtcttttgtttgaaatgcaaatgtta

SEQ ID NO: 227923 - DNA, 1039 bp, Homo Sapiens
ttggctatcgcttacctacctccctctgcaggaacccggcgatatggctgccgctgtgccccgcgccgcatttctctccccgctgcttccccttctcctgggcttcctgctcctctccgctccgcatggcggcagcggcctgcacaccaagggcgcccttcccctggatacggtcactttctacaaggtcattcccaaaagcaagttcgtcttggtgaagttcgacacccagtacccctacggtgagaagcaggatgagttcaagcgtcttgctgaaaactcggcttccagcgatgatctcttggtggcagaggtggggatctcagattatggtgacaagctgaacatggagctgagtgagaaatacaagctggacaaagagagctacccagtcttctacctcttccgggatggggactttgagaacccagtcccatacactggggcagttaaggttggagccatccagcgctggctgaaggggcaaggggtctacctaggtatgcctggttgcctgcctgtatacgacgccctggccggggagttcatcagggcctctggtgtggaggcccgccaggccctcttgaagcaggggcaagataacctctcaagtgtgaaggagactcagaagaagtgggccgagcaatacctgaagatcatggggaagatcttagaccaaggggaggacttcccagcatcagagatgacacggatcgccaggctgattgagaagaacaagatgagtgacgggaagaaggaggagctccagaagagcttaaacatcctgactgccttccagaagaagggggccgagaaagaggagctgtaaaaaggctgtctgtgattttccagggtttggtgggggtagggaggggagagttaacctgctggctgtgagtcccttgtggaatataaggggtagtgggaaaagtggtactaacccacgattctgagccctgagtatgcctggacattgatgctaacatgaccatgcttgggatgtctctagctggtctggggatagctggagcacttactc

SEQ ID NO: 227924 - DNA, 600 bp, Homo Sapiens
ctttgtacaaaaaagttggccagattccctccgtcgccgccaagatgatgtgcggggcgccctccgccacgcagccggccaccgccgagacccagcacatcgccgaccaggtgaggtcccagcttgaagagaaagaaaacaagaagttccctgtgtttaaggccgtgtcattcaagagccaggtggtcgcggggacaaactacttcatcaaggtgcacgtcggcgacgaggacttcgtacacctgcgagtgttccaatctctccctcatgaaaacaagcccttgaccttatctaactaccagaccaacaaagccaagcatgatgagctgacctatttctgatcctgactttggacaaggcccttcagccagaagactgacaaagtcatcctccgtctaccagagcgtgcacttgtgatcctaaaataagcttcatctccgggctgtgccccttggggtggaaggggcaggattctgcagctgcttttgcatttctcttcctaaatttcattgtgttgatttctttccttcccaataggtgatcttaattactttcagaatattttcaaaatagatatatttttaaaatccttaaaaaaaa

SEQ ID NO: 227925 - DNA, 1021 bp, Homo Sapiens
ttgggcacctgcctgcctttgcctaaggcggatttgaataatcttatcttggctttggtcttagaagagaatcactaaccagagacgagactcagtgagtgagcaggtgttttggacaatggactggttgagcccatccctattataaaaatgtctcagagcaaccgggagctggtggttgactttctctcctacaagctttcccagaaaggatacagctggagtcagtttagtgatgtggaagagaacaggactgaggccccagaagggactgaatcggagatggagacccccagtgccatcaatggcaacccatcctggcacctggcagacagccccgcggtgaatggagccactggccacagcagcagtttggatgcccgggaggtgatccccatggcagcagtaaagcaagcgctgagggaggcaggcgacgagtttgaactgcggtaccggcgggcattcagtgacctgacatcccagctccacatcaccccagggacagcatatcagagctttgaacaggtagtgaatgaactcttccgggatggggtaaactggggtcgcattgtggcctttttctccttcggcggggcactgtgcgtggaaagcgtagacaaggagatgcaggtattggtgagtcggatcgcagcttggatggccacttacctgaatgaccacctagagccttggatccaggagaacggcggctgggatacttttgtggaactctatgggaacaatgcagcagccgagagccgaaagggccaggaacgcttcaaccgctggttcctgacgggcatgactgtggccggcgtggttctgctgggctcactcttcagtcggaaatgaccagacactgaccatccactctaccctcccacccccttctctgctccaccacatcctccgtccagccgccattgccaccaggagaaccactacatgcagcccatgcccacctgcccatcacagggttgggcccagatctggtcccttgcagctagttttctagaattta

SEQ ID NO: 227926 - DNA, 1041 bp, Homo Sapiens; identical to SEQ ID NO: 194404

SEQ ID NO: 227927 - DNA, 1140 bp, Homo Sapiens; identical to SEQ ID NO: 194408

SEQ ID NO: 227928 - DNA, 587 bp, Homo Sapiens
  misc_feature (514)..(534): n is a, c, g, or t
ttggatttgacctcagtgatcacgagaagaaagccatgaccgaccaatatgttgacatactgatcctctactctgagtggggctaaataagttattttctctgaccgcctactggaaatatttttaagtggaaccaaaataggcatccttacaaatcaggaagactgacttgacacgtttgtaaatggtagaacggtggctactgtgagtggggagcagaaccgcaccactgttatactgggataacaatttttttgagaaggataaagtggcattattttattttacaaggtgcccagatcccagttatccttgtatccatgtaatttcagatgaattattaagcaaacattttaaagtgaattcattattaaaaactattcatttttttcctttggccataaatgtgtaattgtcattaaaattctaaggtcatttcaactgttttaagctgtatttctttaattctgcttactatttcatggaaaaaaataaatttctcaattttaatgtnnnnnnnnnnnnnnnnnnnnncccaactttcttgtacaaagttgtgcggcccaacttttttgtacaaagttggc

SEQ ID NO: 227929 - DNA, 911 bp, Homo Sapiens; identical to SEQ ID NO: 194411

SEQ ID NO: 227930 - DNA, 626 bp, Homo Sapiens
aactttgtacaaaaaagttggctgttgaaacctttcaaagctaaagacatggaccttcagcagtgtaagaagatattgtacagtatattttaaatctatgaaattcatagttctgatgcttttggtcacagagcatcattttatcacttctggaaaatgtttattccaaaacagctttaatggcccatatgtacacttcgtaatctcaaggttattattctgacaccagcttgctgctatgatttcagagcacataagtaaaggtgctttttaatgtgcagtctatttccagagcttacttagttgctgatttccagatttcgatgtttcttaagtctaggtgaatttatatatatatttttttgcttttcattttctaaagttagttattatttccattgaagcttgttttctttttttcttcccattttagctactgcagtgcttttgtttcacacttgatttgtaaaaattttatatatatgtatttaaaatgtgccattttattgctaagtgaagtatgtcctgttttctgctataattctttctcggtcaaattgcaatgtcagcagttactgccacactcctgtcagcttaaacacaaatgttactgcttatcttttctt

SEQ ID NO: 227931 - DNA, 1180 bp, Homo Sapiens
  misc_feature (313)..(359): n is a, c, g, or t
actttgtacaaaaaagttggggcagttctccattttctctatagccagtcagctatagctacaggcaaagaagagtaagaccaaaatgccatctttggtaaaaaagtggcagagtatccagcgtgagttagatgaagaggacaattctagttccagtgaagaggatcgggaatcaactgcacagaagcgaattgaagagtggaaacagcagcagctggttagtggcatggcagagagaaatgctaattttgaagcccttcctgaggattggagagcaaggctgaagagaaggaaaatggctccaaacacatannnnnnnnnnnnnnnnnnnnnnnnnnnnnnnnnnnnnnnnnnnnnnncagttcaaagtcttaaccagttttattgtcaaataaactataaatgttatgggggagatcttataaatttcctgggcaagagtgtatgcatacaaagttttcacttttgtgaaatgtaatttttctgtttttgcaaagggatgaggtgattggaattgctttgaccatgctgcctttattctcaaactggcaaacttagcatgttaggtgtattaacctcatcagtcttgaagaacatgtggctcatgagtataacacttctgtagaggactccctgacaaaagtgaagaattaacttctcctccagaacaagtgcaattcagaaggcagctctgcattctaccttgcttgactggaattgtctgaagctttttctggcctcttttctctagtcggccacccctgaagtgctgaggtctaagtggtttacctcgtgctgatagatggccacactctttagagtagttctcataagttctagaactggtagctcggtcgtttcgcacactaggtggcatacaggcagcagcaggtgttcatatccttgattttgagaatttcccctcaagtatgtggcagtaaatacaacaagacactctatgtattaatgtctccattgtcttaaccctgttccaaaacaaaattcacctcctttctttatgtgaatgtattctccataaaattccagtatttaaaaagcagtttactgttctgtactttctgttgtatcacaatcaggtaaaagtcactttaaactgaggaaacggcaaattgtgttttaaagctctttgtatttctccaatttctgaccttgtaaattt

SEQ ID NO: 227932 - DNA, 414 bp, Homo Sapiens
tataatgcccactttgtacaaaaaagttgggtcccagcgaacccgcgtgcaacctgtcccgactctagccgcctcttcagctcgccatggatcccaactgctcctgcgccgccggtgactcctgcacctgcgccggctcctgcaaatgcaaagagtgcaaatgcacctcctgcaagaaaagctgctgctcctgctgccctgtgggctgtgccaagtgtgcccagggctgcatctgcaaaggggcgtcggacaagtgcagctgctgcgcctgatgctgggacagccccgctcccagatgtaaagaacgcgacttccacaaacctggattttttatgtacaaccctgaccctgaccgtttgctatattcctttttctatgaaataatgtgaatgataataaaacagctttgacttg

SEQ ID NO: 227933 - DNA, 805 bp, Homo Sapiens
tccttgggagccatgggccggtgaatgtttctgatccctctgcgctatccaccatcatgtacttctgcaggatgaaggacttcagctcatccttttgggggcctctgaggcgtctgggcaggtcctggttggggccctcccaggctgcaggcccctcttcctttccctctaccagcatctgcacagcttcttccaagtccccccgagctttggccagcacccactgggcctgctccaccgaacaggtagggaacacctccaggagtacatccacccctggcagaagctcctcctcagcgccagttgcctcatcttgggtgtctgcagcagcagcagccgaagacctagtctcttctttgagcatttcgggccgctgcaggggctctggggagatgggcacctgaccttggacaccagagctctgcggttgcaggttctctttgttcctggcatcgctcagctgccctgagagcttctgcatcatgtcccctattgtgcccctggggatgtgggcgaagccaggcacataggcctccatcatctcagtgaaagcctccatatcgaagttctcctctgatgggcccgaggggcccaggtcctccaggaccccaagcacataggagaagatgacctcatccaagccactgaggtcggcctccgggaggtgtgtctggacaaaggcaaggagggctgcactgacgatcctctccagctccatgctctctgttctgctccgtcgggcgccgccggcgacttgtcccgcgcggtgcagctctcatctcccagccgtgacacctctcgccaa

SEQ ID NO: 227934 - DNA, 909 bp, Homo Sapiens
tggataaaataggcgcgtgctgcaacccgcgcccgcttcggagagagaaatgctggggtgcagcttcaagcttaggaccacccaccatgcctatccaggtgctgaagggcctgaccatcactcattaagaacagaggaggctgcctgttactcctggtgttgcatccctccagacactctgctgtttcctgcctaggcgtggctgcagccatggctaggaaagcgctgccacccacccacctgggccagagctggttctgctcctgctgcagggacactgagctggctatctcggcgcttcgggcaagaactgcaacaggctctcctgggtcctgcaggtgtacagccgggcccctgccttgtgcctcagctctcgagagctgctgctgccgggtgacctgatccaacctgataaggtgccatcttcagctaccactgcaaggccctgagggcaacagcagcacggcactgcccacccggctgctgatggcctggtgccagctgggagtcctcccggcacttcgaggccactgagccacccttccagccccagcccaccatggacaggggtatccagcttcctcctcaacctcgtcctctgcccctgagccagtgacgcccaaggacatgcctgttacccaggtcctgtaccagcactagctggtcaagggcatgacagtgctggaggccgtcttggagatccaggccatcactggcagcaggctgctctccatggtgccagggcccgccaggccaccaggctcatgctgggacccaacccaagtgcacaaggacttggctgctgagcaacacaccccagcagaacgtgaaaagtgggctaccagggcttcctggcaggctagggggaggagccaccccccgcttccctattgtgaccaggcctatggg

SEQ ID NO: 227935 - DNA, 757 bp, Homo Sapiens
ggaaagggcactgagggacagaagactagcattaccttcatgaaagggctgttagagatgcctggaagaaggcatgccttgggaactgggaagatgccgtcagtgtgggtgggcaagaggacagccagtcgtcctgctgccagcccaatagcttccagcggcaggtgcccaggtgctaccggagcccctcataggggtaggggcagggactgcacctcctccaggcactcatcgtaagcctcctggtactcctcatggggcttgaccattatcacacaggtggggcgcttggagcctgcggctgcacccaggtccgtcttagaggggatatagacatagggcaaatttcggtcctcacacatgactgggagatggcagtatacctcaatgggcagtgtgtctcctgccaaaaccatgatccctttttctcctttgttgacaaatttctgaacctctttcaccccgcgccgaatctgcttctgcttcaccgctttcttgatgcatttgtagagcttccgcgtgaggcggcgagaagccaggggctgcgcgatggggttctggttgaccagcagctcctggtaggtgcgctccccggaacacgcctccgcctgagcctcgggcccgtcgggatctgcctttattttggtcatcgcagcggccgctgaaacctagtcccagggaggcgagcccacgcggccacagctttaggcatcacttccaggtcatcagctgcgcgagaagccgccgtacaacccaa

SEQ ID NO: 227936 - DNA, 619 bp, Homo Sapiens; identical to SEQ ID NO: 194418

SEQ ID NO: 227937 - DNA, 1371 bp, Homo Sapiens
  misc_feature (987)..(1027): n is a, c, g, or t
tggctcaacgagcaccctcgaaaacctccttcttcctcgtgcgggaggacaccaaggctgccgtgctgctccacctgctgcacaacgtggtgcggccccaggaccagaccgtggtgtttgtggccacgaagcaccacgccgagtacctcactgagctgctgacgacccagcgggtgagctgcgcccacatctacagtgccctagacccgacagcccgcaagatcaatctcgccaaattcacgcttggcaagtgctccactctcattgtgactgacctggccgcccgaggcctggacatcccgctgctggacaatgtcatcaactacagcttccccgccaagggcaaactcttcctgcaccgcgtgggccgtgtggctcgggctggccgaagtggcacagcctactccttggtggcccctgatgaaatcccctacctgctggatctgcacctgttcctgggccgctccctcaccctcgcccgacccctcaaggagccctcaggtgtggccggtgtggatggcatgctgggtcgggtgccacagagtgtggtggacgaggaggacagtggtctgcagagcaccctggaggcatcgctggagctacggggcctggcccgcgttgctgataacgcccagcagcagtatgtgcgctcacgcccggcgccctcgcctgagtccatcaagagggccaaggagatggaccttgtggggctgggcctgcaccccctcttcagctcgcgttttgaggaggaggagctgcagcggctgaggctggtggacagcataaagaactaccgctcccgggcgactatctttgagatcaacgcctccagccgagacctgtgcagccaggtgatgcgcgccaagcggcagaaggaccgcaaggccatcgcccgcttccagcagggacagcaggggcggcaggagcagcaggagggcccagtgggcccagccccgagccgcccagcactgcaggagaagcagcctnnnnnnnnnnnnnnnnnnnnnnnnnnnnnnnnnnnnnnnnncattttctcagaggtcgtgggccggaagcggcagcggtcaggacccaacaggggagccaagaggcggagggaggaggcccggcagcgggaccaggaattctacatcccctaccggcccaaggactttgacagcgagcggggcctgagcatcagcggggaagggggagcctttgagcagcggcagctggcgctgtcctggacttgatgggggatgaagcccagaacctgacgaggggccggcagcagctcaagtgggaccgtaagaagaagcggtttgtgggacagtcggacaggaagacaagaagaagattaagacagagagcggccgctacatcagcagctcc

SEQ ID NO: 227938 - DNA, 903 bp, Homo Sapiens
ttggcggaaacggacccacgccccgagcgccctgtcgcccccccgcaagagagggaagagcggccacagtagcggaaagctgagcagcaagtctctgctgacatcagatgattatgagctgggagcagggataagaaagagacacaaggggtctgaggaggaacatgatgccctcatcggaatggggaaagccagggggaggaaccagacttgggatgaacatgaggcctcgtcggacttcatcagtcagctaaagattaagaagaagaagatggccagcgaccaggagcagttggcaagcaagctcgacaaggccctctccctcaccaagcaggacaagttgaagtcgcccttcaagttttcggacagtgctggggggaaatcgaaaactagcgggggctgcggcaggtacttgactccttacgacagcctgctggggaagaacaggaaggcgctggccaagggcctcggcctgtctctgaaatcctccagagaaggtaaacacaaaagggcagccaaaaccaggaagatggaggtggggttcaaggccagaggccagcccaagtcggcccattccccgtttgcctcggaagtgagcagctactcttacaatacggactcagaggaagacgaagaattcctgaaggacgagtggcccgcccaaggcccctccagctccaaactgacgccttccctcctgtgtagcatggtggcaaagaacagcaaggcagctggtggccccaagctgaccaagaggggcctggcggccccccggactctgaaacccaagccggccaccagcaggaagcagccgttttgtctgctgcttcgagaggccgaggcgcgttcctccttcagcgactcttcggaggaatcgtttgaccaagatgagagctcggagga

SEQ ID NO: 227939 - DNA, 1470 bp, Homo Sapiens; identical to SEQ ID NO: 194420

SEQ ID NO: 227940 - DNA, 945 bp, Homo Sapiens
ttgggtggctccagagatggcagtgagcgagaggagggggctcggccgcgggagccccgcggagtgggggcagcggctacttctggtgctgctgttgggtggctgctccgggcgcatccaccggctggcgctgacgggggagaagcgagcggacatccagctgaacagcttcggtttctacaccaatggctctctggaggtggagttgagcgtcctgcggctgggcctccgggaggcagaagagaagtccctgctggtggggttcagtctcagccgggttcggtctggcagagttcgctcctattcaacccgggatttccaggactgccctctccagaaaaacagtagcagtttcctggtcctgttcctcatcaacaccaaggatctgcaggtccaggtgcggaagtatggagagcagaagacgttgtttatctttcccgggctcctcccggaagcaccctccaaaccagggctcccgaagccacaggccacagtcccccgcaaggtggatggcggagggacctctgcagccagcaagcccaagtcaacacccgcagtgattcagggtcctagtgggaaggacaaggacctggtgttgggcctgagccacctcaacaactcctacaacttcagtttccacgtggtgatcggctctcaggcggaagaaggccagtacagcctgaacttccacaactgcaacaattcagtgccaggaaaggagcatccattcgacatcacggtgatgatccgggagaagaaccccgatggcttcctgtcggcagcggagatgccccttttcaagctctacatggtcatgtccgcctgcttcctggccgctggcatcttctgggtgtccatcctctgcaggaacacgtacagcgtcttcaagatccactggctcatgggcgggccttgggccttcaccaagagcatctctctcctctt

SEQ ID NO: 227941 - DNA, 1073 bp, Homo Sapiens; identical to SEQ ID NO: 194422

SEQ ID NO: 227942 - DNA, 732 bp, Homo Sapiens; identical to SEQ ID NO: 194425

SEQ ID NO: 227943 - DNA, 1238 bp, Homo Sapiens; identical to SEQ ID NO: 194428
  misc_feature (238)..(247): n is a, c, g, or t

SEQ ID NO: 227944 - DNA, 897 bp, Homo Sapiens
ttggcaacaacttttcttttgtgtgtggggttactttccactggcccccccttcctcctctcctttcaagatttaaatgctaatggcggattaaaacctgtagatacgtttggctttaggagtctggcgcattggagtgactgtctggcatcaccaagatgacactccacgccacccggggggctgcactcctctcttgggtgaacagtctacacgtggctgaccctgtggaggctgtgctgcagctccaggactgcagcatcttcatcaagatcattgacagaatccatggcactgaagagggacagcaaatcttgaagcagccggtgtcagagagactggactttgtgtgcagttttctgcagaaaaatcgaaaacatccctcttccccagaatgcctggtatctgcacagaaggtgctagagggatcagagctggaactggcgaagatgaccatgctgctcttataccactctaccatgagctccaaaagtcccagggactgggaacagtttgaatataaaattcaggctgagttggctgtcattcttaaatttgtgctggaccatgaggacgggctaaaccttaatgaggacctagagaacttcctacagaaagctcctgtgccttctacctgttctagcacattccctgaagagctctccccacctagccaccaggccaagagggagattcgcttcctagagctacagaaggttgcctcctcttccagtgggaacaactttctctcagttctccagcttctcccatgggtgatatcctgcagaccccacagttccagatgagacggctgaagaagcagcttgctgatgagagaagtaatagggatgagctggagctggagctagctgagaaccgcaagctcctcaccgagaa

SEQ ID NO: 227945 - DNA, 724 bp, Homo Sapiens
ttggcaaccttcccggggcgcgggccgcagcttttcggttcacagcgggcagggaaagccgcgggaagggtactccaggcgagaggcggacgcgagtcgtcgtggcaggaaaagtgactagctccccttcgttgtcagccagggacgagaacacagccacgctcccacccggctgccaacgatccctcggcggcgatgtcggccgccggtgcccgaggcctgcgggccacctaccaccggctcctcgataaagtggagctgatgctgcccgagaaattgaggccgttgtacaaccatccagcaggtcccagaacagttttcttctgggctccaattatgaaatgggggttggtgtgtgctggattggctgatatggccagacctgcagaaaaacttagcacagctcaatctgctgttttgatggctacagggtttatttggtcaagatactcacttgtaattattccaaaaaattggagtctgtttgctgttaatttctttgtgggggcagcaggagcctctcagctttttcgtatttggagatataaccaagaactaaaagctaaagcacacaaataaaagagttcctgatcacctgaacaatctagatgtggacaaaaccattgggacctagtttattatttggttattgataaagcaaagctaactgtgtgtttagaaggcactgtaactggtagctagttcttgattcaatagaaaaatg

SEQ ID NO: 227946 - DNA, 695 bp, Homo Sapiens
aaaaaaaaaacctttatttacaaggacatcaaaaatggtcagcaaagcattcacagctcaccatcccccataagtcatttcaggtggtttcaattctttgcaagataaagaatattttctatttttttaagcaacataaggtaaacttgattgaaactgaattctttctcaaaagtataagtcatttcctgaaaatttaaatattgctctcatattttattcttcgaaactccatatattaaaaaggaagagagaaaaccccgtgctcgtttattaacagtgtgccttggagttgaaaacaataaatcaatccttgaggttttgctcctaggaacctaattgtgaacaaaactcacagcttctgcaaataaaaggggaactgggcaggcatacatgtaactggcaatccattctgtttactttcagctgcacccacctctggatcaaagaacttctaggacatcaagccaattatcttctgtaataccctacccctaatatagatacccccaactcacctcagatattaaatactgataactaagtagcactgttattgatatttacacctttcaatccagatgcagtttagaaaagtggcatcataatatgaacattaacaatgtaacttccgtttattttttaaaggaatgtataatcgagggtatctcctttaccaacttttttgtacaaag

SEQ ID NO: 227947 - DNA, 971 bp, Homo Sapiens
ttgggaatggaggagtcggaacccgaacggaagcgggctcgcaccgacgaggtgcctgccggaggaagccgctccgaggcggaagatgaggacgacgaggactacgtgccctatgtgccgttacggcagcgccggcagctactgctccagaagctgctgcagcgaagacgcaagggagctgcggaggaagagcagcaggacagcggtagtgaaccccggggagatgaggacgacatcccgctaggccctcagtccaacgtcagcctcctggatcagcaccagcaccttaaagagaaggctgaagcgcgcaaagagtctgccaaggagaagcagctgaaggaagaagagaagatcctggagagtgttgccgagggccgagcattgatgtcagtgaaggagatggctaagggcattacgtatgatgaccccatcaaaaccagctggactccaccccgttatgttctgagcatgtctgaagagcgacatgagcgcgtgcggaagaaataccacatcctggtggagggagacggtatcccaccacccatcaagagcttcaaggaaatgaagtttcctgcagccatcctgagaggcctgaagaagaaaggcattcaccacccaacacccattcagatccagggcatccccaccattctatctggccgtgacatgataggcatcgctttcacgggttcaggcaagacactggtgttcacgttgcccgtcatcatgttctgcctggaacaagagaagaggttacccttctcaaagcgcgaggggccctatggactcatcatctgcccctcgcgggagctggcccggcagacccatggcatcctggagtactactgccgcctgctgcaggaggacagctcaccactcctgcgctgcgccctctgcattgggggcatgtccgtgaaagagcaaatggagaccatccgacacgtgtacacatgatggtggccaccccgggg

SEQ ID NO: 227948 - DNA, 874 bp, Homo Sapiens
ttggcccacatctcagacacctccgtggttgtcaagctggacaacagccgggacctgaacatggactgcatcattgccgagatcaaggcacagtacgatgacattgtcacccgtagccgggctgaggccgagtcctggtaccgcagcaagtgtgaggagatgaaggccacggtgatcaggcacggggagaccctgcgccgcaccaaggaggagatcaacgagctgaaccgcatgatccagaggctgacggctgaggtggagaatgccaagtgccagaattccaagctggaggctgcggtggctcagtctgagcagcagggtgaggcggccctcagcgatgcccgctgcaagttggccgagctggagggtgccctgcagaaggccaagcaggacatggcctgcctgatcagggagtaccaggaggtgatgaactccaagctgggcctggacatcgagatcgccacctacaggcgcctgctggagggcgaggagcagaggctgtgcgagggcgtcggctcggtgaatgtctgcgtcagcagctcccgcggtggcgttgtctgtggcgatctctgcgcctccactactgcccctgttgtctccaccagagtcagtagcgtccccagcaacagcaacgtggtggtgggcactactaacgcctgcgccccctccgcccgggttggcgtctgcggcggcagctgtaagaggtgctaggaggctgccgcctccgccagcgcctgtcgccgtcactctccacccagcccagtacctcgcgcccaccagaacgcgccgcccgcgccgggcctcccaatagccgccgcccgctgcctgcactctaagcgctctccccaccgctccgctccgggagccatccccg

SEQ ID NO: 227949 - DNA, 947 bp, Homo Sapiens; identical to SEQ ID NO: 194431

SEQ ID NO: 227950 - DNA, 1226 bp, Homo Sapiens
ttggcgatgaaggggccgctggggaaggatgtcagagaaaccagaagcttgacggtgaatcctcgggttttaaggagagagcaaagtcctgagagggcgacgtattgtccctgctcacctagcccagaatgaacaaacacgcgccagccagggagcagcgagccgagaattcggacgagcctctgcaaccgccatttgccgttctcgcaaagactaccaagaccacaatgcaacggggcgccgagctaattcccagtgagcagcaggcgaggcgccaccgacgcggaagactataagccccagcgggcgacgaccgaacgcccccgggaacaccgggccccgagctcggtcccgcgcccgaggatcctccacggggctagatggctgcgtcgggggcgggagcggaggtgagcgggcgctagggccgcgagcccccgccggcccttcctccagcgccctgcggaccccgcagaaggcgctcgcctccctagcccgcaaaaacatatcgatttttctcgctgtggcaacggggacgtcctgatagatcctctgctccaataggcaactccggccttccctgccctgacctggaacctctgggagggctgcagagtaagtgccgcctctgcgctccgacggaggcacgaggcctgtggagtaggtccctctgttccgacaggtgcgacacttggcgctccatgcttgcgggtgccgggaggcctggcctcccccagggccgccacctctgctggttgctctgtgctttcaccttaaagctctgccaagcagaggctcccgtgcaggaagagaagctgtcaggtgggtgattgtctgggaacccgacacgtcccgtcgtttgtttttggttttagtatcttccccatataccaagagcacaggtggaaaaggccggcaccacatggaatgagggcaagcgctgtgccgggaagttggatgggcagagcctgggagaaatgttttctgaatggcctggggctggcatttatctttcctttcagcaagcacctcaaatttgccatgctggctggtggaagagtttgtggtagcagaagagtgctctccatgctctatttccgggctaaaactacccctgagtgtggtcccccaggatatgtagagaaaatcacatgcatcctcatctaagagaatgagttccaaagctgccgctccacctttgatggaacaacgctttattttggaaattc

SEQ ID NO: 227951 - DNA, 1022 bp, Homo Sapiens; identical to SEQ ID NO: 194437

SEQ ID NO: 227952 - DNA, 1478 bp, Homo Sapiens
ttggctttttggcttttcttttggttgtaacttaagttatagcttaatttatatttaaatgttttaagtataaatcacctctagtctgcatatggaatctgttcatttctattttcaggatatacttttgagatgtcagtgattgcaccaacactttgtgcttctagtggctttgccataattcagtgtcaccaataaggcacagcccagttagcagcttagcccccctagcaaaccccaaggcacaaagtgggcatcctgactcatctctaggtctgtggtttctcccctcttcccttggcagagttattgagggcatgatctcagggctgctaagataacatttctgaggattctagatgatcctcttaaagaataaaagcacatccgtggatcggacatggctgcatgtgcctgcttaacagggccaacttagttcctactgttctgtgcccttcagtggatggaacgtgagtgtctgatcatctctcttggaagttttctgaaccttccaagctctgtggtgaggacaaaccagtgtttgaatcatatgctgataactgtttgcctgtgaccctcacaccttgttcttcagggttttaatgattttctgttgacaacttttgcaatgctttcccaccaaagtgcttacttgtaaagaaaactaaatccttctgtgtccccggcagcctcagtgcagcaacagaagccaagggagaatgctgctggtttggcccatggcacagccagcttctctgaccagtaatccggggtgacttgagggtctgcaaaggcatagaactccccagtgttttccacctcattctcccagattgagctcccttccaaaggatcgttcctctcattgcacagccatattacaaagggtttcctgctcaagtgatgttttggtaagaacttcgctgagttccactgtggattacagtttgtatggactactactgtaaattatagcttgtttggagggatattagtcattattttattcatgacaggtagactacaattcgaacttagggttacctcagtctttagccattactgcttatttcttttccccaagtcacaaaaaacttgtaagctgctgggttaaagcagaggccacctgtcagatctaccctacccttatttggttacatggcacctgagagtttcactcagaccagggatcttccttagggagggtcaaagtgcagatcagaccatgcaggtaaggtgaaccagctgcacggaccaggttcccgcaaaacattgccagctagtgaggcataatttgctcaaagtatagaaacaagcccacctgtgcccactttgaccattggtgaggatagatataaaatcacttcttccaacgaagcctacgtgaaaatctatttataaatggaccacaactctggggtgtcgtttttgtgctgtgacttcctaattattgctaaagaactactgtttagttggta

SEQ ID NO: 227953 - DNA, 1311 bp, Homo Sapiens
ttggcgcagtctcggccaggcggtatgagtttggctgggggccgggcaccccggaagaccgctgggaaccggctttctgggcttttggaggcagaggaggaagatgagttctaccagacgacttatgggggtttcacagaggaatccggagatgatgagtatcaaggggaccagtcagacacagaggacgaagtggactctgactttgacattgatgaaggggatgaaccatccagtgatggagaagcagaagagccaagaaggaagcgccgagtagtcaccaaggcctataaggaacctctcaagagcttaaggcctcgaaaggtcaacaccccggctggtagctctcagaaggcgcgagaagagaaggcactactgccattagaactacaagatgacggctctgacagtcggaagtctatgcgtcagtctacagctgagcatacacgacaaacgttccttcgggtacaggagaggcagggccagtcaagacggcgaaaggggccccactgtgagcggccactaacccaggaggaactgctccgggaggccaagatcacagaagagcttaatttacggtcactggagacatatgagcggctcgaggctgataaaaagaagcaggttcataagaagcggaagtgccccgggcccataatcacctatcattcagtgacagtgccacttgttggggagccaggccccaaggaagagaacgttgacatagaaggacttgatcctgctccctcggtgtctgcattgactcctcatgctgggactggacccgtcaacccccctgctcgctgctcacgtaccttcatcacttttagtgatgatgcaactttcgaggaatggttcccccaagggcggcccccaaaagtccctgttcgtgaggtctgtccagtgacccatcgtccagccctataccgggaccctgttacagacataccctatgccactgctcgagccttcaagatcattcgtgaggcttacaagaagtacattactgcccatggactgccgcccactgcctcagccctgggccccggcccgccacctcctgagcccctccctggctctgggccccgagccttgcgccagaaaattgtcattaaatgaagagatgtctagtcctcagaaacttctttcctgccctgattggggctcttgctgttccgtttcttctccctgcttctcccctttgtcatctctgatctttgcctaatctgtttctttttccttttcccctagttcttacaggtttcgttgtgttttttaaatctaataaaatagaaagatctcttcattaat

SEQ ID NO: 227954 - DNA, 1475 bp, Homo Sapiens
  misc_feature (221)..(289): n is a, c, g, or t
  misc_feature (1172)..(1256): n is a, c, g, or t
ttggcacattctagatgatgttccagagggcacctctcctactaccaagctgaaggttgggaagacggtcactgcccgagtgattggcgggcgagacatgaagacattcaagtatctcccaataagtcaccccagattcgttcgaaccatcccggagctgagtgttcggccaaggctacatccctttgtggtttttctgagaagaaaaaagaaaatcaaannnnnnnnnnnnnnnnnnnnnnnnnnnnnnnnnnnnnnnnnnnnnnnnnnnnnnnnnnnnnnnnnnnnntgagctggaggatggccacactgctcttaacactcactctgttagccccatggagaagattaaacagtaccaggccggccagactgttacttgcttcttaaagaaatacaatgtggtgaagaaatggcttgaggtggagattgccccagacatccgggggagaattcccttattgctcacttctctgagcttcaaggttctgaagcatccagataagaagttccgggttggccaggccctgagggccaccgttgttggcccagattcctccaagaccttcttatgtctgtccctcacaggtcctcacaagcttgaggaaggggaagtggccatgggccgagtggtgaaggtgactcccaacgaggggctgaccgtctccttcccctttgggaagataggaacagtcagtatatttcacatgagtgactcctactccgagacgcccctggaagacttcgtcccccagaaggttgtcagatgttacatcctgtccactgcagacaacgtattgactttgtcgctgcgatcatccagaacaaacccggagacgaaaagcaaagtagaagatccagagattaactccatccaggacattaaggaagggcagcttctgaggggctatgtagggtccatccagccacacggtgtgttctttcgccttggcccctccgttgtgggtttggctcggtactcccatgtctcccagcacagcccgtccaagaaagccctttataacaaacacctccctgaagggaagctgctcacagccagggtcctacgccttaaccaccagaagaacctggtagagctgtctttcctccccggagacactgggaagccagacgtgctttctgcttccttggaagggcaacttacaaagcannnnnnnnnnnnnnnnnnnnnnnnnnnnnnnnnnnnnnnnnnnnnnnnnnnnnnnnnnnnnnnnnnnnnnnnnnnnnnnnnnnnngggcaggaggaggtggagatgctcagcaaggagaagcaacagcctcagaagccacaggcgcagaagcggggcgggcgggagtgccgggagtctgggagtgagcaggtgaggtctctgcggagggctgtggctgtctatcctctctcctggagggacagccatgagggcgtggggacagggcactccagtggggctcgagggagggtgtcgcctggggct

SEQ ID NO: 227955 - DNA, 898 bp, Homo Sapiens
ttggccatgttggaggctccgggcccgagtgatggctgcgagctcagcaaccccagcgccagcagagtcagctgtgccgggcagatgctggaagtgcagccaggattgtatttcggtggggccgcggccgtcgcggagccagatcacctgagggaagcgggcatcacggccgtgctaacagtggactcggaggagcccagcttcaaggcggggcctggggtcgaggatctatggcgcctcttcgtgccagcgctggacaaacccgagacggacctactcagccatctggaccggtgcgtggccttcatcggtcaggcccgcgctgagggccgtgcggtgttggtgcactgtcatgcaggagtcagtcgaagtgtggccataataactgcttttctcatgaagactgaccaacttccctttgaaaaagcctatgaaaagctccagattctcaaaccagaggctaagatgaatgaggggtttgagtggcaactgaaattataccaggcaatgggatacgaagtggatacctctagtgcaatttataagcaatatcgtttacaaaaggttacagagaagtatccagaattgcagaatttacctcaagaactctttgctgttgacccaactaccgtttcacaaggattgaaagatgaggttctctacaagtgtagaaagtgcaggcgatcattatttcgaagttctagtattctggatcaccgtgaaggaagtggacctatagcctttgcccacaagagaatgacaccatcttccatgcttaccacagggaggcaagctcaatgtacatcttatttcattgaacctgtacagtggatggaatctgctttgttgggagtgatggatggacagcttctttgcccaaatgcagtgccaagttggg

SEQ ID NO: 227956 - DNA, 1429 bp, Homo Sapiens
ttggcatgacaccgcttctcctcacaccccagtccgcagtgcccctccccagcctcggccgggcctcccgggagccgggcgtggcgttccagctagtgagccgtttctcccctgggctcggaggcggaagcttgaggggcgcggggaggagcttcgcgtgcggggtgaacgcccgctctacgtgctcgttctcttcgcgaccgctgcgcgcgagccccgtgtccccacggcgggcagcagcggcggcggcggcggctgaacgcggaggtgggcggagggagcccgcggcggcggcagcagctacagcgaaatggcggagaccgtggctgacacccggcggctgatcaccaagccgcagaacctgaatgacgcctacggaccccccagcaacttcctcgagatcgatgtgagcaacccgcaaacggtgggggtcggccggggccgcttcaccacttacgaaatcagggtcaagacaaatcttcctattttcaagctgaaagaatctactgttagaagaagatacagtgactttgaatggctgcgaagtgaattagaaagagagagcaaggtcgtagttcccccgctccctgggaaagcgtttttgcgtcagcttccttttagaggagatgatggaatatttgatgacaattttattgaggaaagaaaacaagggctggagcagtttataaacaaggtcgctggtcatcctctggcacagaacgaacgttgtcttcacatgtttttacaagatgaaataatagataaaagctatactccatctaaaataagacatgcctgaaatttggcaagaaggggcaaaaacgtgactattaatgattgataagcaccagtgaagaagttctaacttttagcatgctgcacagaaactggtataacatgccttcagtatactaacactcatatgctcagttttgttttgttttggcagttgacaagaagttaatttgctttagtaaaaatccctcattccagcctttctatataaatagctctttcttgctgttttaatgtggtgcacactatagcctcacaaacctgttattccagtgtaatctgcagtgtcgtaactaaagttactggcttggtcttatttgcacagtttttgcgtcttgtttgcttcttgcatctgattaactagaatatttctctttcccccttttaatttgtgatgtcacttgaccccatttatgtgtaggagcactacaccattggtttccaatactgcacacataagatacatacttgtgtgcagaaagtatcttcctccaggcttgtaatacccttcacatggaagattaatgagggaaatctttatattctgtataaaaacaaaagcaaatttatatactaaaatcatttgtctaaaaatttaagttgttttcaaataaaaattaaaatgcatttctga

SEQ ID NO: 227957 - DNA, 923 bp, Homo Sapiens
caatccccatatgatgagactgataatcgcaactccaatgacaaggataagaatgatgatgcacagggtttttctggatttgcgctgataatctgctgcccttgacagctgctgatttgcttgctgaacgtgcacctctgcattttccacattggcttctatgctatctattacatctccttgttcatgaatcatcattcccaaatctttaaatatttcattaatatccataatatcagcttcaagttgcctgatagaagattctctctcatgaataagacggaggtcatcctctgtaatttcttcatcctgcacctgcacttgaggttgagtttggctttcccaggatacaagattcctttcttttgagctgtcctcaggaaaactgccagacactctggaactggctcttactcgagcaacaaactctttctctcgctcagcagcctgcctctggaccttctggaagtttgtcagtgatgttgtgaactctgccactaagcgatccttctgtattttcctttgacgctgttcactgggggtggtgggcagagatccaaactctttaatgtacttatctgtttctttggcaagctggttagtatactgctgcttctgttgcaactgttgcctcaattcaggtgaatcttgaggtgttccaagttgattcagagttctttgtatttccacagaacactgtgtgatcttctggatgttagaagagatcctctgggccaactgggcggggtcaccaccaactcctggagtgtaagacatggttgatgttcttattcgctaatttcatcagatgctgtgcagttttctaagcagtcacctggacctccacggctccctcctacacctccgaccgccgtcacccacctaccccggagccctcagctgcaattctcagctgatgccaa

SEQ ID NO: 227958 - DNA, 933 bp, Homo Sapiens
ttgggggatttgaaccgcgctgacgaagtttggtgatccatcttccgagtatcgccgggatttcgaatcgcgatgatcatcccctctctagaggagctggactccctcaagtacagtgacctgcagaacttagccaagagtctgggtctccgggccaacctgagggcagacaagttgttaaaagccttgaaaggctacattaaacatgaggcaagaaaaggaaatgagaatcaggatgaaagtcaaacttctgcatcctcttgtgatgagactgagatacagatcagcaaccaggaagaagctgagagacagccacttggccatgtcaccaaaacaaggagaaggtgcaagactgtccgtgtggaccctgactcacagcagaatcattcagagataaaaataagtaatcccactgaattccagaatcatgaaaagcaggaaagccaggatctcagagctactgcaaaagttccttctccaccagacgagcaccaagaagctgagaatgctgtttcctcaggtaacagagattcaaaggtaccttcagaaggaaagaaatctctctacacagatgagtcatccaaacctggaaaaaataaaagaactgcaatcactactccaaactttaagaagcttcatgaagctcattttaaggaaatggagtccattgatcaatatattgagagaaaaaagaaacattttgaagaacacaattccatgaatgaactgaagcagcagcccatcaataaggaggggtcaggactccagtacctccaagaggaagactctctgtggcttctactcccatcagccaacgacgctcgcaaggccggtcttgtggccctgcaagtcagagtaccttgggtctgaaggggtcactcaagcgctctgctatctctgcagctaaaacggtgtcagttttcagctgctact

SEQ ID NO: 227959 - DNA, 951 bp, Homo Sapiens
actttgtacaaaaaagttggcgcagacgcagaaaacgcaggcaaacctgaggtcctcagaatggcgggcacaggtttggtggctggagaggttgtggtggatgcgctgccgtattttgatcaaggttatgaagcccctggtgtgcgggaagcggctgcagcgctggtggaggaggaaactcgcagataccgacctactaagaactacctgagctacctgacagccccggattattctgcctttgaaactgacataatgagaaatgaatttgaaagactggctgctcgacaaccaattgaattgctcagtatgaaacgatatgagcttccagccccctcctctggtcaaaaaaatgacattactgcatggcaagaatgtgtaaacaattctatggcccagttagagcatcaagcagttagaattgagaatctggaactaatgtcacagcatggatgtaatgcctggaaagtatacaatgaaaatctagttcatatgattgaacacgcacagaaggaacttcagaagttaagaaaacatattcaagatttaaactggcagagaaagaacatgcaactcacagctggatctaaattgagagaaatggagtcaaattgggtatccctggtcagtaagaattatgagattgaacggactattgttcagctagaaaatgaaatctatcaaattaagcagcaacatggagaggcaaacaaagaaaacatccggcaagacttctgaaaagacaatttagcaggtagaagaaaagttgggctttcacaaaaggcatctgaacttttaatgaactttgaaggacaacagcatcttcccaaaaccattgatgtttaagtgtttagaaatcatagaagtgtagctgctgtggtaattctatttgtatatctcaacagaattaaaatgtctagcttggtggtatttttatagccataaagaaaa

SEQ ID NO: 227960 - DNA, 920 bp, Homo Sapiens
ttgggtggcagcacggcagactggtcaaacaaatggattttacagaggcttacgcggacacgtgctctacagttggacttgctgccagggaaggcaatgttaaagtcttaaggaaactgctcaaaaagggccgaagtgtcgatgttgctgataacaggggatggatgccaattcatgaagcagcttatcacaactctgtagaatgtttgcaaatgttaattaatgcagattcatctgaaaactacattaagatgaagacctttgaaggtttctgtgctttgcatctcgctgcaagtcaaggacattggaaaatcgtacagattcttttagaagctggggcagatcctaatgcaactactttagaagaaacgacaccattgtttttagctgttgaaaatggacagatagatgtgttaaggctgttgcttcaacacggagcaaatgttaatggatcccattctatgtgtggatggaactccttgcaccaggcttcttttcaggaaaatgctgagatcataaaattgcttcttagaaaaggagcaaacaaggaatgccaggatgactttggaatcacacctttatttgtggctgctcagtatggcaagctagaaagcttgagcatacttatttcatcgggtgcaaatgtcaattgtcaagccttggacaaagctacacccttgttcattgctgctcaagagggacacacaaaatgtgtggagcttttgctctccagtggggcagatcctgatctttactgtaatgaggacagttggcagttacctattcatgcagctgcacaaatgggccatacaaaaatcttggacttgttaataccacttactaaccgggcctgtgacactgggctaaacaaagtaagccctgtttactcagcagtgtttgggggacatgaagattgccta

SEQ ID NO: 227961 - DNA, 1138 bp, Homo Sapiens
ttggggaaaaagctcgccaccctgaagggtcccttcccaagcccttagggaccgcagaggacttggggaccagcaagcaacccccagggcacgagaagagctcttgctgtctgccctgcctcaccctgccccacgccaggcccggtggcccccagctgcatcaagtggaggcggaggaggaggcggaggagggtggcaccatgggcccgggcggtgccctccatgcccgggggatgaagacactgctgccatggacagcccgtgccagccgcagcccctaagtcaggctctccctcagttaccagggtcttcgtcagagcccttggagcctgagcctggccgggccaggatgggagtggagagttacctgccctgtcccctgctcccctcctaccactgtccaggagtgcctagtgaggcctcggcagggagtgggacccccagagccacagccacctctaccactgccagccctcttcgggacggttttggcgggcaggatggtggtgagctgcggccgctgcagagtgaaggcgctgcagcgctggtcaccaaggggtgccagcgattggcagcccagggcgcacggcctgaggcccccaaacggaaatgggccgaggatggtggggatgccccttcacccagcaaacggccctgggccaggcaagagaaccaggaggcagagcgggagggtggcatgagctgcagctgcagcagtggcagtggtgaggccagtgctgggctgatggaggaggcgctgccctctgcgcccgagcgcctggccctggactatatcgtgccctgcatgcggtactacggcatctgcgtcaaggacagcttcctgggggcagcactgggcggtcgcgtgctggccgaggtggaggccctcaaacggggtgggcgcctgcgagacgggcagctagtgagccagaggcgatcccgccgcgcagcatccgtggggaccagattgcctgggtggaaggccatgaaccaggctgtcgaagcattggtgccctcatggcccatgtggacgccgtcatccgccactgcgcagggcggctgggcagctatgtcatcaacgggcgcaccaaggccatggtggcgtgttacccaggcaacgggctcggggtacgtaagg

SEQ ID NO: 227962 - DNA, 883 bp, Homo Sapiens
ttgggcgcttgtggagctggtggcggcgctccgcaggggctcggctgttttccgcgcggcaggcgcggccatggcgcagctgggaaagctgctcaaggagcagaagtacgaccggcagctgaggttgtggggtgatcatgggcaagaggctttagaatctgctcatgtttgcctaataaatgcaacagccacaggaactgaaattcttaaaaacttggtactaccaggtattggttcgtttacaattattgatggaaatcaggtcagcggagaagatgctggaaacaatttcttccttcaaagaagcagtatcggcaagaaccgagctgaagctgccatggaattcttacaagaattaaatagcgatgtctctggaagttttgtggaagagagtccagaaaaccttctagacaatgatccctcatttttctgtaggtttactgttgtagttgcaactcagcttcctgaaagcacttcactacgcttagcagatgtcctctggaattcccagattcctcttttgatctgtaggacatatggactagttggttatatgaggatcattataaaagaacatccagtaatagaatctcatccagataatgcattagaggatctacgactagataagccatttcctgaactgagagaacattttcagtcctatgatttggatcatatggaaaaaaaggaccacagtcatactccatggattgtgatcatagctaaatatttagcacagtggtatagtgaaacaaatggacgaatacctaaaacgtataaagaaaaagaggacttcagagatttgattagacaaggaattctaaaaatgaaaatggggctccagaagatgaagagaattttgaagaagctattaaaaatg

SEQ ID NO: 227963 - DNA, 859 bp, Homo Sapiens
tccaacctcaccctttatcagtctcctctactcgatctactccagctacaatgacattcttgctgattcttgaacatatttagcttatttccaccttaaaatttctacccatctgcccagaaatctttccttggatttccaatagccagccctttctcattcctcaggggtctcagcttaaatgttacctcctgagattccttccttaatcatctaatacgaagaagtccccacatccagttattctcttacctcagcatcctgtttatgttcttcttagcatcagactcgggctttttcctgtttattacctacttcgttttcctgaaagatccatgtgccggtaccatgtgttgttcctactgtttctccaatgtctagtagatttggcacatactgatgtgcaattaatacgtgaatgaagaaccattgacagacgattagtcaaaagctcttgcaaagccctttgataggttatcggtggagagtagggagcacaaacctggggtcccattctagcttgaccacttctcggctgtgcacaaactagtctagctctcctgagcctcagttacctattttgcaaattagggatgggaacatccatacctcacgacgccaaacggctaccttgtaaagacgaaaggaggaaatgcaggaaataactccacgtaaggttaatgctccgtaaacagagctgctactgctattatatattctatacaatcctgcgcccttaacggcaggaccctttcagtgcttcagtcctgtcttctctctcctgggttgacctccacagatcctctcagaagagcgttttccaggcgtgaatctccgcagagtggagataaaggcccaa

SEQ ID NO: 227964 - DNA, 589 bp, Homo Sapiens; identical to SEQ ID NO: 194447

SEQ ID NO: 227965 - DNA, 893 bp, Homo Sapiens
tcccgggcgccgccggccgcgggcccgcctacctttcttgggctcgtagccgccgcccggggaccggtagtgggactcgagcgggtgcgcgcccgccttgcccgcgtcgctggccgcctttggcgcggtgtgcagggcctcgccgggggccgcggccgcagagttgtaccgcaggagaccctggccctgcagcgccgcgttcaagttcccgtagtttgtgtagttgccgtagaagggcgacgtgtagtagagggggcggcccagcagcggcgaggcagggtagggcgagcctcctggcggtgccccggttgaggccggcgcggcggccgcgggcagccccggtggcccgcagcccgggcccaggctcggctgcttgaggtccgacgtggcgatctcggccagcgaccacagcttgggcttgctggcggggggcggcgcgcccggagacgtccggctgccctggggcgtcttgcggccaccgcggggcgcggcctcgggcggggggctcagcagcggcgcctccaagccggtaagcggcgacgaggtcacgggcttgggcggcgccaggccccgctcgccctcctcgtcgtcgtcctcgtcgtcctccaggtcgtcatacttgtccttgcactccgagcccgattcgcacagggggtccccggcgcggcacggaagcttctccccgtccgactcggccgagcacgagtgatccgtgagcgagtccacgtgcaggctgatcccttcgtcctctgccgaggtctccgtgccctcctgcgccttgtcgggactctcgtccttgcttctggtagcgtcgccctcgtcctcgtcctcatcttcgcttttgtttctcggggcccaggtcatcttgccaacttttttgtacaaaagttggc

SEQ ID NO: 227966 - DNA, 741 bp, Homo Sapiens
ctttgtacaaaaaagttgggtctcctgcacgtgcaactgcaaacgctctttgttccagagcatggagatcacggagctggagtttgttcagatcatcatcatcgtggtggtgatgatggtgatggtggtggtgatcacgtgcctgctgagccactacaagctgtctgcacggtccttcatcagccggcacagccaggggcggaggagagaagatgccctgtcctcagaaggatgcctgtggccctcggagagcacagtgtcaggcaacggaatcccagagccgcaggtctacgccccgcctcggcccaccgaccgcctggccgtgccgcccttcgcccagcgggagcgcttccaccgcttccagcccacctatccgtacctgcagcacgagatcgacctgccgcccaccatctcgctgtcagacggggaggagcccccaccctaccagggcccctgcaccctccagcttcgggaccccgagcagcagctggaactgaaccgggagtcggtgcgcgcacccccaaacagaaccatcttcgacagtgacctgatggatagtgccaggctgggcggcccctgcccccccagcagtaactcgggcatcagcgcccacgtgctacggcagcggcgggcgcatggaggggccgccgcccacctacagcgaggtcatcggccactaccccgggtcctccttccagcaccagcagagcagtgggccgccttccttgctggaggggaccc

SEQ ID NO: 227967 - DNA, 1544 bp, Homo Sapiens
  misc_feature (123)..(185): n is a, c, g, or t
ttgggtgaacactctgaaagacggaaggagagtagttatcttgatggaattagaagttttgaagtcagctgaagcagttggagtgaagattggcaatccagtgccctataatgaaggactcgnnnnnnnnnnnnnnnnnnnnnnnnnnnnnnnnnnnnnnnnnnnnnnnnnnnnnnnnnnnnnnncgcagaatggaagctcgggaatgggttctactgtttctaaggcttatggtgcttcaaagacatttggaaaagctgcaggtcccagcctgtcacacacttctgggggaacacagtccaaagtggtgcccattgccagcctcactccttaccagtccaagtggaccatttgtgctcgtgttaccaacaaaagtcagatccgtacctggagcaactcccgaggggaagggaagcttttctccctagaactggttgacgaaagtggtgaaatccgagctacagctttcaatgagcaagtggacaagttctttcctcttattgaagtgaacaaggtgtattatttctcgaaaggcaccctgaagattgctaacaagcagttcacagctgttaaaaatgactacgagatgaccttcaataacgagacttccgtcatgccctgtgaggacgaccatcatttacctacggttcagtttgatttcacggggattgatgacctcgagaacaagtcgaaagactcacttgtagacatcatcgggatctgcaagagctatgaagacgccactaaaatcacagtgaggtctaacaacagagaagttgccaagaggaatatctacttgatggacacatccgggaaggtggtgactgctacactgtggggggaagatgctgataaatttgatggttctagacagcccgtgttggctatcaaaggagcccgagtctctgatttcggtggacggagcctctccgtgctgtcttcaagcactatcattgcgaatcctgacatcccagaggcctataagcttcgtggatggtttgacgcagaaggacaagccttagatggtgtttccatctctgatctaaagagcggcggagtcggagggagtaacaccaactggaaaaccttgtatgaggtcaaatccgagaacctgggccaaggcgacaagccggactactttagttctgtggccacagtggtgtatcttcgcaaagagaactgcatgtaccaagcctgcccgactcaggactgcaataagaaagtgattgatcaacagaatggattgtaccgctgtgagaagtgcgacaccgaatttcccaatttcaagtaccgcatgatcctgtcagtaaatattgcagattttcaagagaatcagtgggtgacttgtttccaggagtctgctgaagctatccttggacaaaatgctgcttatcttggggaataaaagacaagaatgaacaaggcatttgaagaagttttccagatgccaacttccgatctttcatattcagagtcagggtcaaagtggagacctacacgacgagtctcgaattaggcactgtgatggacgtgaagcccgtgga

SEQ ID NO: 227968 - DNA, 916 bp, Homo Sapiens
ttggagaatctgggatggcgggatccaggcaaaggggtctccgggccagagttcggccgctgttctgcgccttgctgctgtcactcggtcgcttcgtccggggcgacggcgtgggaggagaccccgcggtcgcgttgccacatcgccgtttcgagtacaaatacagcttcaaggggccgcacctggtgcagagcgacgggaccgtgcccttctgggcccacgcggggaatgctattccaagttcagatcaaattcgagtagcaccatctttaaaaagccaaagaggctcagtgtggacaaagacaaaagcggcctttgagaactgggaagttgaggtgacatttcgagtgactggaagaggtcgaattggagctgatggcctagcaatttggtatgcagaaaatcaaggcttggagggccctgtgtttggatcagctgatctgtggaatggtgttggaatattttttgattcttttgacaatgatggaaagaaaaataatcctgctatagtaattataggcaacaatggacaaatccattatgaccatcaaaatgacggggctagtcaagctttggcaagttgccagagggacttccgcaacaaaccctatcctgtccgagcaaagattacctattaccagaacacactgacagtaatgatcaataatggctttacaccagataaaaatgattatgaattttgtgccaaagtggaaaatatgattatccctgcacaagggcattttggaatatctgctgcaactggaggtcttgcagatgaccatgatgtcctttcttttctgactttccagttgactgaacctggaaaagagccgcccacaccagataaagaaatttcggaaaaggaaaaagaaaagtatcagaggaatttgagcactttcaacaagaattggat

SEQ ID NO: 227969 - DNA, 1301 bp, Homo Sapiens
ggcatttcgggtggtggtgactgcggtggggaagacagcaggggcgctgtcgagggagacgacggctgggttgggaggggcagaggcccaggcccaagggtcagagctcacctggcttccccaactgggatggggccatgtggctgcaaggcaaagccccagttcctgaagggcctggggtgtgaagggtttctccccctgctgggaacgctcggccttgcgccactcagcaaggccccttccaacctgcatctgaccaccaggcagagagtatgtccggggagccccacaaaacaccccccaaacttcgccccgccagcccccctcacctcccctgctgggcattggtgcgcagcaaaaggcacttgaagctgcctctgaggttggggtccccagaggttatggtgatggcacagggtgggtgtcatcagggagcccagcccctggtactcagtggtctcagctcagtagttgggtgcagcagcagcaaggcccaaggcagggtcagtagtgctccagcttgagactcctgtacaggcagcacgtgaagatcatgccaaagacctgcacacaggcaatgccgatccccacagccccaatgaccctcaggtgctcctggatgaaggtctccaacttggtgatgcagccgccctccaccttgtagatgttggaggcatggtctcgctgtccacaaagagccaccaccgtcttgcagcagctgtctgggaccacacggccaccggcctcctgtgagcggatccactcactgtctcgccagtcctgtgagttgttgctgccacagcagtggaactcctgctgcagctggtccacagcgctggtcacagcctcatggcccggctggtggtagcgcttggtcatggtgtccttcaggttctccttgagctccgtgttcagctgctggtagtaggcgtaggcgaggataccagcgatgatctccagcagaaagatgatgaggagcaggatgaagtacaggcgcagcaggttccgacgctccttgaaggtggcgcagcagcccaagaccccagtcaccatgacgacagtgcccgccaccaccaggatgtaggctgtggccaggtaggtgcctgaggccagcaggctgatgtagtcactcttgagggccagcgtccagatgcccactgccatgacagccaggccagccagccagaagcagcaattgtaggtaaacagcaggtacttgaggcaaacggtgccacatgttgtcttcttctcgttgaactcacccatcctggggctaccacgtgtcggggtccgggccccaa

SEQ ID NO: 227970 - DNA, 1236 bp, Homo Sapiens
ttggtctaggtagcggttgtgcttgctgaggctgcacttgctgacactgcagctgcgacgcggctaagaggcgcagagcgaggagtcgggatttggtcgcgagcggcgacgagcatttgtgcagaatgtcatcagatgaggagaaatactcacttccagttgtgcaaaatgactccagtcgaggcagttctgtctcttcgaatcttcaggaagaatatgaagaactgcttcattatgctatagtgactccaaatattgaaccctgtgcttcacagtcatctcatcctaagggagaattgggccagatgtcagaatttctacaattcatgatattcttcatagtcaaggaaataactctgaagtaagagaaactgcaatagaagttggaaaaggatgtgatttccatatttcaagtcattcaaagacagatgagtcatcaccagtgttatcgccaaggaagccttctcacccagtcatggattttttcagttcacatcttttagctgactcttcctcaccagcaacaaattctagtcatacagatgcccatgaaatacttgtgagcgattttcttgtttctgatgaaaaccttcagaagatggaaaatgtgcttgatctttggagttcaggtcttaagacaaacatcatatctgaactaagtaaatggagacttaattttattgactggcaccgaatggaaatgagaaaagagaaagaaaaacatgcagcacatttaaaacaactgtgtaatcagatcaatgaattgaaggagctgcaaaaaacctttgaaatctccattgggagaaaagatgaggtgatttctagcttgtctcatgccataggcaagcaaaaggaaaagatagagttgatgagaacattcttccactggcgaatcggccatgtcagagccagacaggatgtttatgaaggtaaactagctgaccagtactaccagagaactttactgaagaaagtctggaaagtctggcgttccgtagtgcaaaagcagtggaaagatgtggtagaaagagcttgtcaagcaagagctgaagaagtttgtatccagatttccaatgattatgaagccaaagttgctatgttatctggagctttggaaaatgcaaaagctgagattcaaagaatgcaacatgaaaaagagcactttgaagattccataaaaaagctttcatgagggtgtatgtgcattaaatcttgaagccatgactatatttcaaa

SEQ ID NO: 227971 - DNA, 1239 bp, Homo Sapiens
ttggccaagccgggcgcctcttgcaatggagacggtcatttcttcagatagctccccagctgtggaaaatgagcatcctcaagagaccccagaatccaacaatagcgtgtatacttccttcatgaagtctcatcgctgctatgacctgattcccacaagctccaaattggttgtatttgatacgtccctgcaggtgaagaaagctttttttgctttggtgactaacggtgtacgagctgcccctttatgggatagtaagaagcaaagttttgtgggcatgctgaccatcactgatttcatcaatatcctgcaccgctactataaatcagccttggtacagatctatgagctagaagaacacaagatagaaacttggagagaggtgtatctccaggactcctttaaaccgcttgtctgcatttctcctaatgccagcttgtttgatgctgtctcttcattaattcggaacaagatccacaggctgccagttattgacccagaatcaggcaatactttgtacatcctcacccacaagcgcattctgaagttcctcaaattgtttatcactgagttccccaagccagagttcatgtccaagtctctggaagagctacagattggcacctatgccaatattgctatggttcgcactaccacccccgtctatgtggctctggggatttttgtacagcatcgagtctcagccctgccagtggtggatgagaaggggcgtgtggtggacatctactccaagtttgatgttatcaatctggcagcagaaaagacctacaacaacctagatgtatctgtgactaaagccttgcaacatcgatcacattactttgagggtgttctcaagtgctacctgcatgagactctggagaccatcatcaacaggctagtggaagcagaggttcaccgacttgtagtggtggatgaaaatgatgtggtcaagggaattgtatcactgtctgacatcctgcaggccctggtgctcacaggtggagagaagaagccctgagctgggggaaggggtcatgcagcaccaggggatatgcccaactcactgcctgctggaagctctgtgggaatcagatgaaacttgagggaattgtgactctgttccctgttcagggtcccctgcccttctatctgggagctagggaaggtatgggggaggaagagaatggatttatagctacccttaccctcacacatacacttgaaaaaactttcagc

SEQ ID NO: 227972 - DNA, 877 bp, Homo Sapiens
ttgggtatccgctagcgcggcctgggatgcgcttgggctccctgttcgttcccacatgcagggcagcacaaggagaatgggcgtcatgactgatgtccaccggcgcttcctccagttgctgatgacccatggcgtgctagaggaatgggacgtgaagcgcttgcagacgcactgctacaaggtccatgaccgcaatgccaccgtagataagttggaggacttcatcaacaacattaacagtgtcttggagtccttgtatattgagataaagagaggagtcacggaagatgatgggagacccatttatgcgttggtgaatcttgctacaacttcaatttccaaaatggctacggattttgcagagaatgaactggatttgtttagaaaggctctggaactgattattgactcagaaaccggctttgcgtcttccacaaacatattgaacctggttgatcaacttaaaggcaagaagatgaggaagaaggaagcggagcaggtgctgcagaagtttgttcaaaacaagtggctgattgagaaggaaggggagttcaccctgcacggccgggccatcctggagatggagcaatacatccgggagacgtaccccgacgcggtgaagatctgcaatatctgtcacagcctcctcatccagggtcaaagctgcgaaacctgtgggatcaggatgcacttaccctgcgtggccaagtacttccagtcgaatgctgaaccgcgctgcccccactgcaacgactactggccccacgagatcccaaaagtcttcgaccctgagaaggaaagggagtctggtgtcttgaaatcgaacaaaaagtccctgcggtccaggcagcattagccatcgtgccctgctgagggg

SEQ ID NO: 227973 - DNA, 882 bp, Homo Sapiens
ttggggttcccgtcatcttcgggagccgtggaggtacgaacttaagacatgcctattttattaatttacttccaaacgcaacgaaaggtccatggacaatttgtgggccatttaattcagggcccccaattcgtacgtggagaagtgggaatgcaaaagtactttgacctttaaccttcggtccggcgcggtggagggaaacgcctccgtctctatataaggaattttccggtctcttcgggtcctttttcctctcttcagcgtggggcgcccacaatttgcgcgctctctttctgctgctccccagctctcggatacagccgacaccatgggtttcggagacctgaaaagccctgccggcctccaggtgctcaacgattacctggcggacaagagctacatcgaggggtatgtgccatcacaagcagatgtggcagtatttgaagccgtgtccagcccaccgcctgccgacttgtgtcatgccctacgttggtataatcacatcaagtcttacgaaaaggaaaaggccagcctgccaggagtgaagaaagctttgggcaaatatggtcctgccgatgtggaagacactacaggaagtggagctacagatagtaaagatgatgatgacattgacctctttggatctgatgatgaggaggaaagtgaataagcaaagaggctaagggaagaacgtcttgcacaatatgaatcaaagaaagccaaaaaacctgcacttgttgccaagtcttccatcttactagatgtgaaaccttgggatgatgagacagatatggcgaaattagaggagtgcgtcagaagcattcaagcagacggcttagtctggggctcatctaaactagttccagtgggatacggaattaa

SEQ ID NO: 227974 - DNA, 809 bp, Homo Sapiens; identical to SEQ ID NO: 194452

SEQ ID NO: 227975 - DNA, 922 bp, Homo Sapiens
ttggcacagagtttgggcgccaggcgagacggcagggcttaaagttccgggtgaggcgtgggtcccacaaccgcttggaatttgcctcccggctccgctctggaagctaagaaggggcacgagagccggagacgggaacctgagagcagggaagccagtaaccggccggaggagcgcgcggccgctccagtcggaaggagccgttgcagccctgcccggcgtgtggcggggtcagcgaggcccctgcggtgcttcgcccgcgccttccgctccgcactcacccgccctctgggcctcccacaggaatcaaagatcaactcccactgaggacaaatggacctgtaattccgggtgtgacgagagaacgagatttaccttcctgaattaaaaaacaggtcattaagcttgggccctgactcttctttgtgagaaggtacagagatggaaaccttacaatccgagactaaaacgagggtccttccctcatggctgacagcccaggtggctacaaagaatgtggcaccaatgaaggcccccaagaggatgagaatggcagcagtgccagtggcagcagcaagactccctgcgacaaggactgtgtactgcatgaatgaggctgagatagttgatgttgctctgggaatcctgattgagagccgcaaacaggaaaaggcctgcgagcagccggccctggcgggggctgataacccagagcactcccctccctgctccgtgtcgcctcacacaagttctgggagcagcagtgaggaagaggacagtgggaaacagcactggctccaggcctcagcccttcccagagccggggggttccagctctgcctgtagcagagcctgaggagaggagaagaggatgtgctgaaatacgtccggagatctttttcagctagggcataaactgtgc

SEQ ID NO: 227976 - DNA, 928 bp, Homo Sapiens; identical to SEQ ID NO: 194453
  misc_feature (334)..(380): n is a, c, g, or t

SEQ ID NO: 227977 - DNA, 888 bp, Homo Sapiens; identical to SEQ ID NO: 194454

SEQ ID NO: 227978 - DNA, 1336 bp, Homo Sapiens
actttgtacaaaaaagttggaccagagggtctgtggaagggggcgaggctatgtcgcggtggcagcccggatgggccggcagggccgggagtaacgggacgtcgccgcggagcttcttcccccggatacagtgcggcccgagcggaggccgcggcgccgccctccgatcttgaagagcccgcgctgcgcggagcccgcccccgcctgcgcaccggcaccgacgcggagcgaccagcccagccagacccggcccggcgcggcctgatctaacccagccaggcaggcaatactagcccctctggagcacggagctccttccccaaagacatgaagctattggagaactcgagctttgaagccatcaactcacagctgactgtggagaccggagatgcccacatcattggcaggattgagagctactcatgtaagatggcaggagacgacaaacacatgttcaagcagttctgccaggagggccagccccacgtgctggaggcactttctccaccccagacttcaggactgagccccagcagactcagcaaaagccaaggcggtgaggaggagggccccctcagtgacaagtgcagccgcaagaccctcttctacctgattgccacgctcaatgagtccttcaggcctgactatgacttcagcacagcccgcagccatgagttcagccgggagcccagccttagctgggtggtgaatgcagtcaactgcagtctgttctcagctgtgcgggaggacttcaaggatctgaaaccacagctgtggaacgcggtggacgaggagatctgcctggctgaatgtgacatctacagctataacccagacttggactcagatcccttcggggaggatggtagcctctggtccttcaactacttcttctacaacaagcggctcaagcgaatcgtcttctttagctgccgttccatcagtggctccacctacacaccctcagaggcaggcaacgagctggacatggagctgggggaggaggaggtggaggaagaaagcagaagcaggggcagtggggccgaggagaccagcaccatggaggaggacagggtcccagtgatctgtatttgatgaggaggagccgaggccccagcttcatccagcttcaaccaatgcctggacctgtccacctgagaggcccctggggcctccccagctgctggccagaccctggcgctgccacagtcctggcactgcccaagggccatacctgcctagccctttggctccatcctgtggatgcccactcacccctcagactcctgctgcccatgctgtggccggacttgtcagcaagggggcctggtgg

SEQ ID NO: 227979 - DNA, 1155 bp, Homo Sapiens; identical to SEQ ID NO: 194455

SEQ ID NO: 227980 - DNA, 1516 bp, Homo Sapiens
ttggtgcaaagcgtttttctgcaggctgttttcccaggttccctcggcctgtacctcgcgcactcctcttgctccaggtccttcagtctccgctcgtctcaccgtaggctgtgacgacatgagcaacaaagaaggatcaggagggttcaggaaaaggaagcatgacaatttcccacataaccaaagaagagaagggaaggatgttaattcatcttcacccgtgatgttggcctttaaatcatttcagcaggaacttgatgcaaggcatgacaaatatgagagacttgtgaaacttagtcgggatataactgttgaaagtaaaaggacaatttttctcctccataggattacaagtgctcctgatatggaagatatattgactgaatcagaaattaaattggatggtgtcagacaaaagatattccaggtagcccaagagctatcaggggaagatatgcatcagttccatcgagccattactacaggactacaggaatatgtggaagctgtctcttttcaacacttcatcaaaacacgatcattaattagtatggatgaaattaataaacaattgatatttacgactgaagacaatgggaaagaaaataaaactccctcctctgatgcacaggataagcagtttggtacttggagactgagagtcacacctgtcgattaccttctgggagtggctgacttaactggagaattgatgcggatgtgtattaacagtgtggggaatggggacattgataccccctttgaagtgagccagtttttacgtcaggtttatgatgggttttcattcattggcaacactggaccttacgaggtttctaagaagctgtataccttgaaacaaagtttggccaaagtggagaatgcttgttatgccttgaaagtcagagggtcagaaattccaaaacatatgttggcagatgtgttttcagttaaaacagaaatgatagatcaagaagagggcatttcttagaatctaacgttactcagttactaattcttttgagaactcctaagagaccaatttgtaagacttatttagtatttcatttaactttattgtggcttttacatagaaacatattcagttgtacttgttttaaattgtatacaagctgtacataaaattagccaaatgaatcatttcttatatcttattcatgaaagtttgcatacagatgtttgcatatatgcctttttgaatttttgctggttaacctttatcatttatctttgtaatgtgaacatgcttcagagtgtaccttttgccataacctattttaatttactttttctgaagtttggagtgataatttttagtggaagcaatttgtaatttaagttggtagttatattatatatagaaaagattttttagttaaacttctggacatgagcgtcctgtttaaatttcttgttaatatcgtgccaagcctcaaaaataggcttattccatggaacaagaattaaaaatgaataagctatcaatatataattt

SEQ ID NO: 227981 - DNA, 1127 bp, Homo Sapiens
ctttgtacaaaaaagttggcgccggtgtttccagccgtggcaccggcatcggctgacactgctgcctccagctagttatttcgtcctcttccgttcttcacccctacaccttggaggtgaacttctcacctgagggctgtaaagactcgtttgaaaatggagagccaagaaccaacggaatcttctcagaatggcaaacagtatatcatttcagaggagttaatttcagaaggaaaatgggtcaagcttgaaaaaacaacgtacatggatcctactggtaaaactagaacttgggaatcagtgaaacgtacaaccaggaaagagcagactgcggatggtgtcgcggtcatccccgtgctgcagagaacacttcactatgagtgtatcgttctggtgaaacagttccgaccaccaatggggggctactgcatagagttccctgcaggtctcatagatgatggtgaaaccccagaagcagctgctctccgggagcttgaagaagaaactggctacaaaggggacattgccgaatgttctccagcggtctgtatggacccaggcttgtcaaactgtactatacacatcgtgacagtcaccattaacggagatgatgccgaaaacgcaaggccgaagccaaagccaggggatggagagtttgtggaagtcatttctttacccaagaatgacctgctgcagagacttgatgctctggtagctgaagaacatctcacagtggacgccagggtctattcctacgctctagcactgaaacatgcaaatgcaaagccatttgaagtgcccttcttgaaattttaagcccaaatatgacactggccatttttgtaaacgagaccaccaggccttcttcactaagactttgtattcaacttagtttaatgtagatttgccattagctttttcgtaaaataaaagcacagaacagatgtggtggtggtatggaattgtaattacaggtaggttgtgaccttcctttaaatttgttataactccagctaaaattaacaaagaatataaatgcaagtatgtttactccaatttttttaaagctcaacagcagttaactacagctcagttacttttctagtccagtctggtagacaggggta

SEQ ID NO: 227982 - DNA, 403 bp, Homo Sapiens
tacttatttacctttattgtcattgcaagcttcttatggaaactttataggaatgaaaatatacatgttaagaagattaaacattagatagtagatggtttgttgcatgctagaactgttagtattgttgaatcaattactttggtttcatgaaaaaataaacgataaatatctttaaagagaactagaagaattttttgtttgagtgattccaggctgtagtatgatcatttactgaagtagtttgattggctggctaacttagaattattgtttcttgttttgtactgcaataggggttataattgtaagataaaaatgtgtgtgtgtttaagggaagtaggtggtggttaaaattcttggaaaattttcagaatactttaaaaataaagttccaagttac

SEQ ID NO: 227983 - DNA, 505 bp, Homo Sapiens; identical to SEQ ID NO: 194461

SEQ ID NO: 227984 - DNA, 1185 bp, Homo Sapiens
  misc_feature (880)..(920): n is a, c, g, or t
  misc_feature (961)..(987): n is a, c, g, or t
  misc_feature (1094)..(1109): n is a, c, g, or t
tacaaaaaagttgggtttgtgtgtcgtgtgtagtagtgtttgcagacatgcaaaactgcagctgaaataataccttagatttctaggtaagtctttccacatttcaataatgggtaagagtagaaccagggccgggtatcaattattgcttgctgtttgcaaccaggcataaaatcactttctcaaatcatccaccgttcctattaaatttatgccggaaactctccttctgtgagtataactcctgcagttcctatagcagataagatataagaaagtgcctcctagtgctcctccgcccgcttgtttgctaaaattccctttctctctaagtccaccattttcaagatttgtagatagtgtattagttaagacagctttgtcgatctggccagatgttttttctcctttgtccaaaggccagagaccatcccaggaagagtggtgggtggtttatacactggaaatgttgcgtttatgctttttaaaaacacacgttaacttcagaggaaggatgggcaaatctggtctagctgggtgaaacccttattttcccagagatgccttaacctttgttggttttggctttagggttcagagtcacttttgttcccttctccattctggagagggacttcccctacatagagccctgatttttgtggctgtggggattggaggtagcattcaaagatcagatgtgcttttcctcactttggagatgaacactctgggttttacagcattaacctgcctaaccttcatggtgagaaatacaccatctctcttctagtcatgctgtgcatgccgcttactctgttggggtctatataaatttgttgaactcttacctacattccaaagaagtttcaaggaaccnnnnnnnnnnnnnnnnnnnnnnnnnnnnnnnnnnnnnnnnntaaaataaaattatcaggaatactgcctcagttattgaacnnnnnnnnnnnnnnnnnnnnnnnnnnnaagctgagaagtatagggatgaaaaagatgttatattgtgtttgactattttccaacttgtattttcatataatttatattttttaaaagctgaaaatttagaagcnnnnnnnnnnnnnnnnggaaaagcaggtgctttttaaaaatcagaactgaggtagcttagagatgtagcgatgtaagtgtcgatgttttttt

SEQ ID NO: 227985 - DNA, 1708 bp, Homo Sapiens
ttggctgagctttggcgagagctatgacaacagcaagagttggcggcggcgctcgtgctggaggaaatggaagcaactgtcgagattgcagcggaatatgattctcttcctccttgcctttctgcttttctgtggactcctcttctacatcaacttggctgaccattggaaagctctggctttcaggctagaggaagagcagaagatgaggccagaaattgctgggttaaaaccagcaaatccacccgtcttaccagctcctcagaaggcggacaccgaccctgagaacttacctgagatttcgtcacagaagacacaaagacacatccagcggggaccacctcacctgcagattagacccccaagccaagacctgaaggatgggacccaggaggaggccacaaaaaggcaagaagcccctgtggatccccgcccggaaggagatccgcagaggacagtcatcagctggaggggagcggtgatcgagcctgagcagggcaccgagctcccttcaagaagagcagaagtgcccaccaagcctcccctgccaccggccaggacacagggcacaccagtgcatctgaactatcgccagaagggcgtgattgacgtcttcctgcatgcatggaaaggataccgcaagtttgcatggggccatgacgagctgaagcctgtgtccaggtccttcagtgagtggtttggcctcggtctcacactgatcgacgcgctggacaccatgtggatcttgggtctgaggaaagaatttgaggaagccaggaagtgggtgtcgaagaagttacactttgaaaaggacgtggacgtcaacctgtttgagagcacgatccgcatcctgggggggctcctgagtgcctaccacctgtctggggacagcctcttcctgaggaaagctgaggattttggaaatcggctaatgcctgccttcagaacaccatccaagattccttactcggatgtgaacatcggtactggagttgcccacccgccacggtggacctccgacagcactgtggccgaggtgaccagcattcagctggagttccgggagctctcccgtctcacaggggataagaagtttcaggaggcagtggagaaggtgacacagcacatccacggcctgtctgggaagaaggatgggctggtgcccatgttcatcaatacccacagtggcctcttcacccacctgggcgtattcacgctgggcgccagggccgacagctactatgagtacctgctgaagcagtggatccagggcgggaagcaggagacacagctgctggaagactacgtggaagccatcgagggtgtcagaacgcacctgctgcggcactccgagcccagtaagctcacctttgtgggggagcttgcccacggccgcttcagtgccaagatggaccacctggtgtgcttcctgccagggacgctggctctgggcgtctaccacggcctgcccgccagccacatggagctggcccaggagctcatggagacttgttaccagatgaaccggcagatggagacggggctgagtcccgagatcgtgcacttcaacctttacccccagccgggccgtcgggacgtggaggtcaagccagcagacaggcacaacctgctgcggccagagaccgtggagagcctgttctaactgtaccgcgtcccaggggaccgcaaatacatggactggggctgg

SEQ ID NO: 227986 - DNA, 1280 bp, Homo Sapiens; identical to SEQ ID NO: 194464

SEQ ID NO: 227987 - DNA, 1075 bp, Homo Sapiens; identical to SEQ ID NO: 194466

SEQ ID NO: 227988 - DNA, 937 bp, Homo Sapiens
ttggccttcgttcccctaaatcagcctcttgccccattgctctttgcaggggtagaagaaggaagtgtagcggggtaaggaatgcaccgtcagggtctctcacaaccctttcccagctctcctccccaacaaacagtacctgggatggagccctagggtaatcgcagccacgggatgggtcgaggtgacaggcttcagggaccacacttcggcctttgcccgaccttccacaacttaagcgaagagaggccaccagccgtaacagggcgttaaagcccaggggaagattggtccttatgacttcctgccttccagccctcagattcatcgctaccccgaggctaagcgccatgcctcatattgacaacgatgtgaaactggacttcaaggatgtccttttgaggcccaaacgcagtacccttaagtctcgaagtgaggtggatctcacaagatccttttcatttcggaactcaaagcagacatactctggggttcccatcattgctgccaatatggatactgtgggcacctttgagatggccaaggttctctgtaagttctctctcttcactgctgtccataagcactatagcctcgttcagtggcaagagtttgctggccagaatcctgactgtcttgagcatctggctgccagctcaggcacaggctcttctgactttgagcagctggaacagatcctggaagctattccccaggtgaagtatatatgcctggatgtggcaaatggctactctgaacactttgttgaatttgtaaaagatgtacggaagcgcttcccccagcacaccatcatggcagggaatgtggtaacaggagagatggtagaagagctcatcctttctggggctgacatcatcaaagtgggaattgggccaggctctgtgtgtactactcggaagaaaactggagtggggta

SEQ ID NO: 227989 - DNA, 943 bp, Homo Sapiens; identical to SEQ ID NO: 194469

SEQ ID NO: 227990 - DNA, 773 bp, Homo Sapiens
ttggctcgggcaagcactttaaccttttaagcccaaccagatgagttgcctgcagttttggaggccttcagagcatttcactagacctctgtctgtgtcggtccagtgtctttagccaagctttgattaaagatgacttccttgtttgctcaagaaattcgcctttctaaaagacatgaagaaatagtatcacaaagattaatgttacttcaacaaatggagaataaattgggtgatcaacacacagaaaaggcatctcaactccaaactgttgagactgcttttaaaaggaaccttagtcttttaaaggatatagaagcagcagaaaagtcactacagaccaggattcacccacttccacggcctgaggtggtttctcttgagactcgttactgggcatcagtagaagaatatattcccaaatgggaacagtttcttttaggaagagcaccatatccttttgctgttgaaaatcaaaatgaagcagaaaataccattcaaaatgaggcacagcgataacttcttcacatgctatttcaaaaagcctgtttaataaagctgaatgttaaggtgtatgtaggttattgcaggaactttaggaattaaatatgttcatattcttcgattatctcctaagtgacagtgaagatatgagaatttactggcaagtcacatgttatcacctactactatttcaaggtcatgaatttgctttctaccaaacccatagatgtgttaaacacgaatattaaaaggtggactctttattaatt

SEQ ID NO: 227991 - DNA, 1236 bp, Homo Sapiens
ttgcatcttcctgttgggggatcatccattttcttcaatgaatagttttaagtctagtcaaatgctcacacagaggcccgctattaaggaggcagacaggcaacattcaatacgaaggcaggacaagctcagccccgctccttcattcgggcatgtgtcattagggatgacattctgtgaaggctgcccggcttgaatggccaaatccctgcatcatggctttctttaattccctctgctcccaactcacaaaatgaggacctctcttttaagacgagaaggcactgttctcaaaggtatacatttggaacttcaataatgaaagcatctcttgcttggcaggtggaatataggcaatttggatttttaatgcatggcatggggcgggagtgaaatatcttgccagggcttgtttgccctataatgggagagaaccaggcctctggatgatacggtatcaaacactgctgctcctttctgttttcttttgtgggaaagggaggaggatagaatggagaggaattagtgggagcctgggggaagttcaaaataaagaaactgtgaaatcctccacctcaaagttgggtctgcaccaggattctgcctgatgcccaccgcatggagtgattatgtagccaataaagtgcctccagtaaggtcttgaaaactgttggttaaggagggaacgtttcctgtccctcctgatgtttctttccatgttggggcactcagtgtgcgtaactccaggcctgtctctgccctccactcattcagtaaataaggaaagtgtaaaccgagcatgtttggctcctctctccccgttttcaggagtgtgctgtccggagggagcaggcggtattctctgctattccatgcaagcagctgttgtggggcctgatgcaattttgtggaggctacagtgtgtggtggtgatgatgacagaactggagataaaagagaggccatcgttcatgctgacctggagtgcagctttcatgccaacttcttttaagataggcgctggacacagtaaataagtatcttccacagaaaagggcttctcattgagtgtgaccgagtcattgatcttgaagctgcagaggaccctgtccacgttgcgggcatgtcggaagccgtttcctctcacgacaacttgaaatgactctcctgcacatatggtggatggttcagctgctagaatttcgatgcaggacttcttcaaaattgagtggccaa

SEQ ID NO: 227992 - DNA, 962 bp, Homo Sapiens
ttggcgaagggcttgcttccggagagcgggaaggctaaaacgcggtagctaaactgcagccaactttggttgtgtgtggaaaaggctttagccatggacaggagtggctttggagagatatcatcccctgtaatccgggaggcagaggtgacacggactgcacggaaacagagtgctcagaaaagagttttacttcaggcatctcaagatgaaaattttggtaatactacaccaagaaaccaggttatccctcgaactcctagctcatttcgacagccttttaccccaacaagccgaagcttactaaggcagccagatatttcctgcattcttggaacaggagggaagtcgccccgacttacgcagtcttcagggttctttggaaatctctccatggttactaatctggatgacagtaactgggcagctgcattttcatcacagcgttccgggctgttcacaaacacagagccccacagtataacagaagatgtaactatcagtgctgttatgttacgtgaggatgatcctggagaagctgcatccatgagtatgttttctgatttcctgcagtcttttctgaagcactcttcgagtacagtttttgatcttgtggaagagtatgaaaacatctgtggtagtcaggtgaatatactgagtaaaatagtgagtcgagcaacacctggacttcaaaaattttcaaaaacagccagtatgctctggcttcttcaacaggagatggtcacatggaggctgctggcttctttgtatagagacagaatacagtctgcattagaagaggaaagtgtattcgcagttactgctgttaatgccagtgaaaaaacagttgtggaagcgttatttcagagggattcacttgttcgacaaagtcagctggtggtagattggttagagagtattgccaaagatgaaattggagaattttctgatatattgagttt

SEQ ID NO: 227993 - DNA, 1545 bp, Homo Sapiens; identical to SEQ ID NO: 194475

SEQ ID NO: 227994 - DNA, 994 bp, Homo Sapiens
gagcaatgcttttccattaaaaaggcaactttgtacaaaaaagttggctgtaatcagtccaattaaatctacacaagtatctgactgtgaaagactatttgagagatattgatctaatctgtagtaatgccttagaatacaatccagatagagatcctggagatcgtcttattaggcatagagcctgtgctttaagagatactgcctatgccataattaaagaagaacttgatgaagactttgagcagctctgtgaagaaattcaggaatctagaaagaaaagaggttgtagctcctccaaatatgccccgtcttactaccatgtgatgccaaagcaaaattccactcttgttggtgataaaagatcagacccagagcagaatgaaaagctaaagacaccgagtactcctgtggcttgcagcactcctgctcagttgaagaggaaaattcgcaaaaagtcaaactggtacttaggcaccataaaaaagcgaaggaagatttcacaggcaaaggatgatagccagaatgccatagatcacaaaattgagagtgatacagaggaaactcaagacacaagtgtagatcataatgagaccggaaacacaggagtgtcttcggtggaagaaaatgaaaaacagcaaaatgcctctgaaagcaaactggaattgagaaataattcaaatacttgtaatatagagaatgagcttgaagactctaggaagactacagcatgtacagaattgagagacaagattgcttgtaatggagatgcttctagctctcagataatacatatttctgatgaaaatgaacgaaaagaaatgtgtgttctgcgaatgactcgagctagacgttcccaggtagaacagcagcagctcatcactgttgaaaaggctttggcaattctttctcagcctacaccctcacttgttgtggatcatgagcgaataaaaaatcttttgaagactgttgttaaaaaaagtcaaactacaac

SEQ ID NO: 227995 - DNA, 535 bp, Homo Sapiens
aggaattttgttttttatgaaggctttctactaatggaattcctggccttgagaggatgttactttctaaggaaaggatttttttgttattaaaagagccacctgagctgaagattcccttgagaacaagtactgtcctgcggtttcatggcctttcttccatttgtggttcttgcgaagtggaatttaaatgacatcttatcaagatggataaaccctagtttcccagtgctggaatatagaaaatggatggacaagtaaatcccactcatcacccatagtccaggcatggggacctcaacacacctgagcaccagacatcacctttcattctggacctaccatgaaagacttctgaatccacgaagagaaactgactgggcaacatgttattcataaacaggaccttgccctgtcactcatgatggagttcagtggtcctatcatggctcattataacctcaaactcccaggctcaagcaatcctaccatgtcagccttcccagtagctgggactacgggtcttgctctgtca

SEQ ID NO: 227996 - DNA, 883 bp, Homo Sapiens
ctttgtacaaaaaagttggccctcatccagcttcagatttcttccatcaaatcagataacgtcactcgcgcttgtagcttcatccgggaggcagcaacgcaaggagccaaaatagtttctttgccggaatgctttaattctccatatggagcgaaatattttcctgaatatgcagagaaaattcctggtgaatccacacagaagctttctgaagtagcaaaggaatgcagcatatatctcattggaggctctatccctgaagaggatgctgggaaattatataacacctgtgctgtgtttgggcctgatggaactttactagcaaagtatagaaagatccatctgtttgacattgatgttcctggaaaaattacatttcaagaatctaaaacattgagtccgggtgatagtttctccacatttgatactccttactgcagagtgggtctgggcatctgctacgacatgcggtttgcagagcttgcacaaatctacgcacagagaggctgccagctgttggtatatccaggagcttttaatctgaccactggaccagcccattgggagttacttcagcgaagccgggctgttgataatcaggtgtatgtggccacagcctctcctgcccgggatgacaaagcctcctatgttgcctggggacacagcaccgtggtgaacccttggggggaggttctagccaaagctggcacagaagaagcaatcgtgtattcagacatagacctgaagaagctggctgaaatacgccagcaaatccccgtttttagacagaagcgatcagacctctatgctgtggagatgaaaaagccctaaagtttatgtttctaatgtgtcacagaataggacgatatgattctacaacata

SEQ ID NO: 227997 - DNA, 903 bp, Homo Sapiens
ttggcgcgtctccttctacggatatctgtggaccttatggaagcaaagactcttggaactgtaacgcccagaaaacctgtcttatctgtcagtgcaagaaaaattaaggacaatgcggctgattggcacaatttaatcctgaagtgggaaaccctcaatgatgcaggttttaccactgcaaataatattgccaacttgaaaatcagtttattgaataaagacaagatagaactagacagcagcagcccagcctcgaaggaaaatgaagaaaaggtgtgtctggaatataacgaggaactggagaagctgtgtgaggaactgcaggccaccttggatgggttgaccaaaatacaggtgaaaatggaaaagctgtcttcaactaccaagggaatttgtgaactagaaaactaccattatggggaggagagtaaacgaccccctctgttccacacgtggcctacaacccatttctatgaggtttcgcataagctcttggagatgtacaggaaggagctgctcctgaagcgcacggtggccaaggagcttgcccacaccggggatcccgacctcaccctgagctacctgtccatgtggctgcaccagccctatgtggagagcgacagtaggctgcatctggagagcatgctgctggagacaggccaccgagctctctgacgtcctgagacggctgcggacactggctccttccacgtctcaccaggcagacagtctgcctaggacccagtgccgcaggcctggatcagaccccaggatcagaccttcttggggtcttctggccagagcttgtcaccagccccatggcctctccaggcgtgctcatgcccacaacccgcggccagccccacgtggtgccgctcagcctttctctgcccctcctgggaa

SEQ ID NO: 227998 - DNA, 765 bp, Homo Sapiens
  misc_feature (47)..(55): n is a, c, g, or t
ttgggaagcttctggtttctgctgtttgctttaaatacccttggggnnnnnnnnnaaacccttacaaggggagcatcagctttggaaagtgtgactctgtaggagtgtagaaggcagtggtgtatgatcttagcctcgtcctgatgcctgaatccagccagctgttgctctgacccacagcaatagagcaagttacccatcaccagcatttgtacagagcagggaattctggttttagtccattggtagcattgtgtgtatgaggagattcaacaccacagacagctgcaggactcgatatccatggcttctttccatcacaaaacgggtagaaacacattcactgcttcagggttctaatctgtgtgtctccttatgactccatttctgtaagctactctgtaactttgatatatgctgtattttctttctttaaaagatttagatgttttttcagcaagctagccatacaaccattgtatctctttctcttcagtatggtttagagcccagatcagttagtaggctttcgttgtcttctctttcaatacatgtacatctttactgtttgaaaagtgttacagctgtcaaagaatcttcatggacctgaagataatttcttgtgaagttgaatgcaagtgtactgtcattcatagtgtttatatcaaaataccaggaatcttcacttttgctaccttgatatagcattgggctatcatgttacaacattgaaatacattgatttattaaaaaatacttttataa

SEQ ID NO: 227999 - DNA, 1141 bp, Homo Sapiens
  misc_feature (83)..(106): n is a, c, g, or t
ttggcttcctgaggccagaaggagagaagacgtgcagggaccccgcgcacaggagctgccctcgcgacatgggtcacccgccnnnnnnnnnnnnnnnnnnnnnnnnccacacctgcgtcccagcctcttggggcctgcggtgcatgcagtgtaagaccaacggggattgccgtgtggaagagtgcgccctgggacaggacctctgcaggaccacgatcgtgcgcttgtgggaagaaggagaagagctggagctggtggagaaaagctgtacccactcagagaagaccaacaggaccctgagctatcggactggcttgaagatcaccagccttaccgaggttgtgtgtgggttagacttgtgcaaccagggcaactctggccgggctgtcacctattcccgaagccgttacctcgaatgcatttcctgtggctcatcagacatgagctgtgagaggggccggcaccagagcctgcagtgccgcagccctgaagaacagtgcctggatgtggtgacccactggatccaggaaggtgaagaagggcgtccaaaggatgaccgccacctccgtggctgtggctaccttcccggctgcccgggctccaatggtttccacaacaacgacaccttccacttcctgaaatgctgcaacaccaccaaatgcaacgagggcccaatcctggagcttgaaaatctgccgcagaatggccgccagtgttacagctgcaaggggaacagcacccatggatgctcctctgaagagactttcctcattgactgccgaggccccatgaatcaatgtctggtagccaccggcactcacgaaccgaaaaaccaaagctatatggtaagaggctgtgcaaccgcctcaatgtgccaacatgcccacctgggtgacgccttcagcatgaaccacattgatgtctcctgctgtactaaaagtggctgtaaccacccagacctggatgtccagtaccgcagtggggctgctcctcagcctggccctgcccatctcagccccaccatcaccctgctaatgactgccagactgtgggggaggcactctcctctggacctaaacctgaaatccccctctctgccctgggctggatcccgggggacccctttgccctttccctcggc

SEQ ID NO: 228000 - DNA, 780 bp, Homo Sapiens
tttgtacaaaaaagttggcgggctggttacagcagctctacccctcacgacgcaaacatggcagcgcagaaggaccagcagaaagatgccgaggcggaagggctgagcggcacgaccctgctgccgaagctgattccctccggtgcaggccgggagtggctggagcggcgccgcgcgaccatccggccctggagcaccttcgtggaccagcagcgcttctcacggccccgcaacctgggagagctgtgccagcgcctcgtacgcaacgtggagtactaccagagcaactatgtgttcgtgttcctgggcctcatcctgtactgtgtggtgacgtcccctatgttgctggtggctctggctgtctttttcggcgcctgttacattctctatctgcgcaccttggagtccaagcttgtgctctttggccgagaggtgagcccagcgcatcagtatgctctggctggaggcatctccttccccttcttctggctggctggtgcgggctcggccgtcttctgggtgctgggagccaccctggtggtcatcggctcccacgctgccttccaccagattgaggctgtggacggggaggagctgcagatggaacccgtgtgaggtgtcttctgggacctgccggcctcccgggccagctgccccacccctgcccatgcctgtcctgcacggctctgctgctcgggcccacagcgccgtcccatcacaagcccggggagggatcccgcctttgaaaataaagctgttatgggtgtcattcaggacaaa

SEQ ID NO: 228001 - DNA, 466 bp, Homo Sapiens; identical to SEQ ID NO: 194482
  misc_feature (344)..(352): n is a, c, g, or t

SEQ ID NO: 228002 - DNA, 1001 bp, Homo Sapiens
  misc_feature (819)..(831): n is a, c, g, or t
ctttgtacaaaaaagttggatctgggagtggggggaggtcaggcggcacagggggaatcccgggggcctaaggaggttgtctcagtttttgtcagcatctccaccccgaggtggtttgaactttgagccttttgtagtcctgatgaataatttcattttcctcaagtttatgacactcggaacgtcaagaactggaggtttgtgcaatttgagaccggtcggcactgtgcagagatcagagtactaagagacagagattaaaatggcttccagaggaaagacagagacaagcaaattaaagcagaatttagaagaacagttggatagactcatgcaacaattacaagatctggaggaatgcagagaggaacttgatacagatgaatatgaagaaaccaaaaaggaaactctggagcaactaagtgaatttaatgattcactaaagaaaattatgtctggaaatatgactttggtagatgaactaagtggaatgcagctggctattcaggcagctatcagccaggcctttaaaaccccagaggtcatcagattgtttgcaaagaaacaaccaggtcagcttcggacaaggttagcagagatggatagagatctgatggtaggaaagctggaaagagacctgtacactcaacagaaagtggagatactaacagctcttaggaaacttggagagaagctgactgcagatgatgaggccttcttgtcagcaaatgcaggtgctatactcagccagtttgagaaagtctctacagaccttggctctggagacaaaattcttgctctggcaagttttgaggttgnnnnnnnnnnnnntgacatggtgcagaagcttgtaacattgatcacattcttaatgtaaatggtgtctttcttctggggttttcagttattgcaagaaatgaagagattctggaaatgcatcaataacctaagaaaaagcgacataaaaaatatacttatggcttgtgtttatgctcttcatc

SEQ ID NO: 228003 - DNA, 1457 bp, Homo Sapiens
  misc_feature (1193)..(1343): n is a, c, g, or t
ttgggggaggtgaaaggcgccaggtgccagtcctggcctctgatgtaacccagcgccccgcagtcccgacacagattcctggatctcagccccatagcagctatgatcccgctgctgctggcagcgctgctgtgcgtccccgccggggccctgacctgctacggggactccgggcagcctgtagactggttcgtggtctacaagctgccagctcttagagggtccggggaggcggcgcagagagggctgcagtacaagtatctggacgagagctccggaggctggcgggacggcagggcactcatcaacagcccggagggggccgtgggccgaagcctgcagccgctgtaccggagcaacaccagccagctcgccttcctgctctacaatgaccaaccgcctcaacccagcaaggctcaggactcttccatgcgtgggcacacgaagggtgtcctgctccttgaccacgatgggggcttctggctggtccacagtgtacctaacttccctccaccggcctcctctgctgcatacagctggcctcatagcgcctgtacctacgggcagaccctgctctgtgtgtcttttcccttcgctcagttctcgaagatgggcaagcagctgacctacacctacccctgggtctataactaccagctggaagggatctttgcccaggaattccccgacttggagaatgtggtcaagggccaccacgttagccaagaaccctggaacagcagcatcacactcacatcccaggccggggctgttttccagagctttgccaagttcagcaaatttggagatgacctgtactccggctggttggcagcagcccttggtaccaacctgcaggtccagttctggcacaaaactgtaggcatcctgccctctaactgctcggatatctggcaggttctgaatgtgaaccagatagctttccctggaccagccggcccaagcttcaacagcacagaggaccactccaaatggtgcgtgtccccaaaagggccctggacctgcgtgggtgacatgaatcggaaccagggagaggagcaacggggtgggggcacactgtgtgcccagctgccagccctctggaaagccttccagccgctggtgaagaactaccagccctgtaatggcatggccaggaagcccagcagagcttataagatctaacccttatnnnnnnnnnnnnnnnnnnnnnnnnnnnnnnnnnnnnnnnnnnnnnnnnnnnnnnnnnnnnnnnnnnnnnnnnnnnnnnnnnnnnnnnnnnnnnnnnnnnnnnnnnnnnnnnnnnnnnnnnnnnnnnnnnnnnnnnnnnnnnnnnnnnnnnnataaatgcctgtagtcccagccactgaagccagaggatcgattgaaccagggagatcatggtcacagtgaactatgattacgccaacctgggtcacatagcaagactctgtttc

SEQ ID NO: 228004 - DNA, 692 bp, Homo Sapiens
  misc_feature (100)..(158): n is a, c, g, or t
ctttgtacaaaaaagttggcgcgcgttgcggtcaagatggcgctggtggcttctgtgcgagtcccggcgcgcgttctgctccgggcgggggcccggctcnnnnnnnnnnnnnnnnnnnnnnnnnnnnnnnnnnnnnnnnnnnnnnnnnnnnnnnnnnncttcgggagccagcgggtgctggtggagccggacgcgggcgcaggggtcgctgtgatgaaattcaagaaccccccagtgaacagcctgagcctggagtttctgacggagctggtcatcagcctggagaagctggagaatgacaagagcttccgcggtgtcattctgacctcggaccgcccgggtgtcttctcggccggcctggacctgacggagatgtgtgggaggagccccgcccactacgctgggtactggaaggccgttcaggagctgtggctgcggttgtaccagtccaacctggtgctggtctccgccatcaacggagcctgccccgctggaggctgcctggtggccctgacctgtgactaccgcatcctggcggacaaccccaggtactgcataggactcaatgagacccagctgggcatcatcgcccctttctggttgaaagacaccctggagaacaccatcgggcaccggggcggcggagcgtgccctgcagctgggggctgctcttcccgccggcggaggccctg

SEQ ID NO: 228005 - DNA, 1106 bp, Homo Sapiens; identical to SEQ ID NO: 194483
  misc_feature (193)..(237): n is a, c, g, or t

SEQ ID NO: 228006 - DNA, 1087 bp, Homo Sapiens
ttgggaaggaggcctcctagaccttggctggcgcaaaggctgccctggatgggactcctggtatgatcgggtacggcatggccaagggtgctgttcaccagctctgccagagcctggctgggaagaacagcggcatgccgcccggggcagccgccatcgctgtgctcccggttaccctggataccccgatgaacaggaaatcaatgcctgaggctgacttcagctcctggacacccttagaattcctagttgaaactttccatgactggatcacagggaaaaaccgaccgagctcaggaagcctaatccaggtggtaaccacagaaggaaggacggaactcaccccagcatatttttaggcctcatctcagtgcctatgaggggcctgccagaaaagtcactaacctgtctcagtgtggccttgtccagccttgtgttttctgtaacccctgtttgtggtacgagataatgagtcctatttttctctcacataatatgcatttgctctcctaggacagtgtaatacatttatgtgaagtaaagacatgcgagactggtggcctgcaaatagcatccgttgatctgtgttaactgcatagggagggctctgcatagcacctgctatagcggtgtcatgttggatcgcttttgtgactgttcatctgtccttgacagtggctgtcatcttgactactttgttgatttgttggtattggggacattttaaaggctgagttatttttgaatgtcatgtttatgtcatagacgtagttttcgcatccttgaattaaactgccttaactccttttgtggtataagcaaaactacatggactctgtcctggtatccttttcctgtgtggttgccccgtgtcctctggcctagggttaagtgtgcaagataactactcgtgagtattcagaatgttgttcctaataaatgcacttgttgtctgtcttctttaatcaaatcacatcttatatacagcagtcagagatgagtatactagaatcatggattgctggaggtctttttatctgatgttctcagaagggggtggatttaaattcctgaaataaatatttca

SEQ ID NO: 228007 - DNA, 1024 bp, Homo Sapiens
actttgtacaaaaaagttggcttttaattaggaacaaatctaatggaaaggagagttgactgaagttggcccacaggattgtgagctgggcagtgccttcatgaaggcttgccaccttgggacgccccagtttactggggtgtcttgcggagtgcagaaggctttctggcagctgcctgggtttggccagaccctgcctcccctcccgccggccaacccctagtccccttcctgtctccacttgcattcaggggtggctgctgttctgagaacattagaactgggaagagagatggagtcacatggatttttggtgggcattattctgaactttcgtatccaagttagtcccccttattccactgtggcattgccgttctaagcagttacctgatgcctgctgctgaagagctgctcacaggaggcggcggcggccctggcactgccccttgcattaggtcttgtgtttgatgtgttcttgtgaatttactttgtcagaacaaaatatttacgcgttgggttcaggaatttcttttagctccccatctggctgtgaaattcaggaaacctcccgttgcctagtaatcaccccatgtaggtgtacattgtgacaaagtgcatctgaccactaaggggcccccttggtgaccccagcacattcacagcagtgttaaaatggcctgcattttggagatgctggctggcctttcagtgcctcccaggaagacacatggcctttccctcttcagatgcctgaagggagtgctttgaggcggtgatgtgctgggagtgtgggcggcctccctctggccccggggccctctgtggaccttggctccctccgtggacctggggtttcgtggtgagcactgcagcctccctgggcattccctccagcgccagcaccactgcaacatatagacctgagtgctattgtattttggcttggtgtgtatgctcttcattgtgtaaaattgctgttcttttgacaatttaagtgattgttttgtttactgtaagtttg

SEQ ID NO: 228008 - DNA, 799 bp, Homo Sapiens; identical to SEQ ID NO: 194486

SEQ ID NO: 228009 - DNA, 953 bp, Homo Sapiens; identical to SEQ ID NO: 194488

SEQ ID NO: 228010 - DNA, 940 bp, Homo Sapiens; identical to SEQ ID NO: 194489

SEQ ID NO: 228011 - DNA, 1010 bp, Homo Sapiens
ttgggtcccaggtagggacggcacaggagggtgcatggggcgtgggggagctgagcaagggtcgctcacttagaaatgtctttggaatggtgtttaactaatgctgctggcggacatcctaaaaccagatgcatcctcagaggacgagtctactaattattgcctttgttgttgtattacaaatctgcataaaatacctcatttcaaatcaaatcttacaaatttagaagagagatatgttttccgaaaacagtggaagccctttgttccttcccgggtttgtcctgagcctgcactgtcctcgcctgcagcctcagaggggcaggcatccccgcacagacttgactggcagggcggtcacgggacctgcgggctggctccgagtggcagcccatgcctttctgcagggtatgggttgacacttgacaggttgaaaccagtgcctctatggacggctgctgtggccccttcagacaatgggcagtgcccaccccgcccactggcgtctgcgtgtgagggctaggccgccctgccacacatcccgccccctcccggaggcagcttcaggacaggacaccaggctggctgctttttttagcctgcccctggcccaggcccagtccttggtgtcagggagcccccaggccgcaggtggagggtgataaaatatgttctctgacaggacccagccagccacataggtggaggttttccatgtccaaatgaggtcaagatgccgaaatcccagatctgacttcacacttcccttttctagaaccttttgtaaaagttggtggcagcagaggcagccccaggccgggctgcatctctctgtgtctgttgtgccttgcccggcgcctcacggatggcaaagctctcctcacccatgggactgtagtgcaattaaacccccgtctaggtgatgcttttaaagttgtagcttcctgctttgtacagttttctttctggttttaatttttatttgtgctttgagtcagtgcaataaacta

SEQ ID NO: 228012 - DNA, 862 bp, Homo Sapiens
ttggctttcgcctccgcctgtggatgctgcgcctctccgaacgcaacatgaaggtgctccttgccgccgccctcatcgcggggtccgtcttcttcctgctgctgccgggaccttctgcggccgatgagaagaagaaggggcccaaagtcaccgtcaaggtgtattttgacctacgaattggagatgaagatgtaggccgggtgatctttggtctcttcggaaagactgttccaaaaacagtggataattttgtggccttagctacaggagagaaaggatttggctacaaaaacagcaaattccatcgtgtaatcaaggacttcatgatccagggcggagacttcaccaggggagatggcacaggaggaaagagcatctacggtgagcgcttccccgatgagaacttcaaactgaagcactacgggcctggctgggtgagcatggccaacgcaggcaaagacaccaacggctcccagttcttcatcacgacagtcaagacagcctggctagatggcaagcatgtggtgtttggcaaagttctagagggcatggaggtggtgcggaaggtggagagcaccaagacagacagccgggataaacccctgaaggatgtgatcatcgcagactgcggcaagatcgaggtggagaagccctttgccatcgccaaggagtagggcacagggacatctttctttgagtgaccgtctgtgcaggccctgtagtccgccacagggctctgagctgcactggccccggtgctggcatctggtggagcggacccactcccctcacattccacaggcccatggactcacttttgtaacaaactcctaccaacactgaccaagaaaaaaatgtgggg

SEQ ID NO: 228013 - DNA, 664 bp, Homo Sapiens; identical to SEQ ID NO: 194490

SEQ ID NO: 228014 - DNA, 832 bp, Homo Sapiens; identical to SEQ ID NO: 194491

SEQ ID NO: 228015 - DNA, 1517 bp, Homo Sapiens
ttggtgttattatggatagtgattgtgatgctatttatcttcagggtcactctgggcaaagagaaggtcctcagccatgcccccagcaccttgcacataggtgtctgataaaagtttaagaaattaaacactttttgagcaccaaatatatatagggcattgttctggtgggtgtgtcacgctcccagaagactgaattcatggtaggatcactcgcaaggccttgtgaaggagtcttacctaaaacgaaagaaatatcagggacttttgttgactatttacaactcagttttacatttaaattcaggcagtgttaatatgccaaggtagggaatgtgcctttttcagagttggccaggagctcctggctgggacacggagaggcaggtgtggcgtaaggcctcactcccggctgtgaaggtctctgatcacacagaagcagccctgcccagcctggtcatttgctgtccgcttttctctgtgaccacagcagccctgaacaaccagtatgtgtcttcttctccagatagtgaaaaaggtgtccagataaacccacctaagtgaaatggccatcctctaaactgggtacctcactgcacagcttctaggtagccttctaacttaatctaacttgagcctcacagtaaccctgtaaagttagtagagcttgttcttgtattgtgaccttttttaaaaaaaaggaactgaggttcagaatgattaagggcctggcccccagggttgtccagctccataaggtggagctgggcaagattttgggtttgctgctccctgaagctggattctttcatacgatactctttctcaagaagggggctccctgggatctccaggtgtactgcacttaccctcaatccagccccggagaagcaagtgaaaagggtgggtccctcataggctagaatgtgcagctctttctccaggtgggatgtagcaccccgaagtagagctttctgctctgctcctggaaaaggctagggagctggggctggggctcccctcccatgaccaggcagtggtcaccccatgggacaggcacagctacttacgcgaacacagcaggttggtgtggctggctaactaggacctctcgaaagtctctgtgggggcatgagggagaaaaggccattgggagaattactgcctttactttgggactacttttatgctgataacttgggatttcttgatagtccttcacccctgaaaccccgtatttacttaacaagatttagctcttagttcttcaagtaaaattaaagtctcttgtgtaagagccaacacatgcccagctgcggatgggagctgttcctggacagccttctactgcctgggaagtgatggaacaggaactcagggtgcccttaccccctccccagacctgttccctttctttgactgacagagcaccatccaggcaaaattagagcgccaaatggttttcttctcaatcttaaagcagtatacctttccacaggctcgtctgtgtccctgcc

SEQ ID NO: 228016 - DNA, 511 bp, Homo Sapiens
ttgtacaaaaaagttggcgactccatcttcgcggtagctgggaccgccgttcagtcgccaatatgcagctctttgtccgcgcccaggagctacacaccttcgaggtgaccggccaggaaacggtcgcccagatcaaggctcatgtagcctcactggagggcattgccccggaagatcaagtcgtgctcctggcaggcgcgcccctggaggatgaggccactctgggccagtgcggggtggaggccctgactaccctggaagtagcaggccgcatgcttggaggtaaagtccatggttccctggcccgtgctggaaaagtgagaggtcagactcctaaggtggccaaacaggagaagaagaagaagaagacaggtcgggctaagcggcggatgcagtacaaccggcgctttgtcaacgttgtgcccacctttggcaagaagaagggccccaatgccaactcttaagtcttttgtaattctggctttctctaataaaaaagccacttagttca

SEQ ID NO: 228017 - DNA, 405 bp, Homo Sapiens; identical to SEQ ID NO: 194493

SEQ ID NO: 228018 - DNA, 367 bp, Homo Sapiens; identical to SEQ ID NO: 194494

SEQ ID NO: 228019 - DNA, 885 bp, Homo Sapiens
  misc_feature (207)..(217): n is a, c, g, or t
gctggtctatatctcttagaactgctaaactctttaacaaatgacaaattgctggagggaaaaacaagaactcttttcattgccggtggaacacagtgtataagacccaaaatatgccaccccaaaatataatggtaggaaaccagaatatgcaaccccaaaatatgtccctttggcttaagaattattccaagctaattattttgnnnnnnnnnnntgctaacaaaggaagttgtgaaaacagagaagttacacttgtgtaaggaaaatttacatctataaaggaaatcaccatttaaaagctacctctctcgacaccaagaagagaaggataactaaatcactaaagagtcttatcaatggagaatgcatggacttaagtctgtataatgaaccttacccttgtctaatgtgcttttgctggttaactccccaatactgcacctcaaatcttctttctttaagttgaagacagtatttatgcttgaattgaaagccacctgttggagatttactcatttttccctgaatatctcccatgtaaccataaggtatacgtgtttttcaacttttctgtttttctcattttaatctgtcagtttttacagagcatcccatctaagaattccaaaaacagaaaattatttttcctcccctattacaagttgggcatttttttccaaagctaaacaagtctcaccttacaatccaaaaataacattcctaagtattttgacaactactttgatgttacttccaatcaaaagctaccatgcaattatttacataagccctattcataatgaccaaaggaaaaaaacggaatcagaaagtcttacaatagatgactgtgtgggactccactcagacatcaaaagttgccaa

SEQ ID NO: 228020 - DNA, 868 bp, Homo Sapiens
  misc_feature (132)..(156): n is a, c, g, or t
ttgggttctgcgctccattgtgggcatcaaacgacacgtcaaagccctccatctgggggacacagtggactctgatcagttcaagcgggaggaggatttctactacacagaggtgcagctgaaggaggaatnnnnnnnnnnnnnnnnnnnnnnnnncgcaggcaccccagtccctgggactcccacctccgagccagctcccacccccagcatgactggcctgcctctgtctgctcttccaccacctctgcacaaagcccagtcctccggcccagaacatcctggcccggagtcctccctgccctcaggggctctcagcaagtcagctcctgggtccttctggcacattcaggcagatcatgcataccaggctctgccatccttccagatcccagtctcaccacacatctacaccagtgtcagctgggctgctgccccctccgccgcctgctctctctctccggtccggagccggtcgctaagcttcagcgagccccagcagccagcacctgcgatgaaatctcatctgatcgtcacttctccaccccgggcccagagtggtgccaggaaagcccgaggggaggctaagaagtgccgcaaggtgtatggcatcgagcaccgggaccagtggtgcacggcgtgccggtggaagaaggcctgccagcgctttctggactgagctgtgctgcaggttctactctgttcctggccctgccggcagccactgacaagaggccagtgtgtcaccagccctcagcagaaaccgaaagagaaagaacggaaacacggagtttgggctctgttggctaaggtgtaacacttaaagcaattttctcccattgtgcgaacattttattttttaaaaaaa

SEQ ID NO: 228021 - DNA, 844 bp, Homo Sapiens
  misc_feature (380)..(420): n is a, c, g, or t
ttgggaaggagttctacttgtcttgacaccatagaggtggcttgagaagatgtcctttgaagagccagtatagtttctgtgccctgcagcagcccaagtgctttaaagccgtttcaagctgtatagtttgcacacccatcccagtggaggggaaaggggataagtgtttcaaggcaaccttttctgcactttgctgcgaaaagcaaagggccttctatgaaggacaaaacttgcagaattgggtgtgtgggagagcaaaaaaatactgtagatcttcaaagagcatctccacaacccacagccttcttcccaatagtgttaactctgcatttttacagcgtagcatgtgtgtagtttttggctattactggtgtattatnnnnnnnnnnnnnnnnnnnnnnnnnnnnnnnnnnnnnnnnntagcatcattttgattaacatttggggcctgataggggaaatggtgaagcaatggaaaagaacagacaactaatgatttgcttctatgtccagaatattttacctttaaaaaaatgtcattggcaccataaataaggactgtgagagactgtttaaaagctgtgaaagtctgaaacctataagccaaggtgttccctgcctaaacttattgctgttcccacaaaggactaagcctgttcataagttaccaaagttgccattttggagatggaaattgacgaggagggaaggtcttttattggaaagtatacaatacaagcagatcattctgccttaaaggtgctaattcccgaaattagaaaaccctttcttttccagtaacgaagttataaatatcagcttgttcatccaagccactggctga

SEQ ID NO: 228022 - DNA, 1283 bp, Homo Sapiens
aagcgatcttcccacctcagcctcctgaatagctggaactatagtcacacgccaccacacccggctgagagaattctgccagatatcaggacagatggggaacagcagaagccgtgtggggcggagcttttgttcacagtttcttcctgaggaacaggcagagattgatcaattgtttgatgctctgtcatcagataaaaacagcccgaatgtctcatccaaatccttctctctgaaggcactacagaaccacgtcggggaagctcttcccccagagatggtcaccaggctgtatgatggcatgcggagggtcgacctgacagggaaggcgaagggacccagtgagaacgtgtcccaggagcagttcacagcatccatgtcccacctgttgaaaggaaactccgaggagaagagtctcatgattatgaaaatgatttctgccacagaaggtcccgtgaaggccagagaagtccaaaagtttacagaggatctggttggctctgtggtgcacgtgctaagccacagacaggagctgagaggctggactgggaaggaagccccagggcccaacccccgggtgcaggtgctggctgctcagctgctctctgagatgaagctgcaagatggcaagagacttctggggccccagtggctggactatgactgtgaccgagctgtgatcgaggactgggtgttcagggtcccccatgtggccatattcctgagtgtggtcatttgcaagggctttctcgtcctgtgctcgtctcttgatctgactaccctggtccctgagcgtcaagtggaccagggcaggggttttgagagcatcctggatgtcctctctgtcatgtacatcaacgcccagctgcctcgggagcagcggcaccgctggcgcctgctcttttcgtctgagctccatggacacagcttctcccagctctgtggccacatcactcaccgggggccctgtgtggctgtcctcgaggaccatgacaagcatgtgttcggtgggtttgcctcttgctcttgggaggtgaagcctcagtttcaaggggacaatagatgcttcctgttctccatctgccccagcatggctgtgtacacacacacgggctacaacgaccactacatgtacttgaaccatggacagcagacgatcccgaacggactgggtatgggggggcagcacaattactttgggctttgggtggatgttgattttgggaaaggacacagcagagccaagcccacgtgcaccacgtacaacagcccgcagctgtcgg

SEQ ID NO: 228023 - DNA, 1277 bp, Homo Sapiens
ttggcactgattttttccttcaacttgtggatgcaggcaaggtggatgatgccagagctctcctacagagatgtggtgcaattgctgaacaaaccccgattttgttgttgttcctccttaggaattctaggaaacaaggaaaggcatcaactgtgaaatctgtgttagaattgattcctgaattaaatgaaaaggaagaagcatacaattccctcatgaaaagctatgtctcagagaaagatgtcacatctgctaaagcactgtatgaacatttgactgcaaagaatacaaaattggatgatctgtttctaaagcgttacgcatctttgctgaagtatgctggagagcctgtccctttcattgaaccccctgaaagctttgaattttatgcacagcagctaagaaaattgagggaaaactcttcttgaaataaccaggcgatactttgttttgtatatatttgtgattctgtgtctacatgttattttgaagtatatctgagggaaaaataaatgaaaattttctttatgtacttatgtatgtgtgatgcatgttcaaagtcttattgaccataactctgtgcacttggttattggacatttttggagtttttttctctgggaaaaatcgatagtgttttcttcaatgctgctgctgtgtgaagccatactttttcaggattcttcccctaattggctctttggtttccctgctctgtttcatttatttcattaaaatgttattcctttatttaagattcacttattagtctgctgtttctctgaaaaattttagagctaggtatagtgaccgtgaactttctaacgcataatattctgtgatacagccattccgtacatgtgtgaagtcctgcataactttcgaactttgttaaatgttggcactaggagtcatcagatctaggcttcatcattttccagtgagaagcagagacccaaagggcctgttacttgtgcttggtcaggggactgtctgtcatgcctggaggctcttcggcacacttccccatctttcccttctgccactgtggcttcaagcacctctgttcatagagcgtctctgaaattgagtctcggtcatgacttatcccgaagtagagcaatgtgtttcctctcattgtagtttcaggactttgtcagtacaagctctgccctaggcttgttactttatactcatatcctgaaaagatgtgatttcatctatgaaggggtaaaatattggtttgtatttaattgtttgaaataaaaagtgatccc

SEQ ID NO: 228024 - DNA, 928 bp, Homo Sapiens
ttggtgcagggccaagagcgctgtcaagaagacccacacgcccccctccagcagctgaattcctgcagctcagcagccgccgccagagcaggacgaaccgccaatcgcaaggcacctctgagaacttcaggatgcagatgtctccagccctcacctgcctagtcctgggcctggcccttgtctttggtgaagggtctgctgtgcaccatcccccatcctacgtggcccacctggcctcagacttcggggtgagggtgtttcagcaggtggcgcaggcctccaaggaccgcaacgtggttttctcaccctatggggtggcctcggtgttggccatgctccagctgacaacaggaggagaaacccagcagcagattcaagcagctatgggattcaagattgatgacaagggcatggcccccgccctccggcatctgtacaaggagctcatggggccatggaacaaggatgagatcagcaccacagacgcgatcttcgtccagcgggatctgaagctggtccagggcttcatgccccacttcttcaggctgttccggagcacggtcaagcaagtggacttttcagaggtggagagagccagattcatcatcaatgactgggtgaagacacacacaaaaggtatgatcagcaacttgcttgggaaaggagccgtggaccagctgacacggctggtgctggtgaatgccctctacttcaacggccagtggaagactcccttccccgactccagcacccaccgccgcctcttccacaaatcagacggcagcactgtctctgtgcccatgatggctcagaccaacaagttcaactatactgagttcaccacgcccgatggccattactacgacatcctggaactgccctaccacggggacaccctcagcatgttcattgctgccccttatgaaaa

SEQ ID NO: 228025 - DNA, 827 bp, Homo Sapiens
ctttaaaagccaactttgtacaaaaaagttggaacatggctgcggccggtttggcccttctttgtaggagagtttcatccgccctgaaatcttcccgatcgttaataactcctcaggtccctgcctgcacagggttttttcttagtttgttgcctaagagtacaccaaatgtgacatcctttcaccaatatagattacttcataccacattgtcaaggaaaggactagaagaattttttgatgacccaaaaaactgggggcaagaaaaagtaaaatctggagcagcatggacctgtcagcaactaaggaacaaaagtaatgaagatttacacaaactttggtatgtcttactgaaagaaagaaacatgcttctaaccctagagcaggaggccaagcggcagagattgccaatgccaagtccagagcggttagataaggtagtagattccatggatgcattagataaagttgtccaggaaagagaagatgccctaaggcttcttcagactggtcaagaaagagctagacctggtgcttggagaagagacatctttggaagaatcatctggcacaagttcaagcagtgggttataccttggcacctaaataaaagatacaataggaaacgattctttgccttgccttatgtggaccattttctcagactggaacgtgagaaacgagcccgcatcaaagcacggaaggaaaatttagagagaaagaaagcaaaaattcttttaaaaaagtttccacatcttgctgaagcccaaaagtcaagtcttgtctaagatgtctgaactattaaatttaccattttgtttttcttg

SEQ ID NO: 228026 - DNA, 1007 bp, Homo Sapiens
ataaaaaagttcacacttttgaaatttcacagaagaattttaaggccaaaacatagtgggttcatttctcttcacttccagggacaaatctgatgctttcctcaaaccacattaagcttccagttcaaatcccaagccaaccttgtgacctcctgcactgaagttcttcccatcgattaaagctgataaagtcaatttgactcctggtcgaagggtctgagtataacccagtccaatcaggctggcattatttactttagcagagagagaagttctacaatccagcatgtacttagcagcaatgccaaaacgggtgttgttactcccagctgtccaagcaaggtttatggatgtttcaatcttctcattcaccttctggtagatagaacctccaaattcagtgccatcgttcacatgtgtgtgcagctggaagtccgcagccttgtaacccagggcgaaattattctgtgacagtttggatttggctgtgtcaaaactcatctgatagccagcaagccacccttcgaaggccaacacagcccagccatagatggttggtccagaaaaatctatatcaacattactgccaacactaaaacaatcccgtttataggaggccttcaatttcccactcttctttcctgtgttcggtacaaatatggtatcaagagtcagtttcaacccttcagccaacttattctcccaagagatttctgtccctagagtattgtctgtgttccatttctgggtgaaggtaagtccatagttacagaccttatatttggtttctaggttgcctgatgctttccctgtatcagtgtaagcatgaccagaagtagaaaattccactccactacaagacttggttttcaggtctatcttgaccatgccaaagccatatcctttgttgaagacatccttagcagcctttcctaggtcacagtacgttggtgtgttacacatatcttagaaaaatctctctcaggctcttatgaaacccaagccaa

SEQ ID NO: 228027 - DNA, 901 bp, Homo Sapiens; identical to SEQ ID NO: 194498
  misc_feature (159)..(203): n is a, c, g, or t
  misc_feature (765)..(777): n is a, c, g, or t

SEQ ID NO: 228028 - DNA, 1388 bp, Homo Sapiens
ttggctccatctggctctcctctacctccaggcaggctcacccgagatccccgccccgaaccccccctgcacactcggcccagcgctgttgcccccggagcggacgtttctgcagctattctgagcacaccttgacgtcggctgagggagcgggacagggtcagcggcgaaggaggcaggccccgcgcggggatctcggaagccctgcggtgcatcatgaagttccagtacaaggaggaccatccctttgagtatcggaaaaaggaaggagaaaagatccggaagaaatatccggacagggtccccgtgattgtagagaaggctccaaaagccagggtgcctgatctggacaagaggaagtacctagtgccctctgaccttactgttggccagttctacttcttaatccggaagagaatccacctgagacctgaggacgccttattcttctttgtcaacaacaccatccctcccaccagtgctaccatgggccaactgtatgaggacaatcatgaggaagactattttctgtatgtggcctacagtgatgagagtgtctatgggaaatgagtggttggaagcccagcagatgggagcacctggacttgggggtaggggaggggtgtgtgtgcgcgacatggggaaagagggtggctcccaccgcaaggagacagaaggtgaagacatctagaaacattacaccacacacaccgtcatcacattttcacatgctcaattgatattttttgctgcttcctcggcccagggagaaagcatgtcaggacagagctgttggattggctttgatagaggaatggggatgatgtaagtttacagtattcctggggtttaattgttgtgcagtttcatagatgggtcaggaggtggacaagttggggccagagatgatggcagtccagcagcaactccctgtgctcccttctctttgggcagagattctatttttgacatttgcacaagacaggtagggaaaggggacttgtggtagtggaccatacctggggaccaaaagagacccactgtaattgatgcattgtggcccctgatcttccctgtctcacacttcttttctcccatcccggttgcaatctcactcagacatcacagtaccaccccaggggtggcagtagacaacaacccagaaatttagacagggatctcttacctttggaaaataggggttaggcatgaaggtggttgtgattaagaagatggttttgttattaaatagcattaaaactggaattgacaagagtgtttgagcatccctgtctaacctgctctttctactttggtgccccttatctcaccccttccttggaaatttaataaattctcaggcatttccaattgtaaactaaaaccac

SEQ ID NO: 228029 - DNA, 909 bp, Homo Sapiens
ttggcttccctaggctatttctgccgggcgctccgcgaagatgcagctcaagccgatggagatcaaccccgagatgctgaacaaagtgctgtaccggctgggggtcgccggccagtggcgcttcgtggacgtgctggggctggaagaggagtctctgggctcggtgccagcgcctgcctgcgcgctgctgctgctgtttcccctcacggcccagcatgagaacttcaggaaaaagcagattgaagagctgaagggacaagaagttagtcctaaagtgtacttcatgaagcagaccattgggaattcctgtggcacaatcggacttattcacgcagtggccaataatcaagacaaactgggatttgaggatggatcagttctgaaacagtttctttctgaaacagagaaaatgtcccctgaagacagagcaaaatgctttgaaaagaatgaggccatacaggcagcccatgatgccgtggcacaggaaggccaatgtcgggtagatgacaaggtgaatttccattttattctgtttaacaacgtggatggccacctctatgaacttgatggacgaatgccttttccggtgaaccatggcgccagttcagaggacaccctgctgaaggacgctgccaaggtctgcagagaattcaccgagcgtgagcaaggagaagtccgcttctctgccgtggctctctgcaaggcagcctaatgctctgtgggagggactttgctgatttcccctcttcccttcaacatgaaaatatatacccccccatgcagtctaaaatgcttcagtacttgtgaaacacagctgttcttctgttctgcagacacgccttcccctcagccacacccaggcacttaagcacaagcaaagtgcacagctgtccactggggccattgtgg

SEQ ID NO: 228030 - DNA, 601 bp, Homo Sapiens
ttggcactggcaaaccaggggtccttgtaccatgagatggctattgagccgctggatgacatcgcagcggtgacagacatcctgacccagcgggagggcgcaaggctggagacacccccaccctggctggcaatgtttacagaccagcctgccctgcctaacccctgctcgcctgcctcagtggccccagccccagactggacccaccccctgccctgggggagaccccgaaccttttccctggatgctgtccccccagaccactcccctagggctcgctcggttgcccccctcccacctcagcgatccccacgtaccagaggcctctgcagcaaaggccaacctcgcacttggctccagtcaccagtgtgagagagaaaggtgctggcataggatctgcccagaagagaaaatgacccatgcgcagttgggctctggatacggcgctgtctatagcaagttggccagtctggcctcctgttcctctgctggacctggggtaggctgcaagggtgggcagaagcccctcttaaattgtggttgccatggtaccgagggactcattcctggggctcgctgggacctccctaaacccttcctg

SEQ ID NO: 228031 - DNA, 728 bp, Homo Sapiens
ttggccagggactgtcggagatctccctagagcacgaaatcctgctgcacccgcgctacttcggccccaacttgctcaacacggtgaagcagaagctcttcaccgaggtggaggggacctgcacagggaagtatggctttgtaattgctgtcaccaccattgacaatattggtgctggtgtgatccagccaggccgaggctttgtcctttatccagttaagtacaaggccattgttttccggccatttaaaggggaggtcgtggatgctgttgtcactcaggtcaacaaggttggactcttcacagaaattgggcccatgtcttgcttcatctctcgacattccatcccttcagagatggagtttgatcctaactccaacccaccatgttacaagacaatggatgaggatattgtgattcagcaggacgatgagatccgcttaaagattgtggggacccgtgtggacaagaatgacatttttgctattggctccctgatggacgattacttggggcttgtaagctgagcctggtggcctcctacccttggtcctactctaggaagtgtgattgtcacacttatcatgttgtccagaggtccattctggctgctgttgtggaggcaaggaaggcaactcatcccagaaggcatctggtgcttcttgtagcttaactactgcctcctcatttttcatatgtgttctaagtataaaaagtccttggttctc

SEQ ID NO: 228032 - DNA, 1287 bp, Homo Sapiens
taaaaatacaattcaggaaatggggggaaccatagggaaaatcctccacctctaacagagcgaagttactggctttctgcttgctccaagaatcccaaggcttgatgtttgaaggaattatctgttcttcaactactcccagatactcaagacataagttacacacatctggagaagggttctgcccctgctgaagctagatgggagctcaatgcatgggagaaaggagcatcaatctagaaaaaaatgatcaaagaacagctgagtgacagtgtggggccatcccaggcaagtgggctcttggtgctctggtgtagccagaacccatacaagctgggctggcctaggaagcccaccagccagcctgtgttcagctacagcttctgtgttcttatttaccatcatcagccacagcccttgggagcaaagccctagacgcctccttcaagccccctgctggttggtttcatcattatctcgcctcttccaaatctgaatgtaagcctctgacagtgtgatcatctggggaaggatgtcagtcacctggaggtcttgtaattcataccatttgcctgtcccatgatgaagcacgtggatccggtaggagccctcggagggcttgccgtcatgcacgatgttggcaatgaggtcataggtggtattcttgtgtactgcttgtacttcttcagacaagtattctctcagatccacatttgtaatagggaaattgacaatagttggattcttctcaacaaagaagttgttcttagtgaatctcttgatacaaaagattagatatggaggcaacttggtaagctggaagcgcttcagaaagttctccttgtaagtcttatattccttctcagtgatgccattgaacttagccaggatgttgaagagtggcacttggggaatgatgagctgctccttctcgtccttgtagaggggggcagtaggaaggtccagcgtcaggtacataaaagtggactccaccattgtctcctggtactcgtcattatggagcaactgctctttttcttctgctggcagatcaggatggggaagctttttagtgaagatcctcatggacccctggaaaacatcagtcacaatagtcttctttttcttctttgtgccccccagagctgagtgcagagcattcagaaaccaagacagaaagtcaacgccatctccttgtttggtgatctgaaaagtcttcttactgcaaagtacaactgcctgaagcatctcatggggagacacatgtgcctggaaatttcgagccaa

SEQ ID NO: 228033 - DNA, 966 bp, Homo Sapiens; identical to SEQ ID NO: 194499

SEQ ID NO: 228034 - DNA, 941 bp, Homo Sapiens; identical to SEQ ID NO: 194500

SEQ ID NO: 228035 - DNA, 750 bp, Homo Sapiens
tttgtacaaaaaagttggtggagctgtccctcaaagggccgccgggtgctggtcaccggggcaggcaaaggtatagggcgcggcacggtccaggcgctgcacgcgacgggcgcgcgggtggtggctgtgagccggactcaggcggatcttgacagccttgtccgcgagtgcccggggatagaacccgtgtgcgtggacctgggtgactgggaggccaccgagcgggcgctgggcagcgtgggccccgtggacctgctggtgaacaacgccgctgtcgccctgctgcagcccttcctggaggtcaccaaggaggcctttgacagatcctttgaggtgaacctgcgtgcggtcatccaggtgtcgcaggtgagctgccctgtgggctggacgggaattctcgtgagtgatgccagctctgcctcacggtctcgctgcgattccagattgtggccaggggcttaatagcccggggagtcccaggggccatcgtgaatgtctccagccagtgctcccagcgggcagtaactaaccatagcgtctactgtgagtgccccagctgtgccctcagccccaccccagccccagcctcgccctcatcaccgaccccagccccagccagcttgggttcctcttcgtaggctccaccaagggtgccctggacatgctggaccaaggtgatggccttagagctcgggccccacaaggtgagcaggggctggggtacctccccccacctaggacacccacttg

SEQ ID NO: 228036 - DNA, 591 bp, Homo Sapiens; identical to SEQ ID NO: 194502

SEQ ID NO: 228037 - DNA, 720 bp, Homo Sapiens
  misc_feature (350)..(382): n is a, c, g, or t
ttgggtatttctttatggtcgatatacaattgattttttaaaataatagcagatttcttggttcatatgacaaagcctcaattactaattgtaaaaactgaactattcccagaatcatggtcaaaaaatctggaatttttgctgatgaaagtgcttcattgactaaacagtattagtttgtggctataaatgattatttagatgatgactgaaaatgggtataaagtaattaaaagtaatatggtggctttaagtggagagatgggatggcaaatgctgtgaatgcagaatgtaaaattggtaactaagaaatggcacaaacaccttaagcaatatattttcctagtagnnnnnnnnnnnnnnnnnnnnnnnnnnnnnnnnncaaatgtatatttttgcaaaattgttttcaatctagaacttttctattaactaccatgtcttaaaatcaagtctataatcctagcattagtttaatattttgaatatgtaaagacctgtgttaatgctttgttaatgcttttcccactctcatttgttaatgctttcccactctcaggggaaggatttgcattttgagctttatctctaaatgtgacatgcaaagattattcctggtaaaggaggtagctgtctccaaaaatgctattgttgcaatatctacattctatttcatattatgaaagaccttagacataaagtaaaatagtttatatttta

SEQ ID NO: 228038 - DNA, 1008 bp, Homo Sapiens; identical to SEQ ID NO: 194504

SEQ ID NO: 228039 - DNA, 401 bp, Homo Sapiens
  misc_feature (233)..(263): n is a, c, g, or t
gggtctcgcccaggaggcggaccctcatgctcggagccaccgtgagcctcagggagggtactgagctgccccacagccgacctgtccccaggcccagctgcagggcagccctccagagccaggtgagcagcagacacctgcctggcccagggctccgcaggggtggatccagccctgggtcaccaggcccaggcactccctttgccatctgcggcccaggaggtttacctttnnnnnnnnnnnnnnnnnnnnnnnnnnnnnnnggacgaggtcgcccagaggccaagcctcccggccgggaccccattccccaggtgtgctgctggcttcctcctccctgggccagtcctgccacagaagcctgagacagaacaaaccaaatcagagagaactgcaagggg

SEQ ID NO: 228040 - DNA, 400 bp, Homo Sapiens
aaacatttaaaaaatgactgtccctgctcaaatactgcagtaggaaatgtaatttgacatatatcacttccagaaaaaaactttaaatctttctataaaatgaatttgatacatcatcagcatgaagtgaagttaaaatctcttacaaagtaaattcaggtatatcaacaatgagatccaaaagtatcggttcaagatcaaagactcatatgaggtaaaggcaaataaagcccctcatgctttcagacatttacttgttatccttaaaatgattattgttctaaggtgcaaatcttatcattcagtgacctatttgctatttggctgtttatctcctttaaataaaataccatacaggttataatgtacattttaaaatcaaatatgaaagtacacccaa

SEQ ID NO: 228041 - DNA, 775 bp, Homo Sapiens; identical to SEQ ID NO: 194508
  misc_feature (477)..(534): n is a, c, g, or t

SEQ ID NO: 228042 - DNA, 1141 bp, Homo Sapiens
ctttgtacaaaaaagttgggataaaggaagacgaagctatggagatattttgcatagaatgaaggatctctgcagatacatgaacaactttgatagtgaagcacatgcaaaatataaaaaccaagtggtgtattccaccatgctggtcttctttaagaatgcattccagtatgtcaacagcatacagccatctctcttccaaggtcctaatgccccgagccaagttccactggttcttcttgaagatgtatcgaatgtgtatggtgatgtagaaattgatcgtaataaacacatccataaaaagaggaaactagctgaaggaagagaaaaaaccatgagttcagacgatgaagactgttcggcgaaaggaagaaatcgtcacattgtagtcaataaagccgaacttgctaactccactgaagtgttagaaagctttaaattggccagggagagctgggagttgctctattccctagaattccttgacaaagaatttacaaggatttgcttggcctggaagacggatacttggctttggttaagaatcttcctcactgatatgatcatctatcagggtcaatataaaaaggcgatagccagcctgcatcacttagcagctctccagggatccatttctcagccacagatcacagggcaggggaccctggagcatcagagggcgctcatccagctggcgacgtgccactttgcgctaggggagtacagaatgacatgtgaaaaagtccttgatttgatgtgctacatggtactccccattcaagatggaggcaaatcccaggaggaaccctcgaaagtaaagcccaaatttagaaaaggttcggatctgaagctcctgccttgtaccagcaaggctatcatgccatactgcctccatttaatgttagcctgttttaagcttagagctttcacagacaacagagacgacatggcattggggcatgtgattgtgttgcttcagcaagagtggccacggggcgagaatcttttcctgaaagctgtcaataaaatttgccaacaaggaaatttccaatatgagaattttttcaattacgttacaaatattgatatgctggaggaatttgcctacttgagaactcacgaacgtgggaaaattcatctg

SEQ ID NO: 228043 - DNA, 1064 bp, Homo Sapiens
ttggctgttgagatgtttggtaaatgccaggttgatagggcgctggctgcttggagcaaagggtgcatttcagggtgtggccaccaggtgctgtgagtttctgtggctcatggcctctgggctggtcccttgcacagggcccacgctggagtcttaccactctgctgcaggggtggaaggtggcccctcttgtcacccatacccatttcttacaaaataagttacaccgagtctacttggccctagaagagaaagttgaagagtcccagacctactagcattttgcaactatgcttgtaaagtcctcggaaagtttcctcgcgtaccagacagcggcgggggctgatagcaattttagtttttggcctccctatcctctcacatgagaacactgcctggatgcatctcatgatctctggagaatttccccatctttctcttctttccatcgtgtggattcaatagtttggatttgaaggctgccctgcccccgactctcctgccgcacccctggccattgtaccttttgatgtttagaagttcgtggaagtagacgctgaggtgtgcagaggagctggtggataacagagaatgccagggaagatgagtgctgggtcagggtacttggatgaaacggtgcaggccaggcgggccctaataaaaccctctgccaggtctgggagtcccaggccatctgctcaacgctctgtggtttgtcagacctgcaagcaagccccctgctggggaagcctaggtgtccttgagctgaaccgcactgaagaactcttgtcctcactggctgatgcagcagaactcttgggaaatgtcttagtcctgcagaatcaggagtcaccagatgatgcagagttgagatcatcattgcaaagttctctgttcctgaggaactaaatttaagaaaaaatgggattttgttttagagttggaaaaaaagcctgattaaagagtttctgcctgttcccctcaactctcatctgtatctggagggaggtgaggcagatctcgagggcactcatggacccactgaatggcaggggttggaggaa

SEQ ID NO: 228044 - DNA, 808 bp, Homo Sapiens
tttgtacaaaaaagttgggccctctccgccggaaaactgctgccgcccgcgccatggctggcaaagcacacaggctgagcgctgaggagagggaccagctgctgccaaacctgagggctgtggggtggaatgagctggaaggccgtgatgccatcttcaagcagtttcatttcaaagacttcaacagggcctttgggttcatgacaagagtggccctgcaggctgagaaactggaccaccatcctgaatggtttaacgtgtacaacaaggtccacatcacgctgagcacccatgagtgtgccggcctttcagaacgggacataaacctggccagcttcatcgaacaagtagcagtgtccatgacatagaccctgcccttcctctttgaattcttccgggggaaagggtgactgaactgggagtccagggagggagctgaggagcccttaccctcccaccactcccctcccaagacccagccgccgccgttgagggctgagtccttgctgtgggatgtgccagtgtccccaccaacaccaggaatttagaccttttccctgcaccactctcttcatcctgggggctctgttacactaatttgaataaactctcccctttctttgcaacttcccagcaacaataatgattttcttgccaggccgtctcttgctccctaattcatttcccaggaagctgtgatacagggtgaaataaagtcttgtcttagaaaccaggaccctaaaccccacactatgtaataaaaacacatgtgtttttatgtctcaaataaactattatatcacttgga

SEQ ID NO: 228045 - DNA, 752 bp, Homo Sapiens
gtgtgagccaccgtgcctggccaattccaacattcttaaattctctcatccctccagggctccccgtgctatgttctctttaccccttccccctcttctcttgctcaggcctgcaccactgcagccaccgttcatttattcattcattaaacactgagcactcactctgtgctgggtcccgggaagggtgagggggtcagacacaggccctgcccctgccctcagtgactggccagtccagcccaggcggggagagatgtgtacataggttttaaagcagacccagagctcatgggggcctgtgttctgggtgttcaggtgctgctggtcctccattacccactgctccccaaggctggtgggacggggtcccggtggcaggggcaggtatctccttcccgttcctcatccacctgcccagtgctcatcgttacagcaaaccccagggggccttggccaggtcaagggttctgtgaggagaggacccaggagtgtgggggcatttggggggtgaagtggcccccgaagaatggaacccacacccatagctctccccacagctgatacggcatcctgcgagaagacctgccctcctcactgggatccccttcctgcctcctcccagggctctgccagggccttgctcagtcccttccaccaaagtcatctgaacttccgtttccccagggcctccaactgccctcagacactgatgtctgtccccaggtgctctctgcccctcatgcccctct

SEQ ID NO: 228046 - DNA, 1129 bp, Homo Sapiens
ttggcgcggagtccgagcgcgtgtgctgagaccccagggtcgggagggcggagactgggagggagggagaagcccctttggcctgccttacggaagcctgcgagggagggtggtgtccactgcccagttccgtgtcccgatgcccagcgccagcgccagccgcaagagtcaggagaagccgcgggagatcatggacgcggcggaagattatgctaaagagagatatggaatatcttcaatgatacaatcacaagaaaaaccagatcgagttttggttcgggttagagacttgacaatacaaaaagctgatgaagttgtttgggtacgtgcaagagttcatacaagcagagctaaagggaaacagtgcttcttagtcctacgtcagcagcagtttaatgtccaggctcttgtggcggtgggagaccatgcaagcaagcagatggttaaatttgctgccaacatcaacaaagagagcattgtggatgtagaaggtgttgtgagaaaagtgaatcagaaaattggaagctgtacacagcaagacgttgagttacatgttcagaagatttatgtgatcagtttggctgaaccccgtctgcccctgcagctggatgatgctgttcggcctgaggcagaaggagaagaggaaggaagagctactgttaaccaggatacaagattagacaacagagtcattgatcttaggacatcaactagtcaggcagtcttccgtctccagtctggcatctgccatctcttccgagaaactttaattaacaaaggttttgtggaaatccaaactcctaaaattatttcagctgccagtgaaggaggagccaatgtttttactgtgtcatattttaaaaataatgcatacctggctcagtccccacagctatataagcaaatgtgcatttgtgctgattttgagaaggttttctctattggaccagtattcagagcggaagactctaatacccatagacatctaactgagtttgttggtttggacattgaaatggcttttaattaccattaccacgaagttatggaagaaattgctgacaccatggtacaaatattcaaaggacttcaagaaaggtttcagactgaaattcaaacagtgaataaa

SEQ ID NO: 228047 - DNA, 1384 bp, Homo Sapiens; identical to SEQ ID NO: 194510
  misc_feature (1011)..(1059): n is a, c, g, or t

SEQ ID NO: 228048 - DNA, 1016 bp, Homo Sapiens; identical to SEQ ID NO: 194511

SEQ ID NO: 228049 - DNA, 1333 bp, Homo Sapiens
ttggccagaaaaagattttactgagaaggggtctcgtaacatgccgggcctgtctgcagccacgctggcctctctgggtgggacttcctctcggagaggcagcggagacacctccatctccatcgacaccgaggcatccatcagggaaatcaaggactctctagcagaagttgaagagaaatataagaaggctatggtttccaatgctcagctagacaatgaaaagacaaacttcatgtaccaggttgataccctaaaagatatgttgctggagcttgaagaacagctggctgaatctaggcggcagtacgaagagaaaaacaaagaatttgaaagggaaaaacacgcccacagtatactgcaatttcagtttgctgaagtcaaggaggccctgaagcaaagagaggaaatgctcgagaaacatggaataatcctaaattcagaaatagctaccaatggagagacttccgacaccctcaataatgttggataccaaggtcctaccaagatgacaaaagaagagttaaatgccctcaagtcgacaggggatgggaccctaggaagagccagtgaagtggaggtgaaaaatgaaatcgtggcgaatgtggggaaaagagaaatcttgcacaatactgagaaagaacaacacacagaggacacagtgaaggactgtgtggacatagaggtattccctgctggtgagaataccgaggaccagaaatcctctgaagacactgccccattcctaggaaccttagcaggtgctacctatgaggaacaggttcaaagccaaattcttgagagcagttctctccctgaaaacacagtacaggttgagtcaaatgaggtcatgggtgcaccagatgacaggaccagaactccccttgagccatccaactgttggagtgacttagatggtgggaaccacacagagaatgtgggagaggcagcagtgactcaggttgaagagcaggcaggcacagtggcctcgtgtcctttagggcatagtgatgacacagtttatcatgatgacaaatgtatggtagaggtcccccaagagttagagacaagcacagggcatagtttagagaaagaattcaccaaccaggaagcagctgagcccaaggaggttccagcgcacagtacagaagtaggtagggatcacaacgaagaagagggtgaagaaacaggattaagggacgagaaaccaatcagacagaagtttcttggttctccagcaggaactgagggcaactgtcaggaagcgacaggtctcaagtacagtagacactcaaaatgaactcttagatatgaaagagctcgatgaagaaaa

SEQ ID NO: 228050 - DNA, 1052 bp, Homo Sapiens
ggggtgcgaccttttgggttctgcgggcccgggcccccacccttgcttgctagctttgcaccgcaccctggcgaggcctggctgcgcacgcgtgtaataggccgagggggagccgtgctgaggcgtcttgttcccgaccgagagggtgggcctcttctgggctggtcgccaccttctctgtcacagtctgtggttcctaaccagctcagctcacaggggcgacagaggatctcctgttcccgcagcgcccagaaggctctgccacgggactcacggccctggccaccgcagcccagatctgcagcaggaaagccggtgcggccctggcttcccgcctctagggcaggtccagcagggagtgctcggcgtagagcttctgggagacgttgtagacacgctggatgaaggggagggcctcgcctagcatctgcacggcctgctccgggggccccacgttcatggcctccaggaagacctcgcgtgtgggcagcgtgcagaaggccacggtgacggcacggcgcacgacccaggggtggtaggcggccagcgaggcgttgtaggagtcggcgcagagcgcggaggtgcgtgcgtcctcggggctggtacgcaggccctccaggaacagctgcagccagtgcagggcgcggtgcaggcgcagcaccgtccggcagccagactccgggtggtgggagcggcgctccaggtccaccagccggttgctcagctcgtgggccaccatggcctgcaggctgcggtagtgctcgctctgcgggccgcccctgaggcgctccatgatccgcagcttggagaccacgtccttggagatgaatgagaagatggtgcccaggctgttcagaaacctgaccaggcccttccagctggcaatgtaggggtccagcaagacctcttccttctcatcgagacactgcttgaaactgaccaggacgactttcagattgaaacctgtctccgagtcatccattttttgataggaacggaaatacagtagggctggggggctgtgtcgctggggtcagcttgctctgtgccaa

SEQ ID NO: 228051 - DNA, 940 bp, Homo Sapiens
ttgggttttctgaccacgggaaatatgttgaatctttccggaggtttctcaaccattccacggaacaccagtgcatgcaggaattcatggacaagaagctgccaggcataataggaaggattggagacacaaaatcagaaattaagattctaagcataggcggaggtgcaggtgaaattgatcttcaaattctctccaaagttcaggctcaatacccaggagtttgtatcaacaatgaagttgttgagccaagtgctgaacaaattgccaaatacaaagagcttgtagccaagacatcgaacctcgagaacgtaaagtttgcttggcataaggagacatcatctgaataccaaagtagaatgttggagaaaaaggagcttcaaaagtgggactttattcatatgattcaaatgctgtattatgtaaaagacatcccagctaccctgaaattcttccatagtctcttaggtaccaatgctaagatgctcattattgttgtgtcaggaagcagtggctgggacaagctgtggaaaaagtacggatcacgctttccccaggatgacctctgccagtatatcacatcagatgacctcactcagatgctggacaacctagggcttaagtatgagtgctatgaccttttgtccaccatggatatatctgactgctttattgatggtaatgaaaatggagacctgctttgggattttttgactgaaacctgcaactttaatgccacagcaccacctgatctcagagcagagcttgggaaagatctacaagagcctgaatttagtgctaagaaagaggggaaggttctttttaataatactctgagtttcatagtgattgaggcataactatcaatcacaaaagtatattcaaaaattatattttgaacaactcgaatcactcatttatttccatattaaaatcacaa

SEQ ID NO: 228052 - DNA, 1555 bp, Homo Sapiens; identical to SEQ ID NO: 194515
  misc_feature (1398)..(1406): n is a, c, g, or t

SEQ ID NO: 228053 - DNA, 904 bp, Homo Sapiens; identical to SEQ ID NO: 194516
  misc_feature (488)..(496): n is a, c, g, or t
  misc_feature (634)..(660): n is a, c, g, or t

SEQ ID NO: 228054 - DNA, 1272 bp, Homo Sapiens
ttggcagctggatgagactgtcaatgtggagcctctcaccaaggccatcaagtactatcagcatctgtacagcatccaccttgccgaacagcctgaggactgtactatgcagctggctgaccacattaagttcacgcagagtgctctggactgcatgagtgtggaggtaggacggctgcgtgccttcttgcagggtgggcaggaggctacagatattgccctcctgctccgggatctggaaacttcatgcagtgacatccgccagttctgcaagaagatccgaaggcgaatgccagggacagatgctcctgggatcccagctgcactggcctttggaccacaggtatctgacacgctcctagactgcaggaaacacttgacgtgggtcgtggctgtgctgcaggaggtggcagctgctgctgcccagctcattgccccactggcagagaatgaggggctacttgtggctgctctggaggaactggctttcaaagcaagcgagcagatctatgggaccccctccagcagcccctatgagtgtctgcgccagtcatgcaacatcctcatcagtaccatgaacaagctggccacagccatgcaggagggggagtatgatgcagagcggccccccagcaagcctccaccggttgaactgcgggctgctgcccttcgtgcagagatcacagatgctgaaggcctgggtttgaagctcgaagatcgagagacagttattaaggagttgaagaagtcactcaagattaagggagaggagctaagtgaggccaatgtgcggctgagcctcctggagaagaagttggacagtgctgccaaggatgcagatgagcgcatcgagaaagtccagactcggctggaggagacccaggcactgctgcgaaagaaggagaaagagtttgaggagacaatggatgcactccaggctgacatcgaccagctggaggcagagaaggcagaactaaagcagcgtctgaacagccagtccaaacgcacgattgagggactccggggccctcctccttcaggcattgctactctggtctctggcattgctggtggagccatccctgggcaggctccagggtctgtgccaggcccagggctggtgaaagactcaccactgctgcttcagcagatctctgccatgaggctgcacatctcccagctccagcatgagaacagcatcctcgagcccagatgaaggcatccttggcatccctgcccctctgcatgttgcaaagctatcccatgagggcc

SEQ ID NO: 228055 - DNA, 1044 bp, Homo Sapiens
ttgggtcaccgcgatacgcaggcggccccaggcccccgatcagaatgggaaaccagcctccgggaggagttcctgggacacagccattgctgcccaattctatggatcccacacgacaacaaggccaccccaacatgggaggatcaatgcagagaatgaaccctccccgaggcatggggcccatgggtcccggcccacagaattacggcagcggcatgagaccaccacccaactccctcggccccgccatgcccgggattaacatgggcccgggagctggcagaccctggcccaatcctaacagtgctaactcaattccatactcctcctcatcacctggtacctatgtgggaccccctggtggtggcggtcctccaggaacacccattatgcccagtcccgcagattcaacaaattccagtgacaacatctacacaatgattaatccagtgccgcctggaggcagccggtccaacttcccgatgggtcccggctcggacggtccgatgggcggcatgggtggcatggagccacaccacatgaatggatcattagggtcaggcgacatagacggacttccaaaaaattctcctaacaacataagtggcattagcaatcctccaggcacccctcgagatgacggcgagctaggagggaacttcctccactcctttcagaacgacaattattctccaagcatgacgatgagtgtgtgatccccccttctccgagacgctgagagagcaggcattgcaggcgggaagatgccagaaattatgcaagaagtgaggtgtcattatccaggagctggtggggagggcatctccctgctcccctcaaccccctcccaccccatccacgccccctacctttcccaattttagtttcatgcaataaaaaggccaaactttttattccataaaacaagaaggacaaaactctcaaaatgtatttcaagtcagtgaccagaaaaatcccaccccttgccctttccccaaaggaccttttctgtacatgacacttttttagttgtttttgtttggg

SEQ ID NO: 228056 - DNA, 685 bp, Homo Sapiens
tttgtaccaaaaaagttgggacatttcctactgtcttgttactttatttcctacttagagaaaaaactaattttttggtatggtttgacagaattaggatctcttattcttcattgcagagcccacctactggtagcaaggatgtcaccgttcatcatttatattcttgagagactcagtgtaggagattatttaaaagttgttaaaatttgcttctaaatgagccactgcgcccggccacattcagttcttatcaaagaaataacccagacttaatcttgaatgatacgattatgcccaatattaagtaaaaaatataagaaaaggttatcttaaatagatcttaggcaaaataccagctgatgaaggcatctgatgccttcatctgttcagtcatctccaaaaacagtaaaaataaccactttttgttgggcaatatgaaatttttaaaggagtagaataccaaatgatagaaacagactgcctgaattgagaattttgatttcttaaagtgtgtttctttctaaattgctgttccttaatttgattaatttaattcatgtattatgattaaatctgaggcagatgagcttacaagtattgaaataattactaattaatcacaaatgtgaagttatgcatgatgtaaaaaatacaaacattctaattaaaggctttgcaacac

SEQ ID NO: 228057 - DNA, 974 bp, Homo Sapiens
tgcttttcttataatgccaactttgtacaaaaaagttggcgcaggtttcccccgtctgcgaatggaccactggaggggttcaaaggttcgcgtcccagtacgggaatgagcctctttgatctcttccggggctttttcggctttcctggacctcggagccacagagatcccttttttggagggatgactcgagatgaagatgatgatgaggaagaagaagaagaagggggctcatggggccgtgggaacccaaggttccatagccctcagcacccccctgaggaatttggcttcggcttcagcttcagcccaggaggagggatacgtttccacgataacttcggctttgatgacctagtacgagatttcaatagcatcttcagcgatatgggggcctggaccttgccttcccatcctcctgaacttccaggtcctgagtcagagacacctggtgagagactacgggagggacagacacttcgggactcaatgcttaagtatccagatagtcaccagcccaggatctttgggggggtcttggagagtgatgcaagaagtgaatccccccaaccagcaccagactggggctcccagaggccatttcataggtttgatgatgtatggcctatggacccccatcctagaaccagagaggacaatgatcttgattcccaggtttcccaggagggtcttggcccggttctacagccccagcccaaatcctatttcaagagcatctctgtgaccaagatcactaaaccagatgggatagtggaggagcgccggactgtggtggacagtgagggccggacagagactacagtaacccgacacgaaacagatagcagtcctaggggtgatccagaatcaccaagacctccagccctggatgatgccttttccatcctggacttattcctgggacgttggttcgggtcccggtagcctgttaaccctcgaaggccttcaagtcc

SEQ ID NO: 228058 - DNA, 849 bp, Homo Sapiens
ttggcgccgctgtgccgctagcggtgccccgcctgctgcggtggcaccagccaggaggcggagtggaagtggccgtggggcgggtatgggactagctggcgtgtgcgccctgagacgctcagcgggctatatactcgtcggtggggccggcggtcagtctgcggcagcggcagcaagacggtgcagtgaaggagagtgggcgtctggcggggtccgcagtttcagcagagccgctgcagccatggccccaatcaaggtgggagatgccatcccagcagtggaggtgtttgaaggggagccagggaacaaggtgaacctggcagagctgttcaagggcaagaagggtgtgctgtttggagttcctggggccttcacccctggatgttccaagacacacctgccagggtttgtggagcaggctgaggctctgaaggccaagggagtccaggtggtggcctgtctgagtgttaatgatgcctttgtgactggcgagtggggccgagcccacaaggcggaaggcaaggttcggctcctggctgatcccactggggcctttgggaaggagacagacttattactagatgattcgctggtgtccatctttgggaatcgacgtctcaagaggttctccatggtggtacaggatggcatagtgaaggccctgaatgtggaaccagatggcacaggcctcacctgcagcctggcacccaatatcatctcacagctctgaggccctgggccagattacttcctccacccctccctatctcacctgcccagccctgtgctggggccctgcaattggaatgttggccagatttctgcaataaacacttgtggtttgcggcc

SEQ ID NO: 228059 - DNA, 1253 bp, Homo Sapiens
ttggctttcaccgtataacacgaactgcaccattttgagtgtgttaaattacttccagaacagccattccgtgctggaccacaagaaaggggacgacttctttgtgtatgccgattaccacacgcactttctgtactgcgtacgggctcctgcctctctgaatgatacaagtttgctccatgacccttgtctgggtacgtttggtggaccagtgttcccgtggcttgtgttgggaggctatgatgatcaaaactacaataacgccactgcccttgtgattaccttccctgtcaataattactataatgatacagagaagctccagagggcccaggcctgggaaaaagagtttattaattttgtgaaaaactacaagaatcccaatctgaccatttccttcactgctgaacgaagtattgaagatgaactaaatcgtgaaagtgacagtgatgtcttcaccgttgtaattagctatgccatcatgtttctatatatttccctagccttggggcacatcaaaagctgtcgcaggcttctggtggattcgaaggtctcactaggcatcgcgggcatcttgatcgtgctgagctcggtggcttgctccttgggtgtcttcagctacattgggttgcccttgaccctcattgtgattgaagtcatcccgttcctggtgctggctgttggagtggacaacatcttcattctggtgcaggcctaccagagagatgaacgtcttcaaggggaaaccctggatcagcagctgggcagggtcctaggagaagtggctcccagtatgttcctgtcatccttttctgagactgtagcatttttcttaggagcattgtccgtgatgccagccgtgcacaccttctctctctttgcgggattggcagtcttcattgactttcttctgcagattacctgtttcgtgagtctcttggggttagacattaaacgtcaagagaaaaatcggctagacatcttttgctgtgtcagaggtgctgaagatggaacaagcgtccaggcctcagagagctgtttgtttcgcttcttcaaaaactcctattctccacttctgctaaaggactggatgagaccaattgtgatagcaatatttgtgggtgttctgtcattcagcatcgcagtcctgaacaaagtagatgttggattggatcagtctctttcgatgccagatgactcctacatggtgattatttcaaatccatcagtcagtacctgcatgcgggtccgcc

SEQ ID NO: 228060 - DNA, 631 bp, Homo Sapiens
ccttataaaagcccactttgtacaaaaaagttgggccgcagcctctgcgcgtcgccctccacggttaccccggctctccgcccctccttctcgcggcgctcgagggaccatggccgatcctcgcgtgagacagatcaagatcaagaccggcgtggtgaagcggttggtcaaagaaaaagtgatgtatgaaaaagaggcaaaacaacaagaagaaaagattgaaaaaatgagagctgaagacggtgaaaattatgacattaaaaagcaggcagagatcctacaagaatccaggatgatgatcccagattgccagcgcaggttggaagccgcatatttggatcttcaacggatactagaaaatgaaaaagacttggaagaagctgaggaatataaagaagcacgtttagtactggattcagtgaagttagaagcctgaaacttttctcgtatggggtggtttttgcattaaatcctggggtccattttacaatccattatttttgaccactgctatgtgttcaagtagtatgagaatgtgattgtttttatctggttacatatatatttctttgtctaatttaatatgtcaaataaatgagttcatctaataaaattgtttattttatacttt

SEQ ID NO: 228061 - DNA, 604 bp, Homo Sapiens; identical to SEQ ID NO: 194527

SEQ ID NO: 228062 - DNA, 938 bp, Homo Sapiens
ttggcagagctccacttcctgtccccgcggctctgtgtcccctgctagccgtaggccgtgtgacccgcaggcaccgggagatccagaagtgaaacgccaggctctctggaggccaggagatgactctgttgacgttcagggatgtggccatagaattctccctggaggagtggaaatgcctggacctcgctcagcagaatttgtacagggatgtgatgttggagaactacagaaacttgttctccgttggtctcactgtctgtaagccaggcctgatcacctgcctggagcaacgaaaagagccctggaatgtgaagagacaggaggcagcagacggacatccagctatgtcttctcattttacccaagaccttctgccagagcagggcatacaagatgcattcccaaaaagaatactgagaggatatggaaattgtggccttgataatttatatttaaggaaagactgggaaagtttagatgagtgtaagttgcaaaaagattataatggacttaaccaatgttcatcaactacccatagcaaaatctttcaatataataaatatgttaaaatctttgataacttttcaaatttacatagacgtaatataagtaatactggagagaaacctttcaaatgtcaagaatgtggcaaatcctttcaaatgctctcattcctaactgaacatcagaaaattcacactggaaaaaaattccaaaaatgtggagaatgtggcaaaacctttatccagtgctcacactttactgaacctgagaacattgacactggagagaaaccttacaagtgtcaagaatgtaacaacgtcattaaaacttgctcagtccttactaaaaatagaatttatgccgggaggggaacattacagatgtgaagaatttgggcaaagtatttaaccagtgctcccaccttactgaac

SEQ ID NO: 228063 - DNA, 575 bp, Homo Sapiens
actttgtacaaaaaagttggtcctcggctttgacagagtgcaagacgatgacttgcaaaatgtcgcagctggaacgcaacatagagaccatcatcaacaccttccaccaatactctgtgaagctggggcacccagacaccctgaaccagggggaattcaaagagctggtgcgaaaagatctgcaaaattttctcaagaaggagaataagaatgaaaaggtcatagaacacatcatggaggacctggacacaaatgcagacaagcagctgagcttcgaggagttcatcatgctgatggcgaggctaacctgggcctcccacgagaagatgcacgagggtgacgagggccctggccaccaccataagccaggcctcggggagggcaccccctaagaccacagtggccaagatcacagtggccacggccacggccacagtcatggtggccacggccacagccactaatcaggaggccaggccaccctgcctctacccaaccagggccccggggcctgttatgtcaaactgtcttggctgtggggctaggggctggggccaaataaagtctcttcctcc

SEQ ID NO: 228064 - DNA, 1228 bp, Homo Sapiens
ttggatccaaattgacagatgaccaactcataaaagagtttcttagtggttcttactgctttcgtgggggtgtcggttggtggaaatatgaattctgctatggcaaacatgtacatcaataccatgaggacaaggatagtgggaaaacctctgtggttgtcgggacatggaaccaagaagagcatattgaatgggctaagaagaatactgctagagcttatcatcttcaagacgatggtacccagacagtcaggatggtgtcacatttttatggaaatggagatatttgtgatataactgacaaaccaagacaggtgactgtaaaactaaagtgcaaagaatcagattcacctcatgctgttactgtatatatgctagagcctcactcctgtcaatatattcttggggttgaatctccagtgatctgtaaaatcttagatacagcagatgaaaatggacttctttctctccccaactaaaggatattaaagttaggggaaagaaaagatcattgaaagtcatgataatttctgtcccactgtgtctcattatagagttctcagccattggacctcttctaaaggatggtataaaatgactctcaaccactttgtgaatacatatgtgtatataagaggttattgataaacttctgaggcagacatttgtctcgctttttttcatttttgttgtgtcttataaactgactgtttttctttgcttggatactgtgattccaaaataaatctcatccaagcaagttagagtccagcctaatcaaatgtcataattgttgtacctattgaaagtttttaaataatagatttattatgtaaattatagtatatgtaagtagctaatgaagtaaagatcatgaagaaagaaattgataggtgtaaatgagagaccatgtaaaatatgtaaattctagtacctgaaatcctttcaacagatttttatatagcaactgctctctgcaagtagttaaactagaaactgggcacatggtagaggctcacatgggagttgtcctcacccttgttaatctcagaaactcttatttataataggttgcttctctctcagaacttttatctattacttttttcttcttatgagtatgtttactctcagagtatctatctgatgtagacagttggtgatgcttctgagactcagaatggtttactctaacaaaacactgtgctgtctatcccctgtacttgcc

SEQ ID NO: 228065 - DNA, 976 bp, Homo Sapiens; identical to SEQ ID NO: 194528

SEQ ID NO: 228066 - DNA, 925 bp, Homo Sapiens
gagcaatgcttttctataaaagacaactttgtacaaaaaagttggtgcagaagctactcaaatgcagtcggcttgtcctggctcttgccctcatcctggttctggaatcctcagttcaaggttatcctacgcagagagccaggtaccaatgggtgcgctgcaatccagacagtaattctgcaaactgccttgaagaaaaaggaccaatgttcgaactacttccaggtgaatccaacaagatcccccgtctgaggactgacctttttccaaagacgagaatccaggacttgaatcgtatcttcccactttctgaggactactctggatcaggcttcggctccggctccggctctggatcaggatctgggagtggcttcctaacggaaatggaacaggattaccaactagtagacgaaagtgatgctttccatgacaaccttaggtctcttgacaggaatctgccctcagacagccaggacttgggtcaacatggattagaagaggattttatgttataaaagaggattttcccaccttgacaccaggcaatgtagttagcatattttatgtaccatggttatatgattaatcttgggacaaagaattttatagaaatttttaaacatctgaaaaagaagcttaagttttatcatccttttttttctcatgaattcttaaaggattatgctttaatgctgttatctatcttattgttcttgaaaatacctgcattttttggtatcatgttcaaccaacatcattatgaaattaattagattcccatggccataaaatggctttaaagaatatatatatatttttaaagtagcttgagaagcaaattggcaggtaatatttcatacctaaattaagactctgacttggattgtgaattataatgatatgccccttttcttataaaaac

SEQ ID NO: 228067 - DNA, 952 bp, Homo Sapiens; identical to SEQ ID NO: 194530

SEQ ID NO: 228068 - DNA, 960 bp, Homo Sapiens
ttggaccagtttccgagcggcaaggcagcgatggcgatttttagtgtgtatgtggtgaacaaagctggcggcttgatttaccagttggacagctacgcgccacgggctgaggctgagaaaactttcagttatccgctggatctgctgctcaagctacacgatgagcgtgtgttggttgctttcggccagcgggacggcatccgagtgggtcatgcagtgctggccatcaatggcatggacgtgaatggcaggtacacggccgacgggaaagaggtgctggagtatctgggtaaccctgctaattacccggtgtccattcgatttggccggccccgcctcacttctaatgagaagcttatgctggcctccatgttccactcgctctttgccatcggctcccagctgtctcctgaacagggaagctcaggcattgagatgctggagacagacacattcaaattgcactgctaccagacactgacagggatcaagtttgtggttctagcagatcctaggcaagctggaatagattctcttctccgaaagatttatgagatttactcagactttgccctcaagaatccattctattccttagaaatgcctatcaggtgtgagctctttgaccagaacctgaagctagctctggaggtggcagagaaggctggaacttttggacctgggtcataggctgaacctgttatggacccccaaattctgagagttcctgcaacaagaatactgctgttgacactccagtggaaatcccagcagccttgttagtgcacttgaaagtgggagaatgctgaccctgatgacttgtactgattcctgagccttaacactgtgctctttccttctgtatataccatggtcttactttccaactctgtacagatttatttatggaggagctaggtccataaatgttgtaataaatattcctttgatcttggtgtt

SEQ ID NO: 228069 - DNA, 518 bp, Homo Sapiens; identical to SEQ ID NO: 194532

SEQ ID NO: 228070 - DNA, 952 bp, Homo Sapiens; identical to SEQ ID NO: 194535
  misc_feature (709)..(756): n is a, c, g, or t

SEQ ID NO: 228071 - DNA, 640 bp, Homo Sapiens
aggtgctgttccgctgcccgccctgcacacccgagcgcctggccgcctgcgggcccccgccggttgcgccgcccgccgcggtggccgcagtggccggaggcgcccgcatgccatgcgcggagctcgtccgggagccgggctgcggctgctgctcggtgtgcgcccggctggagggcgaggcgtgcggcgtctacaccccgcgctgcggccaggggctgcgctgctatccccacccgggctccgagctgcccctgcaggcgctggtcatgggcgagggcacttgtgagaagcgccgggacgccgagtatggcgccagcccggatcaggttgcagacaatggcgatgaccactcataaggaggcctggtggagaaccacctggacagcaccatgaacatgttgggcgggggaggcagtgctggccggaagcccctcaagtcgggtatgaaggaactggccgtgttccgggaaaaggtcactgagcagcaccggcagatgggcaagggtggcaagcatcaccttggcctgcaggagcccaagaagctgcgaccaccccctgccaggactccctgccaacaggaactggaccaggtcctggagcggatctccaccatgcgtccctccagatgagcggggccctc

SEQ ID NO: 228072 - DNA, 957 bp, Homo Sapiens
  misc_feature (63)..(106): n is a, c, g, or t
ttggggggggatagactcccacctcctgggcctccccaggcaccccccagtgatacagactcnnnnnnnnnnnnnnnnnnnnnnnnnnnnnnnnnnnnnnnnnnnntggcaacagtggtagggggtgaagccccagtccctgtgctgccaacaccccctgaggctcctaggccccctgccacagtgcaccctgaaggagtccctcctgctgacagtgaaagcaaggaggtgggcagcactgaaacaagccaagatggagatgccagctccagtgaaggcgagatgcgggtcatggacgaggacatcatggtagaatcaggtgatgactcatgggatctgatcacatgttactgtcgaaagccctttgcagggcggcccatgattgagtgcagcctgtgtgggacgtggatccacctctcctgtgctaagattaagaagaccaacgtccccgacttcttttattgccagaaatgcaaggaactgaggccagaggcccggcggttaggggggcctcccaaatctggagagccctgatggcaccaactttagcctggaacttccaaatgacaacatgatttgggaactgagcctcagggtcctcagcctatcccctggagcttggatactgtctgcacttcaaggcaggaattctcaagggagacttgtttgaaaatgagtgtctcactttcccaccctatccttcctccccactctgtggacttgaaattgaatccattacggttggggatgggaggctgtctgtgtcccgacacataatctctgtctcttggacctgccacccatcacttttctgggtcaggattggaattggggatggaatgggacagttgtctataaaactctaatgtaaatattaacactccctccctcaacttttctctatttcatccccatttatttcctctacaccggttgaattttaatttggacttcccc

SEQ ID NO: 228073 - DNA, 582 bp, Homo Sapiens
ttggatattgagattatcttggtttcttggaagagataggaatgagttcttatctagtgttgcaggccagcaaatacagaggtggtttaatcaaacagctctagtatgaagcaagagtaaagactaaggtttcgagagcattcctactcacataagtgaagaaatctgtcagataggaatctaaatatttatagtgagattgtgaaagcaaccttaaagttttgaagaagactgatgagactaggtgctttgcttcctttcatcaggtatctttctgtggcatttgagaacagaaaccaagaaacatggtaattactaaattatgaggctttgctttttgtttgcttttaagtagaaaaacatgttggcaacattgagttttggagttgattgagataatatgacttaactagttttgtcattccatttgttaaagatacagtcaccaagaatgttttgagttttttgaaagaccccaatttaagccttgcttatttttaaattatttccattcagtgatgttggatgtatatcaattatttagtaaataatctcaataaattttgtgctgtggcctttgct

SEQ ID NO: 228074 - DNA, 999 bp, Homo Sapiens
ctgaggaaggagagtttaatgttgtgagaaggcagcaggatgcttagggtgcgggctccagcaggagagcaccttggccctggtcttgggccagcagacgcagaagcagggagtgcagagcccggcaaacaggtgtgtagcccaggcggctcagatgcaggtaatcatacatgtcatgatggctgatggtgccatctgagtgcacaaagccagggtcggcatctaggaagtgggcccgagggggccagccagtgccgcccgtaccagctcgttcacctgtcggttcttctcccgaagtgggttgggatgttggcctcgcggaagcaggcccagcaccacaacccgggcctggggctgtcgctcattcaccagttgcacaatggccttgatgccaccagtcacctgctctgctgtgtgtccgtggttgttggtgcccacccagaccaccacaatcttgggccggatgtgttccagctccccattctccagccgccacagtacatgctgtgtgccgtcaccaccaatgccaaagttaagtgcatgcagaggagagaagagctcgcgccagatctcgcactggtgcatgagctggaccaaggagtccccgatgaagacgacttcgggttccttatctttgctgtcagccacgaaccgatggtgcagggacatccagcgcccgtcgccctgtacgtcctgcaccggcgtgggcttgctggctgggttctcctctccactcatcttggcgccgcagctcctgcaggatgagcgagtcgggtcggcccgggagtgttccgaacggagctggctccgccacgcccactcctacccctcgcggcaacaaaggaccgtcccaacggtagcacacccgcggaggacgaaggccgatacagggcgccgcctcctctccagggacggaagccttcacttaggtggtaggtggaatcaggaaccttcgcttcccccagagggcggccgcacaccaacttttttgtacaaagt

SEQ ID NO: 228075 - DNA, 872 bp, Homo Sapiens
ttggctcaaggcccggaagcgaaagcctctccacctcttccgagcggggtcacggcccggccgtcggtaacctggtttccgagagtgccgggcggtcggcgggtcagggcagcccggggcctgacgccatgtcccggaacctgcgcaccgcgctcattttcggcggcttcatctccctgatcggcgccgccttctatcccatctacttccggcccctaatgagattggaggagtacaagaaggaacaagctataaatcgggctggaattgttcaagaggatgtgcagccaccagggttaaaagtgtggtctgatccatttggcaggaaatgagagggctgtcatcagctctgattaagaaaggagatttcttcatgctttcgattctgcatggggtacagccagtcacctcaccagagaatgacggctggagaagaaaactctgtaataccataaataagagtgcttgtaataaaagactgtgcacaaggattaatatttcccttcttaagtatcaaaagaactctggaacaaattataccattaggaaggttttcatgattcagttgattttccaaaaatgaagctatctcacccagctgggtttggaggagcaatctgcttattattctgtcgttaccacttactcaagcgagctgtgatatgaatacaagcaaccagtgggctcgggaaggtccgggtctcttctgccatcttccagataagagatttcagtaaaaaactgccatgctgagctgccttatagagctcttcgaaaatgttcgagttgataaagctctttgaggacaaggtacttcgtgcacctcatgctgaagattgcaccatgttggaaataaatatgaagcaagtcaa

SEQ ID NO: 228076 - DNA, 551 bp, Homo Sapiens
  misc_feature (139)..(148): n is a, c, g, or t
actttgtacaaaaaagttgggcgtttctttccctgcttttgagatagtaggaagagttcttggtggtgtccccccccttcaattcttcagttgtatagtagttatagggaagatatgggtgtttttctttattattacnnnnnnnnnnctgcaggtcagtaaaaggatttaagttgcactgacaaaaataccaaaataaaagtgtatttttaagttcccatttgaaattgctggcgctgctggccggatgcatttttgagtttgtattagttgataaattaacagtaataacaagattgtatgaaccgcatggtgcttgcagttttaaatattgtggatatttgtcctgcatcagaaacgagctttggtttttacagattcaactgtgttgaaatcaaacctgccgcaacagaaattgtttttatttcatgtaaaataagggatcaatttcaaaccctgcttatgatatgaaaatattaaaacctaatctattgtagttttattcagactggtttctgttttttggttattaaaatggtttcctattttgc

SEQ ID NO: 228077 - DNA, 977 bp, Homo Sapiens; identical to SEQ ID NO: 194543

SEQ ID NO: 228078 - DNA, 478 bp, Homo Sapiens
cctataaaagcccactttgtacaaaaaagttggccaccgaggtcgcacgcgtgagacttctccgccgcctccgccgcagacgccgccgcgatgcgctacgtcgcctcctacctgctggctgccctagggggcaactcctcccccagcgccaaggacatcaagaagatcttggacagcgtgggtatcgaggcggacgacgaccggctcaacaaggttatcagtgagctgaatggaaaaaacattgaagacgtcattgcccagggtattggcaagcttgccagtgtacctgctggtggggctgtagccgtctctgctgccccaggctctgcagcccctgctgctggttctgcccctgctgcagcagaggagaagaaagatgagaagaaggaggagtctgaagagtcagatgatgacatgggatttggcctttttgattaaattcctgctcccctgcaaataaagcctttttacacatctc

SEQ ID NO: 228079 - DNA, 909 bp, Homo Sapiens
ccaactttgtacaaacttctcgcagactccgcgacctactgacccggcgactgacaggctccaactacccgggactcagtattagccttcgcctcactggctcctctgcacaagaggcggcttccggagtagccctcggtgaagccccagaccacagctatgagtcccttcgtgtgacgtctgcgcagaaacatgttctgcatgtccagctcaaccggcccaacaagaggaatgccatgaacaaggtcttctggagagagatggtagagtgcttcaacaagatttcgagagacgctgactgtcgggcggtggtgatctctggtgcaggaaaaatgttcactgcaggtattgacctgatggacatggcttcggacatcctgcagcccaaaggagatgatgtggcccggatcagctggtacctccgtgacatcatcactcgataccaggagaccttcaacgtcatcgagaggtgccccaagcccgtgattgctgccgtccatgggggctgcattggcggaggtgtggaccttgtcaccgcctgtgacatccggtactgtgcccaggatgctttcttccaggtgaaggaggtggacgtgggtttggctgccgatgtaggaacactgcagcgcctgcccaaggtcatcgggaaccagagcctggtcaacgagctggccttcaccgcccgcaagatgatggctgacgaggccctgggcagtgggctggtcagccgggtgttcccagacaaagaggtcatgctggatgctgccttagcgctggcggccgagatttccagcaagagccccgtggcggtgcagagcaccaaggtcaacctgctgtattcccgcgaccattcggtggccgagagcctcaactacgtggcgtcctggaacatgagcatgctgcagaccc

SEQ ID NO: 228080 - DNA, 375 bp, Homo Sapiens; identical to SEQ ID NO: 194546

SEQ ID NO: 228081 - DNA, 1227 bp, Homo Sapiens
ttgggatggccacaccggcggtaccagtaagtgctcctccggccacgccaaccccagtcccggcggcggccccagcctcagttccagcgccaacgccagcaccggctgcggctccggttcccgctgcggctccagcctcatcctcagaccctgcggcagcagcggctgcaactgcggctcctggccagaccccggcctcagcgcaagctccagcgcagaccccagcgcccgctctgcctggtcctgctcttccagggcccttccccggcggccgcgtggtcaggctgcacccagtcattttggcctccattgtggacagctacgagagacgcaacgagggtgctgcccgagttatcgggaccctgttgggaactgtcgacaaacactcagtggaggtcaccaattgcttttcagtgccgcacaatgagtcagaagatgaagtggctgttgacatggaatttgctaagaatatgtatgaactgcataaaaaagtttctccaaatgagctcatcctgggctggtacgctacgggccatgacatcacagagcactctgtgctgatccatgagtactacagccgagaggcccccaaccccatccacctcactgtggacacaagtctccagaacggccgcatgagcatcaaagcctacgtcagcactttaatgggagtccctgggaggaccatgggagtgatgttcacgcctctgacagtgaaatacgcgtactacgacactgaacgcatcggagttgacctgatcatgaagacctgctttagccccaacagagtgattggactctcaagtgacttgcagcaagtaggaggggcatcagctcgcatccaggatgccctgagtacagtgttgcaatatgcagaggatgtactgtctggaaaggtgtcagctgacaatactgtgggccgcttcctgatgagcctggttaaccaagtaccgaaaatagttcccgatgactttgagaccatgctcaacagcaacatcaatgaccttttgatggtgacctacctggccaacctcacacagtcacagattgcactcaatgaaaaacttgtaaacctgtgaatggaccccaagcagtacacttgctggtctaggtattaaccccaggactcagaagtgaaggagaaatgggttttttgtggtcttgagtcacactgagatagtcagttgtgtgtgactctaataaacggagcctactttttgtaaatta

SEQ ID NO: 228082 - DNA, 1497 bp, Homo Sapiens
agcaatgctttttctataatagccaactttgtacaaaaaagttggatggatttacccttggagaaaagggagaaaagatgtccaagtctcttgggaatgtcattcatcctgatgttgtcgttaatggaggacaagatcaaagcaaagagcctccgtatggtgctgatgtccttcgctggtgggtagctgattccaatgtcttcaccgaagttgcaattggcccatccgtgctcaatgctgccagagatgatattagcaagcttaggaatacacttcgctttcttttgggaaatgtggctgatttcaacccagaaacagattccatccctgtaaacgatatgtatgtcatagaccagtacatgctacacttactgcaggatttggcaaacaagattaccgaattatacaaacaatatgattttggaaaagttgttcggctgttacggacgttttataccagagagctctctaacttttatttcagtataatcaaagataggctctattgtgaaaaggaaaatgaccccaaacgacgctcttgtcagactgcattagttgaaattttggatgtaatagttcgttcttttgctcccattcttcctcacctggctgaagaggtgttccagcacataccttatattaaagagcccaagagtgttttccgtactgggtggattagtactagttctatctggaaaaagcccgggttggaagaagctgtggagagtgcgtgtgcaatgcgagactcatttcttggaagcatccctggcaaaaatgcagctgagtacaaggttatcactgtgatagaacctggactgctttttgagataatagagatgctgcagtctgaagagacttccagcacctctcagttgaatgaattaatgatggcttctgagtcaactttactggctcaggaaccacgagagatgactgcagatgtaatcgagcttaaagggaaattcctcatcaacttagaaggtggtgatattcgtgaagagtcttcctataaagtaattgtcatgccgactacgaaagaaaaatgcccccgttgttggaagtatacagcggagtcttcagatacactgtgtcctcgatgtgcagaagttgtcagtggaaaatagtattaacagctcactcgagcaagaaccctcctgacagtactggctagaagtttggatggattatttacaatataggaaagaaagccaagatttaggtaatgagtggatgagtaaatggtggaggatgggagtcaaaatcagaattatagaagaagtatttcctgtaactatagaaagaattatgtatatatacatgcagaaatatatatgtgtgtgtgtatctgtggatggatatatgtatatctcttcctatatatatcccatagtgggacttattcagaacatagatatgtattccggcttgtcctccaatacgggccagcagaaaatgttttatattttataaatcatcttttgactcctgtatttaaat

SEQ ID NO: 228083 - DNA, 327 bp, Homo Sapiens; identical to SEQ ID NO: 194550
  misc_feature (129)..(186): n is a, c, g, or t

SEQ ID NO: 228084 - DNA, 1009 bp, Homo Sapiens
cccttgccgggcccaccagccgagaaggagccacctccgcccatcatcatgttcaacactgcaaaggagatgaagtcctcctccaggaaggagcagctctccagtccaaccatgatgtgcgtgagctcggggatgggggtcgggcccaggctgacattggacatgtctctttctagcttggcaatccccccagtgtactgggccacagatctgtcaatatccacggcctctgcgctcccccaggccggctggacccccaggaggtacttccgggcacagtccaccagatgctcgtgctccacgcccacgccggccagcaccatgcggtcgggagtgtagtagttcctcaggtaggaatgcagcacctctcggttgatctttgctacgttttctgtggggcagaaacggtggaggccaactgtgttctccctgtaagccgcttcatgaatcatctcggtgagaagtggctctgggtcaggccgcaggttcaggtcctccagctcaaactggaccgccatccgcgtcatctcgacttcttcatctgttagccggggctgcagaaccacatcagccagtaaggcaaccaccgtgtccaagcctttgctatcagcagacacagcatacatggtggtgtctcttgatgtctggcagtcacagatacccccatgcttttccaacgtaagcagaatttcatctttgctgtcaaatcgagcagtagacgaaaatgccaatttttccaaaaagtgagcaattccactaaggtatttcgcttcatatctcgatcctgaattgataagaattcctactgtacaaaactgtccaaacttattctgagatgccacgcgaagcccattatccaatgtggttactttggtttcaaacttttcctgtccatcaactgtagcaaaaacaggcttgggtactccaggtaagggagaagagagggggatgttgggataggcaccaccactactaaaccgtctatacgcaggaggtccaaacctcccaa

SEQ ID NO: 228085 - DNA, 1211 bp, Homo Sapiens
  misc_feature (52)..(61): n is a, c, g, or t
tacaccaaggctccatgttccccggacagtgggcctgaggggtcggggtgannnnnnnnnnagcatggcagcatgatttctgtacaatcaatccatcatctggggcacagggtggtgtgcgggggctatttcttggctttggcggaattgcggggtggggtgatgggtcggcctccagggttcaggccactgaactgcccgtacttccccttgttcttgtcggcgggcttgaggatctggaaagagcacatgagggtctcgtccacactcatcatggcgccagcattgtcaaactcgccacagtagttgggagctgagaaaagtgtcaccagctgccgcttggcaaagaactcgtagccgtcttctaccacctggtgtgctcggcagatgaggtccaagtcgtgcttgtggaggaacttggccaccacctcggctccaaaggtaaaagagacgccacggtcgttctcgccccagccctgcacgtccttgtcagggtcagaccacagcaggtcacacagcaggccctggtcaggcacatctgtgggccgcatgatccgccgaatctgctccatagactgcaggtccggggacaggcctccgtggcagcagaagatcttttcgtccactatggccgcgatgggcaggcagttgaagcagtcagtgaaggttttccacagtttgatgttgtagcgtctcttgcactcatcgtagaaaccatagatgcggttgatgctggcacactcgtggttcccacggagcaggaagaagttctcggggtacttgatcttataggccagcagcaggcagatggtctccaaggactgcttgcccctgtccacatagtcccccagaaagaggtagttgctctcgggagggaaaccgccatactcaaatagtcgcagaaggtcgtagtactggccgtgtatgtcaccgcagatcttgaggggtgcctccagctccagaagaatgggctggctcagaaaaatctcccgggatttcaggcacagaccgcggatctcgttctctgtcagctgtacattcttgccaggccgcgagccctgcacttccagcaggcgcccgatgatcgagtccaggttgagcttctcgctgtcggacatggcggcgccgccgctccagcccagcagctcctggcccgctcctgcctcccgccctccggcagcctccttccggcctggctctccttccgccaa

SEQ ID NO: 228086 - DNA, 1325 bp, Homo Sapiens
ttggattgaagaaaatgttaatagcctgagtcaaatttcagcagacttaccagcatttgtatcagtggtagcaaatgaagccaaactgtatcttgaaaaacctgttgttcctttaaatatgatgttgccacaagctgcattggagactcattgcagtaatatttccaatgtgccacctacaagagagatacttcaagtctttcttactgatgtacacatgaaggaagtaattcagcagttcattgatgtcctgagtgtagcagtcaagaaacgtgtcttgtgtttacctagggatgaaaacctgacagcaaatgaagttttgaaaacgtgtgataggaaagcaaatgttgcaatcctgttttctgggggcattgattccatggttattgcaacccttgctgaccgtcatattcctttagatgaaccaattgatcttcttaatgtagctttcatagctgaagaaaagaccatgccaactacctttaacagagaagggaataaacagaaaaataaatgtgaaataccttcagaagaattctctaaagatgttgctgctgctgctgctgacagtcctaataaacatgtcagtgtaccagatcgaatcacaggaagggcgggactaaaggaactacaagctgttagcccttcccgaatttggaattttgttgaaattaatgtttctatggaagaactgcagaaattaagaagaactcgaatatgtcacttaattcggccattggatacagttttggatgatagcattggctgtgcagtctggtttgcttctagaggaattggttggttagtggcccaggaaggagtgaaatcctatcagagcaatgcaaaggtagttctcactggaattggtgcagatgagcaacttgcaggttattctcgtcatcgtgtccgctttcagtcgcatgggctggaaggattgaataaggaaataatgatggaactgggtcgaatttcttctagaaatcttggtcgtgatgacagagttattggtgatcatggaaaagaagcaagatttcctttcctggatgaaaatgttgtctcctttctaaattctctgccgatttgggaaaaagcaaacttgactttaccccgaggaattggtgaaaaattacttttacgccttgcagctgtggaacttggtcttacagcctctgctcttctgcccaaacgggccatgcagtttggatcaagaattgcaaaaatggaaaaaatttaatgaaaaagcatctgataaatgtggacggctcccaattcatgtccttagaaaatctttctattgaaaaggaactaaatttgtaatgtgattc

SEQ ID NO: 228087 - DNA, 1294 bp, Homo Sapiens
ggaaagagggaagggggaagcagggagccacgaagagagagaggtgccacgggaactcctgggctgccgactcccgtcttcttggtgaaggagtcagggttaggtgtgaaagtgggagatgaggggcattggtacacccaaggaggtctgctgcagtcatcacagaggcaggctggtccgccttcgaggtgagttgcaggcaggctgagcagcagaaaccatgtggtaggtgcccatgcttgagcaggaatgggggtggaccccatctaggtcgctgccggactagccgcagtgatgcctgacagctggaaaatgtcaaaaagtaatcaagagggagcccaggatcggggaagtaggctggggtgtcagcaaaggctattgtctggcggggggccggtatcacacaaacagcccaagccctaggcacaaatactcaatgaattcagctctgggggctttgtggctagctctgaggctggagggcacttcatccccgtctaaatccttcagcaaagcactttggggtggcccaagattccagcctgactgcaaggtgactgtggttgctaacacggcaaactccaggaagagtaccttggtccagccagtgagggctgctcccagagctgacttcccttccctcccttcgtggttttaccccactcggcctttgtgtccctgaggagcgcatcttccccaatgtgcatgcgcatcaaagcgttcctactctgcactcgttccagctctacaacatctccagattcggaggatcaaacttgtaccccatagtctcagagcaactgaatctcggcatgaacaaagggaattagagaatgctttcccttaaaaacaaaatccctatccctgtggctgatccacggagacatacacacacccttggagacaagacctcacagctacagccctgtcctccccaaagaaactaagatacagaccaacaagtacacacaagtacatacagggatattcacatatagggtagtaaattccctgtgtagggaatgcagccagtgagatagagccaggtagaagggctcttctcacaaagctgctgcacaaaccctggccacaaacttctgcctggctcaaggctttttccctccatcaccaagtcagcccgttatgctgccaaaagcatatgccctagtgctcttgaaggccatagtctgatgccagggatgcttaagctgggcactgtttggccacagtgacaccaggcagggccgggggacttggggtcaagtgtattgacatcccactgaaatgcagccaa

SEQ ID NO: 228088 - DNA, 701 bp, Homo Sapiens; identical to SEQ ID NO: 194555

SEQ ID NO: 228089 - DNA, 1215 bp, Homo Sapiens
  misc_feature (1115)..(1124): n is a, c, g, or t
ttgggggcgctttagggactggacttgcagtgtaaacagagacgctgcaaattgcttgtggacggtgtaggccgctgcaggccaccatgaaccggcttccggatgactacgacccctacgcggttgaagagcctagcgacgaggagccggctttgagcagctctgaggatgaagtggatgtgcttttacatggaactcctgaccaaaaacgaaaactcatcagagaatgtcttaccggagaaagtgaatcatctagtgaagatgaatttgaaaaggagatggaagctgaattaaattctaccatgaaaacaatggaggacaagttatcctctctgggaactggatcttcctcaggaaatggaaaagttgcaacagctccgacaaggtactacgatgatatatattttgattctgattccgaggatgaagacagagcagtacaggtgaccaagaaaaaaaagaagaaacaacacaagattccaacaaatgacgaattactgtatgatcctgaaaaagataacagagatcaggcctgggttgatgcacagagaaggggttaccatggtttgggaccacagagatcacgtcaacaacagcctgttccaaatagtgatgctgtcttgaattgtcctgcctgcatgaccacactttgccttgattgccaaaggcatgaatcatacaaaactcaatatagagcaatgtttgtaatgaattgttctattaacaaagaggaggttctaagatataaagcctcagagaacaggaagaaaaggcgggtccataagaagatgaggtctaaccaggaagatgctgctgagaaggcagagacagatgtggaagaaatctatcacccagtcatgtgcactgaatgttccactgaagtggcagtctacgacaaggatgaagtctttcattttttcaatgttttagcaagccattcctaaacagcccaactggcatttaattacccaatactgtatataaggcaaatatggacagttactttcctcttgcctgttcatatccttcagtgacattgaggaagcagtgtttctctttttaaaggagaatagtcgtcaaccttcattcatctcttacatctctcaccctctccnnnnnnnnnnctttgattttcccccttattgatgggactgatattcattctgttttttgatgaacatttggaaaactgtcgggctttttattaaaagctct

SEQ ID NO: 228090 - DNA, 489 bp, Homo Sapiens
aaattgatgagcaatggttttctataaaaggcaactttgtacaaaaaagttggcttggacactgggcagaatggctcccgcaaagaagggtggcgagaagaaaaagggccgttctgccatcaacgaagtggtaacccgagaatacaccatcaacattcacaagcgcatccatggagtgggcttcaagaagcgtgcacctcgggcactcaaagagattcggaaatttgccatgaaggagatgggaactccagatgtgcgcattgacaccaggctcaacaaagctgtctgggccaaaggaataaggaatgtgccataccgaatccgtgtgcggctgtccagaaaacgtaatgaggatgaagattcaccaaataagctatatactttggttacctatgtacctgttaccactttcaaaaatctacagacagtcaatgtggatgagaactaatcgctgatcgtcagatcaaataaagttataaaattgccttc

SEQ ID NO: 228091 - DNA, 903 bp, Homo Sapiens
ttggctctgcgccccgcgtagttccggtggcgactgcggcgcatggcggtgagcggtgtggagaagacgcgcgggtggctgggccttgcattgttggcggctctcggtgaccctcgtgctacccccctttctccaggccctgggacatcttgctggggaggcagcggcggccccaggcccgggtactccctgcgcgtcccgcggagcccggcttcccggcccagtttccagcgcccggaatccttccactgtctgtctctgcccagagcaacctacgtgcagtaacgctgactccagagcgcacccgttgggcgatgaaggcggcacagcgtcgaaaaaacaaaagaataagaagaaaacgcggaacagggcctctgtggcaaatggaggcgagaaggcctcagagaaactcgccccagaagaagttcccctaagcgctgaggcccaggcacaacagttggcccaggaattggcttggtgtgtggagcaactggagctgggcctcaagaggcagaaacccaccccgaaacagaaagagcaggctattggagcaatccgaaccctgcgcagcaaaagaacgcccttgccccggaagaggcagctgatgcactccttgtttggagactatagggctcagatggaagccgaatggcgtgaggccctgcgggctctcagagctgctgcttattcagcccaggtgcaacctgtagatggagccaccagaaagaagagccaaagggtctgcaggcctcgctctatatggagagccaaagccactctggacatgcctgatgaagagtttagttcaatttcttttagcgtctccccgaacctgaaacatccccctcccttggggtggtgtaggggtttgttttgagtgcagagcctttccaggacttctgt

SEQ ID NO: 228092 - DNA, 931 bp, Homo Sapiens
ttggcagaaggtatgggtcatgaacagaaccaaggagctgcgctgctacagatgttaccacttctgtggctgctaccccactcctgggccgtccctgaagctcctactccaatgtggccagatgacctgcaaaaccacacattcctgcacacagtgtactgccaggatgggagtcccagtgtgggactctctgaggcctacgacgaggaccagcttttcttcttcgacttttcccagaacactcgggtgcctcgcctgcccgaatttgctgactgggctcaggaacagggagatgctcctgccattttatttgacaaagagttctgcgagtggatgatccagcaaatagggccaaaacttgatgggaaaatcccggtgtccagagggtttcctatcgctgaagtgttcacgctgaagcccctggagtttggcaagcccaacactttggtctgttttgtcagtaatctcttcccacccatgctgacagtgaactggcagcatcattccgtccctgtggaaggatttgggcctacttttgtctcagctgtcgatggactcagcttccaggccttttcttacttaaacttcacaccagaaccttctgacattttctcctgcattgtgactcacgaaattgaccgctacacagcaattgcctattgggtaccccggaacgcactgccctcagatctgctggagaatgtgctgtgtggcgtggcctttggcctgggtgtgctgggcatcatcgtgggcattgttctcatcatctacttccggaagccttgctcaggtgactgattcttccagaccagagttttgatgccagcagcttcggccatccaaacagaggatgctcagatttctcacatcctgcccaggatctccttcttagggtagaagagtctcctgggacatccctggggtgtgtgtg

SEQ ID NO: 228093 - DNA, 905 bp, Homo Sapiens
ttggggagcgctttggaaggcgcacggggcgaagatggcggcggagcgacaggaggcgctgagggagttcgtggcggtgacgggcgccgaggaggaccgggcccgcttctttctcgagtcggccggctgggacttgcagatcgcgctagcgagcttttatgaggacggaggggatgaagacattgtgaccatttcgcaggcaacccccagttcagtgtccagaggcacagcccccagtgataatagagtgacatccttcagagacctcattcatgaccaagatgaagatgaggaggaagaggaaggccagaggttttatgctgggggctcagagagaagtggacagcagattgttggccctcccaggaagaaaagtcccaacgagctggtggatgatctctttaaaggtgccaaagagcatggagctgtagctgtggagcgagtgaccaagagccctggagagaccagtaaaccgagaccatttgcaggaggtggctaccgccttggggcagcaccagaggaagagtctgcctatgtggcaggagaaaagaggcagcattccagccaagatgttcatgtagtattgaaactctggaagagtggattcagcctggataatggagaactcagaagctaccaagacccatccaatgcccagtttctggagtctatccgcagaggggaggtgccagcagagcttcggaggctagctcacggtggacaggtgaacttggatatggaggaccatcgggacgaggactttgtgaagcccaaaggagccttcaaagccttcactggcgagggtcagaaactgggcagcactgccccccaggtgttgagtaccagctctccagcccaacaggcagaaaatgaagccaaagccagctcttccatcttaatcaacg

SEQ ID NO: 228094 - DNA, 1263 bp, Homo Sapiens
aactttgtacaaaaaagttggatggcgggatgcggcgcgccgcgcgtgaacctccttggcctgggcgaagctgtgtggaccaagcaagtcaggagtgtggccatgttttctgagcaggctgcccagagggcccacactctactgtccccaccatcagccaacaatgccacctttgcccgggtgccagtggcaacctacaccaactcctcacaacccttccggctaggagagcgcagctttagccggcagtatgcccacatttatgccacccgcctcatccaaatgagacccttcctggagaaccgggcccagcagcactggggcagtggagtgggagtgaagaagctgtgtgaactgcagcctgaggagaagtgctgtgtggtgggcactctgttcaaggccatgccgctgcagccctccatcctgcgggaggtcagcgaggagcacaacctgctcccccagcctcctcggagtaaatacatacacccagatgacgagctggtcttggaagatgaactgcagcgtatcaaactaaaaggcaccattgacgtgtcaaagctggttacggggactgtcctggctgtgtttggctccgtgagagacgacgggaagtttctggtggaggactattgctttgctgaccttgctccccagaagcccgcacccccacttgacacagataggtttgtgctactggtgtccggcctgggcctgggtggcggtggaggcgagagcctgctgggcacccagctgctggtggatgtggtgacggggcagcttggggacgaaggggagcagtgcagcgccgcccacgtctcccgggttatcctcgctggcaacctcctcagccacagcacccagagcagggattctatcaataaggccaaatacctcaccaagaaaacccaggcagccagcgtggaggctgttaagatgctggatgagatcctcctgcagctgagcgcctcagtgcccgtggacgtgatgccaggcgagtttgatcccaccaattacacgctcccccagcagcccctccacccctgcatgttcccgctggccactgcctactccacgctccagctggtcaccaacccctaccaggccaccattgatggagtcagatttttggggacatcaggacagaacgtgagtgacattttccgatacagcagcatggaggatcacttggagatcctggagtggaccctgcgggtccgtcacatcagccccacagcccctgacactctaggttgttaccccttc

SEQ ID NO: 228095 - DNA, 1084 bp, Homo Sapiens
  misc_feature (162)..(212): n is a, c, g, or t
ttggctcagactatagataagtggactggaccctgtgtcttgggggtggcagttgggattactccccaacaaggctgattttaggcagcatgtgttcactgtgctgtgatttcatctactgtctcccagaaagtgtgttgggatcggccattagcagcttgnnnnnnnnnnnnnnnnnnnnnnnnnnnnnnnnnnnnnnnnnnnnnnnnnnncccccatcagggcaaatggtctaactggtgcaatcatgaagagagttaatggttaacagacattggccaataacaaaacaccccatggactgtgactcgagtatccaacaggcagtcagagctctcccggtctgaaagttgcattgccactgctaactttgggattgcatcagagaggccctgagtggggttgagatgaggttggtttggtttgatgttacacactcctcacctgttctttctgagtgtcctttctctgaaaggatttatgtttttcttcgttagatagtgacttctgagcaagctgatctcccctggcatgctccaacctgattggacaaaggaagctctatggcctgggagagagactattcttaatttttctttcttacaaaaactgatttttcccataaatatttttacttcagaggactaggaccattttgttttgggcccttctgctgaaaatttgtctcgtttaagaggcagctagaatctttaccatatgtatgaatttgtataatttcatttttggatagggataaacttttgcttctgataaaagcctggaatttcatctggtcctcagagcattgcgtgtgtgtcttgctgtagcccgaaaaggttttgtgtaaagattctgggatggcaagttgtttgccttttctgaaaagagaacatacagaacctgtccatctttaagaccttcatccatggaatctactatacaggaggatgcagtgggctggaggagatgggcgaaaatgggagcaggaagcctggcctgtcttctggtcatggcctcctaaacccttaacttccagtagaaatgtactcaagcctatttataaacaaatacttttcctgcctcc

SEQ ID NO: 228096 - DNA, 915 bp, Homo Sapiens
  misc_feature (704)..(719): n is a, c, g, or t
ttggctcagggtgccggcaccatgaagatctggacttcggagcacgtctttgaccacccgtgggaaactgttacaacagctgcaatgcagaaatacccaaaccctatgaacccaagtgtggttggagttgatgtgttggacagacatatagatccctctggaaagttgcacagccacagacttctcagcacagagtggggactgccttccattgtgaagtctcttattggtgcagcaagaacgaaaacatatgtgcaagaacattctgtagttgatcctgtagagaaaacaatggaacttaaatctactaatatttcatttacaaacatggtttcagtagatgagagacttatatacaaaccacatcctcaggatccagaaaaaactgttttgacacaagaagccataattaccgtgaaaggagttagcctcagcagttaccttgaaggactgatggcaagtacgatatcctcaaatgctagtaaaggccgagaagcaatggaatgggtaatacataaattaaatgctgagattgaagaactgacagcctcagcaagaggaaccataaggactccaatggcagcagcagcgtttgcagagaagtgatcttgacagttggtagacaacatcgggtactccaggtctctccaaactgactatatatttatttgttattttaaaaatacaactatattttgggtagnnnnnnnnnnnnnnnngataagttggtgtaaggctatgtgacttgatcaaaacagatgcagggcctctaaataaaagggatcatctgaaattaatgttgtttgaaattactatctgattttgagggttccagtatttctgtgaaaattcacaagaactccttggaaactggtattgatattcagtctccttaaaggtagattttcaagcttt

SEQ ID NO: 228097 - DNA, 935 bp, Homo Sapiens
ttgggtcgttagtgaggatgacgcggcatggcaagaactgcaccgcaggggccgtctacacctaccacgagaagaagaaggacacagcggcctcgggctatgggacccagaacattcgactgagccgggatgccgtgaaggacttcgactgctgttgtctctccctgcagccttgccacgatcctgttgtcaccccagatggctacctgtatgagcgtgaggccatcctggagtacattctgcaccagaagaaggagattgcccggcagatgaaggcctacgagaagcagcggggcacccggcgcgaggagcagaaggagcttcagcgggcggcctcgcaggaccatgtgcggggcttcctggagaaggagtcggctatcgtgagccggcccctcaaccctttcacagccaaggccctctcgggcaccagcccagatgatgtccaacctgggcccagtgtgggtcctccaagtaaggacaaggacaaagtgctgcccagcttctggatcccgtcgctgacgcccgaagccaaggccaccaagctggagaagccgtcccgcacggtgacctgccccatgtcagggaagcccctgcgcatgtcggacctgacgcccgtgcacttcacaccgctagacagctccgtggaccgcgtggggctcatcacccgcagcgagcgctacgtgtgtgccgtgacccgcgacagcctgagcaacgccaccccctgcgctgtgctgcggccctctggggctgtggtcaccctcgaatgcgtgggagaagctgattcggaaggacatggtggaccctgtgactggagacaaactcacagaccgcgacatcatcgtgctgcagcggggcggtaccggcttcgcgggctcctggagtgaagctgcaagcggagaatcacgggccggtgatgcagctgagtgtgtgcggga

SEQ ID NO: 228098 - DNA, 912 bp, Homo Sapiens
ttggcaggtgaggaactcaactcaaactcctctctctgggaaaacgcggtgcttgctcctcccggagtggccttggcagggtgttggagccctcggtctgccccgtccggtctctggggccaaggctgggtttccctcatgtatggcaagagctctactcgtgcggtgcttcttctccttggcatacagctcacagctctttggcctatagcagctgtggaaatttatacctcccgggtgctggaggctgttaatgggacagatgctcggttaaaatgcactttctccagctttgcccctgtgggtgatgctctaacagtgacctggaattttcgtcctctagacgggggacctgagcagtttgtattctactaccacatagatcccttccaacccatgagtgggcggtttaaggaccgggtgtcttgggatgggaatcctgagcggtacgatgcctccatccttctctggaaactgcagttcgacgacaatgggacatacacctgccaggtgaagaacccacctgatgttgatggggtgataggggagatccggctcagcgtcgtgcacactgtacgcttctctgagatccacttcctggctctggccattggctctgcctgtgcactgatgatcataatagtaattgtagtggtcctcttccagcattaccggaaaaagcgatgggccgaaagagctcataaagtggtggagataaaatcaaaagaagaggaaaggctcaaccaagagaaaaaggtctctgtttatttagaagacacagactaacaattttagatggaagctgagatgatttccaagaacaagaaccctagtatttcttgaagttaatggaaacttttctttggcttttccagttgtgacccgttttccaaccagttctgcagcatatta

SEQ ID NO: 228099 - DNA, 925 bp, Homo Sapiens
ggtactatccaaaacaaaaagcaggtatttgagacagtgttcaagacaacaagtgaacttgtacacagtgaagagaaataaaaaggtggcttccgtatttccctccctcagtaaggttatgtgttgcataaagggatgaggctcattttggtgaaaaatgctttcatacagaaaattttgaattgagtgacctccccgcacaggcgttccaggccctgacctgaacaaggaaatcaaagtaagttaacaccactggcttcacatgaacctcaagactataatctaacggtatctaccatctcctttactttaaaaaagtttaatgtccatttacctataccaaatcagtagacttaattttctctcttaggaagtttttaaccaaattacagctaaattaatctcactttaaagtgcaagaaaggctctgctagagtagtgtttgttctgtggcatagaaagaggagcatgcctcctccggcactggcctaagaggccccacatgaagaactagctgcaagacagtgatccattaggtctgccaaaaagcagggggactcaaggttcagcctagaaagaggggtccctgccaagtctggcttttacctgtacccaggtcccaaacaaaccttgggtcccctaactgataaggctggagcacagcaccagtcatcaacagggccaaagtcgtcttagcgagtcagtgagcacctctaagccatgatttgtcaatgctcacatggatagtggtaaaggaataaagaagcctgggttttggaacagtacaaacattctttacctagtaagcagtgatcaaagttcttacctagggtaaatgatgaaaaaaataggtaatgaggtccccatacacccgtgctgagaatattagtctaactttaaagcagtacaggaatggcttctccaa

SEQ ID NO: 228100 - DNA, 723 bp, Homo Sapiens; identical to SEQ ID NO: 194564

SEQ ID NO: 228101 - DNA, 930 bp, Homo Sapiens
ttggcagatgaggacctggcaggcaggcaggctggccccggggacttctctctggccctgctccctccgagcgctccgccgttgcccgcctggcccctacggagtccttagccaggatggaggctgttgtgaacttgtaccaagaggtgatgaagcacgcagatccccggatccagggctaccctctgatggggtcccccttgctaatgacctccattctcctgacctacgtgtacttcgttctctcacttgggcctcgcatcatggctaatcggaagcccttccagctccgtggcttcatgattgtctacaacttctcactggtggcactctccctctacattgtctatgagttcctgatgtcgggctggctgagcacctatacctggcgctgtgaccctgtggactattccaacagccctgaggcacttaggatggttcgggtggcctggctcttcctcttctccaagttcattgagctgatggacacagtgatctttattctccgaaagaaagacgggcaggtgaccttcctacatgtcttccatcactctgtgcttccctggagctggtggtggggggtaaagattgccccgggaggaatgggctctttccatgccatgataaactcttccgtgcatgtcataatgtacctgtactacggattatctgcctttggccctgtggcacaaccctacctttggtggaaaaagcacatgacagccattcagctgatccagtttgtcctggtctcactgcacatctcccagtactactttatgtccagctgtaactaccagtacccagtcattattcacctcatctggatgtatggcaccatcttcttcatgctgttctccaacttctggtatcactcttataccaagggcaagcggctgccccgtgcacttcagcaaaatggagctccag

SEQ ID NO: 228102 - DNA, 870 bp, Homo Sapiens
ttggcccaggcggcggtggaaaggtgggccccctcatcctgtgccacagccagggtatccaggatgccaaccgttgggtccctaccctcctccatacccaccgcctgcccctggaatccctcctgtgaatcccttggctcctggcatggttggaccagcagtgatagtagacaagaagatgcagaagaaaatgaagaaagctcataaaaagatgcacaagcaccaaaagcaccacaagtaccacaagcatggcaagcattcctcctcttcctcctcctcttccagcagtgattctgactgaatacaggccctggacccttccctcaagtctcaccagttctgctctcccatcaagcttcagatgccatgttgtactgggggaatgtagcccttgtgctccccaccccctacctccacctgagcctcaccctgctgttgagccctgagtggctaggggaaatgggaagaggattgccatggcctggccatcttgttgctgcttggttagatcatatagctaatgaattaggcaggggagctattttttgaagatgatgaactaaatgttgaagacaagtttgagatctgtaaaatgtgattttttacttccacttataatacttgtgattggggaggtttgtggaaattcaattatgatgaaaaacctatcttttttgtaatgttggcatacttggggaatttagtggcaaatacattccccagcaggccttttgttggttgcactaactgcaagggttgctgggaagtagagtccatttggttgatgagctttgactgcggttttggaaccttacctctcctccttagcccaatatgctgtcttgggtcctattcaaataaagttatttc

SEQ ID NO: 228103 - DNA, 431 bp, Homo Sapiens; identical to SEQ ID NO: 194574

SEQ ID NO: 228104 - DNA, 1123 bp, Homo Sapiens
ttgggatattttgtttcagagttcttagtgtggctttttccatttatttaagtgattctttgttactcactaactctgcaagcctgtggaataatgaagtaccttcctggaaagtttggattattttttaaacaaaaacaagggagatacatgtattctcaggtacacacagagctgagagggctgaatggttttctgctatagcagccgagaggcctcccatcatggaaagatttctccaggaaaaggaggaatgtagccagctccccactcaggacgcttcctcatttctcttcaccaaaaccaaacagagacagcttccagtaccttcttcagtgttaccatctctaagaaggaaccagttgggaccgtgaagactcccgaccctgtggccatgatggaaatcaaaggaagacaccctctacgtcacctgccctcgactgtgtgtgcccacatgtgccgagagatggcccagagccagttcccctccagctgcaagggcatggtgtccccagagctctgagtctgtcactctccctctgctactgctgctgatctgaatatggaaaccccatggttcccttccccattcggactgggtgtgtacaagcaaggacccagatgcatcagacacagcccccaagatgttcctttctactcggccagctcgggagccagacacagcactcacagcccaggccgtgatccaccctccccaagtccaccagggccagcggcccctcacctctctggtcactggtgagaccttccacaactttcctccagacctgccagcagatgtgcccaccaggggcattaggtatccgccggagcctggccatagggtagtctcgggagccgcgctgagatcttttgccacctgcattttagaagaacatggtctctgtctcctcggcccagccagctgtcccggcaaggcctgccgagggcagttttcaacctcatgaaggaaacacagtcctgccaaggagggggagtggcgcccatggggacaggcctcagtccttagaagccctctgggtagctgtgcccacccagccttcatggctgcaggtacaaggacctttgcttccatagagaaaacgcacagctcagaaagggg

SEQ ID NO: 228105 - DNA, 1319 bp, Homo Sapiens
  misc_feature (156)..(237): n is a, c, g, or t
ttggctatttttctttaagtgacacacattctcctgtctctggcttcttcaggctgaaatgacatagtctttctcacccttacttcactcttgagaggtagggctcctttataattacatggttgctctcagactttctgtgaaagtttgggagcnnnnnnnnnnnnnnnnnnnnnnnnnnnnnnnnnnnnnnnnnnnnnnnnnnnnnnnnnnnnnnnnnnnnnnnnnnnnnnnnnncactgaaattacctggagtgaggattacttgtaattaaaatatttataaaagaaacaactttattcacagagtccagctttgggactagtctgtatcttgttttttaagtctaacaacactgataataggaagtaaaaacagaaaggaaaagaaattaccactgggaaaatctttttagttagattgtaggcttcctggggcctcccatgccaggactgcaaagtgatccagccctacctgtcttcccacctgtgtgtcccccgtgtgggaagttggtgtcacttccccttcccaccctcacatctgcttagccagtagccacacccctaaaacatcagactcaccatccaggtgcagctccagaggctacaaaaggcttcatgggacttgaatccccatcctagcttctctctccttcccctcaagacctgatctggttttaaggggcctggagctgggagtctcaagtctgctaagattcacatccatagcccccatggctttgaggagaatcctctctgccattcttccaatctccccagtgggttttgctattattttctaaattgggttaagtctaagaaggtgggggtgagcagggggtttatctatgtgtagtgagtgcttcatgtgtggaatattcattttcttactgcagtgggacttggggttgaagccacccctcctactctgttggcttagccctgagatggtgacaggctggcctgcagtcagcatcattgtgcatgtgacagcatcaatgtgattagtaatttgtctgttcctcccttgaactgtctgtttagtctgaggtttttaaacttgcaggcagctgactgtgatgtccacttgttccctgatttttacacatcatgtcaaagataacagctgttcccacccaccagttcctctaagcacatactctgcttttctgtcaacatcccattttggggaaaggaaaagtcatatttattcctgcaccccagttttttaacttgttctcccagttgtccccctcttctctgggtgtaagaaggaaattggaaaaaaattatatataatttctcttttatggtggggg

SEQ ID NO: 228106 - DNA, 872 bp, Homo Sapiens; identical to SEQ ID NO: 194578

SEQ ID NO: 228107 - DNA, 761 bp, Homo Sapiens; identical to SEQ ID NO: 194579

SEQ ID NO: 228108 - DNA, 867 bp, Homo Sapiens
ttggcaagatatcaaagattagttcctggccgtgaaaattgcagggaggagcaactcatccctcagatgggagtaacttcctcaggactgaatcaagttttaagtcagcaagcaaaccaggagatcagcccactggacagcatgattcaaagactacaacaggagcaagacctgagacgttctggtgaagcaggtatcagtaataccagccgtttaagtagaggctccataagttctacctcagaggttcattcaccaccaaacgtaggactaagacgtagtggacaaattgaaggtgtacggcaaatgcacagcaacgcaccaagaagtgaaatagccacagagcgggatctggtagcttggagtcgaagggtggtagtacccgagctatcagctggtgtagccagtaggcaagaagaatggagaactgcaaagggagaagaagaaataaagacttacaggtcagaagagaaaagaaaacacttaactgttccaaaagagaataaaatacccactgtctcaaagaatcatgctcatgagcatttcctggatcttggagaatccaaaaagcaacagacaaatcaacacaattatcgtacaagatctgcattggaagagactcctagaccctcagaagagatagaaaatggcagtagttcttcagatgaaggcgaagtagttgctgtcagtggtggaacatccgaagaagaagagagagcatggcacagtgatggcagttctagtgactactccagtgattactctgactggacagcagatgcaggaattaatctgcagccaccaaagaaagttcctaagaataaaactcaagaaagcagaaagcagttcagatgaagaagaagaatc

SEQ ID NO: 228109 - DNA, 615 bp, Homo Sapiens
  misc_feature (418)..(457): n is a, c, g, or t
ctttgtacaaaaaagttggagagaatctcaaaaaaacaatctactgttttaatgagatttaacagcttttaacagtgagtttcgtttgtaaactgcttgaagtctgtggcattcaggcacacgtctggctggccggctgggtctcctcccgggctcagtgggcctggggcctctctgacgtggtgcctgctggagggaggctcgtcgtcaccagctgactgctggtccggcttctgaccggcctttgtcctggctccgtagcagaacactgtaaaagtgcccgcgtctttgcaatagttgcagatttcagtcgtcgtgttacttgtgcacaaacagaagctgggtcttacccgcagcacgagtgtctcgggctgcccggagtcgcccgggatcaggtgctgcagccagagttacgcgnnnnnnnnnnnnnnnnnnnnnnnnnnnnnnnnnnnnnnnnaacctgtgtttcacgtgactcagcagtgcccgccgccgtcaccagctatgcattcactccgtttccagtgagcacatgtcttgcttggaaagtggacctgtgtctgtgtctatcctgaagaacttaccagcataaatcctcatttcagtgctaccgat

SEQ ID NO: 228110 - DNA, 984 bp, Homo Sapiens
ttggcactgtggagtgctcccgtgtaaataaaaagaggaaaaaagtttctcaagtcgccgctgcacgacgtctggccggcgctggagcgggggtctgcgctctcccgagcggccgcgcgctggactttattgtgccgcaaccagccccagttcccattgtttgtgtttttttcaaaatatggcaaaggttcaggtgaacaatgtagtggtgctggataacccttctcctttctacaacccgttccagttcgagatcaccttcgagtgcatcgaggacctgtctgaagacttggaatggaaaattatctatgtgggctctgcagaaagtgaagaatacgatcaagttttagactctgttttagtgggtcctgttcccgcaggaaggcatatgtttgtatttcaggctgatgcacctaatccaggactcattccagatgcagatgcagtaggcgtaactgttgtgctaattacttgtacctatcgaggacaagaatttattagagttggctattatgtaaataatgaatatactgagacagaattaagggaaaatccaccagtaaaaccagacttttctaagcttcaaaggaatattttggcatctaatcccagggtcacaagattccacattaattgggaagataacacagaaaaactggaagatgcagagagcagtaatccaaatctacagtcacttctttcaacagatgcattaccttcagcatcaaagggatggtccacatcagaaaactcactaaatgtcatgttagaatcccacatggactgcatgtgaccacctaccatccctttagtacaaattaagctattaaaaatacacagaactatttccctgaaattccgtaagtacatagtcaaaacacaatgtgaagaatttgtttaaaaacatcctgtagaaagtttataagaaaaccagtatttgaacaaattgggaatataaatacactatttttaagtaattttttt

SEQ ID NO: 228111 - DNA, 927 bp, Homo Sapiens; identical to SEQ ID NO: 194581

SEQ ID NO: 228112 - DNA, 964 bp, Homo Sapiens
  misc_feature (84)..(92): n is a, c, g, or t
ttggctttctggatggggacttgtattttaaataacttatcattccagctatgttggactagggtccaaagcattttataatannnnnnnnnaatctaggaaaaagacccaaacaaatctaacttcttgctttctcacctatttgaattttctcctacctaatttgtttgtgtctttattatagctcagtttgacttctcaaacttttcaagggttggggcagctgcacttttaggttgcctataggaaatattgcatatggagattacagtgtttttctgacctagttcaagaccagaacatgggtcatagggtttttattcagcaaaatgaaaacgtatcttcagaacttaacatattactggatgtgatacagattttgctttctgtggaattgaaaattcacaaaaattcacagcttaaatttcccatcagtgactggaggaatttttttcaggtgcttcctatattactatccctcatgcatattaactctttagaattttaggttaagtgatgtctatagaagtagcctggaaaaccatgagttttggagttcagtgaccccctgctttcctctgctcctcccttcccaaggcattgaagctgaatgtgccaactggcagttagaagcgaaagatggcattgggagaaattttagagagctttcaaactctttattctcatgttccacatggtctaattttaacataaataatatgccttcacactggattgtaaaaggcatgtgatttttgagattttattttgtgatgtattgtcttctgcagtattaaagggaaagaggtattaatgtgcattaccctatcttgtttttgaagccagggtagttgtatgattttgttaccagcagtgctaacctgaatgtgacctggttaccttggaaatgcaggaacttatatgaatgtactataaaataaaatgcggactgattcccaggaaa

SEQ ID NO: 228113 - DNA, 1009 bp, Homo Sapiens
ttggggacaagtcctcaggctaccactatggggtcagcgcctgtgagggctgcaagggcttcttccgccgcagcatccagaagaacatggtgtacacgtgtcaccgggacaagaactgcatcatcaacaaggtgacccggaaccgctgccagtactgccgactgcagaagtgctttgaagtgggcatgtccaaggagtctgtgagaaacgaccgaaacaagaagaagaaggaggtgcccaagcccgagtgctctgagagctacacgctgacgccggaggtgggggagctcattgagaaggtgcgcaaagcgcaccaggaaaccttccctgccctctgccagctgggcaaatacactacgaacaacagctcagaacaacgtgtctctctggacattgacctctgggacaagttcagtgaactctccaccaagtgcatcattaagactgtggagttcgccaagcagctgcccggcttcaccaccctcaccatcgccgaccagatcaccctcctcaaggctgcctgcctggacatcctgatcctgcggatctgcacgcggtacacgcccgagcaggacaccatgaccttctcggacgggctgaccctgaaccggacccagatgcacaacgctggcttcggccccctcaccgacctggtctttgccttcgccaaccagctgctgcccctggagatggatgatgcggagacggggctgctcagcgccatctgcctcatctgcggagaccgccaggacctggagcagccggaccgggtggacatgctgcaggagccgctgctggaggcgctaaaggtctacgtgcggaagcggaggcccagccgcccccacatgttccccaagatgctaatgaagattactgacctgcgaagcatcagcgccaagggggctgagcgggtgatcacgctgaagatggagatcccgggctccatgccgcctctcatccaggaaatgttggagaactcagagggcctggacactctgagcggacagcc

SEQ ID NO: 228114 - DNA, 748 bp, Homo Sapiens; identical to SEQ ID NO: 194585

SEQ ID NO: 228115 - DNA, 1342 bp, Homo Sapiens
ttggtgaagttcaacaccatccctcctctcaggaagtacatgctggtattcaaggggaagaggtacctgacagggataggatcagacaccaggaatgccttatatcacgtccataacggggaggacgttgtgctcctcaccacctgcaagcatggcaaagactggcaaaagcacaaggattctcgctgtgacagagacaacaccgagtatgagaagtatgattatcgggaaatgctgcacaatgccactttctgtctggttcctcgtggtcgcaggcttgggtccttcagattcctggaggctttgcaggctgcctgcgtccctgtgatgctcagcaatggatgggagttgccattctctgaagtgattaattggaaccaagctgccgtcataggcgatgagagattgttattacagattccttctacaatcaggtctattcatcaggataaaatcctagcacttagacagcagacacaattcttgtgggaggcttatttttcttcagttgagaagattgtattaactacactagagattattcaggacagaatattcaagcacatatcacgtaacagtttaatatggaacaaacatcctggaggattgttcgtactaccacagtattcatcttatctgggagattttccttactactatgctaatttaggtttaaagcccccctccaaattcactgcagtcatccatgcggtgacccccctggtctctcagtcccagccagtgttgaagcttctcgtggctgcagccaagtcccagtactgtgcccagatcatagttctatggaattgtgacaagcccctaccagccaaacaccgctggcctgccactgctgtgcctgtcgtcgtcattgaaggagagagcaaggttatgagcagccgttttctgccctacgacaacatcatcacagacgccgtgctcagccttgacgaggacacggtgctttcaacaacagaggtggatttcgccttcacagtgtggcagagcttccctgaaaggattgtggggtaccccgcgcgcagccacttctgggataactctaaggagcggtggggatacacatcaaagtggacgaacgactactccatggtgttgacaggagctgctatttaccacaaatattatcactacctatactcccattacctgccagccagcctgaagaacatggtggaccaattggccaattgtgaggacattctcatgaacttcctggtgtctgctgtgacaaaattgcctccaatcaaagtgacccagaagaagcagtataaacgagacaatgatggggacagacttctcgggcttcccgttgggctgaccctga

SEQ ID NO: 228116 - DNA, 765 bp, Homo Sapiens
ttggatcatggcagcatccaggccattgtcccgcttctgggagtggggaaagaacatcgtctgcgtggggaggaactacgcggaccacgtcagggagatgcgcagcgcggtgttgagcgagcccgtgctgttcctgaagccgtccacggcctacgcgcccgagggctcgcccatcctcatgcccgcgtacactcgcaacctgcaccacgagctggagctgggcgtggtgatgggcaagcgctgccgcgcagtccccgaggctgcggccatggactacgtgggcggctatgccctgtgcctggatatgaccgcccgggacgtgcaggacgagtgcaagaagaaggggctgccctggactctggcgaagagcttcacggcgtcctgcccggtcagcgcgttcgtgcccaaggagaagatccctgaccctcacaagctgaagctctggctcaaggtcaacggcgaactcagacaggagggtgagacatcctccatgattttttccatcccctacatcatcagctatgtttctaagatcataaccttggaagaaggagatattatcttgactgggacgccaaagggagttggaccggttaaagaaaacgatgagatcgaggctggcatacacgggctggtcagtatgacatttaaagtggaaaagccagaatattgagttatttcttaacaagtttcgagagagaagggagcaagacaagagcaagcaacggctattaaatgtcacaatcctttaattagaaaccattt

SEQ ID NO: 228117 - DNA, 777 bp, Homo Sapiens; identical to SEQ ID NO: 194591
  misc_feature (560)..(569): n is a, c, g, or t

SEQ ID NO: 228118 - DNA, 1263 bp, Homo Sapiens
  misc_feature (53)..(61): n is a, c, g, or t
ttggcaggatttgagacagcccagggtttcctcttcaagtaggtctaaaacannnnnnnnnctcattgacttccttcctgttctaactgccagtactcagaagtcagagttgagagacagaggcaccccggacagagacgtgaagcactgaataaatagatcagaatgactgaaaaagccccagagccacatgtggaggaggatgacgatgatgagctggacagcaagctcaattataagcctccaccacagaagtccctgaaagagctgcaggaaatggacaaagatgatgagagtctaattaagtacaagaaaacgctgctgggagatggtcctgtggtgacagatccgaaagcccccaatgtcgttgtcacccggctcaccctggtttgtgagagtgccccgggaccaatcaccatggaccttactggagatctggaagccctcaaaaaggaaaccattgtgttaaaggaaggttctgaatatagagtcaaaattcacttcaaagtgaacagggatattgtgtcaggcctgaaatacgttcagcacacctacaggactggggtgaaagtggataaagcaacatttatggttggcagctatggacctcggcctgaggagtatgagttcctcactccagttgaggaggctcccaagggcatgctggcgcgaggcacgtaccacaacaagtccttcttcaccgacgatgacaagcaagaccacctcagctgggagtggaacctgtcgattaagaaggagtggacagaatgaatgcatccacccctttccccacccttgccacctggaagaattctctcaggcgtgttcagcaccctgtccctcctccctgtccacagctgggtccctcttcaacactgccacatttccttattgatgcatcttttcccaccctgtcactcaacgtggtccctagaacaagaggcttaaaaccgggctttcacccaacctgctccctctgatcctccatcagggccagatcttccacgtctccatctcagtacacaatcatttaatatttccctgtcttacccctattcaagcaactagaggccagaaaatgggcaaattatcactaacaggtctttgactcaggttccattagttcattctaatgcctaaattcttttgtggttgttgctggcccaatgagtccctagtcacatcccctgccagagggagttcttcttttgtgagagacactgtaaacgacacaagagaacaagaataaaacaataactgtga

SEQ ID NO: 228119 - DNA, 931 bp, Homo Sapiens
ttggcgtaattcgtgttctgagttataacagtagtaagcattaaagaattttatgactttttattttcaggtgtaaacgtcctactttggggcaacttgccagagatagaagagagtacagatgaagatgtgttaaatatctcagcagaggagtgtattagataaatggaattatgatatatatgatatacaaacttttttctatttaaaaatatattaatggatcaactttaaaattgttagttgccagtgatcttttttggaaaacaaaaatggggcatttgttgatttatttattttccgtctctaattagttacctcagtttgattgaagccagtgaagttgtgcttttcctctacttctacttcctctccccgacctttttctgcccagtgtaggtgtattcttaaattcagacaggggaagattctttcacatatcactcagttacctcccaatctgggggagtttttcttacaacttgataccagataccattaattttacattcctgaataaaggcctagtacccacgcatatttcaaccatgcatatatcaagttcaaccgagttttaataggggattaaaaaaacaagctgttaggtttccatgggcactggttctcataggttctattggtgataactgctttaacatggagcaagagtttgtgaatcaggaaatagaataaattaaaatttaaaatatatagaggaatcctcttgattgctcagcatgatgttagataaatgagtttgtcagaaaatatcagtatacgctgtttaccaatgttatttatttacattcttctaaagccattatggatattgtattatgagagctaaacctaaataagttatcctgttccctaggaccttctctgtaaatagtgaattttagacgagtagtctgtcctaaatcttaaatag

SEQ ID NO: 228120 - DNA, 687 bp, Homo Sapiens
actttgtacaaaaaagttggctcctactgaaagactttctcctaatgcttggaaaaccataactgacatagttctaaatggcacagccttcgtgacactagaaattggaaaacaactaattaaagcacagaaaggagcagcatttctttctattactactatctatgctgagactggttcaggttttgtagtaccaagtgcttctgccaaagcaggtgtggaagccatgagcaagtctcttgcagctgaatggggtaaatatggaatgcgattcaatgtgattcaaccagggcctataaaaaccaaaggtgcctttagccgtctggacccaactggaacatttgagaaagaaatgattggcagaattccctgtggtcgcctggggactgtagaagaactcgcaaatcttgctgctttcctttgtagtgattatgcttcttggattaatggagcagtcattaaatttgacggtggagaggaagtacttatttcaggggaattcaacgacctgagaaaggtcaccaaggagcagtgggacaccatagaagaactcatcaggaagacaaaaggttcctaagaccactttggccttcatcttggttacagaaaagggaatagaaatgaaacaaattatctctcatcttttgactatttcaagtctaataaattcttaattaacaaacattc

SEQ ID NO: 228121 - DNA, 946 bp, Homo Sapiens; identical to SEQ ID NO: 194592

SEQ ID NO: 228122 - DNA, 1342 bp, Homo Sapiens
ttggagccgagcgcgttgctgcccggaggctcctacgccacggcccgtcgggcccggcgccggaagtgagctgttccgaggcgccgccgggagctgccacgtccgagacctggagcagccaccgccgcaatcatggtgtcagtaattaacactgtggatacctcccatgaggacatgattcacgacgcccagatggactactatggcacccgcctggcaacctgctcatcagacaggtccgtcaaaatctttgatgtgcgcaatggagggcagatccttatcgccgacctcaggggtcatgagggtcctgtgtggcaagtggcctgggctcaccccatgtacggcaacatcctggcatcgtgctcctatgaccggaaagtcattatctggagagaggaaaacggcacctgggagaagagccacgagcatgcgggacacgactcctcagtgaactcggtgtgctgggccccccatgactacggcctgatcctggcctgtgggagctcggatggggccatctccctgctgacttacaccggggaaggccaatgggaagtaaagaagatcaacaacgctcacaccattggctgcaatgccgtcagctgggcccctgctgttgtacctggaagcctcatagaccacccatcggggcagaaacccaattacatcaagaggtttgcatcaggtggctgtgacaacctcatcaagctgtggaaggaggaggaggacggccagtggaaggaggagcagaagctagaagcgcacagtgactgggttcgagatgtggcctgggccccctccatcggcctgcccaccagcaccatcgccagctgctcccaggatggtcgtgtgttcatttggacctgtgatgatgcctcaagcaatacgtggtcccctaaattgttgcacaagttcaacgatgtggtgtggcatgtgagctggtccatcacagccaacatcctggctgtctctggtggagacaataaggtgaccctgtggaaggagtcagttgatgggcagtgggtgtgcatcagtgatgtcaacaagggccagggctccgtatcagcatcagtgacagagggccagcagaacgagcagtgacaagacaggtggggcctggctccccacccgccagctccaggactgccccttcctgggccaactaaccaaacaactgggaagagccccccaactccaacaggattattttcccaggaggagttacagatgcagccacagattgatcatctgccttaacgtgatcggagatgctttgtaatctactgtccagctgaagcactcatgttacgaggagaaactacaagtgatgttcaatctattt

SEQ ID NO: 228123 - DNA, 897 bp, Homo Sapiens
caggctgatgtttccagctcctcctctccagaccaagatactccctgtgctaagccgaaggaggtaaccacttctcctcggttactttcgtgagttgtatttctgggagggagtagcacttggagagaaacttgacggtgagagtagctgatgggggctacgagttgacacactcctttttgttaggggggtttctggggtagagatagctcgcttctgagaaccctttgaaggtgtggtgtaagagttcaagaggatttcctcttcttcttccacttcaattagctcttgaatggaaacaatgtctctagctcctgcatggccactgtccttgcaggtactatgcctggctttcgataatcttttgctcagaaactcatgctcaaaagagttcaggatctctgaggtaaggccaactttatgtgtgctggtgcagaaggctataagctcgcctaccattccctcctcattctgtccatactgaacacaaagctctaccaatttctcaattagagcctcctcgcagtctaggccgaagatctgcagctcctccgccagctgctgggcggatgcggacatggtcgcccaagccaggggccggggagccggcccacccagctccgacctgcgcccaagaagcccacgggggtggcgagcgatgagctcctcgccctcttatccttcccccctccgcggaccgtgacaggaggtgactggcccaagcaagacctcagaccgtcagaaggccccggccgtcggtcacagagaaatactttttttaaaaaatgaaggggtggctcccaaacgccctgaatggagggagcagaaatctcgagaggacgctctcctggtgagaacgtcctgcttcccaaaagctaccgctgagcttctcaccaa

SEQ ID NO: 228124 - DNA, 990 bp, Homo Sapiens
ttggccgccgaatggcagcctccagaaagccaccgcgagtaagggtgaatcaccaggattttcaactgagaaatttaagaataattgaacctaacgaggtgacacactcaggagacacaggtgtggaaacagacggcagaatgcctccaaaggtgacttcagagctgcttcggcagctgagacaagccatgaggaactctgagtatgtgaccgaaccgatccaggcctacatcatcccatcgggagatgctcatcagagtgagtatattgctccatgtgactgtcggcgggcttttgtctctggattcgatggctctgcgggcacagccatcatcacagaagagcatgcagccatgtggactgacgggcgctactttctccaggctgccaagcaaatggacagcaactggacacttatgaagatgggtctgaaggacacaccaactcaggaagactggctggtgagtgtgcttcctgaaggatccagggttggtgtggaccccttgatcattcctacagattattggaagaaaatggccaaagttctgagaagtgccggccatcacctcattcctgtcaaggagaacctcgttgacaaaatctggacagaccgtcctgagcgcccttgcaagcctctcctcacactgggcctggattacacaggcatctcctggaaggacaaggttgcagaccttcggttgaaaatggctgagaggaacgtcatgtggtttgtggtcactgccttggatgagattgcgtggctatttaatctccgaggatcagatgtggagcacaatccagtatttttctcctacgcaatcataggactagagacgatcatgctcttcattgatggtgaccgcatagacgcccccagtgtgaaggagcacctgcttcttgacttgggtctggaagccgaatacaggatccaggtgcatccctacaagtccatcctgagcgagctcaagccctgtgtgctgacctctcccc

SEQ ID NO: 228125 - DNA, 941 bp, Homo Sapiens; identical to SEQ ID NO: 194595

SEQ ID NO: 228126 - DNA, 1307 bp, Homo Sapiens; identical to SEQ ID NO: 194596

SEQ ID NO: 228127 - DNA, 764 bp, Homo Sapiens
actttgtacaaaaaagttggccgatcccaacgaggctccctggagcccgacgcagagcagcgccctggccgggccaagcaggagccggcatcatggattccttcaaagtagtgctggaggggccagcaccttggggcttccggctgcaagggggcaaggacttcaatgtgcccctctccatttcccggctcactcctgggggcaaagcggcgcaggccggagtggccgtgggtgactgggtgctgagcatcgatggcgagaatgcgggtagcctcacacacatcgaagctcagaacaagatccgggcctgcggggagcgcctcagcctgggcctcagcagggcccagccggttcagagcaaaccgcagaaggcctccgcccccgccgcggaccctccgcggtacacctttgcacccagcgtctccctcaacaagacggcccggccctttggggcgcccccgcccgctgacagcgccccgcagcagaatggacagccgctccgaccgctggtcccagatgccagcaagcagcggctgatggagaacacagaggactggcggccgcggccggggacaggccagtcgcgttccttccgcatccttgcccacctcacaggcaccgagttcatgcaagacccggatgaggagcacctgaagaaatcaaggtacagggacgggcaccagcccctctcccacctcctgcctcttccattccagctactgccctgtgtctactcctgagctcccagctggggctctcaattc

SEQ ID NO: 228128 - DNA, 1044 bp, Homo Sapiens
ttggctcatcccctgttggtggaagactcataaatcaatgccttatcaattttaggtttcttcggctacgtttcagtcacttgttcctgatattcccggtcacatcgagagcccagtcttcattgctactaatcaggctcagtcacctgaaacttctgttgctcaggtagcccctgttgatttagacggtatgcaacaggacattgagcaagtttgggaggagctattatccattcctgagttacagtgtcttaatattgaaaatgacaagctggttgagactaccatggttccaagtccagaagccaaactgacagaagttgacaattatcatttttactcatctataccctcaatggaaaaagaagtaggtaactgtagtccacattttcttaatgcttttgaggattccttcagcagcatcctctccacagaagaccccaaccagttgacagtgaactcattaaattcagatgccacagtcaacacagattttggtgatgaattttattctgctttcatagctgagcccagtatcagcaacagcatgccctcacctgctactttaagccattcactctctgaacttctaaatgggcccattgatgtttctgatctatcactttgcaaagctttcaaccaaaaccaccctgaaagcacagcagaattcaatgattctgactccggcatttcactaaacacaagtcccagtgtggcatcaccagaacactcagtggaatcttccagctatggagacacactacttggcctcagtgattctgaagtggaagagctagatagtgccctggaagtgtcaaacagaatggtcctaaaacaccagtacattcttctggggatatggtacaacccttgtcaccatctcaggggcagagcactcacgtgcatgatgcccaatgtgagaacacaccagagaaagaattgcctgtaagtcctggtcatcggaaaaccccattcacaaaagacaaacattcaagccgcttggaggctcatctcacaagagatgaacttagggcaaagctctcc

SEQ ID NO: 228129 - DNA, 1054 bp, Homo Sapiens; identical to SEQ ID NO: 194598

SEQ ID NO: 228130 - DNA, 1367 bp, Homo Sapiens
ccgcataactcttttaataaataaagcatattcatggcttagattttaaatcacatttacagatgagggaaaacttctaggcctaaacaggtaacagtaaagcgactactgctggaaggagtggtgtgccacatgcgccttaagcctcaagagtggggactgcagggccaaacaccaaatacatcacctttaggccagacggagagtggagacccaggaagcccatgcaaccaccatctgccccctcccctagtgctgcagaaccggctggacactgtcacactttcagaagaactggaggtgggtcctgatcatattacatgaagctttccaccattgtgaacaattaggcaaggcatgagtgacagaggggcatcgctgataaatacagagcaatactggggcagtgaagaggaagctacagagacattcgtgtttcttcaaatatcagaagcttccacatcacagcaggagagctgacgacgagctccacctcctgaaggcttagtccaaaaacttcctgttggcatttgcaccaaacaaggctccccggacttctggcatcatctgctgggctatgagatccagccggctttccagggtgttggaaacctttattttacgatctccattatagatctcaactccaccagctatgtcttcaggcaggtaggactcctggtcaatttggacatcaacatcgtttttggtggcaattttgtacataggaattgccttctgcactgcagcctttaccagagggaaatcttgtttcctgcaacgaacaatcattcggggctccagcaactggtacaaaccctggagaaccagtccatccagcagcacttggtacctggttgtatcttttaccaccttgctgagtctctgttttgcttcatttagtaggtctgtgataaggtcatctcttgctctgaggactttgagtctcgcttgattcatcaaattggacatctgaattttcttctgctgctcaatctgtttctctttcttctcataatattccataatctttagtctttgggtttgcacaagccgacctttctctatgttgaactcttcttctgcctttgcatctatttcttctgctttctcattggcttcttgttcaatgaaagccatcatatgctttatctgcttttgcacgtcagcatcgctgagagccatggcgagagcaatgctaggccggtgaacagtaggctcgagtttaggtttgaaaggtgaggtgagagaaatcggcaaagggaacccctgcgcagatctcgggttcctttacggttataaccgcgccaacttttttgtacaaagttcccttcttatagaaaagcattgctcatcaatttgttgca

SEQ ID NO: 228131 - DNA, 989 bp, Homo Sapiens; identical to SEQ ID NO: 194601

SEQ ID NO: 228132 - DNA, 1514 bp, Homo Sapiens; identical to SEQ ID NO: 194602

SEQ ID NO: 228133 - DNA, 1181 bp, Homo Sapiens
ttggggagagagcaggaggccctcatgttcaccagggaacaggaccacaccggccactgaaggagggcaggagcagtcctccctctgaatggctgcacagttaatgttcccagcccagtcccctttcgggggccttgggagagtttaaggcacctgctggttccaggacctcgctttccatctgttcttgttgcaatgccatcttcaaaccgttttatttattgaagtgtttgttcagttaggggctggagagagggagcttgctgcctcctgccttgctacactaatgtttacagcacctaagcttagcctccagggccccacctctcccagctgatggtgagctgacagtgtccacaggttccaggaccatttgagattggaagctacactcaaagacactcccaccaggctctttctcccttttcctcttgctcactgccctggaatcaacaggctggttgctggttagattttctgaaacaggaggtaaaatttttctttggcagaggcccctaagcaagggaggggtgttggagagccagtgcccttaagactggagaaagctgcaatttaccaagttgccttttgccactgtagctgaccaggggactaggttgtagaggtgggaaggccccctctgggctgatcttgtgccattcttgaccttggacctgcttggttaaggagggagtgggccagaccagagtgccaggagctaatggagccaggcctgactcctaggagtggtccaaaggccttcagcctagatggtgcaaagctggggccagcctgtcttcaccggcaccctcacctgtgacaccaagacccaccccaatcccagacttcacacagtattctcccccacgccgtcctatgaccaaaggcccctgccaggtgtgggccacagcagcaggtatgtgtgaaagcaacgtagcgccccgcggactgcagtgcgcttaaccaactcacctcccttctcttagcccaagcctgtccctcgcacagcctcgcacaaaccacattgcctggtggggcccagtgtactgaaaataaagtcgttccgatagacacgtcagctggggcctctatctgtctgtcaccagggccatgtggaaagaggaagagcagcaggcactgaatctgaggtggtgctggggcctgatccatcctctagaggg

SEQ ID NO: 228134 - DNA, 1285 bp, Homo Sapiens; identical to SEQ ID NO: 194606
  misc_feature (441)..(492): n is a, c, g, or t

SEQ ID NO: 228135 - DNA, 744 bp, Homo Sapiens; identical to SEQ ID NO: 194607

SEQ ID NO: 228136 - DNA, 860 bp, Homo Sapiens
ttgggttgtcctttgcatctgcacgtgttcgcagtcgtttccgcgatgctgcctctgctgcgctgcgtgccccgtgtgctgggctcctccgtcgccggcctccgcgctgccgcgcccgcctcgcctttccggcagctcctgcagccggcaccccggctgtgcacccggcccttcgggctgctcagcgtgcgcgcaggttccgagcggcggccgggcctcctgcggcctcgcggaccctgcgcctgtggctgtggctgcggctcgctgcacaccgacggagacaaagcttttgttgatttcctgagtgatgaaattaaggaggaaagaaaaattcagaagcataaaaccctccctaagatgtctggaggttgggagctggaactgaatgggacagaagcgaaattagtgcggaaagttgccggggaaaaaatcacggtcactttcaacattaacaacagcatcccaccaacatttgatggtgaggaggaaccctcgcaagggcagaaggttgaagaacaggagcctgaactgacatcaactcccaatttcgtggttgaagttataaagaatgatgatggcaagaaggcccttgtgttggactgtcattatccagaggatgaggttggacaagaagacgaggctgagagtgacatcttctctatcagggaagttagctttcagtccactggcgagtctgaatggaaggatactaattatacactcaacacagattccttgcactgggccttatatgacccacctaatggattttccttgccgaccgacggtggacaacactttttgcagatgagctggtggagctcagcacagccctggagcaccaggagtacattactttt

SEQ ID NO: 228137 - DNA, 552 bp, Homo Sapiens
ttggcgagaagtcaggcacgtagctcagcggcggccgcggcgcgtgcgtctgtgcctctgcgcgggtctcctggtccttctgccatcatgccgatgttcatcgtaaacaccaacgtgccccgcgcctccgtgccggacgggttcctctccgagctcacccagcagctggcgcaggccaccggcaagcccccccagtacatcgcggtgcacgtggtcccggaccagctcatggccttcggcggctccagcgagccgtgcgcgctctgcagcctgcacagcatcggcaagatcggcggcgcgcagaaccgctcctacagcaagctgctgtgcggcctgctggccgagcgcctgcgcatcagcccggacagggtctacatcaactattacgacatgaacgcggccaatgtgggctggaacaactccaccttcgcctaagagccgcagggacccacgctgtctgcgctggctccacccgggaacccgccgcacgctgtgttctaggcccgcccaccccaaccttctggtggggagaaataaacggtttagagacta

SEQ ID NO: 228138 - DNA, 799 bp, Homo Sapiens
tgtacaaaaaagttggctttggcctcctcacagaaggaagaatcagcgtccagctctcaaggctgagtttgaccggcctgtcagtgaggaggacacagtccctttgtcccacttggatgagagccccgcctacctcccagagctggctggccccgcccagccatttggccccaagggtggctactcttactagcccccagcggctgttccccctgccgcaggtgggtgctgccctgtgtacatataaatgaatctggtgttggggaaaccttcatctgaaacccacagatgtctctggggcagatccccactgtcctaccagttgccctagcccagactctgagctgctcaccggagtcattgggaaggaaaagtggagaaatggcaagtctagagtctcagaaactcccctgggggtttcacctgggccctggaggaattcagctcagcttcttcctaggtccaagccccccacaccttttccccaaccacagagaacaagagtttgttctgttctgggggacagagaaggcgcttcccaacttcatactggcaggagggtgaggaggttcactgagctccccatatctcccactgcggggagacacaagcctggactctgccccacgctgtggccctggagggtcccggtttgtcagttcttggtgctctgtgttcccagagacacgcggaggttgaagaaaggaacctgggatgaagagtgctgtgtataaccaagaagtatgggtccctgctctcaaggaaccttttgcctttcttctgcccttttcctaggccc

SEQ ID NO: 228139 - DNA, 700 bp, Homo Sapiens
  misc_feature (210)..(240): n is a, c, g, or t
gagctttttaataatctcattccacatagccttatagatcctgtaaataggggggggtcacaaaagtaatatattgtgttatggaagataattttgtactgtgctgtttcctaaatcataccaatatcctaaagtcatgcacttcccagatgatcgtgatcctccaaatgctttgtaagatggggcagggcgtggaaatatatatatatnnnnnnnnnnnnnnnnnnnnnnnnnnnnnnnagtatagtatatattttcctaacctttcttctgggtccttcctcagatctttgagtcacgatagaaaaggagctcgagttctttgtgtaggaaagttaagcttcctgcctgcggtgttcttgcaattgccttaggaattcacaagctctaggagttctgaacggaaggcagacgagaggcactttatccagtcccagaaagaatctctaaccgtgtgactgagaagtcatctagaaaaacttatatttttaatgtaaaaacaaatgggggttaccagacctcacagagtattggacgtctacaagtgcttttatattttgtaactgtaaagaagtttcatatgcacagaagagcagttggaaatctggtcgactgcaataaaacaagatgacctttgcatgtacaaagatgttgcattcagactatgaaaatagcaaataaagctttggtgcaagttgcc

SEQ ID NO: 228140 - DNA, 1193 bp, Homo Sapiens
gaattccagcattttatgagcgcaccacatcggggaggggtggcagtggtttccacggtaacccaaagtaaggcttgtgcacttgctgagcttccagatgcgaattagtaaaagctaaattcaaaagtagaatgggcatctccaaagagtacgataaaaacattttgtatcaaacttgtgattaaaaaaatacaaaagttaaacccacaggcaaagaggaaaatgacaatcctgagagctgccctgataggtgagcctcgaacctcgtctaaatccgtaagaaggcaaaccctggggaggccagcacccctcgggagagtgggagtgaacgcggagcccacctggcttcatctgggcaaagcttcgtagcgcctctggcaggatgtgtgtccagtcccccgaggggcagaggcactgcggtgtggacacacgagggctggggggcaggggcggagccgaaccctgcagccaggcaaaagcgggaaaggcctggttcctccagcatttcccagcttttgggggctcccaagagatagtggttcccacttgcccagccactgctgtggccaagcagcagggtcggacctgagcctgtggtcacagcagactggctactactcagctccaggcccttatttccaatcctcggtgtccaggagagaaagctggtcagcagaagccagatggggacagagtgtggaagtggcgttactgtacagagaggcggcaggcaggagtcgcagatggtggtggctgctaggacagcatggactgctgcacggccttctgcagcgactgccgcgtcaccagcagacgcaccacctcctccgagcgcttggtgagccgcttgcgggcctggtcgtgtgtgaccatggtcatgtcccagccgttcacctgcatgatcttgtctccaatctgcagcccagcgatttcagcagggcctccttcagacacccgtgtgacataaatacccttgtccgtcttgtcttcagagaagggattctgggaagggtcctggtcgattccacctccaatgctgaaacccaggattaagttctcaccttgacgcagcttgtgaatttcaactctttgcaccacggcggtgaccggctggcccgggatgtaggacatctcgaccctgctctggtcgcccagcgccgctccgccaacttttttgtacaaagttggctatt

SEQ ID NO: 228141 - DNA, 556 bp, Homo Sapiens; identical to SEQ ID NO: 194612

SEQ ID NO: 228142 - DNA, 880 bp, Homo Sapiens
ttggagtaacatggcggcggcggcggtagccaggctgtggtggcgcgggatcttgggggcctcggcgctgaccagggggactgggcgaccctccgttctgttgctgccggtgaggcgggagagcgccggggccgacacgcgccccactgtcagaccacggaatgatgtggcccacaagcagctctcagcttttggagagtatgtggctgaaatcttgcccaagtatgtccaacaagttcaggtgtcctgcttcaatgagttagaggtctgtatccatcctgatggcgtcatcccagtgctgactttcctcagggatcacaccaatgcacagttcaaatctctggttgacttgacagcagtggacgtcccaactcggcaaaaccgttttgagattgtctacaacctgttgtctctgcgcttcaactcacggatccgtgtgaagacctacacagatgagctgacgcccattgagtctgctgtctctgtgttcaaggcagccaactggtatgaaagggagatctgggacatgtttggagtcttctttgctaaccaccctgatctaagaaggatcctgacagattatggcttcgagggacatcctttccggaaagactttcctctatctggctatgttgagttacgttatgatgatgaagtgaagcgggtggtggcagagccggtggagttggcccaagagttccgcaaatttgacctgaacagcccctgggaggctttcccagtctatcgccaacccccggagagtctcaagcttgaagccggagacaagaagcctgatgccaagtagctccagggaacgcatgtggatcctagacagcgccttatctatgattgagtgtccgtgtaaataaattcctactta

SEQ ID NO: 228143 - DNA, 1501 bp, Homo Sapiens
ctttgtacaaaaaagttggcactttatgaaggtggtgtttttaaggctcatcttactttcccaaaagattatcccctccgacctcctaaaatgaaattcattacagaaatctggcacccaaatgttgataaaaatggtgatgtgtgcatttctattcttcatgagcctggggaagataagtatggttatgaaaagccagaggaacgctggctccctatccacactgtggaaaccatcatgattagtgtcatttctatgctggcagaccctaatggagactcacctgctaatgttgatgctgcgaaagaatggagggaagatagaaatggagaatttaaaagaaaagttgcccgctgtgtaagaaaaagccaagagactgcttttgagtgacatttatttagcagctagtaacttcacttatttcagggtctccaattgagaaacatggcactgtttttcctgcactctacccacctattgctggacttctgttgtacaagttggcaaacactggctggaactgggctgcaataaaacatgccagttatcaatgctgacaagagcctaacaagtgccaacttacagatgattacgcattttgaattctaatgaactgttttaaccttcaggaagaattgtaaagacctgtacatagcacaacatgatccggataatatatatactgttcatgtacatccacaaatacaccttgtaccaaataatgctttcttgtagtagaataagaatcgtgtaaattctaagagattttagcaggttttctttcctattcattgtttcttatcagtttaaaaggattcctttaagcatgtcagatgaaaagcaattaggattaaaagtttccatttaatttcccttaaacccttgaggcttcattaaactcttttcacttactaaacttttgtatcttctttgttttgacacactcccctttgcttttatctcttacctgccagaatgttctcaaatgatttagttcaaatactgaaatacttaatgagcaattacttgatttttaatgatgacttcgaaggagtcatcactaggtgctttgtcctttttgtattctagttgcacccacctcttggattggatatagcaataacatttattggccgttgtgagctcttgatcccagtcattacccctgagaactaaaaatagatggttcttaattcaacttactgaaaatttccccaaacaatagcaaatctgacttttccctcttcagttgcctggtattaaggttggataaatgaagcatgcacagctacaggctttctacttaacttctgggtttgctattacaaatcctatttactctcatacccttctccttagtccttcatatttctctgcctctattcttctatactgcagatttttctcacctattgtacaaagaaattgcgatgtatattttcatgtaatttgattttggaattctgtcaccttatgtagtgagttcttccaaaatataatt

SEQ ID NO: 228144 - DNA, 1376 bp, Homo Sapiens
aagcagggcaaccagcagccccgtcacccggttgctccttggacttcctgaatcttgggcttgtccccaggtgccacagccttggctcatgacagtgagcgcgttggcgtgagtgacagagcggacagtggcagcagccaaccagggcaggccaaagagggcacagatgccgcccatggccacgatgagcagcaggtccaggtggaagccggagcccttctgcagcatgcgctccttcttggagatgatgagcgtggtgatctgtgtctccatgaagatgagaatgaagaccaggatggcgggcagcaggctggcaaccatcatccacacagggaaggggctcttctctcccagggggttgatgacccagcccctcttttctggggcagtcaccgagaatccactgggaacgctcagcttctgggtataggtgtcctcaatactgtaatccacaagcaccatgatgaggatggcgatgggcaccccaaagtccccaatcacccgccggatccggccaggaaagaaccggctgttcttgaatttgcgcaggaagaaggcgatgaagaaggtgccggccatgagcaccagcgacagcagggccgtgttgggctggccccggggcttcccctgcccagactgcccagccaagctcctgttgcccggccccagcgtgggtcttgccccggcccatgtcatgttctcaccgccgtccacctctgagctgttggaggctgagcagccatgcagggggtgctcctggaagatcttcaccagcttgtagaaggtctcatagatgaagatgagtgagatcaagaaggcgaagatctcctgggtgaagcgggagacgaagcggaccaggaagctcccctccagggccaccatgagcagggccaggaacaccagccagaagccgatccacacacggcccaccaggtactccaggtggttgctgctacagaacgagaagaaggcctcctcaaagaccagcaggggccctgagaagccgatcaccaacaggggctgggcacccagcaggcagaagaccacgccctggagcgctgtggacataatcagctccgacacccctatcaggtcctgcgtcttctctcccagcagccccccaaaggtgatggcaggagacagggcggcaaagtagatgaagatgactgcggccaggcactgagggtcaagtgcatctcggaagtcactcaggtagtggggatagcggcgccgcacatctcggatcagccccccaaagggccgccccgtccgccgaaggggatcatcttcagctgcccctgccgcctctaccatctgcaggagcgccttatcttgggcagatttgggctccagcccagcccctgtaggtagcccaa

SEQ ID NO: 228145 - DNA, 702 bp, Homo Sapiens; identical to SEQ ID NO: 194615

SEQ ID NO: 228146 - DNA, 1231 bp, Homo Sapiens
ttggctgcactcaaccacgatgagaggctgcccggccaatgcagctgccgccccgtctgctgcggaggctttgctttttgactccctggcgacagtaaagttgaagagcttccggccggaggccaatagatgggacccccggaaggcggaagttctagggcggaagtggccgagaggagaggagaatggcggcggaaggctggatttggcgttggggctggggccggcggtgcctgggaaggcctgggcttctcggccccggccctggccccactacacctctctttcttcttttgttgttggggtctgtgactgcggatataactgacggcaacagtgaacatctcaagcgggagcattcgctcattaagccctaccaaggggtcggttccagctctatgcccctctgggacttccagggcagcactatgctcacgagccagtacgtacgtctgacccctgacgagcgcagcaaagagggctctatctggaaccaccagccgtgcttcctcaaagactgggaaatgcacgtccacttcaaagtccacggcacagggaagaagaacctccatggagacggcatcgccttgtggtacacccgggaccgcctcgtgccagggcctgtgtttggaagcaaagataacttccacggcttagccatcttcctggacacctaccccaatgatgagaccactgagcgcgtgttcccgtacatctcggtgatggtgaacaatggctccctgtcctacgaccacagcaaggatgggcgctggaccgagctggcgggctgcacggctgacttccgcaaccgcgatcacgacaccttcctggctgtgcgctactcccggggccgtctgacggtgatgaccgacctggaggacaagaacgagtggaagaactgcattgacatcacgggagtgcgcctgcccaccggctactacttcggggcctccgccggcaccggcgacctgtctgacaatcatgacatcatctccatgaagctgttccagctgatggtggagcacacgcccgacgaggagagcatcgactggaccaagatcgagcccagcgtcaacttcctcaagtcgcccaaagacaacgtggacgaccccacggggaacttccgcagcgggcccctgacggggtggcgggtgttcctgctgctgctgtgcgctctcctgggcatcgttgtctgcgccgtggtgggggccgtggtgttccagaagcggca

SEQ ID NO: 228147 - DNA, 922 bp, Homo Sapiens; identical to SEQ ID NO: 194617

SEQ ID NO: 228148 - DNA, 1019 bp, Homo Sapiens
ttggctttgccatgaggccatgaggcccgcttcatccttttctatttccctagaaccttaatggagaaggaattgcaaagaatcaagtccacccttctcatgtgacagatggggaaactgaggccttgagaaggaaaaaggctaatctaagttcctgcgggcagtggcatgactggagcacagcctcctgcctcccagcccggacccaatgcactttcttgtctcctctaataagccccaccctccccgcctgggctccccttgctgcccttgcctgttccccattagcacaggagtagcagcagcaggacaggcaagagcctcacaagtgggactctgggcctctgaccagctgtgcggcatgggctaagtcactctgcccttcggagcctctggaagcttagggcacattggttccagcctagccagtttctcaccctgggttggggtcccccagcatccagactggaaacctacccattttcccctgagcatcctctagatgctgccccaaggagttgctgcagttctggagcctcatctggctgggatctccaaggggcctcctggattcagtccccactggccctgagcacgacagcccttcttaccctcccaggaatgccgtgaaaggagacaaggtctgcccgacccatgtctatgctctacccccagggtagcatctcagcttccgaaccctgggctgtttccttagtcttcattttataaaagttgttgcctttttaacggagtgtcactttcaaccggcctcccctacccctgctggccggggatgggagacatgtcatttgtaaaagcagaaaaagttgcatttgttcacttttgtaatattgtcctgggcctgtgttggggtgttgggggaagctgggcatcagtggccacatgggcatcagagctggccccacagagaccccacagggcagtgagctctgtcttcccccacctgcctagcccatcatctatctaaccggtccttgatttaataaacactataaaaa

SEQ ID NO: 228149 - DNA, 920 bp, Homo Sapiens
ctttgtacaaaaaagttggggaacatgctgctctaattcagatttaaagagtttcttcctgttaattcgaagctcactgtgcctcttgtttccgagggaagaaggactgattaagtcatctaaatggatgcaatactgaattacaggtcagaagatactgaagattactacacattactgggatgtgatgaactatcttcggttgaacaaatcctggcagaatttaaagtcagagctctggaatgtcacccagacaagcatcctgaaaaccccaaagctgtggagacttttcagaaactgcagaaggcaaaggagattctgaccaatgaagagagtcgagcccgctatgaccactggcgaaggagccagatgtcgatgccattccagcagtgggaagctttgaatgactcagtgaagacgtcaatgcactgggttgtcagaggtaaaaaagacctgatgctggaagaatctgacaagactcataccaccaagatggaaaatgaggaatgtaatgagcaaagagaaagaaagaaagaggagctggcttcaaccgcagagaaaacggagcagaaagaacccaagcccctagagaagtcagtctccccgcaaaattcagattcttcaggttttgcagatgtgaatggttggcaccttcgtttccgctggtccaaggatgctccctcagaactcctgaggaagttcagaaactatgaaatatgaaatatctctgcttcaaaaaatgaggaagagcaagactgtcccctatgctgccaacatgcagtctttgtttatgtcttaaaaatgtcatgtttatgtcatgtctgtgaattgctgagtactaattgattcctccatccttgaaatcagttctcataatgcttttttaaataagaaaaatttaggaagatgaatttcttcca

SEQ ID NO: 228150 - DNA, 895 bp, Homo Sapiens
gccaactttgtacaaaaaagttgggtgggacaatgggtggtgaattctgaagttttggagagggaagtggagcagccagcaagtaagctagccagagttttctcaagagccagctttgctcagcacactctcctgggccccaaggagtcccacggaatggggaaagcgggaaccctggagttcttgggaatcttggagcctaaagagaaaccgaggtgcaaattcatttcatggtgactgacccttgagcttaaacagaagcagcaaatgaaagaaccggacaaataaggaagggcacaagcctacccgactctatttacagtctgtaactttccactcttcctgtagtcccgaggcccctgggtccttctagcttttctctttcccatccttggggccttgtgtgatgatgggtgtggggctgccgatgggaaagtcgggggttgttaggcttttctgcctgctcctgcttaaacacaagaaggaatcctggattttgccctctccttagctcttagtctctttggtaggagttttgttccagaggagctctcccccttggatttgaacttgctctttttgttgttgttgttctttctcttctttttcttacctcccactaaaggggttccaaattatcctggtctttttctaccttgttgtgtttctatctcgtctttacttccatctgtttgtttttttctccatcagtgggggccgagttgttcccccagcctgccaaattttgatccttcccctcttttggccaaatcctaggggaagaaatcctagtatgccaaaaatatatgctaagcataattaaactccatgcgggtccataacagccaagaagcctgcagagaaagccaaggcagttccctccgcagaacacccc

SEQ ID NO: 228151 - DNA, 834 bp, Homo Sapiens
ttcagcaggctaatttgtctgtttattcccacaaggtagccagaggtgagagcgccgagccaagcccagcaggccataggaccttcctccggcggagtgcacgctggattttcgggtctgccccaccagcaggtttgcaggcaggccgtcatgagtgccggtggaaggctccgagggcgtgggcaggggctcgggcggggccacacacttgtggagctagaaatagtggggcaggtccttctctatcaccaggggctcctccatgggtccgtagcgcttcaccacgcagccgttcttgtcgatgaggaactgtggagagacggtgtccaaacttggtgaagttccacttgatggcatttcccaggatgcccttgcccttgggttggatcttcatccacttccacagcgggtgggcgtcgtccccgttcacgcagatcttgctgaacatatcgaatttgacgttgtagcccgcggcgaactctttgatctcttcgttactccctggctcctgcttcccgaactggttacacgggaaggccaggatccgcaaaccacactcagcgtatcgggcgtgcaggtcgacgagctgagtgtagtttacttcggtcttgcctcactgggaggccacgttggtgacgatgcacacgaagccccggtacttgtccaggttaaccatgtgcccgtcgatgtccttggcggaaaactcgtgcatggagcgcgcacagcgccagtcgtcccgggacgcgcacatggtcccggccaggccaggcgcggccagagccccacagagcagcgccgtttttcggtaggcggcaaaggccaacttttttgtac

SEQ ID NO: 228152 - DNA, 779 bp, Homo Sapiens; identical to SEQ ID NO: 194620

SEQ ID NO: 228153 - DNA, 611 bp, Homo Sapiens; identical to SEQ ID NO: 194621

SEQ ID NO: 228154 - DNA, 1399 bp, Homo Sapiens
ttggcgagcgtctcgcaggccgtagggggaagatggcggtggagtcgcgcgttacccaggaggaaattaagaaggagccagagaaaccgatcgaccgcgagaagacatgcccactgttgctacgggtcttcaccaccaataacggccgccaccaccgaatggacgagttctcccggggaaatgtaccgtccagcgagttgcagatctacacttggatggatgcaaccttgaaagaactgacaagcttagtaaaagaagtctacccagaagctagaaagaagggcactcacttcaattttgcaatcgtttttacagatgttaaaagacctggctatcgagttaaggagattggcagcaccatgtctggcagaaaggggactgatgattccatgaccctgcagtcgcagaagttccagataggagattacttggacatagcaattacccctccaaatcgggcaccacctccttcagggcgcatgagaccatattaaattctatttactatttgttgaatttatttttccgtcagttatgtaaaataaacatactcttcttcctcccctgattattgccattaagcctttaaattctaaacaaattataatgcatcatctatttaggagttagatttggatgtgctattgtatgattacgaatagtctgtatgtttcaagcccttctgtaaaatatgaagaaaagtgctcttagcattctgtgtaaaactgtactgttaaatatatgtgtgtaatcagcctgagtgtgaaagttaatggaggcctgggaacagggtttatactaagtagtggaggagcgtatggttaagcccaaaggggcagaacaagaaagccacgggattgtatgaaatcaaacatgagtttgtggtgtagactgctgtatgcagttggaaaggacacgtgagagtgagctcaagtggcagcagaggcagtttggaataagctgcggcaagttgaagaagctgtgttggacgagattgccccgccttgatcagggtaccatgacataaaaggttaaagaacaggcaacacaatgagcacttaagtttttaacatgtggggaatagggcattttaaaggctggaaccagttcagaggaaacaagggtttgggtagaggtagaaaggtttaattaaccctggagatctgcaaatggagggaggggtgaaggaggaatcttaagacggagggagaagagccaaggacaacgtcaggttgaatgagtaggaggtgttcgcacatcctcttgtgtgctaggtagtggcgtgcatctgatctgagaggcagtaaagcagtgatgaagacagtgcacaaaacattgaaagtcctgattgcagcagtgactctgcaaccttggataaaattatttcaatctttatttt

SEQ ID NO: 228155 - DNA, 1203 bp, Homo Sapiens
ttggctacttattcatgggtgactatgtagacagaggatattattcagtggagactgtgactcttcttgtagcattaaaggtgcgttatccagaacgcattacaatattgagaggaaatcacgaaagccgacaaattacccaagtatatggcttttatgatgaatgtctgcgaaagtatgggaatgccaacgtttggaaatattttacagatctctttgattatcttccacttacagctttagtagatggacagatattctgcctccatggtggcctctctccatccatagacacactggatcatataagagccctggatcgtttacaggaagttccacatgagggcccaatgtgtgatctgttatggtcagatccagatgatcgtggtggatggggtatttcaccacgtggtgctggctacacatttggacaagacatttctgaaacctttaaccatgccaatggtctcacactggtttctcgtgcccaccagcttgtaatggagggatacaattggtgtcatgatcggaatgtggttaccattttcagtgcacccaattactgttatcgttgtgggaaccaggctgctatcatggaattagatgacactttaaaatattccttccttcaatttgacccagcgcctcgtcgtggtgagcctcatgttacacggcgcaccccagactacttcctataaatttctcctgggaaacctgcctttgtatgtggaagtatacctggctttttaaaatatatgtatttaaaaacaaaaagcaacagtaatctatgtgtttctgtaacaaattgggatctgtcttggcattaaaccacatcatggaccaaatgtgccatactaatgatgagcatttagcacaatttgagactgaaatttagtacactatgttctaggtcagtctaacagtttgcctgctgtatttatagtaaccattttcctttggactgttcaagcaaaaaaggtaactaactgcttcatctccttttgcgcttatttggaaattttagttatagtgtttaactggcatggattaatagagttgggagttttatttttaagaaaaattcacaagctaacttccactaatccattatcccttttattttattgaaatgtataattaacttaactgaagaaaaggttcttcttgggagtatgtgtcataacatttaaagagaatttcccc

SEQ ID NO: 228156 - DNA, 923 bp, Homo Sapiens
ttggattaattcttaaattccctgcagagaatgccccctttattgctgcaccagggtgggcattgctcccactgagccctactccaccctgtccctgcactcccttggttgccaaaaaaatgataacttaaatcccttccagacttaagaattttatggcatggcccaattgatataaacatttaggaggaaatgaaaagctaaaataggaagtaattattcctctaaagaaacattttgagcaaggcagtttagagaatcctaatgtctacactggcatagcacgagccatgtaagcttcttttttttctatgcaagagtattgatgtatgtgctgaatcttcacagacttgtcaatacacaggcagtattctaaaatagcactgaacagggagtcaggagactattgtctcctaaacccaggactagagttccctcgtactgtcactcctttggtcattaaatgcactgggcttgcccgcactttggccttcctagaacgctgcttcataacctctctgtctgacttctgcatctccttccaggtcagctcattcacaagagttgctcccaagcctggatgagttgcaccttgcatcttgagcatgcatttctcacaataattattaagctgtgtgataatttctgctttcaggacactcatccattatcttggctgtgagctccttgggtacgggtaccttgtatgtttaattttatatccctagcacaaagcaagtgcctggcacatagtcagtgccctaagtatttgtagagtgaagaatgccagcctctcttgtccctggtttccttatgtgttgaatgtggttgagtttgtccattgctagggagagacttccagtaataaaatttactattctaaatgcttctactgttatgttttatctgcccatttatctttc

SEQ ID NO: 228157 - DNA, 929 bp, Homo Sapiens
  misc_feature (407)..(458): n is a, c, g, or t
ttggaaaataactgaccctcccttcctgtccgccctcttcccctctaatgctcacgctcccaacacaaggtgggcagggaggcaccattcaggaacctggaccaaagctgacgaggctgggccaagccagggatggggccacagccagaaccccgagccctacttccaggttctggttagctcagccccagcccagcccagctgctctgcccagagctgggtgagtggggagacacctcagagccccgcaaaacccactgaccggaggcaaaaggcagtggggctgggggtagttttccatggtcacagagaactagtggtggctctgagaaggggaggacctctgggctttgattccatctccttgtcttttttctttgtttttagagacagggtcctgctatttnnnnnnnnnnnnnnnnnnnnnnnnnnnnnnnnnnnnnnnnnnnnnnnnnnnntgggctcaagcaatcctcctgagtgatcccatttcttaatcagtgtagccccaagaaggctggggctatttaccagggtagaaaaaggagcttacctcccacctttggtcctaagtccctgccccctccccttcacaccataactaggtaacagtttgataactagggaagaaagcagaacagttaagcagccgccacatccccgctggctgggggcctcactccaggaaggggctggactggctgtcctttccagtggcctggctccgctgtgtggatggggagatcggggccagaggcagaaccctggtgaggaagctccagtcctgctctctacccagcccatcttgcctccatggtgcctctggaggcctctgggcctcctctaacaggggctggtgggcaccaagagccattgagtagacccctggctggtaagggccaagttccaccggtgcttctgggaagggg

SEQ ID NO: 228158 - DNA, 1340 bp, Homo Sapiens
ttggggaagagagaaaggttgtgatggcggctatagctgcatccgaggtgctggtggacagcgcggaggaggggtccctcgctgcggcggcggagctggccgctcagaagcgcgaacagagactgcgcaaattccgggagctgcacctgatgcggaatgaagctcgtaaattaaatcaccaggaagttgtggaagaagataaaagactaaaattacctgcaaattgggaagccaaaaaagctcgtttggagtgggaactaaaggaagaggaaaagaaaaaggaatgtgcggcaagaggagaagactatgagaaagtgaagttgctggagatcagtgcagaagatgcagaaagatgggagaggaaaaagaagaggaaaaaccctgatctgggattttcagattatgctgctgcccagttacgccagtatcatcggttgaccaagcagatcaaacctgacatggaaacatatgagagactgagagaaaaacatggagaagagtttttcccaacatccaatagtcttcttcatggaacacatgtgccttccacagaggaaattgacaggatggtcatagatctggaaaaacagattgaaaaacgagacaaatatagccggagacgtccttataatgatgatgcagatatcgactacattaatgaaaggaatgccaaattcaacaagaaagctgaaagattctatgggaaatacacagctgaaattaaacagaatttggaaagaggaacagctgtctaatcccttcaagaactgtttatagaagcttgagaatggggtaaaaatttctgctagcaaaatcaagttctttttgaaattttatcagtaatccagaatttagtagtccatgccttctcactcagcatttagaaataaaaatgtggtttcttaaacgtatatcctttcatgtatatttccacatttttgtgcttggatataagatgtatttcttgtagtgaagttgttttgtaatctactttgtatacattctaattatattatttttctatgtattttaaatgtatatggctgtttaatctttgaagcattttgggcttaagattgccagcagcacacatcagatgcagtcattgttgctatcagtgtggaatttgatagagtctagactcgggccacttggagttgtgtactccaaagctaaggacagtgatgaggaagatggcagtggccaccggaggactggagcagtccctcctcatggcggcctgtgaccaaagtcggggaggagtggagctatccttccatgatctgatcatgtacagttccctttttaaaaagcaataaatgcctggggattagaatttc

SEQ ID NO: 228159 - DNA, 853 bp, Homo Sapiens
ttggccttacagtgcttgttcggggcgctccgctggcttcttggacaattgcgccatgtgtgctgctcggctagcggcggcggcggcccagtcggtgtatgccttctcggcgcgcccgctggccggcggggagcctgtgagcctgggctccctgcggggcaaggtactacttatcgagaatgtggcgtccctctgaggcaccacggtccgggactacacccagatgaacgagctgcagcggcgcctcggaccccggggcctggtggtgctcggcttcccgtgcaaccagtttgggcatcaggagaacgccaagaacgaagagattctgaattccctcaagtacgtccggcctggtggtgggttcgagcccaacttcatgctcttcgagaagtgcgaggtgaacggtgcgggggcgcaccctctcttcgccttcctgcgggaggccctgccagctcccagcgacgacgccaccgcgcttatgaccgaccccaagctcatcacctggtctccggtgtgtcgcaacgatgttgcctggaactttgagaagttcctggtgggccctgacggtgtgcccctacgcaggtacagccgccgcttccagaccattgacatcgagcctgacatcgaagccctgctgtctcaagggcccagctgtgcctagggcgcccctcctaccccggctgcttggcagttgcagtgctgctgtctcgggggggttttcatctatgagggtgtttcctctaaacctacgagggaggaacacctgatcttacagaaaataccaacctcgagatgggtgctggtcctgttgatccagtctctgcagaccaaggcgagtttctcactaataaag

SEQ ID NO: 228160 - DNA, 1033 bp, Homo Sapiens; identical to SEQ ID NO: 194623

SEQ ID NO: 228161 - DNA, 798 bp, Homo Sapiens; identical to SEQ ID NO: 194625

SEQ ID NO: 228162 - DNA, 1529 bp, Homo Sapiens
  misc_feature (449)..(463): n is a, c, g, or t
ttgaaaaccccacccacagccgccaagcggtcacaccaaacccaggactttcagacaggatgaatggtggggccccgcaatggggctactgagaaagcaggacttgacgctcatacgctccactgaaacgcaggactttcccagcccagtccctcagtggagaagactgccgaagcccggctccggcagcagggtggcgcctgcgtcatgaggacgggctcgcatcttcagccctggtggcagggagcggcgtttcttccgcacaggccttgcgcctgctaggaagtggcacatcttcctgctcagggcaccaaggtggttcagaaacgttaaggacgagccacagcgaaaagccgcagtcctcacaggcaagaagggataaataaatatgaggtgacccgcagcagctctcacctgggctggtgtgtcacaaccctgacccacccctnnnnnnnnnnnnnnntcaagaagcaacatcctaaggagaacagggccctactctacacagccctttctgagatgatcggcatacagcaggtgatgcaggctgcacactcagcagattcagcggctggaaacagcaagtgggtttcttcggatgaaagggaagaattcagtccaactgcaggaggggtgggagaggttccagatcctgggaaccacatcaccagacctcggccctttttgccaagtgacccccaccccaccctgatgtggtctacagggccctcccacagggaaaggcccagggaagtccagagctacaggcaccaaggctgcagagggtgctggacgaaacctcctatttctgaaatgcatttcagttgccactgtacaagttaagcaaaataataaggaaaaaggaaaagtgaaagtgaaaatcatgcacttgaaaacgagttagatggagtaagctctgtccacgggattgtgctgcggcaaggaccgaggccccgcccacaggcctggagtcccgacagccggtctgccaggcacccgcctccgcttcctactgctgcttgcattccgccggctggctgagttccttctagaaacgtatgaatgattaacagacaaaaattacaccttagagttaatttccgcatcatcctcgtcttctccctcctcgtcaccttctaattcctcctcttctccttcttcaccttcttcaaaattgtcatcatcttctatggcctccccagtgaagtacagcacagcccgcgggactatccgctcacggaaaaagtgtccaatttcaaaatcagaggctaatgtgaattcagaatcttcatccagtgattctccatccccggatgctttcaatggattgaagaagttgaaaaaggactcattgggtacttgtttcgtaattgttctaacagtgcctcgacccttatgcttctgctttttcttgatggttttgacagtaacattctttcctttcttccagtcaatagtacacccgtcacagtccacaatctcaggaccttcaaaggaaaagggatcagccttatctggttctgatccaa

SEQ ID NO: 228163 - DNA, 971 bp, Homo Sapiens
actttgtacaaaaaagttggcgcttccgctctctggccgggcttgggctgcgtggagaatactttttgcgatgcctactggagactttgattcgaagcccagttgggccgaccaggtggaggaggagggggaggacgacaaatgtgtcaccagcgagctcctcaaggggatccctctggccacaggtgacaccagcccagagccagagctactgccgggagctccactgccgcctcccaaggaggtcatcaacggaaacataaagacagtgacagagtacaagatagatgaggatggcaagaagttcaagattgtccgcaccttcaggattgagacccggaaggcttcaaaggctgtcgcaaggaggaagaactggaagaagttcgggaactcagagtttgacccccccggacccaatgtggccaccaccactgtcagtgacgatgtctctatgacgttcatcaccagcaaagaggacctgaactgccaggaggaggaggaccctatgaacaaactcaagggccagaagatcgtgtcctgccgcatctgcaagggcgaccactggaccacccgctgcccctacaaggatacgctggggcccatgcagaaggagctggccgagcagctgggcctgtctactggcgagaaggagaagctgccgggagagctagagccggtgcaggccacgcagaacaagacagggaagtatgtgccgccgagcctgcgcgacggggccagccgccgcggggagtccatgcagcccaaccgcagaaccgacgacaacgccaccatccgtgtcaccaacttgtcagaggacacgcgtgagaccgacctgcaggagctcttccggcctttcggctccatctcccgcatctacctggctaggacagaccactgggccaatccaagggcttttgccttcatcagcttccaccgccgcgagatgcttgcgcgtgccatttgccggggtg

SEQ ID NO: 228164 - DNA, 671 bp, Homo Sapiens; identical to SEQ ID NO: 194630

SEQ ID NO: 228165 - DNA, 1309 bp, Homo Sapiens
ttgggagcagcccagcgtgcccattccagcgcccgcgtccccgcagcatgccgcgcccccgcctgctggccgcgctgtgcggcgcgctgctctgcgcccccagcctcctcgtcgccctggatatctgttccaaaaacccctgccacaacggtggtttatgcgaggagatttcccaagaagtgcgaggagatgtcttcccctcgtacacctgcacgtgccttaagggctacgcgggcaaccactgtgagacgaaatgtgtcgagccactgggcatggagaatgggaacattgccaactcacagatcgccgcctcgtctgtgcgtgtgaccttcttgggtttgcagcattgggtcccggagctggcccgcctgaaccgcgcaggcatggtcaatgcctggacacccagcagcaatgacgataacccctggatccaggtgaacctgctgcggaggatgtgggtaacaggtgtggtgacgcagggtgccagccgcttggccagtcatgagtacctgaaggccttcaaggtggcctacagccttaatggacacgaattcgatttcatccatgatgttaataaaaaacacaaggagtttgtgggtaactggaacaaaaacgcggtgcatgtcaacctgtttgagacccctgtggaggctcagtacgtgagattgtaccccacgagctgccacacggcctgcactctgcgctttgagctactgggctgtgagctgaacggatgcgccaatcccctgggcctgaagaataacagcatccctgacaagcagatcacggcctccagcagctacaagacctggggcttgcatctcttcagctggaacccctcctatgcacggctggacaagcagggcaacttcaacgcctgggttgcggggagctacggtaacgatcagtggctgcaggtggacctgggctcctcgaaggaggtgacaggcatcatcacccagggggcccgtaactttggctctgtccagtttgtggcatcctacaaattgcctacagtaatgacagtgcgaactggactgagtaccaggaccccaggactggcagcagtaagatcttccctggcaactgggacaaccactcccacaagaaaaacttgtttgagacgcccatcctggctcgctatgtgcgcatcctgcctgtagcctggcacaaccgcatcgccctgcgcctggagctgctgggctgttagtggccacctgccacccccaggtcttcctgctttccatgggcccgctgcctcttggcttctcagccactttaaatcaccatacggctggggactggggaa

SEQ ID NO: 228166 - DNA, 870 bp, Homo Sapiens
  misc_feature (153)..(161): n is a, c, g, or t
ttggcatattttcattgactccttagtacaagggaaccttaatgaccaacagatcctagaagacagtatgatattttctctggccagttgcataataactgcaaaattgtgtacctgggcaatctgttttttaaccacctctgaagaagttcnnnnnnnnnttatatgaagagataaaccaagtttttggaaatggtcctgttactccagagaaaattgagcagctcagatattgtcagcatgtgctttgtgaaactgttcgaactgccaaactgactccagtttctgcccagtttcaagatattgaaggaaaaattgaccgatttattattcctagagagaccctcgtcctttatgcccttggtgtggtacttcaggatcctaatacttggccatctccacacaagtttgatccagatcggtttgatgatgaattagtaatgaaaactttttcctcacttggattctcaggcacacaggagtgtccagagttgaggtttgcatatatggtgaccacagtacttcttagtgtattggtgaagagactgcacctactttctgtggagggacaggttattgaaacaaagtatgaactggtaacatcatcaagggaagaagcttggatcactgtctcaaagagatattaaaattttatacatttaaaatcattgttaaattgattgaggaaaacaaccatttaaaaaaaatctatgttgaatccttttataaaccagtatcactttgtaatataaacacctatttgtacttaattttgtaaatttggatttttatatatcatattttcttaattcattgtacacatttgacttactgcacagtatattgatcattttaatgggaaactttagc

SEQ ID NO: 228167 - DNA, 939 bp, Homo Sapiens; identical to SEQ ID NO: 194632

SEQ ID NO: 228168 - DNA, 715 bp, Homo Sapiens
tttgtacaaaaaagtttgggctagacccggtttactggaattgctctggcgatcgaggggtcctagtacaccgcaatcatgtctattatgtcctataacggaggggccgtcatggccatgaaggggaagaactgtgtggccatcgctgcagacaggcgcttcgggatccaggcccagatggtgaccacggacttccagaagatctttcccatgggtgaccggctgtacatcggtctggccgggctcgccactgacgtccagacagttgcccagcgcctcaagttccggctgaacctgtatgagttgaaggaaggtcggcagatcaaaccttataccctcatgagcatggtggccaacctcttgtatgagaaacggtttggcccttactacactgagccagtcattgccgggttggacccgaagacctttaagcccttcatttgctctctagacctcatcggctgccccatggtgactgatgactttgtggtcagtggcacctgcgccgaacaaatgtacggaatgtgtgagtccctctgggagcccaacatggatccggatcacctgtttgaaaccatctcccaagccatgctgaatgctgtggaccgggatgcagtgtcaggcatgggagtcattgtccacatcatcgagaaggacaaaatcaccaccaggacactgaaggcccgaatggactaaccctgttcccagagcccac

SEQ ID NO: 228169 - DNA, 874 bp, Homo Sapiens
tacaaaaaagttggggcctcgttgagagaaggtctcattcggtgttttgggaagagagtcgtgtgggcccaggtatcgtagcggcgacacgagagagacgggcggtgtgacagccttccactacctgcacgagtgtattggtctgtctgctatcagctatgccgctgcccgttgcgctgcagacccgcttggccaagagaggcatcctcaaacatctggagcctgaaccagaggaagagatcattgccgaggactatgacgatgatcctgtggactacgaggccaccaggttggagggcctaccaccaagctggtacaaggtgttcgacccttcctgcgggctcccttactactggaatgcagacacagaccttgtatcctggctctccccacatgaccccaactccgtggttaccaaatcggccaagaagctcagaagcagtaatgcagatgctgaagaaaagttggaccggagccatgacaagtcggacaggggccatgacaagtcggaccgcagccatgagaaactagacaggggccacgacaagtcagaccggggccacgacaagtctgacagggatcgagagcgtggctatgacaaggtagacagagagagagagcgagacagggaacgggatcgggaccgcgggtatgacaaggcagaccgggaagagggcaaagaacggcgccaccatcgccgggaggagctggctccctatcccaagagcaagaggcagtaagccgaaaggatgaagagttagaccccatggaccctagctcatactcagacgccccccggggcacgtggtcacaggactccccaagcggaatgaggccaagactggcgctgacaccacagcagctgggccctctt

SEQ ID NO: 228170 - DNA, 952 bp, Homo Sapiens
ctttgtacaaaaaagttgggacattcagccggcggttcggggcgacggactctccattccagaaccatggcccaatttgtccgtaaccttgtggagaagaccccggcgctggtgaacgctgctgtgacttactcgaagcctcgattggccacattttggtactacgccaaggttgagctggttcctcccacccctgctgagatccctagagctattcagagcctgaaaaaaatagtcaatagtgctcagactggtagcttcaaacagctcacagttaaggaagctgtgctgaatggtttggtggccactgaggtgttgatgtggttttatgtcggagagattataggcaagcggggcatcattggctatgatgtttgaagaccaatctttaacatctgattatatttgatttattatttgagtgttgttggaccatgtgtgatcagactgctatctgaataaaataagatttgtcaaaactcagtgttttctccatcagatactccatgaaaggtcacaatttctcttgatattaagctgggttgtctttaaacaaccctaaatacacgtctgtttagcccgcaattggaaaggatatatgtggcaatattaacctggtacatgaatatatggggataacattttaatttgaaggtttggaatatatatatttaagctttatttccagaacagtgagggttaggtcttgggaaaactataacttgccaaagtagaagaaatagtagtaccatatgccaaagtgatagagatgaatcatgtcagtagttagaataacatttcactgttttctttgctaaaatcacagaaagaccctattgacaacatctatgtctgtaaaaatgttagagtacttgtcatctttgaatatagcctccccaagagagaacagggtggtattctaagtatgtttctttgtaacatctttagcagt

SEQ ID NO: 228171 - DNA, 911 bp, Homo Sapiens
ttggggcggctggtgggcgaccgggcgcatcctcattgcagtgcggcggccctacctcggccctggcctgaccccggcggccctgcccgcccctccctccagcatcatggccagcccaagaaccaggaaggttcttaaagaagtcagggtgcaggatgagaacaacgtttgttttgagtgtggcgcgttcaatcctcagtgggtcagtgtgacctacggcatctggatctgcctggagtgctcggggagacaccgcgggcttggggttcacctcagctttgtgcgctctgttactatggacaagtggaaggacattgagcttgagaagatgaaagctggtgggaatgctaagttccgagagttcctggagtctcaggaggattacgatccttgctggtccttgcaggagaagtacaacagcagagccgcggccctctttagggataaggtggtcgctctggccgaaggcagagagtggtctctggagtcatcacctgcccagaactggaccccacctcagcccaggacgctgccgtccatggtgcaccgagtctctggccagccgcagagtgtgaccgcctcctcggacaaggcttttgaagactggctgaatgatgacctcggctcctatcaaggggcccaggggaatcgctacgtggggtttgggaacacgccaccgcctcagaagaaagaagatgacttcctcaacaacgccatgtcctctctgtactcgggctggagcagcttcaccactggagccagccggtttgcctcggcagccaaggagggcgctacaaagtttggatcccaagcgagtcagaagcgtccgagctgggccacagcctgaacgagaacgtcctcaagctctgcgcaggagaagtgaacgaagggaaagatttttgatgatgtct

SEQ ID NO: 228172 - DNA, 548 bp, Homo Sapiens; identical to SEQ ID NO: 194635

SEQ ID NO: 228173 - DNA, 998 bp, Homo Sapiens
ttgggtcattggtggcggaggcaatggccggcaaccagctgtaagcgaggcacggaagacatatgcttgtgagacaaaggtgtctctgaaactatggatggtacaagaacttcacttgacattgaagagtactcggatactgaggtacagaaaaaccaagtactaactctggaagaatggcaagacaagtgggtgaacggcaagactgcttttcatcaggaacaaggacatcagctattaaagaagcatttagatactttccttaaaggcaagagtggactgagggtattttttcctctttgcggaaaagcggttgagatgaaatggtttgcagaccggggacacagtgtagttggtgtggaaatcagtgaacttgggatacaagaattttttacagagcagaatctttcttactcagaagaaccaatcaccgaaattcctggaaccaaagtatttaagagttcttcggggaacatttcattgtactgttgcagtatttttgatcttcccaggacaaatattggcaaatttgacatgatttgggatagaggaacattagttgccattaatccaggtgatcgcaaatgctatgcagatacaatgttttccctcctgggaaagaagtttcagtatctcctgtgtgttctttcttatgatccaactaaacatccaggtccaccattttatgttccacatgctgaaattgaaaggttgtttggtaaaatatgcaatatacgttgtcttgagaagttgatgcttttgaagaacgacataaaagttggggaattgactgtctttttgaaaagttatgtctacttacagaaaagtaaatgagacatagataaaataaaatcacactgacatgtttttgaggaattgaaaattatgctaaagcctgaaaatgtaatggatgaatttttaaaattgtttataaatcatatgatagatctttactaaaaatggctttttagtaaagccatttacttttttctaaacaa

SEQ ID NO: 228174 - DNA, 1612 bp, Homo Sapiens
ttggctgagtgcgctgagcggggaagcgcaaaggggcaagttacccgtcctggcgtttctggggttcgcctcggaggctagcctcggtgctctcgcaggctcgctcgcttctgcatccccgttgccgcccggagccaactcttaagttctggacgccaggcctgaggcagttccgccatggacttctccaagttcctggcagacgacttcgacgtgaaggagtggatcaatgcggccttcagggccggctccaaggaggcggcgtccgggaaggcggatggccacgcagccaccctggtgatgaagctgcagctgttcatccaagaggtgaaccacgccgtggaggaaacaagtcaccaagctctccagaacatgcccaaagtgctccgtgatgttgaagccctaaaacaggaggcatctttcctgaaagaacagatgattcttgtcaaggaggacattaaaaaatttgaacaggacacatctcaatccatgcaggtgttggtagaaattgaccaagtgaagtccagaatgcaacttgctgccgaatctcttcaggaagcagataagtggagcacgttgagcgccgatattgaggagacatttaagactcaggacatagctgtgatttctgccaagctaacaggtatgcagaacagcttaatgatgcttgttgatacaccagactactcagaaaagtgtgtgcacttggaggcactgaagaacaggctggaggccctagccagtccacagattgtagcggcattcacctctcaggctgtagatcagtccaaagtgtttgtgaaggtgtttactgaaattgaccggatgccccagctcctggcctactactacaagtgtcacaaggtgcagcttttagcagcctggcaagagctgtgtcaaagtgacctatccctggaccggcagcttaccggactctatgatgccttgcttggtgcttggcacacacaaatccagtgggctacacaggttttccagaagccccacgaggtggtaatggtgctgctgattcagaccctgggggccctcatgccctcgctgccctcctgcctcagcaacggcgtggagagggcagggcccgagcaggagctcaccaggctgctggagttctacgacgccaccgcccacttcgccaagggcttggagatggcactgctcccccacctacatgaacacaatctggtaaaagtcacggagctggtggatgctgtgtatgatccatacaaaccctaccagctgaagtatggcgacatggaagagagcaacctcctcatccagatgagtgctgtgcctctggagcatggggaagtgattgactgtgtgcaggagctgagccactccgtgaacaagctgtttggtctggcgtctgcagccgttgacagatgcgtcagattcaccaatggcctggggacctgcggcctgttgtcagccctgaaatccctctttgccaagtatgtgtctgatttcaccagcactctccagtccatacgaaagaagtgcaaactggaccacattcctcccaactccctcttccaggaagattggacggcttttcagaactccattaggataatagccacctgtggagagcttt

SEQ ID NO: 228175 - DNA, 616 bp, Homo Sapiens
tttgtacaaaaaagttgggctgttcgaaggtgatccagacgcaagatggctgtcctctctaaggaatatggttttgtgcttctaactggtgctgccagctttataatggtggcccacctagccatcaatgtttccaaggcccgcaagaagtacaaagtggagtatcctatcatgtacagcacggaccctgaaaatgggcacatcttcaactgcattcagcgagcccaccagaacacgttggaagtgtatcctcccttcttattttttctagctgttggaggtgtttaccacccgcgtatagcttctggcctgggcttggcctggattgttggacgagttctttatgcttatggctattacacgggagaacccagcaagcgtagtcgaggagccctggggtccatcgccctcctgggcttggtgggcacaactgtgtgctctgctttccagcatcttggttgggttaaaagtggcttgggcagtggacccaaatgctgccattaaagaattataggggtttaaaaactctcattcattttaaatgacttacctttatttccatttacattttttttctaaatataataaaaacttacctggcatcagcctcatacct

SEQ ID NO: 228176 - DNA, 589 bp, Homo Sapiens; identical to SEQ ID NO: 194638

SEQ ID NO: 228177 - DNA, 1363 bp, Homo Sapiens
ttgggtgagtttttccggtgcacgcgagtgcttctgaaacgtcagctgcgctcccctaggagtgctgagcccgcggaaccgcagccatgactgaggctgatgtgaatccaaaggcctatccccttgccgatgcccacctcaccaagaagctactggacctcgttcagcagtcatgtaactataagcagcttcggaaaggagccaatgaggccaccaaaaccctcaacaggggcatctctgagttcatcgtgatggctgcagacgccgagccactggagatcattctgcacctgccgctgctgtgtgaagacaagaatgtgccctacgtgtttgtgcgctccaagcaggccctggggagagcctgtggggtctccaggcctgtcatcgcctgttctgtcaccatcaaagaaggctcgcagctgaaacagcagatccaatccattcagcagtccattgaaaggctcttagtctaaacctgtggcctctgccacgtgctccctgccagcttcccccctgaggttgtgtatcatattatctgtgttagcatgtagtattttcagctactctctattgttataaaatgtagtactaaatctggtttctggatttttgtgttgtttttgttctgttttacagggttgctatcccccttcctttcctccctccctctgccatccttcatccttttatcctccctttttggaacaagtgttcagagcagacagaagcagggtggtggcaccgttgaaaggcagaaagagccaggagaaagctgatggagccaggacagagatctggttccagctttcagccactagcttcctgttgtgtgcggggtgtggtggaattaaacagcattcattgtgtgtccctgtgcctggcacacagaatcattcatacgtgttcaagtgatcaaggggtttcatttgctcttgggggattaggtatatttggggaggaagcatgtgttctgtgaggttgttcggctatgtccaagtgtcgtttactaatgtacccctgctgtttgcttttggtaatgtgatgttgatgttctccccctacccacaaccatgcccttgagggtagcagggcagcagcataccaaagagatgtgctgcaggactccggaggcagcctgggtgggtgagccatggggcagttgacctgggtcttgaaagagtcgggagtgacaagctcagagagcatgaactgatgctggcatgaaggattccaggaagatcatggagacctggctggtagctgtaacagagatggtggagtctaaggaaaccggcctgtctctggtgaatggggactttcttttgggtggacacttggcaccagcttctgagagcccctttcc

SEQ ID NO: 228178 - DNA, 956 bp, Homo Sapiens; identical to SEQ ID NO: 194639

SEQ ID NO: 228179 - DNA, 814 bp, Homo Sapiens
tttggatcccgcggactccgcccggcccggcctccccaggcatggcgccgctgcgcttctccgccaatctgtcctggctattccccgagctctccggcctccccgcgcgggtgcgggccgcgggcagctcgggcttcgaggccgtcgaggtggcctggccgtacgcggagacgcctgaggcgctggcgcgcgccgcgcgagaagcggggctgcggcttgtactgatcaacacgcccccgggagaccaagagaagggggaaatggggctgggggccgtccccgggagacaggcggccttccgagagggactggagcaggccgtgcggtatgccaaagccctgggctgtcccaggatccacctgatggctggccgagtaccccagggagctgatcgaatagcagtcaaggctgagatggaggccgtttttctggagaacctgaggcatgcagctggggttttggctcaggaggacctcgtgggactgctggagcccatcaacacccgcatcactgacccccagtacttcctggacacgccccagcaggcggcagccatcttacagaaggtaggaagacccaacctccaattacaaatggacatattccactggcagatcatggatgggaacctgacaggaaacatccgggagttcctgcccattgttgggcatgtgcaggtggcacaggtcccaggccgaggggagccccgcagcccccggaaaagctgaattttccctatctgtttcaactgctggaagatgaaggctacaaaggcttcgtggggctgaaacacagtagaaggggctggagttgg

SEQ ID NO: 228180 - DNA, 935 bp, Homo Sapiens
tttgtacaaaaaagttggctttgcttgcgggcgagcgattggtgcgtgctttgggccccggcggggagctggagccagagcggctaccccgaaagctgcgggccgagcttgaggccgcgctggggaagaagcacaagggcggtgatagctccagtggcccccaacgcttggtttctttccgtctcatccgggatctgcaccagcatctgagagaaagggattccaaactatacctccatgagctcctagaaggcagtgaaatctatctcccagaggttgtgaagcctccacggaacccagaactagttgcccggctggagaagattaagatacagctggccaatgaggaatataaacggatcacccgcaacgtcacttgtcaggatacaagacatggtgggactctcagcgacctgggaaagcaagtgagatcattgaaggctctggtcatcaccatcttcaatttcattgtcacggtggttgctgccttcgtctgcacttaccttggaagccaatatatcttcacagaaatggcctcgcgggtgctagctgcattgatcgtcgcctctgtggtgggtctggccgagctgtatgtcatggtgcgggcaatggaaggcgagctgggagaactgtaactggtgcttcatcatcaagtctagagaagactttgggggcttcaggctccaattggcagtcaccgactcagtcaacccatcagactttttgtattcagctccagttagtcagaagaccagcccaggccagctgctgtttctgtggggagccctaatcttctgtgaatttccaaagggagcattggaggagattgagataacacatctttaaaacagaaagaactggtcttggtctatcagtacctcttcctgaatctggtacccatctgccttctccagttcattctaaacactgctggg

SEQ ID NO: 228181 - DNA, 954 bp, Homo Sapiens; identical to SEQ ID NO: 194645

SEQ ID NO: 228182 - DNA, 1370 bp, Homo Sapiens
agcaatgcttttttataatgccaactttgtacaaaaaagttgggttcttttcagaactccgggaatgtgctaaagccaaaggcttcttcatagatacacggtccaataaaacactggctgattctctggataatgcgaacgacccccacgatcccattgtgaacaggctactgcgctccatggccacgcaggccatgtcgaatgctctgtacttctccaccggatcctgtgcggaggaggagttccatcattacggtcttgcattagataaatatacccactttacttctccaataagaagatattcagatattgtagtacaccgcttgttaatggcagccatttcaaaagataagaaaatggaaattaagggaaatctgttcagcaacaaagatcttgaggaattatgcagacatatcaacaacagaaaccaagcagcacagcattctcagaagcagtctactgagctcttccagtgcatgtacttcaaagacaaagaccctgccaccgaggagcgttgcatatctgacggagttatttattcaattagaacaaatggtgtgcttctatttataccaaggtttgggattaaaggtgctgcttatctaaaaaataaagatggtttagtcatctcatgtggcccagatagctgttctgaatggaaaccaggatcccttcaacgatttcaaaacaaaattacctctactacaacagatggggaatctgttacgttccatttgtttgaccatgtaaccgtaagaatatccatacaggcctcacgttgccattctgatacaatcagacttgaaataattagtaacaaaccatacaagataccaaatacagaacttattcatcagagttcccccttgctgaagagtgagttagtgaaagaagtaactaaatctgtggaagaagctcagcttgcccaagaagtcaaagtaaacatcattcaggaggaatatcaagaatatcgccaaacaaagggaaggagcctatacacacttctagaggagatacgggacctagctctcctggatgtttcaaacaattatggaatatgagaggctcttacttcactaagagctgtcatatgtgaatgttttacagtcttttcaaacttaacatttaatgtgtgtcactcagtgctctagtcgatcaggactgggtgacacacttctagaggagatacgggacctagctctcctggatgtttcaaacaattatggaatatgagaggctcttacttcactaagagctgtcatatgtgaatgttttacagtcttttcaaacttaacatttaatgtgtgtcactcagtgctctagtcgatcacgactgggtagctatttcgcatatatgtaaaatgttc

SEQ ID NO: 228183 - DNA, 1118 bp, Homo Sapiens
ttggcaaatcacaagcttctttgcagcttccagccgttatggaacacctgaaaagctacaagaactggtagacacagctcattccatgggtatcatagtcctcttagatgtggtacacagccatgcttcaaaaaattcagcagatggattgaatatgtttgatgggacagattcctgttattttcattctggacctagagggactcatgatctttgggatagcagattgtttgcctactccagctgggaagttttaagattccttctgtcaaacataagatggtggttggaagaatatcgctttgatggatttcgttttgatggtgttacgtccatgctttatcatcaccatggagtgggtcaaggtttctcaggtgattacagtgaatatttcggactacaagtagatgaagatgccttgacttacctcatgttggcaaatcatttggttcacacgctgtgtcccgattctataacaatagctgaggatgtatcaggaatgccagctctgtgctctccaatttcccagggagggggtggttttgactatcgactagccatggcaattccagataagtggattcagctacttaaagagtttaaagatgaagactggaacatgggcgatatagtatacacgctcacaaacaggcgctaccttgaaaagtgcattgcttatgcagagagccatgatcaggcattggttggggataagtcgctggcattttggttgatggatgccgaaatgtatacaaacatgagtgtcctgactccttttactccagttattgatcgtggaatacagcttcataaaatgattcgactcattacgcatgggcttggtggagaaggctatctcaatttcatgggtaatgaatttgggcatcctgaatggttagacttcccaagaaaaggaaataatgagagttaccattatgccaggcggcagtttcatttaactgacgacgaccttcttcgctacaagttcctaaataattttgacagggatatgaatagattggaagaaagatatggtttggcttgcagctccacaggcctacgtgagtgaaaacatgaaggcaataagatcattgcttttgaagagcaggtcttctttt

SEQ ID NO: 228184 - DNA, 955 bp, Homo Sapiens; identical to SEQ ID NO: 194647
  misc_feature (594)..(605): n is a, c, g, or t

SEQ ID NO: 228185 - DNA, 1493 bp, Homo Sapiens
ttggcgtaggcccgggaggccgggccggccgggctgcgagcgcctgccccatgcgccgccgcctctccgcacgatgttcccctcgcggaggaaagcggcgcagctgccctgggaggacggcaggtccgggttgctctccggcggcctccctcggaagtgttccgtcttccacctgttcgtggcctgcctctcgctgggcttcttctccctactctggctgcagctcagctgctctggggacgtggcccgggcagtcaggggacaagggcaggagacctcgggccctccccgcgcctgccccccagagccgccccctgagcactgggaagaagacgcatcctggggcccccaccgcctggcagtgctggtgcccttccgcgaacgcttcgaggagctcctggtcttcgtgccccacatgcgccgcttcctgagcaggaagaagatccggcaccacatctacgtgctcaaccaggtggaccacttcaggttcaaccgggcagcgctcatcaacgtgggcttcctggagagcagcaacagcacggactacattgccatgcacgacgttgacctgctccctctcaacgaggagctggactatggctttcctgaggctgggcccttccacgtggcctccccggagctccaccctctctaccactacaagacctatgtcggcggcatcctgctgctctccaagcagcactaccggctgtgcaatgggatgtccaaccgcttctggggctggggccgcgaggacgacgagttctaccggcgcattaagggagctgggctccagcttttccgcccctcgggaatcacaactgggtacaagacatttcgccacctgcatgacccagcctggcggaagagggaccagaagcgcatcgcagctcaaaaacaggagcagttcaaggtggacagggagggaggcctgaacactgtgaagtaccatgtggcttcccgcactgccctgtctgtgggcggggccccctgcactgtcctcaacatcatgttggactgtgacaagaccgccacaccctggtgcacattcagctgagctggatggacagtgaggaagcctgtacctacaggccatattgctcaggctcaggacaaggcctcaggtcgtgggcccagctctgacaggatgtggagtggccaggaccaagacagcaagctacgcaattgcagccacccggccgccaaggcaggcttgggctgggccaggacacgtggggtgcctgggacgctgcttgccatgcacagtgatcagagagaggctggggtgtgtcctgtccgggaccccccctgccttcctgctcaccctactctgacctccttcacgtgcccaggcctgtgggtagtggggagggctgaacaggacaacctctcatcacccccacttttgttccttcctgctgggctgcctcgtgcagatacacattgtacgggccatgccgctagcgcaagtggccgttgggcctggtgagggt

SEQ ID NO: 228186 - DNA, 859 bp, Homo Sapiens; identical to SEQ ID NO: 194650

SEQ ID NO: 228187 - DNA, 879 bp, Homo Sapiens
ttgggtctgcccgcccctggcctggccccgtctgtctctctcagcagctgtctttctcgcgcccactggccggtctctcctcttccccgcagttgcctccttctctgcctgcctgggtggccgccatgggccggaagcggctcatcactgattcctacccggttgtgaagaggagggaggggcccgctgggcacagcaagggggagctggcacccgagctaggggaggagccccagccccgcgacgaggaggaagcggagctggagctgctgaggcagtttgacctggcctggcagtacgggccctgcaccgggatcacacggctgcagcgctggtgtcgggccaagcagatgggcttggagcctcccccagaggtgtggcaggtgctgaagacccaccccggagacccccgcttccagtgcagtctctggcatctctatcccctatgaggcaccacgtaagacctcctgcccttagctctcttgctcaccacccaagaacctcaggacagaagcgagagcccattgctcctgctcagctcagcccggctgcggaggaacccttggcaggcagaacctggaggtgtcagaggctcaactcctccatctaaccagcaggctcccagagtccccggaagagcctgcgcagctgaagcagagtgcttctagatggagagtggtcactggggaaaaggacctggccatcaccttccaatacctgctgcctgtctccctgacccatgatctggcaagttaggcacagtcagacatggacagttgatccatgaggaaaagatgctctcccacctaaggccaggaatctgagagcaggactggctgagctcccagggcaaggggttcactaatgcttatcaataaa

SEQ ID NO: 228188 - DNA, 1610 bp, Homo Sapiens
  misc_feature (1439)..(1447): n is a, c, g, or t
ttggctgtccgcgcctaggagcagtggcgctgagagcagcaaggccagagttgaaaacttacagagtcctgaggctttcagactgaaaaaggctttcttctgtcactgacaatcgccaccatgatccatagtcttttcttgatcaactcctctggagacattttcctggagaaacattggaaaagtgtggtcagccgttctgtttgtgattacttttttgaggcgcaagagagagctactgaggcagaaaatgtgcctccggttatccctacccctcaccactatctcttaagtgtttaccgccacaagatcttttttgtggccgtgatccagacggaggtcccccctctgtttgtcattgagtttcttcaccgagtggtggacacatttcaggattattttggagtctgttcagagccagtgatcaaagacaatgtagttgtggtttatgaggtattggaagagatgcttgacaatggttttccattggctaccgagtcgaacattcttaaagaactcataaagcctcctaccatccttcgaacggttgtcaacaccatcacaggaagcacgaatgtgggtgaccagcttcccactgggcagctgtcagtggtgccttggcgacggactggggtgaaatataccaacaatgaggcctattttgatgtgattgaagagattgatgcaattattgataaatcaggctccacaattactgctgagatccagggggtgattgatgcctgtgtcaagctgactggcatgccagaccttacactttccttcatgaaccctaggttgttggatgatgtcagcttccatccttgtgttcgtttcaaacgctgggaatctgagcgcatcctctccttcatccctcctgatggaaacttccgcctgctgtcttaccatgtcagtgcacagaatctggttgcaatcccagtgtatgtcaaacataacatcagtttccgggacagtagttcccttggacgctttgaaataacggtgggacccaagcagacgatggggaagaccattgagggagtgactgtcaccagccagatgcccaagggggtcctgaacatgagccttactccatcacaggggacacacacattcgacccagtcacaaagatgctgtcttgggatgtaggaaaaataaatccacaaaagctaccaagtttgaaggggaccatgagtcttcaggctggagcttccaaaccagatgaaaaccccacaattaacctgcagtttaagatccagcagctggccatttctggactcaaggtgaatcgtctggatatgtatggagaaaagtacaaaccctttaagggcataaaatacatgaccaaagctgggaagttccaagttcgaacctgaagggagcatttgctgagggaatagtcttgcacattttttcatttcttacttgtctaaaagtnnnnnnnnntatcagcctgtctcctaatcagtcccctcctggacccacccgctcccttttttccttagccttcagtgccatggaactaatcagggaggaaaaggtcccagggagaactggacagaactgaaacacagcacacagttctcaaggacagtgtgtgatgggggta

SEQ ID NO: 228189 - DNA, 884 bp, Homo Sapiens
  misc_feature (282)..(314): n is a, c, g, or t
ttggcttccttaccagaaaagcctcagccttcctctggaagcatcccccgttctgggcaagggggaagggctcctttaaggggtgtgctttcccagtggggagcagtctggccctgccccctactaaagcctctgctctcagcactttcccccaagtccttgtaacttgcttgaaggtgggttctggctgccagccagtccctggacaaactctcctgccccttttaaatttcactcattttgtataaacccagcaggctggtgtttacttagccctgtagnnnnnnnnnnnnnnnnnnnnnnnnnnnnnnnnngagttcacggttcaatattgcctcctcgccctggtgaggggaggtgctgcttttctgccccacctgccggctggttccagcagcgctggggcccagctggggggccgggatgggggcttctctctctgggaggggtgcaggtgccctccccaggctgggagggttccttccctagctccccatctgcccccgctggtgagagttgggcttcttggtcttggaactccctggcattgggaacagagcatttccagcatttgttgttgttgttttactcacctaacccttagaaaatgaatgttagaaggtgcctgccgaggcgggacagagtgtttgctcgcgctggagaaggctctgctcagccctgagagtcccttcctgccccaccgatactggcactttaaaaaggaagctgaccgcacagtgtccagacgaattggcccccagaagatggggagttctgtcctgcccttctgtgtctgcgtgacctcacccagcctaggagggaggtgcattcagggtagatttgcctctcattcaaagttctggggctttgggcggaaaacagcc

SEQ ID NO: 228190 - DNA, 976 bp, Homo Sapiens
ttgggtttccggaagccggtagccgcctcagtcgtcagaccggtgctagcgacacgggagtggcaaacgcatcctcttgccgttcccggtgtttgggccttgcctgtgacggtgggaaaagaaaatggccttgctgtgctacaaccggggctgcggtcagcgcttcgatcctgagaccaattccgacgatgcttgcacataccacccaggtgttccggtctttcacgatgcattaaagggttggtcttgctgtaagagaagaacaactgatttttctgatttcttaagcattgtaggctgtacaaaaggtagacataatagtgagaagccacctgagccagtcaaacctgaagtcaagactactgagaagaaggagctatgtgaattaaaacccaaatttcaggaacacatcattcaagcccctaagccagtagaagcaataaaaagaccaagcccagatgaaccaatgacaaatttggaattaaaaatatctgcctccctaaaacaagcacttgataaacttaaactgtcatcagggaatgaagaaaataagaaagaagaagacaatgatgaaattaagattgggacctcatgtaagaatggagggtgttcaaagacataccagggtctagagagtctagaagaagtctgtgtatatcattctggagtacctattttccatgaggggatgaaatactggagctgttgtagaagaaaaacttctgattttaatacattcttagcccaagagggctgtacaaaagggaaacacatgtggactaaaaaagatgctgggaaaaaagttgttccatgtagacatgactggcatcagactggaggtgaagttaccatttcagtatatgctaaaaactcacttccagaacttagccgagtagaagcaaatagcacattgttaaatgtgcatatttgtatttgaaggagagaaggaatttgatcaaaatgtgaaattatgggg

SEQ ID NO: 228191 - DNA, 814 bp, Homo Sapiens
ttggcggagcgtgccctcgccgctgagctcccctgaacagcagctgcagcagccatggccccgccctgggtgcccgccatgggcttcacgctggcgcccagcctggggtgcttcgtgggctcccgctttgtccacggcgagggtctccgctggtacgccggcctgcagaagccctcgtggcacccgccccactgggtgctgggccctgtctggggcacgctctactcagccatggggtacggctcctacctggtctggaaagagctgggaggcttcacagagaaggctgtggttcccctgggcctctacactgggcagctggccctgaactgggcatggccccccatcttctttggtgcccgacaaatgggctgggccttggtggatctcctgctggtcagtggggcggcggcagccactaccgtggcctggtaccaggtgagcccgctggccgcccgcctgctctacccctacctggcctggctggccttcgcgaccacactcaactactgcgtatggcgggacaaccatggctggcgtgggggacggcggctgccagagtgagtgcccggcccaccagggactgcagctgcaccagcaggtgccatcacgcttgtgatgtggtggccgtcacgctttcatgaccactgggcctgctagtctgtcagggccttggcccaggggtcagcagagcttcagaggtggccccacctgagcccccacccgggagcagtgtcctgtgctttctgcatgcttagagcatgttcttggaacatggaattttataagctgaataaagtttttgacttccttt

SEQ ID NO: 228192 - DNA, 1100 bp, Homo Sapiens
  misc_feature (291)..(340): n is a, c, g, or t
ttgggaaattgacaaaagagttcaatatatgattgaagtgatgtttgctgtacggaaagatggattcaaggaccaccccattatcctagaaggtcttgatttggtggaagaagatgatcaattcactcatatgctccctctggaggatgactataatccagaagatgttcttaatgttttcaagatggatcctaattttatggagaatgaagagaagtacaaagctattaagaaagaaattcttgatgagggagatactgactcgaacacagaccaggatgctgggagtannnnnnnnnnnnnnnnnnnnnnnnnnnnnnnnnnnnnnnnnnnnnnnnnnggacaaaaagtaactattcatgacaaaacagaaattaacctggtctcatttcgtcgtacaatttatcttgctattcagtcaagtttagattttgaagaatgtgctcacaaattgctgaaaatggagtttcctgaaagccaaacaaaagaactctgcaacatgatacttgattgctgtgcccaacagaggacatacgaaaaattttttggcttattagctgggcgattttgcatgctaaagaaagagtacatggaatcctttgaaggtatattcaaagaacagtatgataccatccatcgcttggaaacaaacaagttgcgaaatgttgctaagatgtttgctcaccttttatacactgattcacttccatggagtgttcttgaatgtataaaactgagtgaagaaaccactacatcatccagtagaatttttgtcaaaatatttttccaggaactgtgtgaatacatgggtcttcctaaacttaatgcaagattaaaggatgaaactctgcagccattctttgaaggattattaccccgagataatccaagaaacactcggtttgccatcaacttctttacttctataggtcttggaggtttaacggatgaactgcgggagcatctcaaaaatacaccaaaggtcattgtggcgcagaaaccagatgttgagcaaaataaatcctccccatcctcttcctcttcagcgtcctcctcttcagagtctgactcatccgactctgattctgacagcagtgata

SEQ ID NO: 228193 - DNA, 1143 bp, Homo Sapiens
ttggagcaagcgtctgccgcggtggccgggtgccgatttgacaagatcaaagctgcaggaaaatggacagtgaggttcagagagatggaaggatcttggatttgattgatgatgcttggcgagaagacaagctgccttatgaggatgtcgcaataccactgaatgagcttcctgaacctgaacaagacaatggtggcaccacagaatctgtcaaagaacaagaaatgaagtggacagacttagccttacagtacctccatgagaatgttccccccattggaaactgacgcttggctcctttcttgtggatggattttctcaaagtacacagataaagcatggtttgtttcagtctccaaattcaaacctttgagtaataaatcagcactcaaaaatgtacacccatttagtttgtggtagcaaagtgcaatgcgaaattgaatgagaaactgagatttctcagtaatggtgaatatttcgctctttaaacctaaaactcttcattgagtagcttatatttgaacatgattggttaaacatttgcctctacctctgattttgctttgctgtcaaagtttaacaccttccaactacttatgtgtgtcctgtaacacaggtgattgaacgtatgagagggaaaggcaaagaaaaaggaagccagacactaggagaattattaacttctcatacttccccacattgagaagcattcggagtgtatttagcctgtagatgttgtgatatgcaaatatcccattccctggttactggcattcctaagattcttcatggtattttcaaactttggataaatttacagattagaaagatatctgacagttaatctctgttctccttacaaattccttttgtgctgctggaaaggatctttggctaggtggatgactagttttattcaaagccttttctcaaagccctttcagttacaaccaccccactatggaatcagtatttagttatacatttgtataagaacctgtattttgaaaaacacattcatgtatatttattcctggaattatttgcctgttaaacagtgtctttcatgttctctcccccgattgtaaactctgtaagaagctgcttgtatctgtatcccctgttgaaactttgaaaaccctg

SEQ ID NO: 228194 - DNA, 902 bp, Homo Sapiens
  misc_feature (775)..(800): n is a, c, g, or t
tttgtacaaaaaagttgggccacttgtccccaaaaattttgattctcaacatgtccgagactgctcctgccgctcccgctgccgcgcctcctgcggagaaggcccctgtaaagaagaaggcggccaaaaaggctgggggtacgcctcgtaaggcgtctggtcccccggtgtcagagctcatcaccaaggctgtggccgcctctaaagagcgtagcggagtttctctggctgctctgaaaaaagcgttggctgccgccggctatgatgtggagaaaaacaacagccgtatcaaacttggtctcaagagcctggtgagcaagggcactctggtgcaaacgaaaggcaccggtgcttctggctcctttaaactcaacaagaaggcagcctccggggaagccaagcccaaggttaaaaaggcgggcggaaccaaacctaagaagccagttggggcagccaagaagcccaagaaggcggctggcggcgcaactccgaagaagagcgctaagaaaacaccgaagaaagcgaagaagccggccgcggccactgtaaccaagaaagtggctaagagcccaaagaaggccaaggttgcgaagcccaagaaagctgccaaaagtgctgctaaggctgtgaagcccaaggccgctaagcccaaggttgtcaagcctaagaaggcggcgcccaagaaaaaataggcgaacgcctacttctaaaacccaaaaggctcttttctgagccaccactgatctctataaaagagctggataatttctttctnnnnnnnnnnnnnnnnnnnnnnnnnncccccctctctctcttgaagatggtgttattaaaaaagaattgcttatccatttggttgcaccgaacaggtccctatcagtccaaaataaatactttatttg

SEQ ID NO: 228195 - DNA, 614 bp, Homo Sapiens; identical to SEQ ID NO: 194656

SEQ ID NO: 228196 - DNA, 708 bp, Homo Sapiens
ttggctgggccatggagactgtggcacagtagactgtagtgtgaggctcgcgggggcagtggccatggaggccgtgctgaacgagctggtgtctgtggaggacctgctgaagtttgaaaagaaatttcagtctgagaaggcagcaggctcggtgtccaagagcacgcagtttgagtacgcctggtgcctggtgcggagcaagtacaatgatgacatccgtaaaggcatcgtgctgctcgaggagctgctgcccaaagggagcaaggaggaacagcgggattacgtcttctacctggccgtggggaactaccggctcaaggaatacgagaaggccttaaagtacgtccgcgggttgctgcagacagagccccagaacaaccaggccaaggaactggagcggctcattgacaaggccatgaagaaagatggactcgtgggcatggccatcgtgggaggcatggccctgggtgtggcgggactggccggactcatcggacttgctgtgtccaagtccaaatcctgaaggagacgcgggagcccacggagaacgctccaggagggcctgtccatcctcgctgtcctttccctgttctccccctgccccccgtctctatcctctgtggccttcagctaatttctgctcccctgagattcgtccttcagccccatcatgtgctttgggatgagtgtaaataaaacggggctgtg

SEQ ID NO: 228197 - DNA, 585 bp, Homo Sapiens
aggctgttgtcccccaaaagatctcgtgtttcccctcctgagcgggtggaggaggcccaagcggtgctgggcgcgctcccccttccttcccctccggcgtcctctcccggccctctcgcgctgcactgtctctccgacgcaagactgtcccggcccggatatggctcgtggacagcagaaaattcagtctcagcagaaaaatgccaaaaagcaagctggacaaaagaagaaacaaggacatgaccaaaaggctgctgccaaagctgccttaatatatacctgcactgtctgtaggacacaaatgccagaccctaagaccttcaagcagcactttgagagcaagcatcctaagactccacttcctccagaattagctgatgttcaggcataaggttgtttacaggtgaattcatgacacctttgactcttctactgtctcagaccttaggtaacatacctgcagctgcttttctaacaaactgttgatcaacaaaaataaaggggctacagaaacactcatttttatgctgttccctcttgggcttcacgcaaagacaattctgtgtaaatgtacagttgactctg

SEQ ID NO: 228198 - DNA, 973 bp, Homo Sapiens
cagcagcagcagggggaggttcagcgggcgcgctcaccgcaacaggtggaaggtgagccagtacatgagcataggttgcgccgccgccaccgccatggtcaggtacatgcgcagctggtccgggccccacgcaccgggaccccctcagctgctgcgtctgccaagatcttcagccgcagcgtccggatcatgaacacaaagatggctacgcagcaccagcccagcaccaggtagtagccaatcttcccgaagagcaggcccatgaggaccccgccaatcatcccgacatatttgtagcccaagaaggccaccaggtcgatggtggtgaggtcggtgttgacagtgaccagatagaggctgagcaggatggccagcacctccagggtcagccaggccagggctgagctcgcttgcagccccaggaggtctggggagaacctatcctgggtccccagcgcaagaccagccaccaaaacgtaggtgatgaaagccattgctggaatgtagaggtccggggcattgacgtcaaagcggggggccaccggggtgtcctgttggtactgcacttcccagtcctggtgtaggtaggggaagaacagcaggcccagctttctgcccacatacatggtgtccacagcaaagtaatacttgagcttggtgatggggatgaagcggtcgatgttcttatccaccagctccttgccctgcgcggccaggctgctcccataggccatggccatgttggacaccgggtcagccaggaaggctgcatggggcgtgggagaggctgcaggataactcaggccaccaggtgcccgctgggccccatagccccggctctgggctgaacttgtgtcatcgaaaagctggtgggggtcggccatgcccggctgggacacagggatcctccgcttcgaggccgaacctggcatcccagcgctgtgcacacctcagggttccagatccttgccaa

SEQ ID NO: 228199 - DNA, 954 bp, Homo Sapiens
ttgggtcagagccgtcgtggctgggttccattctcggcggtggtacctgctcccggtggccctgaggacgtgtgggccaggggcggccccgaaattaggaagcggagggggagcagtctgcaggtctgcggggctaagtgtcgcggcggcgcacctcgcgtcaagaatccggaggaggagactgcaaggataggcccaggagtaatggagtccaaagaggaactagcggcaaacaatctcaacggggaaaatgcccaacaagaaaacgaaggaggggagcaggcccccacgcagaatgaagaagaatcccgccatttgggagggggtgaaggccagaagcctggaggaaatatcaggcgggggcgagttaggcgacttgtccctaattttcgatgggccatacctaataggcatattgagcacaatgaagcgagagatgatgtagaaaggtttgtagggcagatgatggaaatcaagagaaagactagggaacagcagatgaggcactatatgcgcttccaaactcctgaacctgacaaccattatgacttttgcctcataccttgaatcctaaaagttttcgctgaggttaatgtgaacactgctttacaagcttgtatttttgtgatttactttttctgtaagccttttggggtttacacttaccagtttctaatggaaattagaattctaattgaatattgttttgtctcagcctaaaagttacggtcagcatggcaattcacctattttaggaaaaatactcttttcataatatgaaatgcataaagcagttcaaaaagcagtctgtattccatcatcttcctttttcattccagtccttatttttgtaagtattacttttcctcctccggctacctggactcaaaatctcagttgtctttgacagtttttttcttgtccctgaccaaaaaagaatgatcatacccagaa

SEQ ID NO: 228200 - DNA, 838 bp, Homo Sapiens
ctttgtacaaaaaagttggcgttgctcttgtgttctcgcgagaggcgggaaagggcgcagggtttgaaacatggcggacgacgtagaccagcaacaaactaccaacactgtagaggagcccctggatcttatcaggctcagcctagatgagcgaatttatgtgaaaatgagaaatgaccgagagcttcgaggcagattacatgcttatgatcaacatttaaatatgatcttgggagatgtggaagaaactgtgactactatagaaattgatgaagaaacatatgaagagatatataaatcaacgaaacggaatattccaatgctctttgtccggggagatggcgttgtcctggttgcccctccactgagagttggctgaaacaaagaatttgtcctgtatggaaaacgggagactttgtacagtggcctctctaaaagtacaaaacattcataagagaaacctgcatacattttgatattaagaaataattccggggattcttccactcctgaaatgagttgatttgcagataactcacaacttcttaagctaaatggtattttcatttttctcaagctctccaataaatatgaccaccaagatgcagaactctttcaggacttcttttgctccattattctcacagatacttactgatttttcttttctttaaattggtgtttccttgtagatttttttaagtgcggtcttctgtcttgtgaattatttaaagtaagcatgtcttaccttcacttagcacacatttgcagtgcacctactgtgtttgagcaccaggtttgagtgctgggaaccagagttttatcaaaatgctttctg

SEQ ID NO: 228201 - DNA, 1372 bp, Homo Sapiens
ttggggtggtagtgctagagaccttggctggtcagagggctgtgaagacgcacggtgccaggaccaagtatctgaaagacctggtggaagaggaggctgaggaggctggagtggctttgagaagcacccagagcacactgcaagcaggtctggctgcagatgcctgggctgctcccatcgccatgcagatctacaagaagcacctggaccccaggcccgggccctgcccacctgagctgggcctgggcctgggccagctggcctgctgctgcctgcaccgccgggccaaaaggaggcctcctatgacccaggtgtacgagaggctagagaagctgcaggcagtggtggcgggggtgcccgggcatttggaggccgccagctgcatccccccttccccgcaggagaactcctacgtgtccagcactggcagagcccacagtggggctgctccatggcagcccctggcagcgccatcaggagccagtgcccaggcagcagagcagctgcagagaggccccaaccagcccgtggagagtgacgagagcctaggcggcctctctgctgccctgcgctcctggcacttgactccaagctgccctctggacccagcacccctcagggaggccggctgtcctcagggggacacggcaggagaatcgagctgggggagtggcccaggatcccggcccacagccgtggaaggactggcccttggcagctctgcatcatcgtcgtcagagccaccgcagattatcatcaaccctgcccgacagaagatggtccagaagctggccctgtacgaggatggggccctggacagcctgcagctgctgtcgtccagctccctcccaggcttgggcctggaacaggacaggcaggggcccgaagaaagtgatgaatttcagagctgatgtgttcacctgggcagatcccccaaatccggaagtcaaagttctcatggtcagaagttctcatggtgcacgagtcctcagcactctgccggcagtgggggtgggggcccatgcccgcgggggagagaaggaggtggccctgctgttctaggctctgtgggcataggcaggcagagtggaaccctgcctccatgccagcatctgggggcaaggaaggctggcatcatccagtgaggaggctggcgcatgttgggaggctgctggctgcacagacccgtgaggggaggagaggggctgctgtgcaggggtgtggagtagggagctggctcccctgagagccatgcagggcgtctgcagcccaggcctctggcagcagctctttgcccatctctttggacagtggccaccctgcacaatggggccgacgaggcctagggccctcctacctgcttacaatttgg

SEQ ID NO: 228202 - DNA, 468 bp, Homo Sapiens
ctttgtacaaaaaagttgggttgagtggaacaagaaggaagaacttgttgcagagcaggctctgaagcacctgaagcaatatgctcccctgctggccgtgttcagctcccaaggccagtcagagctgatcctcctccagaaggttcaggaatactgctacgacaacatccatttcatgaaagcctttcagaagattgtggttctcttttataaagctgatgttctgagcgaagaagcaatactgaaatggtataaggaagcacatgttgctaaaggcaaaagtgtttttcttgaccagatgaagaaatttgttgagtggttacaaaatgcagaagaagaatccgaatcggaaggtgaggaaaattaaatggctcaacaagcacaatacctaggttaccacacaccactttttgattgggaatgctgaaccatttgagaagagaaacttggcttctgttttcgcaaagg

SEQ ID NO: 228203 - DNA, 899 bp, Homo Sapiens; identical to SEQ ID NO: 194663

SEQ ID NO: 228204 - DNA, 1257 bp, Homo Sapiens
  misc_feature (161)..(179): n is a, c, g, or t
  misc_feature (263)..(272): n is a, c, g, or t
ttttaaaacaaagtgtttactttaggcaggattttttaaaataaagcagcaatacccacgcagataagacaaaaaagctaaaatatctcacacctcctaatcctggagtgcaatcttttttcctcatcgtttttgatagggccaaacttgtgtctacagtnnnnnnnnnnnnnnnnnnngaattactaactggcaaccattaagattctatacttaccatagtcctttaataggcaagctgataaaatagcccccagttattnnnnnnnnnntccaaggaaaacccccaataattagtcttatctccaaattgcatgaagtctcctatatctgaaacttaaaaatgattctaatgacttcctctatcagtaatgtgttatcactgaggtgggtgatggggagggaagagggaagaaatctgtcagtattaccttcgaactcagaaatgtttaaaaaaaagtctcaaacattttgatggttagacaaaacacctccactgttatgtatgggcttcctttttggaaacttatgaacttgctatgtgagcttctgcaaattggttcaaaagcacatttaaggagttgataatttaagactatatgaatcagaattttaacactccattaaaataagagctgaaatttttggcatttatcttcagaacacctaaaaaacagactgcaaattcaactcacattaatactaaatctctttaaaattaactatatcataaaagacaatgactttgtcactaaactaagttttaaaaaaggtggcattctcatgtttcagtcccatgctgccatttgagatgaaaaaaaaggcaactgtcagaattttaattgtgatcagtttggacggctggtacttggtactttctcacaatccaaattagtaaacttgaaaactcccaaccaatttttgcttttagaattaaattcttgttgagtttttcaatcttgtactacaaagccttatggattagattcatttctttctctcacaaggtcatcccaaccgggctccatttcagttgtggcaacccgaaacagggcttggagatgctcatctgttaatggctgactcaaagtgtgttggtttcgagtcaaatatgaaaaagccttttcacagatttggttactatcaaacaaggatgccaccttacaggcaacccctttgataattgggtaggattcagcagacaatccagcataaaactgccccaagtctttgattctgtattcattccaaagccaa

SEQ ID NO: 228205 - DNA, 952 bp, Homo Sapiens
aaattgatgagcaatgcttacttataaaagcccactttgtacaaaaaagttggcttccccttcccgggcctttcagcttggtctttccgggcctcgcttcccccagcccctgcgcccggcccgaacgagaggttccggagccccggcgcgggcgggttctggggtgtagacgctgctggccagcccgccccagccgaggttctcggcaccgccttgagagcttcagctgccccagggtgtgcagattagaatcccaagaaaatcaaatggcatccggggatttctgctcacctggagaagggatggaaatacttcaacaagtgtgcagcaaacaacttcctccttgtaacctgagtaaagaggacctgttacagaacccatacttcagcaagcttctcctgaatctctcacagcatgtggatgagagtggcttaagcctcaccctagcaaaggagcaggctcaggcatggaaggaagttcgactgcataagacaacatggttgaggtctgagattttacacagagtcattcaagagttgcttgtggactactatgtgaagatacaagacacaaatgtaacttctgaggacaaaaagtttcatgagacccttgaacagcggctgcttgtaactgaactgatgcggctcttaggtcctagccaggagagggagatacctccactgctggggctggagaaagcggaccttctggaactcatgccactctcagaggattttgtgtggatgagggctcggctacagcaagaagtagaggagcagctcaaaaagaaatgtttcactctgctctgctactatgatcccaattcagatgctgacagtgaaaccgtgaaggcagcaaaggtgtggaaactcgcagaggtcctggtgggtgagcagcagcagtgccaggatgccaagagccagcagaaggagcagatgttgctgctggagaa

SEQ ID NO: 228206 - DNA, 880 bp, Homo Sapiens
ttgggatgtgtgctgggccttggaggaagggggccgagaccgggccttacttctgtaacgatactgtgaggcatcggaaggccagcctgttgtgtccgttttgaagaatgaacggagaccagaattcagatgtttatgcccaagaaaagcaggatttcgttcagcacttctcccagatcgttagggtgctgactgaggatgagatggggcacccagagataggagatgctattgcccggctcaaggaggtcctggagtacaatgccattggaggcaagtataaccggggtttgacggtggtagtagcattccgggagctggtggagccaaggaaacaggatgctgatagtctccagcgggcctggactgtgggctggtgtgtggaactgctgcaagctttcttcctggtggcagatgacatcatggattcatcccttacccgccggggacagatctgctggtatcagaagccgggcgtgggtttggatgccatcaatgatgctaacctcctggaagcatgtatctaccgcctgctgaagctctattgccgggagcagccctattacctgaacctgatcgagctcttcctgcagagttcctatcagactgagattgggcagaccctggacctcctcacagccccccagggcaatgtggatcttgtcagattcactgaaaagaggtacaaatctattgtcaagtacaagacagctttctactccttctaccttcctatagctgcagccatgtacatggcaggaattgatggcgagaaggagcacgccaatgccaagaagatcctgctggagatgggggagttctttcagattcaggatgattaccttgacctctttggggaccccagtgtgaccggcaaaat

SEQ ID NO: 228207 - DNA, 903 bp, Homo Sapiens; identical to SEQ ID NO: 194667

SEQ ID NO: 228208 - DNA, 1083 bp, Homo Sapiens
  misc_feature (917)..(956): n is a, c, g, or t
aagtgctgggattacaggtgtgagccaccacacttggccagtatatcctcagtatgaagatatttttatcttcctgtgttctctggcttcagagtttcacctgcccacacagggtccgttgctggcaactggacttccccataagccttgggtatcctgtgatgggctgtgtctccctgaagattgtctggcttgcccacttctccgtgcatgactctgggtgtgagtctgtctaggaacaggagggaaagttggactcagacagaaatcagatgcttccatgtattcagggcgcgcattgtgagcagtggagtatgagccttgagggcctcatggttgcagggcaggcttccctgcagatgggtggcagcccctggtagaatgctggatttctctggaatctagaagtgccatattttagtggaaaggcatcagggctgtttgacagtgtgcgtctttccaatcccatgttcctccattcgtgtgtctgttataaaactgagtgaaggctgctatgacctgtgttcactctggttacagggaggtgcaaaccattctgtctcccagcctttcttctctctttgtgtgctcccagcacttccttcttttctaacatggcctggagagagtctctctctccttgtctctgtctcttaataatagtttttaacgtggacatctcttccttggtacagtggtttttaaatcctgagaagaaccaagtcaggttttttaaagcagactaaaagcatgaaattgctttcagaagaatgtatatcatcgggaaaagtttgggggcagagtgggggaatcaggctttattcaaaagaaacagttgaaaacatggactttttctacccaatgcccatttcacgactcctctgagactaattgggaaacggggaaattcttggaannnnnnnnnnnnnnnnnnnnnnnnnnnnnnnnnnnnnnnnaggtcacttattagtgaaacctcattttagatctgacattggtagatagatggatttaggcaaatatgatgcgtttgtggggaatccacgtggttgacgttagatctcccttctgcagactgttgcc

SEQ ID NO: 228209 - DNA, 1004 bp, Homo Sapiens
ttgggtcctccagagacagaggggccggaagttctcttcacggagccgcgcggctgcgggggcgcaaatagggtcagtgggccgcttggcggtgtcgttgcggtaccaggtccgcgtgaggggttcgggggttctgggcaggcacaatggcgtctcgagcaggcccgcgagcggccggcaccgacggcagcgactttcagcaccgggagcgcgtcgccatgcactaccagatgagtgtgaccctcaagtatgaaatcaagaagctgatctacgtacatctggtcatatggctgctgctggttgctaagatgagcgtgggacacctgaggctcttgtcacatgatcaggtggccatgccctatcagtgggaatacccgtatttgctgagcattttgccctctctcttgggccttctctcctttccccgcaacaacattagctacctggtgctctccatgatcagcatgggactcttttccatcgctccactcatttatggcagcatggagatgttccctgctgcacagcagctctaccgccatggcaaggcctaccgtttcctctttggtttttctgccgtttccatcatgtacctggtgttggtgttggcagtgcaagtgcatgcctggcagttgtactacagcaagaagctcctagactcttggttcaccagcacacaggagaaagaagcataaatgaagcctctttggggtgaagcctggacatcccatcgaatgaaaggacactagtacagcggttccaaaatcccttctggtgattttagcagctgtgatgttggtacctggtgcagaccaggccaaagttctggaaagctccttttgccatctgctgaggtggcaaaactataatttattcctggttggctagaactgggtgaccaacagctatgaaacaaattcagctgtttggaagtgaactttggaggtttttctttaagaatgaaccttcgtccttgcctctactcggtcattctccccatttcc

SEQ ID NO: 228210 - DNA, 1357 bp, Homo Sapiens
  misc_feature (411)..(445): n is a, c, g, or t
ttgggtttcttattgtatgtctatatatgtatgtggggaggacaggagtgaatgttcacacacttttcttgcgtactcaactaaattggagaatgtttctgaagaaaattggatgaaattagctgctgagattgagtttctgccttaaaatctgaaacaaaaaaagggacaaattgctggtagatctactgactgtagccatcaccagaacacttagtttcttcccagacatgaatttcctgacaggctctgagccagaaacacactgtgggcgtgcatctggttcagccctggatatgcctccactgtggagggaagcattggaactggagttgtgcacagcaccgcagctagtgggcctggctgggggtgcagaagggcagggtagttctttccatttccccttgcagnnnnnnnnnnnnnnnnnnnnnnnnnnnnnnnnnnngacggttgaagaatcaagctcataatatgatacacccagacagacccagaaatcttttgatttccccagcgagatacttaccactctctcttctctttcccatggttaaaacaggagttgtgttctctgtcgctgctaaattattcttcacttgagtgaagcaaatatttagcttccaaataaagtatattttgttctgaactggcagtttaagaggagataccgtagtctagattgtctttgaggtagaatatatgatggaccacatagtttaagattacaaggtactttccctcttctctcaggccatgcatttgaataaagtgcctcccttagcctgagctcctaaagacctcttgtacttggttgcaaactcagatctctagtctagtctagtctagtctagtcatgtgtgactgtgtactgagataccactagcccagtttgctgggtctctatgttttggaagttgggggtttaataatatttaatgtctttttaggatcataaacataaataggtttgttgatattcaggccttcagaatttaagggttttaaatatagcattcagattgtaattggtatgtttttgccatctggtccactcaattgtatatttttattttgcaaaacaacccaaaacttactttatgttgctttgttcagtaccttttgaattcccccagaagagttgttttcaaaacaaacattccagaatgaatgtcgctctttgaatggaacgtctttattgtgcttgaagtatttcttctctggttgtaattctaaattacagagtcatttgagctttctcccctcccgctagtatctttacaggagcagggaagagcagtagaggatgtataaatttgggcgaagttaaattacaatttatttgaggtattcctaaacc

SEQ ID NO: 228211 - DNA, 1376 bp, Homo Sapiens
ctttgtacaaaaaagttggcagacccatagcatgacaacgcgtccccgctcggcctggccaggccccgcgctatggagttcctctgggcccctctcttgggtctgtgctgcagtctggccgctgctgatcgccacaccgtcttctggaacagttcaaatcccaagttccggaatgaggactacaccatacatgtgcagctgaatgactacgtggacatcatctgtccgcactatgaagatcactctgtggcagacgctgccatggagcagtacatactgtacctggtggagcatgaggagtaccagctgtgccagccccagtccaaggaccaagtccgctggcagtgcaaccggcccagtgccaagcatggcccggagaagctgtctgagaagttccagcgcttcacacctttcaccctgggcaaggagttcaaagaaggacacagctactactacatctccaaacccatccaccagcatgaagaccgctgcttgaggttgaaggtgactgtcagtggcaaaatcactcacagtcctcaggcccatgtcaatccacaggagaagagacttgcagcagatgacccagaggtgcgggttctacatagcatcggtcacagtgctgccccacgcctcttcccacttgcctggactgtgctgctccttccacttctgctgctgcaaaccccgtgaaggtgtatgccacacctggccttaaagagggacaggctgaagagagggacaggcactccaaacctgtcttggggccactttcagagcccccagccctgggaaccactcccaccacaggcataagctatcacctagcagcctcaaaacgggtcagtattaaggttttcaaccggaaggaggccaaccagcccgacagtgccatccccaccttcacctcggagggatggagaaagaagtggagacagtcctttcccaccattcctgcctttaagccaaagaaacaagctgtgcaggcatggtcccttaaggcacagtgggagctgagctggaaggggccacgtggatgggcaaagcttgtcaaagatgccccctccaggagagagccaggatgcccagatgaactgactgaaggaaaagcaagaaacagtttcttgcttggaagccaggtacaggagaggcagcatgcttgggctgacccagcatctcccagcaagacctcatctgtggagctgccacagagaagtttgtagccaggtactgcattctctcccatcctggggcagcactccccagagctgtgccagcaggggggctgtgccaacctgttcttagagtgtagctgtaagggcagtgcccatgtgtacattctgccaagagtgtaacctaaatggcagggcccacgtgta

SEQ ID NO: 228212 - DNA, 1272 bp, Homo Sapiens
ttggcaaagctgttctgcagatcagaaagaaggggttcctggtcatacaccagtactaccaaggacagctttttttcctgcaagatctgttacctaaagcaataaaaaatggccagaggatcagtgtccgatgaggaaatgatggagctcagagaagcttttgccaaagttgatactgatggcaatggatacatcagcttcaatgagttgaatgacttgttcaaggctgcttgcttgcctttgcctgggtatagagtacgagaaattacagaaaacctgatggctacaggtgatctggaccaagatggaaggatcagctttgatgagtttatcaagattttccatggcctaaaaagcacagatgttgccaagacctttagaaaagcaatcaataagaaggaagggatttgtgcaatcggtggtacttcagagcagtctagcgttggcacccaacactcctattcagaggaagaaaagtatgcctttgtcaactggataaacaaagccctggaaaatgatcctgattgtcggcatgtcatcccaatgaacccaaacacgaatgatctctttaatgctgttggagatggcattgtcctttgtaaaatgatcaacctgtcagtgccagacacaattgatgaaagaacaatcaacaaaaagaagctaacccctttcaccattcaggaaaatctgaacttggctctgaactctgcctcagccatcgggtgccatgtggtcaacataggggctgaggacctgaaggaggggaagccttatctggtcctgggacttctgtggcaagtcatcaagattgggttgtttgctgacattgaactcagcagaaatgaagctctgattgctcttttgagagaaggtgagagcctggaggatttgatgaaactctcccctgaagagctcttgctgaggtgggctaattaccacctggaaaatgcaggctgcaacaaaattggcaacttcagtactgacatcaaggactcaaaagcttattaccacctgcttgagcaggtggctccaaaaggagatgaagaaggtgttcctgctgttgttattgacatgtcacgactgcgggagaaggatgacatccagagggcagaatgcatgctgcagcagcggagaggctgggctgccggcagtttgtcacagccacagatgttgtccgagggaaccccaagttgaacttggcttttattgccaacctctttaacagataccctgccctgcacaaaccagagaaccaggacattgactgggggg

SEQ ID NO: 228213 - DNA, 689 bp, Homo Sapiens
ctttgtacaaaaaagttggcgacgggtcctccaagagtttggggcgcggaccggagtaccttgcgtgcagttatgtcggcgtcggtagtgtctgtcatttcgcggttcttagaagagtacttgagctccactccgcagcgtctgaagttgctggacgcgtacctgctgtatatactgctgaccggggcgctgcagttcggttactgtctcctcgtggggaccttccccttcaactcttttctctcgggcttcatctcttgtgtggggagtttcatcctagcggtttgcctgagaatacagatcaacccacagaacaaagcggatttccaaggcatctccccagagcgagcctttgctgattttctctttgccagcaccatcctgcaccttgttgtcatgaactttgttggctgaatcattctcatttacttaattgaggagtaggagactaaaagaatgttcactctttgaatttcctggataagagttctggagatggcagcttattggacacatggattttcttcagatttgcacttactgctagctctgctttttatgcaggagaaaagcccagagttcactgtgtgtcagaacaactttctaacaaacatttattaatccagcctctgcctttcattaaatgtaaccttttgccttccaaattaaagaactccatgccactcctc

SEQ ID NO: 228214 - DNA, 1323 bp, Homo Sapiens
  misc_feature (843)..(862): n is a, c, g, or t
ttggcgcccagcgagccagagtggtggctggtcccgcgcgaaaattctgagctgtacacctctaggaaatgaaacactagttcagaagaagcctgtaaactctcttacaaatacatttggttattcaccatgaggttagcaaagcctaaagcgggtatttctcggagctcaagccaaggaaaggcctatgagaacaagcgcaaaacaggccggcagcggcagaagtggggcatgactattcgatttgactcaagcttcagtagactcagaagaagcttggatgacaaaccctataaatgtactgaatgtgaaaagagtttcggtcagagttcaactctttttcaacaccagaagatccatactggaaagaaatcccataaatgtgctgattgtgggaaaagtttctttcagagttctaatctcattcagcatcgacggatccatacgggggaaaagccctacaaatgtgatgagtgtggagaaagcttcaaacagagctcaaatctcattcagcaccagagaattcatactggagaaaaaccctatcagtgtgatgagtgtggccggtgtttcagccagagctcccaccttattcaacatcagagaacccacactggggagaaaccctaccagtgcagtgaatgtggcaaatgtttcagtcagagctctcatctgaggcagcacatgaaggtgcataaagaagagaagcctcgtaaaacccggggcaaaaatatcagggtgaagactcacttaccctcttggaaagctggtacaggaaggaagtctgtggctggtctccgttaagtatagggctttttgacagctttttgagacctcttaagnnnnnnnnnnnnnnnnnnnntgaaaggaatcttttttagaaatagagatgctttatagtagatcacttaaatactggatcttttgctagtgtgaaaacattgggaatttaatgacattattgagctgaaagaaattacatgagtccagctaccctcatttcttttttatgtgacatggagcacaaagaactgaaaatatgttttgagggagcatgacatccttgacctcatttgaaattacttccattttcaaaaaccatcatgttttgcagatacattttgagaaaaaccatcatgttttgaggatacatttgtgaaagtgcaggcatgccaatgactactcagttttagggacttttgtggaagaaaaaattaaaagggagaagaaatcaattccactacttttgaagttctgcaacagatgagattttgtttgtaaagttttgtagtatattaaccattggtttatcactctagattc

SEQ ID NO: 228215 - DNA, 869 bp, Homo Sapiens
agaatttcattacttgcaactgaatgtcttggccagtttctgccagagtgctgatccttcccatagcacaagaagctatgtgtgtagacattgtagtccttgccatagaggcgaaattgcagagcattatctggggactcgatagtctggttttggggtacaaaagtgacttgtgtagaggctcccccaaggtccaaagctccaaaggtttcctgattattggtttcatatgggactatgctgaaccaccttgttttctgactgaatttgcccagcagatagttgatagtaatccagccataggcaccttcctcttggccagtaatgatcctggcaccctggaagtcaaaggggtagttgctgaggctcctctccaccacatccagaaccctgtctgccaactcttcactttccatcctgagcaaccgcatgcctgccgtggctcccaggtaaacgggtgtctcttggtgctgggaccttggaatcacttccctagctctttccatgcaatcagtcaggtaaatgcctatttcatttactttctgaacaaattttgagattccaggacctttaaccctgcattcttctacttgatgcaccacgcctgtgtcattctccttttctgctggccacttatagatgtataaacttgtgtgagaagaacccgcatccagcacaatcccatacttaacgttttctggcaatgctttgttctgggtcaaccccacagcaagcaaagctatcacagctatgatagaggagaagccaaggatggctaggatattcttggagcaaaatgtcttcacgttagactcctttgtatcttccataagtagcagcttttgttttcctcctctttcctcgtcttt

SEQ ID NO: 228216 - DNA, 1353 bp, Homo Sapiens
  misc_feature (1154)..(1194): n is a, c, g, or t
  misc_feature (1267)..(1277): n is a, c, g, or t
ttggggaagaggcacgtgcgctgctgaatggagctggcgctggttgctacgagcaggtcctctttgggttcgctgtacacccggagcccgaggcttgcggcgaccacgagcaatggactcttgtggctgacttcactcaccatgctcacactgcctccttgtcagcagtagctgtaaatagtcgttttgtggtcactgggagcaaagatgaaacaattcacatttatgacatgaaaaagaagattgagcatggggctctagtgcatcacagtggtacaataacttgcctgaaattctatggcaacaggcatttaatcagtggagcggaagatggactcatctgtatctgggatgcaaagaaatgggaatgcctgaagtcaattaaagctcacaaaggacaggtgaccttcctttctattcacccatctggcaagttggccctgtcggttggtacagataaaactttaagaacgtggaatcttgtagaaggaagatcagcattcataaaaaatataaaacaaaatgctcacatagtagaatggtccccaagaggagagcagtatgtagttatcatacagaataaaatagacatctatcagcttgacactgcatccattagtggcaccatcacaaatgaaaagagaatttcctctgttaaatttctttcagagtctgtccttgcagtggctggagatgaagaagttataaggttttttgactgtgattcactagtgtgcctctgcgaatttaaagctcatgaaaacagggtaaaggacatgttcagttttgaaattccagagcatcatgttattgtttcagcatcgagtgatggtttcatcaaaatgtggaagcttaagcaggataagaaagttcccccatctttactctgtgaaataaacactaatgccaggctgacgtgtcttggagtgtggctagacaaagtggcagacatgaaagaaagccttcctccagctgcagagccttctcctgtaagtaaagaacagtccaaaattggcaaaaaggagcctggtgacacagtgcacaaagaagaaaagcggtcaaaacctaacacaaagaaacgcggtttaacaggtgacagtaagaaagcaacaaaagaaagtggcctgatatcaaccaagaagaggaaaatggtnnnnnnnnnnnnnnnnnnnnnnnnnnnnnnnnnnnnnnnnncaatgcagtgaatcacagatgtctcctgaagaactcttttagatgaaatcattctactcaaatgtaccttaannnnnnnnnnnccctgagtaaaagcaagaaatttcttcctttggaaaaaatatatatactaaaaaaccactttagatggtttttttt

SEQ ID NO: 228217 - DNA, 913 bp, Homo Sapiens
ttggtgatcgactacttgttgaacggatctttgctcaatacatggttcctcacaatttagaaactacagaacggatgaaatgcttatattacttgtatgccacactggatttaaatgctgtgaaagcattgaatgaaatgtggaaatgtcaatatctgctccgacatcaagtaaaggatttgcttgacttgattaagcaacccaaaacagatgccagtgtcaaggccatattttcaaaagtgatggttattacaagaaatttacctgatcctggtaaggctcaggatttcatgaagaaattcacacaggtgttagaagatgatgagaaaataagaaagcagttagaagtacttgttagtccaacatgctcctgcaagcaggctgaaggttgtgtgcgtgaaataactaagaagttgggcaaccccaaacagcctacaaatcctttcctggaaatgatcaagtttctcttggagaggatagcacctgtgcacatagataccgaatctatcagtgctcttattaaacaagtgaacaaatcaatagatggaacagcagatgatgaagatgagggtgttccaactgatcaagccatcagagcaggtcttgaactgcttaaggtactctcatttacacatcccatctcatttcattctgctgaaacatttgaatcattactggcttgtctgaaaatggatgatgaaaaagtagcagaagctgcactacaaattttcaaaaacacaggaagcaaaattgaagaggattttccacacatcagatcagccttgcttcctgttttacatcacaaatctaaaaaaggacccccccgtcaagccaaatatgccattcattgtatccatgcgatattttctagtaaagagacccagtttgcacagatatttgagcctctgcataa

SEQ ID NO: 228218 - DNA, 969 bp, Homo Sapiens
ttgggccttctcccgcaaaccctcggatggctcccctgatactaagccctccagactggcttctaagaccaagacttcctctcttgcccctgttgtgggcaccacaaccaccactccgtcgccctctgctatcaaggctgctgccaagagtgctgccctgcaggtgacaaagcagatcacgcaggaagaagacgacagtgatgaggaagtagcccccgaaaactttttctccctccctgaaaaggctgagccacctggagttgagccatacccttaccccatccccactgtccctgaagagctgcctccaggcacggaaccagagccggctttccaggacgatgcagccaatgccccccttgaattcaagatggcagcaggttcaagtggggccccttggatgcctaagcctggggacgactacagctacaatcagttttccacatatggcgatgccaatgccgctggtgcttattatcaggattattacagtggtggctactatcctgcacaggacccggccctggtccccccccaggaaattgccccagatgcctccttcatcgatgacgaagcatttaagcggctgcagggcaagaggaaccgagggagagaagaaatcaactttgtggagatcaaaggtgatgaccagctcagtggggcccagcaatggatgactaagtcattgacagaagagaaaaccatgaagtcattcagcaaaaagaaaggtgagcagccaacaggccagcagcggcggaaacaccagatcacatatcttattcatcaggccaaggagcgggagctggaactgaagaacacctggtcagagaacaagctcagccgccgtcagacccaagccaaatatggattctagggctctggaaactgattgctcccaagatctcctgccagcccagctggcctggcccccagcctcacctctgggaacccagctgcttctaagcccag

SEQ ID NO: 228219 - DNA, 1067 bp, Homo Sapiens
  misc_feature (756)..(768): n is a, c, g, or t
actttgtacaaaaaagttgggaaaacaattccccgaggccaatctaaagggaaaaaatcctacactacttttactacttttgattatttctcatttttgggaaaagaattcctaatgtgctactagaattccttcttcagttttaacgagtaattggataaaccctgagggaaaacggaggtagattcagcacctaacaatcctgtatgcttttgagatcacgtttagtgctatgtcctagtctagaatattttcatataccttgcagtaaaacgactttgtggcaggacagtctcttgaggggttttgtttctgtttcctaaatactcctaaataatatttctaatcagccattatgctggggcatctctgatcccagtaggtacctctgaatataccaggtgtctggagttagaagcccatagccctttcccagcctttttggtttttttaattgaacacatttcatctaagtaaagctcagttctttatcacaatttactgaccaaatacctagcaccagttcctgctgccactttttaaagtgccatatgactttctacgaacaggtaccttgctgtcttgacaaatcctaatgtcacgcctacagccccaacacaagctccagtcttcctcttcggcatgccctggaagcttcttggcctcagctccccttccccgctcagcaccctgttaggatcagtgtgtgtggatgggatagccctgggatggaaaggactagcctctactgatgcnnnnnnnnnnnnngcaacacaaacgtttccttcttatagcacatgcacttccttacaatgacatgatttgtattatcctcacatgtgtttactactgctggggccttccttcatcctctgagggctattttgtactttctgcagcaatcagcttaataacaacacttattgcacctgtctctctctgagaacacggtgtgtctcgacacgtaccacgtacgtggaaacacaagagcccaccacttgaatttctaagaccatttcattctgaaacttcttatcaattacctaaatctcaacgaaaaacattta

SEQ ID NO: 228220 - DNA, 1379 bp, Homo Sapiens
ttggctatggagtgttttgctcagttatattctactctgaaagaaggcaacccaccctgggaggtgacagaagcggttctctttatcatggctgctatagcaaagagtgttgatccggaaaacaatccaacacttgtggaagtcctagaaggagttgtccgcctcccggagaccgtacatacggctgtgcgatacaccagcattgaattggttggagagatgagtgaagtcgttgatcgaaatcctcagttccttgaccctgtgttgggctatttgatgaaaggcctgtgtgaaaagcccctggcttctgctgcagccaaagccattcataacatttgctctgtctgccgagatcacatggctcagcactttaatggactcctggagattgcccgctccctcgattccttcctgttgtctccagaagctgctgtgggcttgctaaaagggacagcacttgtcctagcccgattacctttggataagattaccgaatgtcttagtgaactatgttctgttcaggttatggcattgaaaaagctgttgtctcaagagcccagcaatggcatatcctcagatcccacagtgttcttagatcgccttgcagtgatatttaggcataccaatcccattgtggaaaatggacagactcatccgtgtcagaaagtcatacaggaaatatggccagttttatccgagactctaaataagcaccgagctgataatcggattgtagagcgttgttgcaggtgcctgcgctttgctgttcgctgtgtaggcaaaggatctgcagcactgctgcagccactagtcacacagatggtgaatgtgtaccacgtacatcagcattcctgcttcctgtaccttggcagtatccttgtggatgaatatggcatggaagaaggctgtcggcagggactgctagacatgctccaggcactgtgcatccccacctttcagctcctagaacagcagaatggtctccagaatcaccctgacactgtagatgacctgttccggctagccaccaggtttattcagcgtagccctgtcaccttgctgcggagccaagtggtcatccctatcttacagtgggccattgcctctactaccctggaccaccgggatgccaattgtagtgtcatgaggtttctacgagacctcattcatacaggggtagccaatgatcatgaaaaagactttgaattacggaaagaactgattggacaggtgatgaaccagcttggacagcagcttgtcagccagctgctgcacacctgctgcttttgcctccccccctataccctaccagatgtggctgaagtgctctgggagatcatgcaggttgacagaccgactttttgtcgatggttagaaaa

SEQ ID NO: 228221 - DNA, 1148 bp, Homo Sapiens
ttggcgctttcaacctcactgcctctgtcttcatcctctagtgtgtttgtacgctgtgatgaggagcgacttgatatcatgaaggttctaataactggtccagcggacaccccttatgcaaatggctgctttgagtttgatgtgtattttcctcaagattatcccagttcaccccctcttgtgaatctagagacaactggtggtcatagcgtgcgattcaatccaaacctttataatgatggcaaggtttgtttaagcatcttaaacacgtggcatggaagaccagaagagaagtggaatcctcagacctcaagctttttgcaagtgttggtgtctgtccagtcccttatattagtagctgagccttattttaatgaaccgggatatgaacggtctagaggcactcccagtggcacacagagttctcgagaatatgatggaaacattcgacaagcaacagttaagtgggcaatgctagaacaaatcagaaacccttcaccatgttttaaagaggtaatacacaaacatttttacttgaaaagagttgagataatggcccaatgtgaggagtggattgcggatatccagcagtacagcagtgataagcgggtaggcaggactatgtctcaccatgcagcagctctcaagcgtcacactgctcagctccgcgaagagttgctgaaacttccctgccctgaaggcttggatcctgacactgacgatgccccagaggtgtgcagagccacaacaggtgctgaggagactctaatgcatgatcaggttaaacccagcagcagcaaagaactccccagtgacttccagttatgagctgcattgatgtggacttcatagacacaaaggcttcgaagcacaagccaaatatgtcaatatttgtatgtaagaaactaattatgtaataggtaatgaaactgaaactatactatgcccttaaggagatcagtttaatttcaaggtgatcttttatttacctgtacaggagtgtaaacttttttgtgcttttatttttcatttgtgagaaccactgattggtatgttcaacaaatttgtgtatacaaaagaaatggataaatcactgctatatatggaaactaccttacgaaaagatgtttaactgaatgtttaattta

SEQ ID NO: 228222 - DNA, 1034 bp, Homo Sapiens
ttggcatttgactcggagaaaaatgagagtagacgaaatctggaacttccacgcctctcagaaacctctataaaggatcgaatggccaagtaccaggcagctgtgtccaaacaaagcagctcaaccaactatacaaatgagctgaaagccagtggtggcgaaatcaaaattcataaaatggagcaaaaggagaatgtgcccccaggtcctgaggtctgcatcacccatcaggaaggggaaaagatttctgcaaatgagaatagcctggcagtccgttccacccctgccgaagatgactcccgtgactcccaggttaagagtgaggttcaacagcctgtccatcccaagccactaagtccagattccagagcctccagtctttctgaaagttctcctcccaaagcaatgaagaagtttcaggcacctgcaagagagacctgcgtggaatgtcagaagacagtctatccaatggagcgtctcttggccaaccagcaggtgtttcacatcagctgcttccgttgctcctattgcaacaacaaactcagtctaggaacatatgcatctttacatggaagaatctattgtaagcctcacttcaatcaactctttaaatctaagggcaactatgatgaaggctttgggcacagaccacacaaggatctatgggcaagcaaaaatgaaaacgaagagattttggagagaccagcccagcttgcaaatgcaagggagacccctcacagcccaggggtagaagatgcccctattgctaaggtgggtgtcctggctgcaagtatggaagccaaggcctcctctcagcacgagaaggaagacaagccagctgaaaccaagaagctgaggatcgcctggccaccccccactgaacttggaagttcagaagtgccttggaggaagggatcaaatgtcaaagcccaaatggcctcctgaagacgaatcagcaagcccgaagttcctgaggatgtcgatctagatctgaagaagctaagacgatcttcttcactgaaaggaaagaagcc

SEQ ID NO: 228223 - DNA, 1045 bp, Homo Sapiens
ttggggcgaaaggagcccgggcctggaggtttgcgtaccggtcgcctggtcccggcaccagcgccgcccagtgtggtttcccataaggaagctcttcttcctgcttggcttccacctttaacccttccacctgggagcgtcctctaacacattcagactacaagtccagacccaggagagcaaggcccagaaagaggtcaaaatggggtttatattttcaaaatctatgaatgaaagcatgaaaaatcaaaaggagttcatgcttatgaatgctcgacttcagctggaaaggcagctcatcatgcagagtgaaatgagggaaagacaaatggccatgcagattgcgtggtctcgggaattcctcaaatattttggaactttttttggccttgcagccatctctttaacagctggagcgattaaaaaaaagaagccagccttcctggtcccgattgttccattaagctttatcctcacctaccagtatgacttgggctatggaacccttttagaaagaatgaaaggtgaagctgaggacatactggaaacagaaaagagtaaattgcagctgccaagaggaatgatcacttttgaaagcattgaaaaagccagaaaggaacagagtagattcttcatagacaaatgaaatcatgcttaccaatcaaatctcaaagcacagaattattgacttgaatcatggtttttacagttttttaaatgctcaagattttgatattatagattttattttaaaatattaaaatgcaagatagttttgagctattttaaaataaaatttataacattcaacacaaaatcatggaggtgctctaaataacttttagatttcctctctctgtgtgcattaccaatatctaagtgtaaaattaataaattgttttgaattcctggaagcaaatgcccagctgctctcatttctctgtcacacatactttccataccacattccatttccacagatgcttctgtattttggatttgtcaattgtgtcctgcccctacatgacagaaaacagtattgttt

SEQ ID NO: 228224 - DNA, 1257 bp, Homo Sapiens
ttggcttaatgatttgggaagttaggcaaatatgagatatgtagacatatctatgctgattgttgcttgagaaataattactaattctagacaaaactcaatcctgtatcttccatcatgaatcttaaaatcatttcacttcactcctaacatttcttacattgcagaactaatggtaaagtaaattttacggaaaaagttaagatagctttgggaacagagacctttccctaaattgattccatagcagatttgggggaattaacaaagaatttcagtctcatcaatcctttgaatccatcttcaaaacttctgcttttaataactttagaaaatttactaatctatagaactaattgagtaggatataggaaggatacaaggatataatgtcctttttataaaagtttagtatagcttctttacatgtatccacttgttccagaaaatgtgcattggttctgaatgtgaaaatatttaaagagagaaaggaacactcaagtaagtgtgggcttcagtgggaattatcacaaaacattggcaagtatttttatttaaattattttcaaatttgacttctacagccaagtggaattggtaggctgtagctgttacactgaaatttctagtctttgtaagtgcctcctgaaagtcatttaaaatggaaaaatatttcaatgagcttttccttttttcatatttatggacatgaatattttattggagatcattaactcctagaatttgagattatatttccatacaacattttataaagttatgttgaacttactacctgttatgtgcaggttattatgtaactattcacagattgcttcatatattgctttatcttcccatctaacttcttaaagttaaaatccggacacacatgttgattatctagaccagtcattctggaaattgtaacactcccacataaaccccaggagactttttcagaatgcaatgtttctaaatgtactgttactggcagtttactctccagcatataaggttgcattttaacttttagattatgaactgtgcaaactttacccaaaactatcttgcatgattccctcctaaatatattccttgattaagtaaatctggcaaatcactgtttgagctagttacataaaatttgttatcaagagaaggcttttctacaagtttccagattaacataaagaaaagagggaatcacagggcatttaagtgcaccttcccattactttccttaaatcacctcat

SEQ ID NO: 228225 - DNA, 1086 bp, Homo Sapiens
ttggtgaaattttgcggggctcaacggctcgcggagcggctacgcggagtgacatcgccggtgtttgcgggtggttgttgctctcggggccgtgtggagtaggtctggacctggactcacggctgcttggagcgtccgccatgaggagaaggaactcctggatatgatgattgctgaagaggaaagcctgaaggaaagactcatcaaaagcatatccgtctgtcagaaagagctgaacactctgtgcagcgagttacatgttgagccatttcaggaagaaggagagacgaccatcttgcaactagaaaaagatttgcgcacccaagtggaattgatgcgaaaacagaaaaaggagagaaaacaggaactgaagctacttcaagagcaagatcaagaactgtgcgaaattctttgtatgccccactatgatattgacagtgcctcagtgcccagcttagaagagctgaaccagttcaggcaacatgtgacaactttgagggaaacaaaggcttctaggcgtgaggagtttgtcagtataaagagacagatcatactgtgtatggaagaattagaccacaccccagacacaagctttgaaagagatgtggtgtgtgaagacgaagatgccttttgtttgtctttggagaatattgcaacactacaaaagttgctacggcagctggaaatgcagaaatcacaaaatgaagcagtgtgtgaggggctgcgtactcaaatccgagagctctgggacaggttgcaaatacctgaagaagaaagagaagctgtggccaccattatgtctgggtcaaaggccaaggtccggaaagcgctgcaattagaagtggatcggttggaagaactgaaaatgcaaaacatgaagaaagtgattgaggcaattcgagtggagctggttcagtactgggaccagtgcttttatagccaggagcagagacaagcttttgcccctttctgtgctgaggactacacagaaagtctgctccagctccacgatgctgagattgtgcggttaaaaaactactatgaagttcacaagactctttgaagtgtccagaagtgggaagaaac

SEQ ID NO: 228226 - DNA, 908 bp, Homo Sapiens; identical to SEQ ID NO: 194675

SEQ ID NO: 228227 - DNA, 903 bp, Homo Sapiens
cgggaactgcagctggtattggccctggagctggaattccaccctggataggagtctgcatcagaggaggaatgtccttcacaggtcttctagccaaatgctgaggctgaggagctggaggattctgctggttcagcagaacattaggtcctgggcagagcccagggccagggccagggccagggccagagacagacacagactgagatttgcctgggatcagtggtgtgacatgtatcttccgatgcagaattttcagagcaatctctggatccatgattctcatcactacttgtgcctgcaacagtgcataagccagttgtggattttgaagtaacatgtttcgagcttcctggtggctgttttggacacagagcttcatctgcttcatcagctcaaacatctgctccggggggagactggctactgctctggtaatcgattcaggggcatcttctggatcgatgggatccccatagggtgagtcaataatgggcgctgcaggcccaaggctctttaactcctccttattcttttcactggcagcattgtccacccgaagcgctctcccactgaactcccgcccattgaggttccgcatggcactaagcgcggtctcctggtcttggtattcgcagaagccatagcccttgggttttcccgtctctctatcgtataccagccggaaactgacaacagaaccaacctccgagaaaatgtcctttaactgctcctcagttgcctcatatggaatgttccccacgaacacggaacgcagtgatcgatccattgccgggtctctcaccgccaaactcgacatgattccggttgtgcagacagccgatagcggattcttcgaggcgtctgtcctcttgcgaccgacacttccgctgagcaacccaa

SEQ ID NO: 228228 - DNA, 911 bp, Homo Sapiens; identical to SEQ ID NO: 194676

SEQ ID NO: 228229 - DNA, 834 bp, Homo Sapiens
ttggggcctttttagatcccgcgatacccatcactttctccaacagattccggtttcatggatctggggtgtgacccatggtttatagtttttaaaatctctccatcagattttatatggagccagtttgataggtgaaagtggtattccatttttttaattataattttcttctgaaattgtttcaggcattcagatttgggagaagtagccccagaaataaaagcatcagagagacgaacagctgtggccattgcagatttggaatggagagaaatggaaggagatgattgcgagttccgttatggagatggtacaaatgaggctcaggacaatgattttccaacagtggagagaagcaggcttcaagaaatgctgtcacttttgggcctagagacgtaccaggtccagaaactcagcctccaggactctctgcagatcagttttgacagtatgaagaactgggcccctcaggttcccaaagacttgccctggaatttcctcaggaagttgcaggccctcaatgctgatgccaggaataccactatggtgctggacgtgctcccagacgccaggcctgtggagaaggagagccagatggaagaggagatcatctactgggacccagctgatgaccttgctgccgacatttattccttttctgagctgcccacccctgatacgccagtgaaccccttagaccttctctgtgccctgctgctctcctcagacagtttcctgcaacaagaaatagcgttgaaaatggccctctgccagtttgcactcacactcgtgttgcctgactcggagaaacactaccatacatttctgctg

SEQ ID NO: 228230 - DNA, 1068 bp, Homo Sapiens; identical to SEQ ID NO: 194677

SEQ ID NO: 228231 - DNA, 852 bp, Homo Sapiens
ttggcttcgtggtgctgaggagcggcctccctcagctggtgtcggagtgcgcggccctggaggagttcatccacgaggggtacctgatcggagaggagggctactgcctcacatcactgcagagtgccctgagctacgtggagctgctgccccggggaggcctggccaagtagtacagctagagcccagggtccctgcagggcctggcctcgcctcccagggctgtctctcctacacctggagccatgggatctactgaggaccatcctggagcctcacgctgctctgcacatggtgggggcttgtccactgtggtgtgctctccagctcttcaccttcctcacctcacatctgaccctggagcttggggttggcacctctgccccgacagaatggggctgaatcagctccaggaggaaccaggccctgctctcctgtgtaggcctcagagaggccaagaagggaagctttgggcttcggtgggtgcaggctcagcgatgaacatctggctggggcagctcctggggagcatcagggaagagggggccatgagccggccagcagtggagacggcagtccagtttctctcccctctgacccctagaaggggagttgtagccccatgaactagtttcttgtctgggtcaggaacaagggccggctggggcctggggtgcagctggtgtcagggtatgctgtttgctgatgggcagggacacccctgcagggtctcgggctctgagcccaggacattccctgccccttgctcaccttggctgtgggctgtgaacattccgggaccctggcatctatctagtccgtgcagccaagggtcagccctcttgactgtca

SEQ ID NO: 228232 - DNA, 1153 bp, Homo Sapiens; identical to SEQ ID NO: 194678

SEQ ID NO: 228233 - DNA, 380 bp, Homo Sapiens
ttgggatgaacacgactgcgagccgtcggaccctgagcaggagacgcgaaccaacatgctgctggagctcgcaaggtcacttttcaataggatggactttgaagacttggggttggtagtagattgggaccaccacctgcctccaccagctgccaagactgtggttgagaacctccccaggacagtcatcagaggctctcaggctgagctcaagtgccccgtgtgtcttttggaatttgaggaggaggagactgccattgagatgccttgccatcaccttttccattccagctgcattctgccctggctaagcattttaaattcctgtcccttgtgccgctatgagctgcccacctgctgacgacacttattgaggagca

SEQ ID NO: 228234 - DNA, 1021 bp, Homo Sapiens
ttggcgccattttggatggtgaaccctgaagtcggtgtctgctgcgttcacggcaggattcggttaggaggaacagcacagcatgctgggctctggatttaaagctgagcgcttaagagtgaatttgagattagtcataaatcgccttaaactattggagaaaaagaaaacggaactggcccagaaagcaaggaaggagattgctgactatctggctgctgggaaagatgaacgagctcggatccgtgtggagcacattatccgggaagactacctcgtggaggccatggagatcctggagctgtactgtgacctgctgctggctcggtttggccttatccagtctatgaaggaactagattctggtctggctgaatctgtgtctacattgatctgggctgctcctcgactccagtcagaagtggctgagttgaaaatagttgctgatcagctctgtgccaagtatagcaaggaatatggcaagctatgtaggaccaaccagattggaactgtgaatgacaggctaatgcacaagctgagtgtggaagccccacccaaaatcctggtggagagatacctgattgaaattgcaaagaattacaacgtaccctatgaacctgactctgtggtcatggcagaagctcctcctggggtagagacagatcttattgatgttggattcacagatgatgtgaagaaaggaggccctggaagaggagggagtggtggcttcacagcaccagttggtggacctgatggaacggtgccaatgcccatgcccatgccctgcctatgccatctgcaaatacgcctttctcatatccactgccaaagggaccatcagatttcaatggactgccaatggggacttatcaggcctttcccaatattcatccacctcagataccagcaactcccccatcgtatgaatctgtagatgacattaatgctgataagaatatctcttctgcacagattgttggtcctggacccaagccagaagcctctgcaaagcttcctt

SEQ ID NO: 228235 - DNA, 780 bp, Homo Sapiens
  misc_feature (334)..(388): n is a, c, g, or t
  misc_feature (655)..(666): n is a, c, g, or t
gccaactttgtacaaaaaagttgggatcttcatgcgaacttcagtgaagatttcatacattggcctcatgacccagagctccttggagacacatcactatgtggattgtggaggaaattccacagctatttaacaactgctattggttcttccacacagcgcctgtagaagagagcacagcatatgttcccaaggcctgagttctggacctacccccacgtggtgtaagcagaggaggaattggttcacttaactcccagcaaacatcctcctgccacttaggaggaaacacctccctatggtaccatttatgtttctcagaaccagcagaatnnnnnnnnnnnnnnnnnnnnnnnnnnnnnnnnnnnnnnnnnnnnnnnnnnnnnnnttaatacagatcttttcagctgttcttagggcattataaatggaaatcataacgtggttctaggttatcaaaccatggagtgatgtggagctaggattgtgagtgacctgcaggccattatcagtgcctcatctgtgcagaagtggcagcagagagggaccatccaaatacctaagagaaaacagacctagtcaggatatgaatttgtttcagctgttcccaaaggcctgggagctttttgaaaagaaagaaaaaagtgtgttggcnnnnnnnnnnnnagaaagttagaattgtttttaccaagagtctatgtggggcttgattcacccttcatccattggctggaacatggattggggatttgatagaaaaataaaccctgcttttgattc

SEQ ID NO: 228236 - DNA, 1165 bp, Homo Sapiens; identical to SEQ ID NO: 194682
  misc_feature (939)..(993): n is a, c, g, or t

SEQ ID NO: 228237 - DNA, 878 bp, Homo Sapiens; identical to SEQ ID NO: 194683

SEQ ID NO: 228238 - DNA, 382 bp, Homo Sapiens
agccaactttgtacaaaaaagttgggttcttgactccgctgctcgccatgtcttctcacaagactttcaggattaagcgattcctggccaagaaacaaaagcaaaatcgtcccattccccagtggattcggatgaaaactggaaataaaatcaggtacaactccaaaaggagacattggagaagaaccaagctgggtctataaggaattgcacatgagatggcacacatatttatgctgtctgaaggtcacgatcatgttaccatatcaagctgaaaatgtcaccactatctggagatttcgacgtgttttcctctctgaatctgttatgaacacgttggttggctggattcagtaataaatatgtaaggcctttcttttta

SEQ ID NO: 228239 - DNA, 490 bp, Homo Sapiens; identical to SEQ ID NO: 194687
  misc_feature (129)..(166): n is a, c, g, or t

SEQ ID NO: 228240 - DNA, 1155 bp, Homo Sapiens
ttggctaacatggcggcgccctgtgtgtcctacggcggagcagtttcgtaccggcttcttctctggggtaggggtagcctcgcccggaagcaaggcctctggaaaaccgcggcccctgagttgcaaacaaatgtcagatcccagcagattgaagagttcaacataggaaagagacatttagccaacatgatgggagaagatccagaaactttcactcaagaagatattgacagagctattgcttaccttttcccaagtggtttgtttgagaaacgagccaggccagtaatgaagcatcctgaacagatttttccaagacaaagagcaatccagtggggagaagatggccgtccatttcactatctcttctatactggcaaacagtcatactattcattaatgcatgatgtatatggaatgttactcaatttagaaaaacatcaaagtcacttgcaagccaaaagtctgcttccagaaaaaactgtaaccagagacgtgattggcagcagatggctgattaaggaggaactagaagaaatgttagtggaaaaactgtcagatctagattatatgcagttcattcggctgctagaaaagttattgacatcgcagtgtggtgctgctgaggaagaatttgtgcagaggtttcgaagaagtgtaactcttgaatcaaaaaaacagctgattgaacctgtacagtatgatgagcaaggaatggcctttagcaaaagcgaaggtaaaagaaagactgctaaagcagaagcaattgtttataaacatggaagtggaagaataaaagtaaatggaattgattaccagctttacttcccgatcacacaggacagagaacagctgatgttccctttccactttgttgaccggctgggaaagcacgacgtgacctgcacagtctcagggggcgggaggtcggcgcaggctggagcaatacgactggcaatggcaaaagccttgtgcagctttgtcaccgaggacgaggtcaagtggatgagacaagctggactacttactactgatccacgtgtgagggaacggaagaagccaggcccagagggagcccgcagaaagtttacgtggaagaacgctaagggtttgctcctaggaaaggagaggaagagctatatatatgtgccgggc

SEQ ID NO: 228241 - DNA, 936 bp, Homo Sapiens
ttggctagctgctggttttccacgctggttttagctcccggcgtctgcaaaatgaagattgaggaggtgaagagcactacgaagacgcagcgcatcgcctcccacagccacgtgaaagggctggggctggacgagagcggcttggccaagcaggcggcctcagggcttgtgggccaggagaacgcgcgagaggcatgtggcgtcatagtagaattaatcaaaagcaagaaaatggctggaagagctgtcttgttggcaggacctcctggaactggcaagacagctctggctctggctattgctcaggagctgggtagtaaggtccccttctgcccaatggtggggagtgaagtttactcaactgagatcaagaagacagaggtgctgatggagaacttccgcagggccattgggctgcgaataaaggagaccaaggaagtttatgaaggtgaagtcacagagctaactccgtgtgagacagagaatcccatgggaggatatggcaaaaccattagccatgtgatcataggactcaaaacagccaaaggaaccaaacagttgaaactggaccccagcatttttgaaagtttgcagaaagagcgagtagaagctggagatgtgatttacattgaagccaacagtggggccgtgaagaggcagggcaggtgtgatacctatgccacagaattcgaccttgaagctgaagagtatgtccccttgccaaaaggggatgtgcacaaaaagaaagaaatcatccaagatgtgaccttgcatgacttggatgtggctaatgcgcggccccaggggggacaagatatcctgtccatgatgggccagctaatgaagccaaagaagacagaaatcacagacaaacttcgaggggagattaataagtggtgaacagtacatcgaccagggcattgctgagctggtccc

SEQ ID NO: 228242 - DNA, 915 bp, Homo Sapiens
ttggctccgctcgctggagttccgcggtgtctttcccagtgctatctgcaggctggccagcttcctctgcgctccggaaagctgcggcccagcgcggactagtgaggacctccacagctcctgacattgccaggagtcctgtcggcgttttctcccagcctccgccatgccggcggtgctgggttttgaaggcagcgccaataagattggcgtgggcgtggtgcgggatggcaaggtgctggcgaacccgcggcggacttacgtcacgcctcctggcacaggattccttccaggtgatacagccaggcatcaccgagctgttatcctagacctgctgcaggaggcactaacagagtctggattaacctcccaggatatcgactgcattgcatacaccaagggccctggcatgggtgccccactggtttctgtggctgttgtggcccgtactgtggcccagctgtggaataagccattggtgggtgtgaaccactgtataggccacattgagatgggccgcctcatcactggagccaccagcccaaccgtgttgtatgtgagtggaggaaatacgcaggtgattgcatactcggaacatcgttaccgtatctttggggaaaccatcgatattgcagtgggtaattgtctggatcgttttgctcgagtgctgaagatttctaacgacccaagtccaggatacaacattgaacagatggcaaagcgaggcaagaagctggttgagctgccatacactgtaaaggggatggacgtctcattctcagggatcctgtctttcattgaggatgtagcccatcggatgctggccacaggcgagtgtactcctgaggatctgtgtttctccctgcaggaaactgtgtttgcaatgctggtagagatcacagagcgagccatggc

SEQ ID NO: 228243 - DNA, 621 bp, Homo Sapiens
gagcaatgctttttccataatgccaactttgtacaaaaaagttggcagacacactcctcttcctggtatctttcaaggcaatggacttccactggattgagaccatcctgagtgataagaagcgggtgcgaaagggtttctggaaacagcctcccctcatctgggatgtcaatcctaaacagattcggattctcaaccccttcttcgtggagattgcagctgacaaactgctgatcctgccaatgcaacagccacggaagattaatcagaagcccaccacgggcctgttggccatcacgctgggcctccacctctgtgacttggtgcacattgccggctttggctacccagacgcctacaacaagaagcagaccattcactactatgagcagatcacgctcaagtccatggcggggtcaggccataatgtctcccaagaggccctggccattaagcggatgctggagatgggagctatcaagaacctcacttccttctgacctgggccagagctgtatcctgtcggttgcctactctgctgtctgggtgacccccatgcgtggctgtgggggtggctggtgccagtatgacccactcggactcaccccctcttggggaggg

SEQ ID NO: 228244 - DNA, 921 bp, Homo Sapiens
  misc_feature (236)..(387): n is a, c, g, or t
gctttcctcctaaggtaggctatgtctggggggccatctcacttagaagtcacaacactcattggcagtgatcacatcatttcaatttgggcttcccaaagtatggtcacccagggtatgaaggtgagatcaatgctacctaccattttgtgtctttaaggggtctttagaaagggctaatcatctgtcactgctcactgagacatgtacattccagcatcatcacagagttatcnnnnnnnnnnnnnnnnnnnnnnnnnnnnnnnnnnnnnnnnnnnnnnnnnnnnnnnnnnnnnnnnnnnnnnnnnnnnnnnnnnnnnnnnnnnnnnnnnnnnnnnnnnnnnnnnnnnnnnnnnnnnnnnnnnnnnnnnnnnnnnnnnnnnnnnngcaaattaagttcttattaaaaactgccaatcattgacgatatataatgatgagatcctgaacaaaagaggcaaagaaatgctcctacttgaaaaatacacattccctatagactgcctcctgtttagtccaacttagatcactcagatccttcctgggatcaaatatatttttaaacctaagacaaagcgaagcaggtgtcacttgggtgatagggaaaaaagcttgtatttcctggttaatgtttagcttttgtaatgctatttaaacacacctaaggtgcctttccctcatctcaggtgctttctctgtaaagtttcactcccacctttcttttctctgcatggccgtccagtcttgcccatctacatccagagctgttaactagtagtgtcattacctgtgaaaaacatgtagaagcttccttgaaccacccagaaatccactcaaatttggggattgtcattccttttgtgaataattaatacaattcagttgttttttaaatattctaataaaaaaggaaattttctc

SEQ ID NO: 228245 - DNA, 1202 bp, Homo Sapiens
ttggataacaacaacaaagatggatctaatcataaagctgaaagtggagctctaatagaagctgcaaaatcaaagatacatcagtacaaagtacgagcttatatccaaatgaagtctctgaaagcatgtaaaagggaaatcaagtcagtcatgaatacagctggaaattccgcaccctctctctttcttaaaagcaattttgagtacttaagaggtaattatcgaaaagccgtgaagctattaaatagttcaaacattgctgagcatccaggattcatgaaaacaggtgaatgcttgagatgcatgttctggaataaccttggttgcatccattttgccatgagcaagcacaatttgggaatattctactttaaaaaggctctgcaagagaatgacaatgtctgtgcacagctcagtgcaggtagcactgatccaggtaaaaaattttcaggaagacccatgtgtacgttactaaccaataagagatatgagttgctgtataactgtggaattcagcttcttcacattggaaggcctcttgctgccttcgaatgtctgattgaagctgttcaggtttatcatgcaaatcctcgcctctggctacggctggctgaatgctgcattgctgccaataaggggacttctgaacaagaaactaaaggccttcccagcaaaaaaggaattgtacagtctattgttggtcaaggctatcatcgtaaaatagttttggcatcacagtctatacagaatactgtttataatgatgggcagtcttcggccattcctgtagccagtatggagtttgcagccatatgtctcagaaatgccttgttgctgctacctgaagaacagcaagatccaaagcaggaaaatggggctaaaaatagtaatcaattaggtgggaacacagagagcagcgaaagcagtgaaacttgcaggtattctaatccttgtgacctcctttggcaaaatcctttcaggacttctttagtaaaccctttgttctttaagtaaattcctaaaatcttcaacctgaatttctgaaattctgttttgcgtaacaagaaaggaaagtatttatgtttctgagtctttctggaagagagaaataaggtgaaggctaagttaggagagatccttgaaaaagaaaagtagaaagtagcagctttggccggacgcagtggctcatgcctgcctgtaaa

SEQ ID NO: 228246 - DNA, 313 bp, Homo Sapiens
ttgcacaaattgattgagcaatgcttttttataatgccaactttgtacaaaaaagttgaaatggcggatgtgcaggtcctggtgcttgatggtcgaggccatctcctgggccgcctggcggccatcgtggctaaacaagtactgctgggccggaaggtggtggtcgtacgctgtgaaggcatcaacatttctggcaatttctacagaaacaagttgaagtacctggctttcctccgcaagcggatgaacaccaacccttcccgaggcccctaccacttccggggccccagccgcatcttctggcggaccgtgc

SEQ ID NO: 228247 - DNA, 1160 bp, Homo Sapiens; identical to SEQ ID NO: 194695

SEQ ID NO: 228248 - DNA, 895 bp, Homo Sapiens
gtacaaaaaagttgggggaacacgctgcggggctcccgggcctgagccaggtctgttctccacgcaggtgttccgcgcgccccgttcagccatgtcgtccggcatccatgtagcgctggtgactggaggcaacaagggcatcggcttggccatcgtgcgcgacctgtgccggctgttctcgggggacgtggtgctcacggcgcgggacgtgacgcggggccaggcggccgtacagcagctgcaggcggagggcctgagcccgcgcttccaccagctggacatcgacgatctgcagagcatccgcgccctgcgcgacttcctgcgcaaggagtacgggggcctggacgtgctggtcaacaacgcgggcatcgccttcaaggttgctgatcccacaccctttcatattcaagctgaagtgacgatgaaaacaaatttctttggtacccgagatgtgtgcacagaattactccctctaataaaaccccaagggagagtggtgaacgtatctagcatcatgagcgtcagagcccttaaaagctgcagcccagagctgcagcagaagttccgcagtgagaccatcactgaggaggagctggtggggctcatgaacaagtttgtggaggatacaaagaagggagtgcaccagaaggagggctggcccagcagcgcatacggggtgacgaagattggcgtcaccgttctgtccaggatccacgccaggaaactgagtgagcagaggaaaggggacaagatcctcctgaatgcctgctgcccagggtgggtgagaactgacatggcgggacccaaggccaccaagagcccagaagacggtgcagagacccctgtgtacttggccccttttgcccccagatgctgaaggtccccatggacattt

SEQ ID NO: 228249 - DNA, 556 bp, Homo Sapiens; identical to SEQ ID NO: 194696

SEQ ID NO: 228250 - DNA, 799 bp, Homo Sapiens
gcactatgaggtttaatgggaaacattaaaaatggttaactcataatgaattataaaactttgatagttacattgtactatcatttatgaggcatttatttttcattatttacacctgaaagaaacttcatacttgtgtgttctgttccccatctcagagcaagattatgaagagaaggtctaaactacttatataaatcaaaacccaactgggctagaaatgaagtataaagagaactaaatctatacacagctgtgccataagagcattaggtggttttagctcttatctggggtatgaaagcaatttagctcatctcacagaaacaaaagcaggtgctgaatcatgaaaacctcaattatttttagcatgcctcttaatttttctttcccctggtttcttgtcgtctgtgcttgattcttgaacaggtaaccacttgagaggatgccggcgatagatgggccatggaggaagtgtcagcaaacatgaaaaagcaaatccggccataactatatagacagtccacccgaactgttcagccacgtacccgtagataaatccaactattgcagaaaaaagaataattccctgaaacatctgttcagctagcttctggcccttgtaatccatctgcgtgggcagcgagctcagatgctccagcatggctggctgaggaggcgggcagctgagcgcgggtggcaggctgcgaggcgagggcgaccgagacttaaggaccgtgaggggtaaggtctggcactgcgcgtcagtagccgggccttctaagcccgggagagccaa

SEQ ID NO: 228251 - DNA, 775 bp, Homo Sapiens; identical to SEQ ID NO: 194698

SEQ ID NO: 228252 - DNA, 917 bp, Homo Sapiens
acaaaaaagttggcttagcaagatggcggctccctgggcgtccctgcgcctggtcgcccccatgtggaatgggcgtatcaggggcatccatcgcctgggtgcggcagtggccccagagggcagtcagaagaagaaaaggacaatactccagttcctgaccaactatttctacgatgtggaggctctgagggattacttgctccaaagggagatgtacaaggtgcatgagaaaaatcgatcttacacctggctggagaagcaacatggtccatacggcgcaggtgcctttttcatcctgaagcagggaggcgcagtcaagtttcgagacaaggagtggatcaggccagataagtatggccatttctctcaggagttctggaatttctgtgaagtgcctgtcgaagctgtggatgccggtgactgtgacatcaactacgagggcctggataacctcctccgcctgaaggagctccagtccttgtcgctgcagcgctgctcccacgtggacgactggtgtctcagccgcctctacccactggccgactcgttgcaggagctctcgctggccggttgcccccgcatctccgaacggggcctcgcctgcctccaccacctccagaacctccgcaggctggacatctcggacctccctgccgtgtccaaccctggcctcactcagatattggtggaggagatgctgcccaattgcgaggttgtgggagtcgactgggctgagggcctgaagtcagggccggagagcagcctcgggacacagccagccctgtccctgcctagcctttagccctgtccccactcacgtggcttctcagcgggctgcatggaatgtctggtagctcaccacacttctggcttccatttgtcttcactcaacgtcaggtgggggagtggtgctgggc

SEQ ID NO: 228253 - DNA, 1329 bp, Homo Sapiens
  misc_feature (1011)..(1063): n is a, c, g, or t
ttggctctgtcctcagcaacactccacagcagaaaggggtagcaggtaccccttcttatcagcggtaaaaatgcatttacaacctttcatttaaccgaaaaacacagaccgctttaacctctttatttctgtcccccactgcatgaacatctatacaattttaaaaatacttcctcataggatgctttggcccttcatctatttaatcatagctacatacctattttttataagtagcagtacacattcaaaggggtattcctagctcaatgcttggtgttctagttcaacttttatcctgcagcaagtaagcctagataactctacacgatttggctgagtggctttgtgtgaccgtggccccaggccaaggggatcatggccctggctggctttcccgggggtctcagctcctgttgtcagtgataggcggctcaaaggagcatcagtttcttttgatccaagaagtgcttactgaatgcctgccctgtgcgtggccttaaacattgagaagtgctgctctccgtttatttgggatttgattctcattttaccatagcttatattctcaatttcaatgccagtctcagaactcttgttttctgtgttctgttctcaaaattacattgtccctcatgtcatttcaaactgttttccaaagggatttgagcatatacaactacaaatccaagcagattgactctcaaaaataatcttaaatactgcaaatagtcccaactaagattcagtcagtatgtttgttttgcaagtttgggagagtaagttggctttgagtcacacatcgaagctttaagaggtgagacgctggcttcattctggactagacaggaacttggcctcagcgtgagatcctgccatgcagtgttgcggtggcactgaagaagtgtgaatgtgaaggcggcgtcggcgcggggccagagcaccactctgctgccccaccacgcggcctgtgaggagccactaaacctttccgtgcctagacctccccannnnnnnnnnnnnnnnnnnnnnnnnnnnnnnnnnnnnnnnnnnnnnnnnnnnngaagaacaatgtcaaatgtttttaatactcagatgtgggagcgacatcaatgaaatctgtactgtatgaaagctacacaaaaatgggcagacatttggttaattgtgccagatacctaaaatgtatgttcagaaaagcattttatcaactcagaaatatgacttatttctagatttcatggcttaatgaattttttcattgttatatataccaaagaggcttacgggttcattgattggtttgaaaaccagacagacggccgggcg

SEQ ID NO: 228254 - DNA, 994 bp, Homo Sapiens; identical to SEQ ID NO: 194700

SEQ ID NO: 228255 - DNA, 1011 bp, Homo Sapiens
ttggcacgtgatcccgcctagggagaaaacgtctgactccagccaccggccttcaaggcacggctttttattccttcggctggtcggcctctcgcccttcagctacctgtgcgtccctccgtcccgtcccgtcccggggtcaccccggagcctgtccgctatgcggctcctgcctctagccccaggtcggctccggcggggcagcccccgccacctgccctcctgcagcccagcgctgctactgctggtgctgggcggctgcctgggggtcttcggggtggctgcgggaacccggaggcccaacgtggtgctgctcctcacggacgaccaggacgaagtgctcggcggcatgacaccactaaagaaaaccaaagctctcatcggagagatggggatgactttttccagtgcttatgtgccaagtgctctctgctgccccagcagagccagtatcctgacaggaaagtacccacataatcatcacgttgtgaacaacactctggaggggaactgcagtagtaagtcctggcagaagatccaagaaccaaatactttcccagcaattctcagatcaatgtgtggttatcagaccttttttgcagggaaatatttaaatgagtacggagccccagatgcaggtggactagaacacgttcctctgggttggagttactggtatgccttggaaaagaattctaagtattataattacaccctgtctatcaatgggaaggcacggaagcatggtgaaaactatagtgtggactacctgacagatgttttggctaatgtctccttggactttctggactacaagtccaactttgagcccttcttcatgatgatcgccactccagcgcctcattcgccttggacagctgcacctcagtaccagaagctttccagaatgtctttgcaccaagaacaagaacttcaacatccatggaacgaacaagcactggttaattaggcaagccaagactccaatgactaattcttcatacagttttt

SEQ ID NO: 228256 - DNA, 938 bp, Homo Sapiens
tttgtacaaaaaagttgggtgcaggttcctgtattaaaatccaagaatcttgttggagtcactatgaccaattgtggaatcacagatctagtgctaaaagactgtccaaagatgatgttcatccatgctaccaggtgcagggtactaaaacatttaaaggtagaaaatgcaccaattgtaaaccgatttgactatgcacagtgcaagaaactgaacatggatcaggtactagaccaaatactaagaatgccacccgagagaaaccgcatcatatacctacgcccaatgcagcaggtggacactctaactttggagcagaagctatttaggggtccctacccctatcacatctgtattatccatgaattcagtaaccctcccaatgtccggaataaggtgcgcattcgcagctggatggacactatagcaaacatcaatcaagagctcattaaatatgaattcttccctgaagccactcgaagtgaagaagacttaaagaaataccccaagtacccctgggggagagaaatctatactttaaaaggtgttgtggatggagctccatattccatgatttctgacttcccttggctgaggtcattacgagctgcagagcccaacagcttcgctcgatacgactttgaagacgatgaagaaagcactatctatgctcctagaaggaaaggacagctgtctgcagacatctgtatggaaacaataggagaggaaatttcagagatgcgtcagatgaagaaggggtgtatttcagcgagtagtggcaatttttatccactattgtgatgtcaatggagagccagttgaagatgactacatttaattggtccctcctcctttccagctattttgtcagaaagcaagtagggccatccagctgccatagtgctccacagggacttgaggcatgcagttgggaggtc

SEQ ID NO: 228257 - DNA, 425 bp, Homo Sapiens
  misc_feature (375)..(385): n is a, c, g, or t
cctataaaagccaactttgtacaaaaaagttgggtccctggcattttaggtgtcggttggtagcagtcatggatcaggtaatgcagtttgttgagccaagtcggcagtttgtaaaggactccattcggctggttaaaagatgcactaaacctgatagaaaagaattccagaagattgccatggcaacagcaataggatttgctataatgggattcattggcttctttgtgaaattgatccatattcctattaataacatcattgttggtggctgaatacattttggaagagagtttttcatcttagagattggtgaacaagtgtgagggtgtgagaaactcacagaatacaaatttgcctgtatgttttgtgggnnnnnnnnnnncctttcaagatgttttctatttctaaattaaagtaatttc

SEQ ID NO: 228258 - DNA, 1170 bp, Homo Sapiens; identical to SEQ ID NO: 194705
  misc_feature (758)..(769): n is a, c, g, or t
  misc_feature (811)..(824): n is a, c, g, or t

SEQ ID NO: 228259 - DNA, 1270 bp, Homo Sapiens
ttggatcccagttgttgatcttatgcaagacgctgcacgaccccgcgcccgcttgtcgccacggcacttgaggcagccggagatactctgagttactcggagcccgacgcctgagggtgagatgaacgcgctggcctccctaaccgtccggacctgtgatcgcttctggcagaccgaaccggcgctcctgcccccggggtgacgcgcagcccccagccgcccagacacatggccccaggccaagcaccccatcaggctaccccgtggagggatgcccaccctttcttcctcctgtccccagtgatgggcctcctcagccgcgcctggagccgcctgaggggcctgggacctctagagccctggctggtggaagcagtaaaaggagcagctctggtagaagctggcctggagggagaagctaggactcctctggcaatcccccataccccttggggcagacgccctgaagaggaggctgaagacagtggaggccctggagaggacagagaaacactggggctgaaaaccagcagttcccttcctgaagcctggggacttttggatgatgatgatggcatgtatggtgagcgagaggcaaccagtgtccctagagggcagggaagtcaatttgcagatggccagcgtgctcccctgtctcccagccttctgataaggacactgcaaggttctgataagaacccaggggaggagaaagccgaggaagagggagttgctgaagaggagggagttaacaagttctcttatccaccatcacaccgggagtgttgtccagccgtggaggaggaggacgatgaagaagctgtaaagaaagaagctcacagaacctctacttctgccttgtctccaggatccaagcccagcacttgggtgtcttgcccaggggaggaagagaatcaagccacggaggataaaagaacagaaagaagtaaaggagccaggaagacctccgtgtccccccgatcttcaggctccgaccccaggtcctgggagtatcgttcaggagaggcgtccgaggagaaggaggaaaaggcacacaaagaaactgggaaaggagaagctgccccagggccgcaatcctcagccccagcccagaggccccagctcaagtcctggtggtgccaacccagtgatgaagaggagggtgaggtcaaggctttgggggcagctgagaaggatggagaagctgagtgtcctccctgcatccccccaccaagtgccttcctgaacggcctgggtgtattggccagga

SEQ ID NO: 228260 - DNA, 1094 bp, Homo Sapiens
  misc_feature (869)..(903): n is a, c, g, or t
aaaaaagttggcgaagagacctatatataagagaagaagaagagtagcttgattaatcttagaatacaaaaggaaaatccgacagtaatgaatgaaaataaacattgaccatttgtgtcttactaaagcagcttattgtaggtgttggcgttctaaaacgtttcctgcctgcgatggttcacataataaacacaatgaattgacaggagataatgtgggtccactaatactgaagaagaaagaagtataataataataacaatattttctcattctttgtgtatagaaaattttaaaatggtggtcttaattattactactggttgaacaattatttcttccaatttattttcttcctgcactactgtttgtatttgatcctttgtctattcagtcacttaattagaaattaaattgtcaagcctcttattctgacttcaaagaattaatgtatcttccaacaataaaatcacttctgattttaatctaggaaaacctaaattgtggctatggatccaaagctgtttgtttctttgaatatcaatattttcaacaggatcttgtatttaaaattcccacctacattgttaaatatgttattttttcatatctcttttggttttgataatctgaagtgtttttttctcgttttggccttccaaactgcatttggttaggtgaattaagaaaaatattgccatcaagaattacttgtgttttcacagagatagactctttgctttatagagattgttgtgtatttaatatgaatatcccagctttagaaaagaagtaaactggatacaaaaagttccattgaggaacagttatttacagtataaaagatttgtttactttacaaaaggctnnnnnnnnnnnnnnnnnnnnnnnnnnnnnnnnnnnattttaaactgactcagtgacagctggggtggaatggcaagaacacttacaaccaaactcatgggctgctgcaatttgaagataattggtaataaacataagacattaattcatattaaaatagttcagtgttcaaaattgtgtttatgtggatatttttctctttttaacactataaaccattaaaatac

SEQ ID NO: 228261 - DNA, 1448 bp, Homo Sapiens
ttggctcacctcccagctcaccagaggccccctttacttagcctcccttactggccggttgcttcgatcatctggcttcttacctgctagccaacaagcgtgtgccaagctctactcctacagtctgcaaggctacaggtgagctcctcccagggaggggagaggagaggcagaagagagaaggcctgggtgtcagggaggcgacagtcagtgggaagcgcttgtgattctcctttcccacggcctccctttccccagctgtttcttgggagctaagtgggcctgaggagactcagagccctcttcccccacttccatcttccacagctggctgggggagacactgccgctctggggctcccacctgctcaccgtggtgcggcccagcttgcagctggcctgggctcacaccaatgccacagtcagcttcctttctgcccactgtgcctctcaccttgcgtggtttggtgacagtctcaccagtctctctcagaggctacagatccagctccccgattccgtgaatcagctactccgctatctgagagagctgcccctgcttttccaccagaatgtgctgctgccactgtggcacctcttgcttgaggccctggcctgggcccaggagcactgccatgaggcatgcagaggtgaggtgacctgggactgcatgaagacacagctcagtgaggctgtccactggacctggctttgcctacaggacattacagtggctttcttggactgggcacttgccctgatatcccagcagtaggccctgccttcctggccactgatttctgcatgggtagaccatccaagactgcagcgggtagaaggtggcagttcttcatgggagtctttttaacttggtgcctgagttctctcctaggcaagtggccagttgcctccacctcagttcttccatctttggtggggacagggcccagcagcatctcagcctcctacccacaattccactgaacacttttctggccctactgcacatggcccccagcctccatccttgtgctggtagcctctcacaactccgcccttgccctctgccttccacttccttccatctcatttctaaaccccaaacagctcatctctaaaaagatagaactcccagcaggtggcttctgtgttcttctgacaaatgattcctgcttctccagactttagcagcctcctgttcccattcttggtcacagctctagccacagcagaaggaaaggggcttccagaagaatatagcaccgcattgggaaacagcagcctcacctccacctgaagcctggggtgtggctgtcagtggacatggggagctggatggaaatgcctctcacttcaaaatgcccagcctgccccaaatgcctctaagcccctcccctgtcccctcccttggagtcctactttcttccaactttccattccccatcatg

SEQ ID NO: 228262 - DNA, 936 bp, Homo Sapiens
ttggtcatcttgggtcagtgcacaaaatggcgccctacagcctactggtgactcggctgcagaaagctctgggtgtgcggcagtaccatgtggcctcagtcctgtgccaacgggccaaggtggcgatgagccactttgagcccaacgagtacatccattatgacctgctagagaagaacattaacattgttcgcaaacgactgaaccggccgctgaccctctcggagaagattgtgtatggacacctggatgaccccgccagccaggaaattgagcgaggcaagtcgtacctgcggctgcggccggaccgtgtggccatgcaggatgcgacggcccagatggccatgctccagttcatcagcagcgggctgtccaaggtggctgtgccatccaccatccactgtgaccatctgattgaagcccaggttgggggcgagaaagacctgcgccgggccaaggacatcaaccaggaagtttataatttcctggcaactgcaggtgccaaatatggcgtgggcttctggaagcctggatctggaatcattcaccagattattctggaaaactatgcgtaccctggtgttcttctgattggcactgactcccacacccccaatggtggcggccttgggggcatctgcattggagttgggggtgccgatgctgtggatgtcatggctgggatcccctgggagctgaagtgccccaaggtgattggcgtgaagctgacgggctctctctccggttggtcctcacccaaagatgtgatcctgaaagtggcaggcatcctcacggtgaaaggtggcacaggtgcaatcgtggaataccacgggcctggtgtagactccatctcctgcactggcatggcgacaatctgcaacatgggtgcagaaattggggccaccacttccgtgttcccttacaccacaggatgaa

SEQ ID NO: 228263 - DNA, 579 bp, Homo Sapiens
catcccaccagcctgtcccctcgtccatcggtccctcggctgtccctcggtggcggctacacaggcatgggcatctcattgtactcgtccacaccctcccgctcatcaaacaccggctctgcctcgttagcatccagacatttcatctctcggtcggtgaagatacgggtgagcaccaccatgcggagcggcactgtgaggatgaggatgaaggggaaggccagggaggcagctgtggacatgacggcccagagcagggccaggcagagcagctgcagggccgtgaacaggtgcatacggagggtccggaccttcttgacgtaagtgacatctgggtggtgtttgggcggcatgagcagcagatgcagccgctcatagaactggatcccgttaagggaggtgactcccatgtacaggaaaattccaaagagcacggccagggggatctgccggagcagatccccgataactatggagaggcccacaagcagggcaaccagcagccccgtcacccgctgctccttgacttcctgaatctcttttgtcatatagtccccaggtgccaacttttttgtacaa

SEQ ID NO: 228264 - DNA, 1275 bp, Homo Sapiens
ttgggtccgcgcgggcttcggaggagcccgccctgccagaggagagggaggtcacggcgtaaaggtgcagctgccgccaccgccgcttctgcaaggtctcagggacgggctgcagccatgtcctattgccggcaggaagggaaggatcgaatcatatttgtaaccaaagaagatcatgaaactccaagcagtgcagaattggtggctgatgaccccaacgatccatacgaggagcatggattgatactgccaaatggaaacattaactggaactgcccatgccttgggggaatggccagcggtccctgtggagaacagtttaagtcagccttttcctgcttccactatagcacggaggagatcaaggggtcagactgtgtagaccagttccgggccatgcaggaatgcatgcagaaatacccagacctctatccctaagaggatgaggatgaggaagaggaaagagagaagaagccagcagaacaagcagaagaaacagctcccattgaggccactgcaaccaaagaagaggagggatcaagttaatgaaggccacaaggcactgggcaccagtccttttggagtggaccttttgcaaaaggccttgtcatcaccttccaagaaagtttccttctgttgtcctgtgcattataatatacaaaataacttattttgatgatcagaggtcttgaggtcttgacatcttgacatatacactgaaaaaaatgggggttgtatgtatgtgtgtcctacccaaacctgtggccgccacttttgaattctcagattgccctgaattttgccacttttaaataatgtgctgaataagctcagcaactaaaaaccattacccaagaacgtttcttgtgagtgagctgatttattctgattcattatattccttttggtagattttataccccttggggaaataatacaacaaaaacatctcttaaaaatgctgggatggggccatatctactagcagaggccagatggtcagatatgatttctgcaaacccatcttgaccttgagtatgtgaaggggtactgtactttattcctgatacattttggtttccatgtaggtgttgagctcctggttttctgtgtttggatgatgaagatttggacccttccattcataatccctttctaagtgtagggagaggctggcttggctgttccttgttattccgaaagccctggtttggggcccatgttcacactggctctcagtctagtcaggtgcaatgttcttgacaggtggggacc

SEQ ID NO: 228265 - DNA, 746 bp, Homo Sapiens; identical to SEQ ID NO: 194709

SEQ ID NO: 228266 - DNA, 888 bp, Homo Sapiens
ttgggtccagaatcttcccaccaagaagcagcaactacaggctttgaaccttcttgtcatcctcctacctgatgcaaacagggacacactgaaggcccttcttgaatttctccaaagagtaatagataataaagaaaaaaataaaatgacagtcatgaatgtagcaatggtcatggccccgaatctctttatgtgtcatgcattgggattgaagtccagtgaacagcgagaatttgtaatggcagctgggacagcaaataccatgcacttattgattaagtaccaaaaacttctgtggacaattcccaagtttattgtaaaccaagtgaggaagcaaaacacggaaaatcataaaaaggataaaagagccatgaagaaattgctgaagaaaatggcttatgaccgagaaaaatatgaaaagcaagataagagtacaaatgatgctgacgttcctcagggagtgattcgagtgcaagctccccatctttcgaaagtttccatggcaatacagctaactgaagaactaaaagccagtgatgtacttgccaggtttctcagccaagaaagtggggttgcccagactctcaagaaaggagaagtttttttgtatgaaattggaggaaatattggggaacgctgccttgatgatgacacttacatgaaggatttatatcagcttaacccaaatgctgagtgggttataaagtcaaagccattgtagaagacttaacaagctgcagataaccatgtggacttctgtcataattcttgctgagtcaagagtgtaaataaaagaaatggcaggactcatattattcagttgtacccaagtatttaaaaatgactctcttaagccttaaaaagtcatagatttgtgctgctgccaga

SEQ ID NO: 228267 - DNA, 860 bp, Homo Sapiens
gccaactttgtacaaaaaagttggatcactgtgcttttttatatgaggcactgtagtattttcacatagtatagtactctggatgtaaaagctcaaaaattgtgattccttgaacgttcactaaatcttcaagcaaaaacacatttttacattatttttacgttgattattttagtgaaagaccatatgaagaagcatttttaatattaacttgttacatactttgatccactttacatcatttttatgttgttgaggtagggaaattagggttcagtttatcactggacattcaggaggcaagtcaatcttttttatttccttataaaattaactcttcaaaagctgttaaacagagagttatcttaatttttattgcagtaggaggaaatatatttaaaatatttgtagatttatagcaaatagagactcgttatttaaaggttaaataacaatttgttcttttgttgtttttgccagtttagggcagtagctgcttttgtcataaatatcttcctaccacatcaaaaatgctgcttttaaaatttttgtttataaattgagaaggaattttctctctataagtttctgtcattgaacagatcaccattaaaaagaatattagaatccagcatgaagataatggctaataaaaatgaggtacatactttataaaaccattaatcagatttgaatgaggaatgcttcccacatccttgaaagaaaaactgtggcttacgttttgaagtattctgagaatgaagtattaagatccaatttctataagcaagatcagacttgttaagtatgccgcaagtaagagctaattcattcattccatgtgtgccactaaataaaga

SEQ ID NO: 228268 - DNA, 1013 bp, Homo Sapiens; identical to SEQ ID NO: 194712

SEQ ID NO: 228269 - DNA, 852 bp, Homo Sapiens; identical to SEQ ID NO: 194717

SEQ ID NO: 228270 - DNA, 1265 bp, Homo Sapiens
ttggctgctaacccgacccggattggcgctgaggtggcccgtggggcagggcagatgattctggaccagatgaagcctgaggagccttccagctctaagatagcaggataggagacttctaagattggagctgcagaagacttgccagcccaccagcacaatgtcaggaagccatacacctgcctgtggccctttctcagccctgactccgagcatatggccccaggagatcttggccaagtacacgcagaaggaagagtcagcagagcaaccagagttctactacgatgagtttggtttccgtgtgtacaaggaagaaggtgatgagcctggctccagtctgctggcgaactcccctctgatggaggatgctccacagaggctgcggtggcaggcccacctggagttcacccataaccacgatgtgggggatctcacctgggacaagattgccgtctccctaccccgctctgagaagctccgctccctggtgctggccggcatcccacatggcatgaggccacagctgtggatgcggctctctggggccctgcagaagaagaggaactctgagctgtcctaccgcgagattgtgaagaacagctccaacgatgagaccatcgctgccaagcagatcgagaaggacctgctccgcaccatgcccagcaacgcctgcttcgccagcatgggtagcatcggggtgccccgcctgcgcagggtgctccgggccctggcctggctctacccagagatcggctactgccagggcaccggcatggtggccgcctgcctcctgctgttcctggaggaggaggacgccttctggatgatgtctgccatcatcgaggacctgctccccgcctcctacttcagcaccaccctgctgggtgtccagactgaccagcgggtcctgcgccacctcattgtccagtacctgcctcgcctggacaagctgctccaggagcatgacattgagctgtccctgatcacactgcactggttcctcacggccttcgccagcgtggtggacatcaagctgctcctgcgcatctgggacctgtttttctacgagggctcccgggtgctgttccagctcacgctgggcatgctgcacctcaaggaggaagagctgatccagtcagagaactcggcctccatcttcaacacgctatcggatatcccgtcgcagatggaggacgcggagctgcttctgggggtggccatgcggctggccggctccctcaccgatgtggccgtggagactc

SEQ ID NO: 228271 - DNA, 569 bp, Homo Sapiens
ataaaagccaactttgtacaaaaaagttggcggaggccgaacaaagtgctgaggtacaagcccccgccgagcgaatgtaacccggccttggacgacccgacgccggactacatgaacctgctgggcatgatcttcagcatgtgcggcctcatgcttaagctgaagtggtgtgcttgggtcgctgtctactgctccttcatcagctttgccaactctcggagctcggaggacacgaagcaaatgatgagtagcttcatgctgtccatctctgccgtggtgatgtcctatctgcagaatcctcagcccatgacgcccccatggtgataccagcctagaagggtcacattttggaccctgtctatccactaggcctgggctttggctgctaaacctgctgccttcagctgccatcctggacttccctgaatgaggccgtctcggtgcccccagctggatagagggaacctggccctttcctagggaacaccctaggcttacccctcctgcctcccttcccctgcctgctgctgggggagatgctgtccatgtttctaggggtattcatttgc

SEQ ID NO: 228272 - DNA, 873 bp, Homo Sapiens; identical to SEQ ID NO: 194718

SEQ ID NO: 228273 - DNA, 590 bp, Homo Sapiens; identical to SEQ ID NO: 194719

SEQ ID NO: 228274 - DNA, 781 bp, Homo Sapiens
ttggtgatatctttgctgacttaactgtaaaaccaaaagaaaagtccaaaaagaaagtggaagccaagtctatatttgatgatgatatggatgacatcttctcctctggtatccaggctaagacaaccaaaccaaaaagccgatctgcacaggccgcacctgaaccaagatttgaacacaaggtgtccaacatctttgatgatcccctgaatgcctttggaggccagtagagcacacagggtatccacatgttaccctgcagctacattgttgagttagtgatgatgttgtatatgctgatggtcttaactggattacaaaaagcaaatactagaacagctagctcatcgttcacccaatgtacttggtatttttctgcactggtttaatcatgcttaatactacaaaacaaaaataaatatttcacagtggttggtttgttttgtttttaaaccacagtttgatttagttagccttgctggggccataatatgcttcagggtgtgtaaaagaagaaatctctttgtggctttcatgggcagggaatcccagagatagcaaatgccacctgaccagaagtctttgttatatggatgggaaccctaacttagggcctgggcaggggaaagagaaagaaggtgagagattatacttcatgagtcttagcaatatgggagcaggttttcactgaattctgagggtgcctctgcatgtcctccaaggcaaagtttggcaaactgtggcccccccactgtcatattttgttaataaaattttattg

SEQ ID NO: 228275 - DNA, 1159 bp, Homo Sapiens
gtacaaaaaagttggatattgttcaagggtcaactgtatagtttattgaacagccacacccattcctttacacatgatctatggcagagttgaatagttgcaacagacactatgtggcctgcaaaatcggaaatttttactgtctggccttttacagaaaagtttgccagcccctgatctagaccagcagctcatctgatagaggcagaggtggccttaaagatgtggccttcttcattttctgttggtttggtttcgtttctatgagagatttcctctgatagctctgctttccccagcacttactctctgagcttttaaatgttctctctgggagcttcatataagctcggtgacatttgagccacagtttttagatcagcacctggaatacatgacacattcttactgaggtcatccagcactgccatggtggctgcccagtcttctggccagtgtgccaggcacatgtccctgtcacacaggttccaagaaacacatacgcagccatgcatagaccaacagatttaatattatattgcagttttcagcgatgcagaatgcagctgcaattgtgttttaaggagaagccaaatggggatggttgtccctgcaacatggtgccactcctgggccatgtgcagcctcagtggacactcttccatagcgctgaggccctggccccgcctccagttaccctgtactgcccactgccttacagttcagtgcgcaggccttcaccttttcatcaccagcctctctgctcagtgctctggagttcttgaccttgtcctttatcatgagatttgctgaaatcactaatgaaaataactcccaaaagcaacaaacaaaaatattagtttaactggcactgtggtatattaaaaggcacaagggcattgtggcttaacacttttgctggatcccaagagacgcacatgatgttaaaaagagatctggcagcagtactaatactacatttcagtgtaatcatcttggggtggtttggccaggatttcccaattccttgatatctggagtttcttcaccattgtccggcatcctgcggaggcttaatatacaggcgtaaggtcagcagcaatttgtctaataaatgatgagatcagtagctgaagtctctaagctgggccattactaa

SEQ ID NO: 228276 - DNA, 979 bp, Homo Sapiens
ttggatccccggcctcggggtggccctgaacccctcagccccttccctgtgtcgcctctggccggtcctggatccctgctgccccctcagctctccccggctctgcccatgacgcccacccacctggcctacactccctcgcccacgctgagcccgatgtaccccagtggtggcggggggcccagcggctcagggggaggctcccacttctccttcagccctgaggacatgaaacggtacctgcaggcccacacccaaagcgtctacaactaccacctcagcccccgcgccttcctgcactaccctgggctggtggtgccccagccccagcgccctgacaagtgcccgctgccgcccatggcacccgagaccccaccggtcccctcctcggcctcgtcatcctcttcttcttcttcctccccattcaagtttaagctccagccgcccccactcggacgccggcagcgggcagctggggagaaggccgtagccggtgctgacaagagcggtggcagtgcaggcgggctggctgagggggcaggggcgctagccccaccgcccccgccaccacagatcaaggtggagcccatctcggaaggcgagtcggaggaggtagaggtgactgacatcagtgatgaggatgaggaagacggggaggtgttcaagacgccccgtgccccacctgcaccccctaagcctgagcccggcgaggcacccggggcatcccagtgcatgcccctcaagctacgctttaagcggcgctggagtgaagactgtcgcctcgaagggggtgggggccccgctgggggctttgaggatgagggtgaggacaagaaggtgcgtggggaggggcctggggaggctggggggcccctcaccccaaggcgggtgagctctgacctccagcatgccacggcccagctctccctagagcaccgagactcctgagggctgtgggcagggggacctgtgtgccccg

SEQ ID NO: 228277 - DNA, 952 bp, Homo Sapiens; identical to SEQ ID NO: 194723
  misc_feature (86)..(148): n is a, c, g, or t

SEQ ID NO: 228278 - DNA, 1004 bp, Homo Sapiens
  misc_feature (886)..(895): n is a, c, g, or t
ttggagaaaagaaaacataagtttcagccaggcatgtgaagtaagaactctgctagagaggaaatggctgcttcatcatcatcctcctcagctggtggggtcagtggaagttctgtcactggatctggtttcagtgtctcagaccttgccccaccacggaaagcccttttcacctaccccaaaggagctggagagatgttagaagatggctctgagagattcctctgcgaatctgtttttagctatcaagtggcatccacgcttaaacaggtgaaacatgatcagcaagttgctcggatggaaaaactagctggtttggtagaagagctggaggctgacgagtggcggtttaagcccatcgagcagctgctgggattcaccccctcttcaggttgatactgcctggatggtcacctctggtgcgcagcaagtgcaaagccagtgggggactttctcacagcttacatagccatccagagatccacagctacgtcactgaattgttaatgcacatttgtacttggtttctctgtatctattcacaggcaacaaatacttatatgtgtgatctttcagggaatgttttgtttatttgtttttaaaagtattgggaatcagattaagacaatcagtttcagagaaccaggaggtttggggttaagagatactcaaaaattttcacaagccaagtagggcatatatcagatttggccaactgaatggcgtctgtcctgtcatccatatggtgcctggaaatatttaccagtcaaggtcaaggtcagcatctgtggttaaaaatatagcattctgacctaaaaaaagttattttgcagatgaatgtgttttcaactcacgacctatccaatgaggaatttttaaatattcnnnnnnnnnncctatttttagacatcatttctatagattctgactttttctacctcttatagacatgccaaatgctggcaaaaaagagtgctttttggatatggcagcacttgttaaaa

SEQ ID NO: 228279 - DNA, 1158 bp, Homo Sapiens; identical to SEQ ID NO: 194725
  misc_feature (945)..(954): n is a, c, g, or t

SEQ ID NO: 228280 - DNA, 983 bp, Homo Sapiens
cttttttcctaatagacaactttgtacaaaaaagttggctccgttttggtcgcggctggttgaagatgaaatccactgaggagggaagtccagcaccctgtgtgccagtccagaactggcccatctgtagaccccctgaaaatcatatgggcttggatttggatattctcaacagaaagggttaaaggctgatggtacctaaagcctggtacttgaattttgatcaagataagctgccttaagttctcttcattacacaaatgatcctagataattgatagatcctgtggttcaactggatttctagatagaagctggattcatgtgatgccagaggagtaaaatttcaagagactgaaaccagatctgagtttcgctgttccagtctggacctctttggtgctgtaaatcctggatatactgtagatgagtactgcgtttttcttttatggcctctcttcagcttctggagacctcactatcctattatgtctttgtgtgaagacatgctgctttgtaattatcgaaagtgtcgcatcaaactctctggctatgcatgggtcactgcctgctctcacatcttctgtgatcagcatggcagtggtgagtttagtcgctcaccagctatctgtcctgcctgcaacagtaccctttctggaaagctagatattgtccgcacagaactcagtccatcagaggaatataaagctatggtattggcaggactgcgaccagagatcgtgttggacattagctcccgagcgctggccttctggacatatcaagtacatcaggaacgtctctatcaagaatacaatttcagcaaggctgaggggccatctgaaacagatggagaagatatatactcagcaaatacaaagcaaggatgtagaattgacctctatgaatgggaggttacctccatgagaagtactagagatacaagaaagttcagtgacatctctgagaaacttatggagcgc

SEQ ID NO: 228281 - DNA, 523 bp, Homo Sapiens; identical to SEQ ID NO: 194727

SEQ ID NO: 228282 - DNA, 972 bp, Homo Sapiens; identical to SEQ ID NO: 194729

SEQ ID NO: 228283 - DNA, 678 bp, Homo Sapiens
ttgggaaattgcagaaggcttcagaacgatggcgcctgacactgaggaagaatatgaagactcaagtgggaatgttgtgaataagaagacatacgaggatctgaaaagacaaggactgctctagtgttgagggatgtagctcagcttttgggctagcccaggcttccctaagatctgctttttctatttctcccaaccaaatcctcttaaagaccctttgctatgtagtctcatggtctagcatgcatcttgtagaaacaaggcatgctggcagattgcagggttgagatgtgttttatctgttttatattttaaaagattctgccagaaaataaaaccagaccttgttctaaagcccagggttatggaccaactcagtgcttcaggtcttaacgcctccatacctcttcctcaccaactttactagtagctgagatttaatgggcacctattatgctacatatcatgttaggtaaatctgacctgacctctttccccaccctcctttgttgctgcttccctgaatgagtattaccccaggatgaggtctgccatcagcttagttagccattgatgcaaatactagggaaagactaggaggatgagccagggttgctactaaggactaagtgtcgcaccaaggtttgccttttgtatttgcataaagaaaggagttgg

SEQ ID NO: 228284 - DNA, 1464 bp, Homo Sapiens
ttggctcctagcggacacctcgtggagtccggccggaagagcaaccgagatgaaggtgaagatgctgagccggaatccggacaattatgtccgcgaaaccaagttggacttacagagagttccaagaaactatgatcctgctttacatccttttgaggtcccacgagaatatataagagctttaaatgctaccaaactggaacgagtatttgcaaaaccattccttgcttcgctggatggtcaccgtgatggagtcaattgcttggcaaagcatccagagaagctggctactgtcctttctggggcgtgtgatggagaggttagaatttggaatctaactcagcggaattgtatccgtacaatacaagcacatgaaggctttgtacgaggaatatgtactcgcttttgtgggacttcttttttcactgttggtgatgacaaaactgtgaagcagtggaaaatggatgggccaggctatggagacgaggaagagccattacatacaatattaggaaagacagtgtatactgggattgatcatcactggaaagaagctgtttttgccacatgtggacagcaagtagacatttgggatgaacaaagaactaatcctatatgttcaatgacctggggatttgacagtataagtagtgttaaatttaacccaattgagacatttctcttgggaagttgtgcatctgacaggaatatagtactgtacgatatgaggcaagctactcctttgaaaaaggttatcttagatatgagaacaaatacaatctgttggaaccctatggaagctttcatttttacagcagcaaatgaagattataacttatatacttttgatatgcgtgcactggacactcctgtaatggtccatatggatcatgtatctgcagtgcttgatgtggattactctcccactgggaaggagtttgtgtctgctagtttcgataaatctattcgaatctttcctgtagacaaaagtcgaagcagggaggtatatcatacaaagagaatgcaacatgttatctgtgtaaaatggacttctgacagcaagtatattatgtgtggatctgatgaaatgaacattcgcctgtggaaagctaatgcttctgaaaaattgggtgtgcttacatcacgagaaaaagcagccaaggattataaccagaaattgaaggagaaatttcagcattatcctcatataaaacgtatagctcgtcatcgacatctaccaaaatctatctatagccagattcaggaacagcgcatcatgaaagaagctcgtcgacgaaaggaagtgaatcgtattaaacacagcaagcctggatctgtgccacttgtgtcagagaagaagaaacacgtagtggcagttgtaaaataattggtattcctaacaatcctgatgtataattatttgttacttttgatttgagaactctacaaataaaagtgctggga

SEQ ID NO: 228285 - DNA, 1441 bp, Homo Sapiens
  misc_feature (189)..(199): n is a, c, g, or t
ttgggtacactagtggcccacgaccaaggggtcttcatttccatgaaaaagggactccaagaggcagtggtggctgtggcccccaactttggtgctccagggtgggccagctgcttgtgggggcacctgggaggtcaaaggtctccaccacatcaacctattttgttttaccctttttctgtgcattgnnnnnnnnnnncctcctaaaaggaatatcacggttttttgaaacactcagtgggggacattttggtgaagatgcaatatttttatgtcatgtgatgctctttcctcacttgaccttggccgctttgtcctaacagtccacagtcctgccccgacccaccccatcccttttctctggcactccagtcccaggccttgggcctgaactactggaaaaggtctggcggctggggaggagtgccagcaatagttcataataaaaatctgttagctctcaaagctaattttttactaaagtttttatacagcctcaaattgttttattaaaaaaaagatttaaaatggtgatgcttacagcagtttgtacgagctcttaagtgttgattccatggaactgacggctttgcttgttttgattcttttccccctacttttcctaatggtttaaattctggaattacactggggttcttttgccttttttagcagaacatccgtccgtccatctgcatctctgtcccatgactcaggggcgcccactctgcttcgattctcctcctgtggaagaaaccattttgagcatgacttttcttgatgtctgaagcgttattttgggtactttttagggaggaatgcctttcgcaataatgtatccattccctgattgagggtgggtgggtggacccaggctccctttgcacacagagcagctacttctaagccatatcgactgttttgcagaggatttgtgtgtgctgcctcaggaggggagggctggtaggagggggggagaggtctctgtcctactgctctccagagggcatttccccttgcgccttctcccacagggcccagcccctctcccctgccccagtccccagggggtactctggagtgagcagtgcccctgtgggggagcctgtaaatgcgggctcagtggaccactggtgactgggctcatgcctccaagtcagagtttccctggtgccccagagacaggagcacaagtgggatctgacctggtgagattatttctgatgacctcatcaaaaaataaacaattcccaatgttccaggtgagggctttgaaaggccttccaaacagctccgtcgcccctagcaactccaccattgggcactgccatgcagagacgtggctggcccagaatggcctgttgccatagcaactggaggcgatggggcagtgaacagaataacaacagcaacaatgccttttgcagcagccctgctcccc

SEQ ID NO: 228286 - DNA, 750 bp, Homo Sapiens; identical to SEQ ID NO: 194732

SEQ ID NO: 228287 - DNA, 782 bp, Homo Sapiens
ttgggggagggagcgaagcagcgcgggcagcgagcgagatgcagcaccgaggcttcctcctcctcaccctcctcgccctgctggcgctcacctccgcggtcgccaaaaagaaagataaggtgaagaagggcggcccggggagcgagtgcgctgagtgggcctgggggccctgcacccccagcagcaaggattgcggcgtgggtttccgcgagggcacctgcggggcccagacccagcgcatccggtgcagggtgccctgcaactggaagaaggagtttggagccgactgcaagtacaagtttgagaactggggtgcgtgtgatgggggcacaggcaccaaagtccgccaaggcaccctgaagaaggcgcgctacaatgctcagtgccaggagaccatccgcgtcaccaagccctgcacccccaagaccaaagcaaaggccaaagccaagaaagggaagggaaaggactagacgccaagcctggatgccaaggagcccctggtgtcacatggggcctggcccacgccctccctctcccaggcccgagatgtgacccaccagtgccttctgtctgctcgttagctttaatcaatcatgccctgccttgtccctctcactccccagccccacccctaagtgcccaaagtggggagggacaagggattctgggaagcttgagcctcccccaaagcaatgtgagtcccagagcccgcttttgttcttccccacaattccattactaataaacacatcaaataaactgactttctcctctctcccccc

SEQ ID NO: 228288 - DNA, 926 bp, Homo Sapiens; identical to SEQ ID NO: 194734

SEQ ID NO: 228289 - DNA, 990 bp, Homo Sapiens
ctttgtacaaaaaagttgggattgaagaacataagaaattcttgaagttacttgagcttctaggccattatcaagagtcaggatctgtcattatatttgtggataagcaggaacatgctgatggtcttcttaaggatttaatgagagcatcttatccttgcatgtctcttcatggaggcattgatcaatatgacagagatagcatcataaatgactttaagaatgggacctgcaaacttcttgtggctacctctgttgctgcccgaggtctagatgtgaaacatctgattcttgtagtaaattatagctgccccaaccattatgaggattatgtacacagagcagggcggactggaagagcaggaaacaagggttatgcttatacttttatcacagaggatcaagctcgctatgctggtgacataattaaagctcttgaattgtcagggactgcagtacctcctgatttagagaaactgtggagtgatttcaaagatcagcagaaagctgaggggaaaataattaaaaagagtagtgggttctctggtaagggattcaagtttgatgaaacagaacaagctttggctaatgagaggaagaagttacaaaaagcagctcttggtctacaagattcagatgatgaggatgctgcagttgatattgatgagcaaattgaaagcatgtttaattcaaagaagagagtaaaggatatggctgctcctggaacatcaagtgttcctgctccaactgcaggaaatgctgagaaattagaaattgctaagagattggctcttagaatcaatgcccagaagaatttgggcatcgagtctcagtagatgtgatgcagcaggccaccaatgcaattcttaggggtggcaccattctggctcccactgtttctgcaaaaccattgcagaacaacttgctgaaaagatcaatgccaagctcatttatgtgccgttagagaacagaagaagagagacaggatgg

SEQ ID NO: 228290 - DNA, 856 bp, Homo Sapiens
  misc_feature (598)..(628): n is a, c, g, or t
ttgggtataattatggcaaagtagacatttatgttctaattaatatgattacagagaaggctttttctcaggtcaggcttttcatgaaagtattttgagaacaatgaattgcaataaccagcttcacacaagcataactgataaacgcgagtgctattgtagtcttggcaagtgagccaagaacctaggagcagggccattcctactgaaggacgggccccctacggagatgaaatttgtttcctggtgagcacagaatcagaacaaagaacaatatcccaaagaggccctgtgtctaccaggagcttctttttccaaatgtaatggattatgtggaattgtagtgccatcggtttttacttagagcccttgacgtgcttggaccaatatttccttccttcttatgaaccaggtttttccttctgattttcccttttcaacattccttaccagtcaccaaagtttcctgttataatttcttttagcagacaagttataagtcagatttaattagcatcagagttgattttatattagtcagattttggatcatcacagagatctccacaactccttggcttaaacagctccaccggtnnnnnnnnnnnnnnnnnnnnnnnnnnnnnnntagtttttttagagtagagttattttctgggagagttactacaaatgcttattctcattgacttatttctttcatggtaactttcgttttggagtgttcattttctgaacttgaccctcacattgtaggggtgcagtttgtccaactcttttccacagcccattagaccccactagctggatatttcacaggcatctttgattcaatatgtccaaagtggaactctcc

SEQ ID NO: 228291 - DNA, 875 bp, Homo Sapiens
ctttgtacaaaaaagttggcacgctgcccggatccctgcggctgcctgcactctggaccacgagctctgagagcagcaggttgagggccggtgggcagcagctcggaggctccgcgaggtgcaggagacgcaggcatggccggtgagctgactcctgaggaggaggcccagtacaaaaaggctttctccgcggttgacacggatggaaacggcaccatcaatgcccaggagctgggcgcggcgctgaaggccacgggcaagaacctctcggaggcccagctaaggaaactcatctccgaggttgacagcgacggcgacggcgaaatcagcttccaggagttcctgacggcggcgaagaaggccagggccggcctggaggacctgcaggtcgccttccgcgccttcgaccaggatggcgacggccacatcaccgtggacgagctcaggcgggccatggcggggctggggcagccgctgccgcaggaggagctggacgccatgatccgcgaggccgacgtggaccaggacgggcgggtgaactacgaggagttcgcgaggatgctcgcccaggagtgaggctccccgcctgtgtccccctggctgcgctctgagccttcagggccaccgcccgctgctgcttttgtgctgggactctccggggaaacctggtcggtggatgggaaactgcctccccctgggaggaaggctttgcgctccggggcctggatgcggcgccctcgggccgcctgcgagcccctctctgcctccagaccttgggcagaaggaggcctccttgggcctggtccccctttgccctgcagtggaatgagggcccctcagccccgcattgatctaaataaaggactgccgagttc

SEQ ID NO: 228292 - DNA, 1331 bp, Homo Sapiens
  misc_feature (1040)..(1048): n is a, c, g, or t
cgcaggcaaaggcttggggggccggggcgcggctgtgcagctctcgccggagccgagcccagccgagcgtccgccgctgcccgtgcgcctctgcgcctccgcgccatggccggcctcaactccctggaggcggtgaaacgcaagatccaggccctgcagcagcaggcggacgaggcggaagaccgcgcgcagggcctgcagcgggagctggacggcgagcgcgagcggcgcgagaaagctgaaggtgatgtggccgccctcaaccgacgcatccagctcgttgaggaggagttggacagggctcaggaacgactggccacggccctgcagaagctggaggaggcagaaaaagctgcagatgagagtgagagaggaatgaaggtgatagaaaaccgggccatgaaggatgaggagaagatggagattcaggagatgcagctcaaagaggccaagcacattgcggaagaggctgaccgcaaatacgaggaggtagctcgtaagctggtcatcctggagggtgagctggagagggcagaggagcgtgcggaggtgtctgaactaaaatgtggtgacctggaagaagaactcaagaatgttactaacaatctgaaatctctggaggctgcatctgaaaagtattctgaaaaggaggacaaatatgaagaagaaattaaacttctgtctgacaaactgaaagaggctgagacccgtgctgaatttgcagagagaacggttgcaaaactggaaaagacaattgatgacctggaagagaaacttgcccaggccaaagaagagaacgtgggcttacatcagacactggatcagacactaaacgaacttaactgtatataagcaaaacagaagagtcttgttccaacagaaactctggagctccgtgggtctttctcttctcttgtaagaagttccttttgttattgccatcttcgctttgctggaaatgtcaagcaaattatgaatacatgaccaaatattttgtatcggagaagctttgagcaccagttaaatctcattccttcccnnnnnnnnncaaatggcaccagctttttcagctctcttattttttccttaagtagcatttattcctaaggtaggcagggtatttccctagtagcatactttcttaagacggaggccatttggttcctgggagaaataggcagccccacactttgaagaatacagaccccagtatctagtcgtggatataattaaaacgctgaagaccataaccttttgggtcaactgttggtcaactatagagagaccagggaccatcccatgggtaggattttccatccagagccaataaa

SEQ ID NO: 228293 - DNA, 1332 bp, Homo Sapiens; identical to SEQ ID NO: 194736
  misc_feature (1125)..(1133): n is a, c, g, or t

SEQ ID NO: 228294 - DNA, 887 bp, Homo Sapiens
ttggcttcgacaaggccagctaccgagtctattgcttgctgggaggccatggccttcgccagcatctataagctggacaaccttgtggccattctagacatcaatcgcctgggccagagtgacccggccccactgcagcaccagatggacatctaccagaagcggtgcgaggccttcggttggcatgccatcggggaagacgggccctcccagatggccctagaagatctggctatgtttcggtcagtccccacatcaactgtcttttacccaagtgatggcgttgctacagagaaggcagtggaactagccgccaatacaaagggtatctgcttcatccggaccagccgcccagaaaatgccatcatctataacaacaatgaggacttccaggtcggacaagccaaggtggtcctgaagagcaaggatgaccaggtgaccgttatcggggctggggtgaccctgcacgaggccttggccgctgccgaactgctgaagaaagaaaagatcaacatccgcgtgctggaccccttcaccatcaagcccctggacagaaaactcattctcgacagcgctcgtgccaccaagggcaggatcctcaccgtggaggaccattattatgaaggtggcattggtgaggctgtgtccagtgcagtagtgggcgagcctggcatcactgtcacccacctggcagttaaccgggtaccaagaagtgggaagccggctgagctgctgaagatgtttggtatcgacagggatgccattgcacaagctgtgaggggcctcatcaccaaggcctagggcgggtatgaagtgtggggcgggggtctatacattcctgagattctgggaaaggtgctcaaagatgtactgagaggaggggtaat

SEQ ID NO: 228295 - DNA, 1616 bp, Homo Sapiens; identical to SEQ ID NO: 194737

SEQ ID NO: 228296 - DNA, 1078 bp, Homo Sapiens
ggggtcgagtcggctgctggggtttatcatctggaagattctctgcgtcagctcagctcagggaacaacagcttacctgcagggtatacagaagctggaggaaggtctgatacctctgcagcttgtcccgctctgttctgcgtgctgcttcaggtttccaagtttctgaaacaccccgtcaagctctgctgagtccctgtcttacgctccctcacctctgcagaaactccgccagatgctgcagatgcttctcctgttgtagctgccactggttctggactgctctgcgtttctccatggccatttgtttcttggcctggagctgctcaaaggcttcccggagttgtgtccgtttcctctgggcttcctccatctgagtcagggccttggtgaggccaattttgatggcctctacgtgctccctgtaggtggccttcagctctttccattgttccttagctgcaattgccttctgtcctgagatgagccaccaggaatgagtacatgagtgagggtggcctgctagcctgcctccctgcaacactgggcctccttcccatcagccaaatgggagacctaactgaaatcctccttccttccccactcaggtcagctgctactacaatcccctgcctactcacggctcgtgtcttcagaagccaaggggtcgagacccttagcagtgtcctcctgagccaggatgttctgcaggaaatccgctacctgaagctggctgcagagcagcttgtctttcttctgagagtcctgctcagagggagggcagagacagggaacatccttacctccttacaggtttccttaagtctgctctctgccaatgctgccctgtatctcagtaagaggagccaggaccagaccctggcttctgaaaggctcgctctcatcttgtacataccaccacaaactcaaccaggatcttggctggcagttctgcctcctcctgcaggcctacaggttccaagatgcctgccacctcagccaggacctctagggctgcagcttccgcctctgtctccgctgcctccatctttccaggcgccaacttttttgtacaaag

SEQ ID NO: 228297 - DNA, 945 bp, Homo Sapiens; identical to SEQ ID NO: 194739

SEQ ID NO: 228298 - DNA, 855 bp, Homo Sapiens; identical to SEQ ID NO: 194740

SEQ ID NO: 228299 - DNA, 970 bp, Homo Sapiens
ctttgtacaaaaaagttggcgttcctctcgcatccaggcattgcctcgctgctttcttttctccaagacgggctgaggattgtacagctctaggcggagttggggctcttcggatcgcttagattctcctctttgctgcatttccccccacgtcctcgttctcccgcgtctgcctgcggacccggagaagggagaatggagagggggctgccgctcctctgcgccgtgctcgccctcgtcctcgccccggccggcgcttttcgcaacgataaatgtggcgatactataaaaattgaaagccccgggtaccttacatctcctggttatcctcattcttatcacccaagtgaaaaatgcgaatggctgattcaggctccggacccataccagagaattatgatcaacttcaaccctcacttcgatttggaggacagagactgcaagtatgactacgtggaagtcttcgatggagaaaatgaaaatggacattttaggggaaagttctgtggaaagatagcccctcctcctgttgtgtcttcagggccatttctttttatcaaatttgtctctgactacgaaacacatggtgcaggattttccatacgttatgaaattttcaagagaggtcctgaatgttcccagaactacacaacacctagtggagtgataaagtcccccggattccctgaaaaatatcccaacagccttgaatgcacttatattgtctttgcgccaaagatgtcagagattatcctggaatttgaaagctttgacctgagcctgactcaatcctccaggggggatgttctgtcgctacgaccggctagaaatctgggatggattccctgatgttggccctcacattgggcgttactgtggacagaaaacaccaggtcgaatccgatcctcatcgggcattctctccatggtttttttacaccgacagcgcgatagcaaaagaagtttctca

SEQ ID NO: 228300 - DNA, 941 bp, Homo Sapiens
ttgggggttcaggtacactggctaaggcagaaccccaaatttcaaggctctttctatcaatattggacctctgggagctaatactcctctttgctcaccaccatgtgatcattgatcagatgtggtgagtgagtaggggactcgacttgcgggatgcagttttgccattgcagcaaagttcattgaggaaaattgtaccatgaaaaagcattttgattatttcatttctggaggatgaccttgagggaagctttttaatattagtttcaagctttccttaccctacaactttaaacaaaagctttaattttgtttgcactcctattttgagcttgtaactggaaaagcatgtcttgcactgttcaacctcctgagtggtcgctttaacaacctccaaattgtgtacagtggttattttccccagttgtatagttttgagacattcaattatcactgtcttagttgtattttaatttactaaattatgtagctatttgactgttaagttcttttaaacaactgtttccttgggcttcagttatttaaagtaaatttaggtgtaatatagaaaactgtccctttccaggtgggagcttaacacctgtataaaacctaaggttttggtaagtaccttagttgaataaaagcacaaggttatcaccttttttatccgtccaccgtgacatggttatgcatcctttagattaacctcaccaaatgaagctttttctatccatttttaatattgtccttacataatattgtccttagattttgatcaattctatgtctgactttgaaattccatttacaatgtagtatgttttcaatgaaaaaccataaagtaacatccaagtgtttcatggtttgttgggaaggtaattttaaaataaaacaatttccaaaaacatttgtcagccaagtcatccataaagtccccg

SEQ ID NO: 228301 - DNA, 285 bp, Homo Sapiens
cgccatgtggagcggccgcagctccttcaccagcttggtggtgggcgtgttcgtggtctacgtggtgcacacctgctgggtcatgtacggcatcgtctacacccgcccgtgctccggcgacgccaactgcatccagccctacctggcgcggcggcccaagctgcagctgagcgtgtacaccacgacgaggtcccacctgggtgctgaaaacaacatcaacctggtcttgaatgtggaagactttgatgtggagtccaaatttgaaaggacagttaatgtttctgt

SEQ ID NO: 228302 - DNA, 1153 bp, Homo Sapiens
ttggcgacagcctccgccacatcctccacctctcttggtccagcgagcgttgccgggccagggtcaagcggagggctccgacggcgcggacggagcgaagcgccgagccatggcgcaccaaacgggcatccacgccacggaagagctgaaggaattctttgccaaggcacgggctggctctgtgcggctcatcaaggttgtgattgaggacgagcagctcgtgctgggtgcctcgcaggagccagtaggccgctgggatcaggactatgacagggccgtgctgccactgctggacgcccagcagccctgctacctgctctaccgcctcgactcacagaatgctcagggcttcgaatggctcttcctcgcctggtcgcctgataactcccccgtgcggctgaagatgctgtacgcggccacgcgggccacagtgaaaaaggagtttggaggtggccacatcaaggatgagctcttcgggactgtgaaggatgacctctcttttgctgggtaccagaaacacctgtcgtcctgtgcggcacctgccccgctgacctcggctgagagagagctccagcagatccgcattaacgaggtgaagacagagatcagtgtggaaagcaagcaccagaccctgcagggcctcgccttccccctgcagcctgaggcccagcgggcactccagcagctcaagcagaaaatggtcaactacatccagatgaagctggacctagagcgggaaaccattgagctggtgcacacagagcccacggatgtggcccagctgccctcccgggtgccccgagatgctgcccgctaccacttcttcctctacaagcacacccatgagggcgacccccttgagtctgtagtgttcatctactccatgccggggtacaagtgcagcatcaaggagcgaatgctctactccagctgcaagagccgcctcctcgactccgtggagcaggacttccatctggagatcgccaagaaaattgagattggcgatggggcagagctgacagcagagttcctctaccacgaggtgcaccccaagcaacacgccttcaagcaagccttcgccaagcccaagggcccagggggcaagcgggggcataagcgcctcatccgcggcccgggtgaaaatgggggatga

SEQ ID NO: 228303 - DNA, 1139 bp, Homo Sapiens; identical to SEQ ID NO: 194743

SEQ ID NO: 228304 - DNA, 897 bp, Homo Sapiens
ttgggcgatgcattcttggcgctgggcggccgcggcggctgctttcgaaaagcgccggcactccgcgattctgatccggcctttagtctctgttagcggctcaggtccgcagtggaggccacatcaactcggcgccttgggaaccgctcgagcctaccagcagattccagagtcattaaaaagtatcacatggcagagattgggaaaaggcaattcaggacagttcttagatgctgcaaaggctctccaggtatggccactgatagaaaagaggacatgttggcatggtcatgcaggaggaggactccacacagacccaaaagaagggttaaaagatgttgatactcggaaaatcataaaagcaatgctttcttatgtgtggcccaaagacaggccagatctacgagctagagttgccatttcgctgggatttttgggtggtgcaaaggccatgaatattgtggttcccttcatgtttaaatatgctgtagacagcctcaaccagatgtcgggaaacatgctgaacctgagtgatgcaccaaatacagttgcaaccatggcaacagcagttctgattggctatggtgtatcaagagctggagctgctttttttaacgaagttcgaaatgcagtatttggcaaggtagcccagaattcaatccgaagaatagccaaaaatgtctttctccatcttcacaacctggatctgggttttcacctgagcagacagacgggagctttatctaagctattgacagaggaacaaggggtatcagttttgtcctgagtgctttggtatttaatcttcttcccatcatgtttgaagtgatgcttgtcagtggtgttttgtattacaaatgcggtgcccagtttgctttggtaacccttggaacactt

SEQ ID NO: 228305 - DNA, 825 bp, Homo Sapiens
aactttgtacaaaaaagttgggtcaagatggcggcgtctgtattaaacaccgtgctgaggcggcttcctatgctatctctcttccgaggttctcacagagttcaggttcccctccagactctttgcaccaaagctccctctgaggaagattctttgtcctcagttcccatttctccttataaggatgagccctggaaatatctggaatcagaagaataccaggagcgatatggttctcgccccgtctgggctgactaccgccgcaaccacaagggtggtgtacccccacagcggactcggaagacatgtattcgtcggaataaagttgttgggaatccctgccccatctgtcgagatcacaagttgcatgttgactttaggaacgtgaagctcttggagcaatttgtctgcgcccacacgggtatcatcttctatgctccatacacaggagtctgtgtgaagcagcacaagcggttgacccaggccatccagaaagccagggatcatggtctcctcatttaccacatcccccaggttgaaccacgggaccttgacttcagtacctctcatggggctgtgagtgctactccgccagcccccaccctggtctcaggtgacccctggtacccatggtacaactggaaacagccaccggagagagaactgtctcgccttcgccggctttaccagggtcatctccaagaagagagtggccccccacctgagtcaatgcccaagatgccccctagaacaccagcggaagcctcctccactgggcagacaggccctcagagtgctctgtaggagctgtagactgggaagaga

SEQ ID NO: 228306 - DNA, 1244 bp, Homo Sapiens
ttggatcctccttgccacaggtcttcacgtgcaccgcaactcagcccattcagcaggagtaggagccatctttgatcgggtgctgacagagctagtgtccaaaatgcgtgacatgaggatggacaagacagagcttggctgcctgagggcaatcattctgtttaatccagatgccaagggcctctccaaccctagtgaggtggaggtcctgcgggagaaagtgtatgcatcactggagacctactgcaaacagaagtaccctgagcagcagggacggtttgccaagctgctgctacgtcttcctgccctccggtccattggccttaagtgtctagagcatctgtttttcttcaagctcattggtgacacccccatcgacaccttcctcatggagatgcttgaggctccccatcaactggcctgagctcagacccagacgtggtgcttctcacactggaggagcacacatccaagagggactccaagccctggggcagggtggggggccatgttcccagaaccttgatggggtgagaagtacagggcagaaccaagaacataaaccctccaagggatctgcttgatatcccaagttggaagggaccccagatacctgtgaggactggttgtctctcttcggtggccttgagtctctgaatttgtcgggttctcccatgatttggggtgatttctcaccctctgtccttcccccagcacaaagcactggccttgcctccaggaccttgcttccttctcatcttgcctcattttgcttcccatctgaagagtggaaatggggaactcccccagaggtggatactggggggcaggcctcccaagctgatggacatgagagtagggccctgacaggccttcctcctctcaaacctggcagatgggggcctctctggaagagggaggggccctgtcactgtccagagtctctttttacacttcacctccttctgcagtcagactgaaatataaaaaaggtggtggtggtggtgaaggggctggtggagatgtaggaaccgatctgctatttttaatttcctgtgaggatagagacttgcagttagactcaaagaagtactgtactttcccaggttgactaagaaatgccagtggtggaggtgggtgtttgggaaaggcagggccctgaaatggcctgtccctagggctctccaagcactagcccttcccagcttcccgccgccccccctatctcttcctgtctaacttgg

SEQ ID NO: 228307 - DNA, 1035 bp, Homo Sapiens
tttgtacaaaaaagttggtttaaaatgccctctccgttcaacccttgttaacaagtgcctaaaaatggaagtacctgttcagattaatcaaagcaataggatttgatttgattaggtatctttttacaccagtatgttatttttaaccaaaatgtaaagttcttattaaactcattacctgccattgtgattgtcccatcatggcccacctggtttcctgatgttgtaaataacatcaatgcatctgctgtgggtcctttgctgagatgtcttcgaaggaattttgttttagccatatccatcaactttgtattttacttgcaatttggaagaaggaaagtcacatgatgaaactccttttgtctataaccaggccctggcaaagtgcaaacaggatgcaactgcagtggcacaaaggtcactcaatcctttgtttccagtttcacattctactacttctgtgctagagaacgatgctctgtgagaggcattcactagtatgaatgtggggatatagtgtataagacttatttgcagtactgtgttcttcagctagaggcagctttttaaataatgcaagtgtatttattagcattaaaattaacatctcagtaatcagcattagcatttctgaggaccattattaattctgagaacagaaattggtgccttgcaaggaagtttactagctctatcaacaagcattcaaggttacatctgctagcagagtagtgttaggaacctggccttactctcctctgacaatcgcaattttttcttattttttataaattcaagaagatacacttggcatcgtgtatcgagggtaagtttttcatgcatttcccagactacttatggagaattgcagtttaagttgctgaaaagtattaacatggtattaagcttaataatacgtaatgggactagatggcccactaagccactgttattttccttcctctctggcaggcacttgatccattccaaagtcaaaaactggactgaagctaaatttgtactttcataatatac

SEQ ID NO: 228308 - DNA, 469 bp, Homo Sapiens
ccaactttgtacaaaaaagttggttcaagatgtcgaagcgaggacgtggtgggtcctctggtgcgaaattccggatttccttgggtcttccggtaggagctgtaatcaattgtgctgacaacacaggagccaaaaacctgtatatcatctccgtgaaggggatcaagggacggctgaacagacttcccgctgctggtgtgggtgacatggtgatggccacagtcaagaaaggcaaaccagagctcagaaaaaaggtacatccagcagtggtcattcgacaacgaaagtcataccgtagaaaagatggcgtgtttctttattttgaagataatgcaggagtcatagtgaacaataaaggcgagatgaaaggttctgccattacaggaccagtagcaaaggagtgtgcagacttgtggccccggattgcatccaatgctggcagcattgcatgattctccagtatatttgt

SEQ ID NO: 228309 - DNA, 321 bp, Homo Sapiens; identical to SEQ ID NO: 194745

SEQ ID NO: 228310 - DNA, 856 bp, Homo Sapiens
  misc_feature (710)..(719): n is a, c, g, or t
ccattttttgtttttaatataagcaaattatctcctccatccctccctggggcaggagacagctaaggtggggaaggctccccagaggggtgcagagctggtgagggagaggcacctggagaaggcgcttcccagcctgggctgaaggccgttttttctctatcagctcaacccactcctaagaagcagattcccctcaggtgacagcagcgtgggtgggtggagcgaggacaccaggcctcgtccctgcccggaagcaggcgaaaggggccccgaaggcctgcctcggccctgtgtcccccgacctgctcagggttgtacccgaagagctgggaagctgtccacactcactaccaaccagaagggcctgggggcctccctcatcctgagccatgggaggtgcaggggtgctttgtctgcaaggaagcctctggaacacctgcgtttctctcgggtgagagaaacaaagatagacaaaccccaggagagagtttattctgcaaaggtgggcgcagacggagggaggccccagacccccgggcttcccctggccaggtgcacaggggcggccaccagagagcctgggcctcctcccagcaggcacagagtgggcacaggcactggcaccagaccatcaaagcccaggagccggggtgaggcgagagcgaggccgtgagtgaccgggctgtgccgaaaccggggcgtcctgnnnnnnnnnngaggctcaccctccaattaccgggtctctttccctgcctggtctgtagccaaatcataatattttaaaacaacaacaaaaaaacagcgagatgctctgacctctcagagaatcctggttctgagaaaaacaatccaa

SEQ ID NO: 228311 - DNA, 1518 bp, Homo Sapiens
ttggcaaagatttaggtggacaccctaaactgtgtgtgcctttaaccagttaaaagaacagtgccttcagcatacttttttattagttgtaggaatacagctttttgaaaaagctataaagtttaaattaactaaaaatatgcattttcttacacataatttaaatgttatcatacttttttgatgaaaacataatgccttagtaaaatagctctatttaataaagaagattgagtactctgacacatttcatttaaattaggaaatttttaatattaaaatcccagtgttctgagttattgaaaggctttcttttattttgagagctttaggtctttttgggatgagaacattttagttgtttagtttgtttcttaagcagtgctattttttgtaaacacagataaatggaaaccattcttttcaatgcagaagaaatctagatatcccctactgtgaccaaatttctgtattacgattttatgttaaattaaactaatatggcaggttataatgatccttaagtgtaaagaaatcagtcaattacaagagtaattgtatagttattgagacctatagtgtgtggcttagatgaaagggagagtaaattttcataccatgctctctcctactcagtttgatctctctaaaattgtagtttggtttgatttaatataattcttagtagaaattttgaaagtatgctttgggattaataattatttttaatttttctggctgaatatcaaattgatagtaacaacagaagcataattttaggaaggctttcgcaaacctagccttttaagagaggtttttaacctgaagcatgagaatatatcacctgtggtttttcctttgagatgaaacgtagtttctagttatatcattacttaaagggcttaaaaagaaaaaacttagcaaacttttgaatctttcttttattgctatttacacatacatacacacatacaaaacctttaaattttgggatctgaatataattctggtaaacagctgtcttcatttttctcctctaaagaacttaattcatttgttacataaaatataaggaaatctttgtactattttacagtaaccacaatctaaatatttacatatacccaaaattaacttatgctcatatattaggatgtgagaatatcatctgtttatggacacatgaaacctcctaatgacctggaattgttagaatatttgactttttatatgcaaagtttttcaaccaagtggtttgtctaatatttaaacatgtactggcacaatttgtgatgaaaatattagcacatttgcaataatgtttctccataacagagaatgttaatgggtaccagaattttatttttgtatttatgttcatagtacttttcctcttgtctactccagacagttattccataaagcatttgtataattaaaaggaaaacagaaaaaggaaaagtaggcaatgtgaaatagtttcaatatatcttatgatttcttaatgtaaatgttttg

SEQ ID NO: 228312 - DNA, 934 bp, Homo Sapiens; identical to SEQ ID NO: 194746

SEQ ID NO: 228313 - DNA, 885 bp, Homo Sapiens
ttggagcagggcggatcggccgctgcctgcttaaagctggggccgccaggagtgcgatcgcctgcggatctgcagctgggcaccggccgcaacgcccgccccgcgacggcagggaataaaggctcagggaccggcagttctactctagagcccaccagcctctcagagcctccggtgactggcctgtgtctccccctggatggacatgtggacggcgctgctcatcctgcaagccttgttgctaccctccctggctgatggtgccacccctgccctgcgctttgtagccgtgggtgactggggaggggtccccaatgccccattccacacggcccgggaaatggccaatgccaaggagatcgctcggactgtgcagatcctgggtgcagacttcatcctgtctctaggggacaatttttacttcactggtgtgcaagacatcaatgacaagaggttccaggagacctttgaggacgtattctctgaccgctcccttcgcaaagtgccctggtacgtgctagccggaaaccatgaccaccttggcaatgtctctgcccagattgcatactctaagatctccaagcgctggaacttccccagccctttctaccgcctgcacttcaagatcccacagaccaatgtgtctgtggccatttttatgctggacacagtgacactatgtggcaactcagatgacttcctcagccagcagcctgagaggccccgagacgtgaagctggcccgcacacagctgtcctggctcaagaaacagctggcggcggccagggaggactacgtgctggtggctgggccactaccccgtgtggtccatagccgagcacgggcctacccactgcctggtcaagcagctacggccactgctgg

SEQ ID NO: 228314 - DNA, 1044 bp, Homo Sapiens
ttgtacaaaaaagttggcctgctcgccgtccccgccatgctgtctctagactttttggacgatgtgcggcggatgaacaagcggcagctctattatcaagtcctaaattttggaatgattgtctcatcggcactaatgatctggaaggggttaatggtaataactggaagtgaaagtccgattgtagtggtgctcagtggcagcatggaacctgcatttcatagaggagatcttctctttctaacaaatcgagttgaagatcccatacgagtgggagaaattgttgtttttaggatagaaggaagagagattcctatagttcaccgagtcttgaagattcatgaaaagcaaaatgggcatatcaagtttttgaccaaaggagataataatgcggttgatgaccgaggcctctataaacaaggacaacattggctagagaaaaaagatgttgtggggagagccaggggatttgttccttatattggaattgtgacgatcctcatgaatgactatcctaaatttaagtatgcagttctctttttgctgggtttattcgtgctggttcatcgtgagtaagaagcctgccttgctgttcctgggaagatgccatagttttcgttactggatgtttggagtagatactggtctgtgattggtggaatggagaacacacgtgttggtgcttctgggtagcactggtttgcattagtttatgtttccatgccagagtttgtgtgggcgggcgcatgtgcaccacagagtgcactcgaggggactttcagtcacaggatttcataattgtcattgtcacactttcaaatttttgtacatcagtgaatttttttatattaaaaggttgagccaaagcccccagtgtttgtattttgaagccaagcttcacttctaaagtgcctacagagacttgtaaatgaaaatgcagctctgcacgagtttgaaaccgtcatacctcccttctattaggaatggcatatactgaggtggtcgtaagtcttaacttctaaaattttaaataaaagactttgc

SEQ ID NO: 228315 - DNA, 885 bp, Homo Sapiens
ttctccaccaccgtttcctccttggcgggcttctccaccacctccgcatcgagagtcttcttctccgcttcgcctctcggccagcgccaaccatatccagctcagagatgtccagcagcttcacacctcgttccttccgcagcagcgtcctggaaggcgggatgggggtccggttccctgtggggctgaagacgctgggcgccgtggggcttctgaagggcgcctgcttcgggatgcctttgagtggggtggtggtgtccatcttccgcagcagcccccggcccttggcgtggaagggcaccccggcgctccgcttcaactgctgggcggtctccgtggacttctgcagcagctccgcccgcagcgtggcgctcttgggtttccgctttaactgaaaatgcttcaccgggggagtgaggggtcccgcgagggtcgtcagggcgtttttgttcaagtactggcactccagtggcagcatggcagacgcttcacactcacccaccttttctctaagttctcccaaaatatcctgaacgttgggattctgctcctccagctccaggttaagcgagcctgtgtccggaaaggacttcaagatgtcggcgaccatgagcacccaggggtccgagtcgaggctggcgagctggatgatctccattagggcgcccttcatctcgtccaccgtgcggcgcgggaggtgcagcgtcccgagtagcaacttgagcttcactgccgacgagaggccatggaagcagagacggatgttgtcgatgaccgcggccgtgagcagggacgcgatgctgggcggcgcccacagctcgtccgtggcccccagcttgttgtgcagccacaggcccgtgtcgctctcccgcatggacgccccaa

SEQ ID NO: 228316 - DNA, 319 bp, Homo Sapiens
actttgtacaaaaaagttggcgttatagtatttgtcagaagttggggtctccgtgggcattgtgatccgtcccaggcagtggattaggaggccagaaggagatcccttccacggtgctaggctgagatggatcctctcagggcccaacagctggctgcggagctggaggtggagatgatggccgatatgtacaacagaatgaccagtgcctgccaccggaagtgtgtgcctcctcactacaaggaagcaaagctctccaagggcgagtctgtgtgcctggaccgatgtgtctctaagtacctggacatccatgagcgga

SEQ ID NO: 228317 - DNA, 1581 bp, Homo Sapiens
  misc_feature (396)..(438): n is a, c, g, or t
gaaaggcgtaacgacttccctcaatgacaggagccccagaggactgaaaggagttataaaaatatacaaacatagatattttttattctggcatagttcatgtttttaagaaagtaattagtaattaattatctgacactgggtaagaactggaagattgtgggagacttataaattatataagacttataatttataagacatataaattatgactctatgtaaaatatcagtggggagaaacccctcattttccattgaaaattctggtaacttttaagtactttccaaaaatagagacaatttccactggtttaaataatggatgcggaaatgaacaaaagaccatccctaaataactgacgcatttagggtggctaataaaataaatgcagnnnnnnnnnnnnnnnnnnnnnnnnnnnnnnnnnnnnnnnnnnntgaataataggggaaaaaaagttttgaattgcattgccccaagtcaggagaaagcacgcggcattctcttcaaggcccgttctgtcctatatcactggaaagcggctgagggcctgcctcagcttttctgcaatcgtttcgtaaaattgcacttgctgctccaggtacaggcggatgacactgttgtaatcatagatccggttactgtgaaagtgattcatctcagcttgcaacgcgtaagacatgatgctgactctcttcaccatgttctgtttgtcttgtagggtgattttacttgttgcaactagtttgtcactttctttcactttttctattgctcccttgtgagtgccaatgatgtcagggaagcagccaagaaaacctttatactcgtgattacattccatcaggaaatggagatctttctttggctgttctgccacgagactggcaatttcttcataagtctttcctgcttctgttattgcatcattgagatctgtttcaccttgatagccactggaactgaacactgtggccaaactctgcaaggcctttcctatcttctgatattccttgggtaatgggcccgtgcagcgcttccagtgctcctgccccaccgtcagcagctccttcacgccgtcatccatggccttggtgaacttccccacagcctcgcacttctgctctatttctactaagtccaagtcaggtgcctctggttccatggtggaaaatatcatgactcccgccagctcatctctctcggccttcctctttccagttttccattccttctcatctcggaaatttaggaactgctggaaaacttcactttctgagattactggatggcgacacatcctggtcatccaggcctgaagtctctccatgcgcattttgataaattcctcttcaaagcggcctgtgacttgtttgtctggaagagaagggattggaatggctgacccaaacttaaccaggagacgctcatataaccagtcaaagtgcttatacctgtggtttacagatcgattagtgttagtaggtgttagctgatattcgatgtagctctttagaccatacattttggagccttttctgggatctgctaccacacagtcaaaagtagaggtaggccaa

SEQ ID NO: 228318 - DNA, 1204 bp, Homo Sapiens
gcatgttcaaggaaacaaaaatttcaagatacagaatacaacatatcagattaaataattcagaattattttaatgtatacacaaataacaatataaagcacatacataagatacattatataatttgaggtttcaaaaagcagtaatttggttttaaaattctgacaccaatatctaatgtaacattcaagtaaaacatatttcaaaagttaagactcctgagactaacacataactctatgacagcctgcctttaccacgatcttcaaaatagtgctgttcaattctcctacagaaagcaaggaggttgctatagtttttcaccttctcagaaagttcatcatttgtcaattgtgtggtaagaatggtgtatagatggccaaataccagtgcgtcaagttcagtaggctgcttattgaagaaatacgattgtgttcccagtctttgagagagagcttgacagcactggtctacatcctctaagacctggtccagagtcttctttccccatccaatagctttcatcttacgtttgacttcccactgtttttgataggccaaaatatgattcagaggccaagggtaaggagatccatacctagcatgagtgatctcccctactgtagcttcatcacaccactgaagatacagctctgcagtcaacagcatattgttgactaattccatgtaagctttcatttctgctttttggacttcctccagcccatcactaagagaatggcccttggctttaacaaattggactattggaccaagttctgatactacttgatttcccacatgaataaaaggtactttaccagatggagacatatattctgcatttgccctacaaactactttgataggcaagttacacatttgcaaaaaggcctgcactgcaagagaagctgcattgtcagaaagtaaaatttgctcccctttcaattgctgatataatgtagcattttcaggccaaggttctgcagctgcaatctgggagacgaaggcttccgccactagagacatgtcggctgggaggcccggcgcccgggtgcctgccccccacgggcctcagcgtcctccaccgcaaacccggaggctctcggcagttaacgagcctagccccgccaacgttcagactcgcaaagcccactccaacagcagcggcggctgcagtgaggcccccaaggttaccgccaa

SEQ ID NO: 228319 - DNA, 919 bp, Homo Sapiens
ttggatcaggtcccggcccgccggaacctgggcgatccacgatgccgagtttgccacgctgcgacagcccataggcttgcccccccgggcattcgggtggactacgaacacaaactgaagccctaggacttgtcgcccgtttgcgctctcgccgaggcacaggctgctcgcggaccaccctgctccgaaaactaagaggtaggtggtagcccattcatctggttactgatactggccggcatcagtggactgtcggcaggtccttgagcaactggtgtgtgaaatgggacggacgtcaaaggacaagcgggatgtctactaccgcctggccaaggagaatggctggcgtgctcgcagcgccttcaaactgctacaactggataaggaattccaactcttccaaggcgtgacacgggcagttgacctgtgtgcagccccaggcagctggagccaggtgctgagccagaagatcgggggccaagggtccggccacgtggtggctgtggacctgcaggctatggctccactaccaggtgtggtacagatccagggggacatcacccagctgtccactgccaaggagatcatccagcactttaagggctgccctgcggacctagtggtgtgtgacggggctcctgatgtaaccggtctccatgatgttgatgagtatatgcaggcccagctcctcctagctgctctgaacattgctacacatgtcctgaagccagggggctgctttgtggccaagatattccgaggccgggatgtgacgctcctctacagccagctgcaggtcttcttctccagcgtgctgtgtgccaagcccaggagcagccggaactctagcatcgaggccttcgctgtctgtcaggctatgaccctcccgagggcttcatcccggacctgagcaaacccc

SEQ ID NO: 228320 - DNA, 899 bp, Homo Sapiens; identical to SEQ ID NO: 194753

SEQ ID NO: 228321 - DNA, 477 bp, Homo Sapiens
ttggcgcaattgtgccctggttcgccaagatgtcgttcccaaagtataagccgtcgagcctgcgcactctgcctgagaccctcgacccagccgaatacaacatatctccggaaacccggcgggcgcaagccgagcggttggccataagagcccagctgaaacgagagtacctgcttcagtacaacgatcccaaccgccgagggctcatcgaaaatcctgccttgcttcgttgggcctatgcaagaacaataaatgtctatcctaatttcagacccactcctaaaaactcactcatgggagctctgtgtggatttgggcccctcatcttcatttattatattatcaaaactgagagggataggaaagaaaaacttatccaggaaggaaaattggatcgaacatttcacctctcatattaagtctggcaatgatgactatatgtattcctgcctaaataaatcatctattaatcattaa

SEQ ID NO: 228322 - DNA, 430 bp, Homo Sapiens; identical to SEQ ID NO: 194754

SEQ ID NO: 228323 - DNA, 996 bp, Homo Sapiens
  misc_feature (610)..(618): n is a, c, g, or t
cttataaaagccaactttgtacaaaaaagttggtgtaatggctgcttcctagaaggtaatgtacgaactcgtctccaaaggatacttaggttgcaccagtgtatttgtaaaacaggagcaaatttggaccttgccgggccaaagtcgtgtcacgtggaacctcttaatctcagcatccggagctccaggaagggaaaatttcaagtcagatagaattctatatataccatttctttggaaccttcagccctcaagattccaacatcatgacctcagtttcaacacagttgtccttagtcctcatgtcactgcttttggtgctgcctgttgtggaagcagtagaagccggtgatgcaatcgcccttttgttaggtgtggttctcagcattacaggcatttgtgcctgcttgggggtatatgcacgaaaaagaaatggacagatgtgactttgaaaggcctactgagtcaaacctcaccctgaaaacctttgcgctttagaggctaaacctgagatttggtgtgtgaaaggttccaagaatcagtaaataagggagtttcacatttttcattgtttccatgaaatggcaacaaacatacatttataaattgnnnnnnnnntgttttctttacaacaaataatgcacagaaaaatgcagcctataatttgctagttaggtagtcaaagaagtaagatggctgaaatttacataagtaatatttcataatcttagaattctctcaaagcatgtgaaataggaagaaggaagttcttgcccagaatcttaggaaatcaccactgttcggttataatcactgcctcctgaatcgttgaggagtcttttaaattagatttttgttttgttgtctcccaagttaatattatatttagatatcagagagtcaaggcaaaaggaaaacttttatctctagggaaaaacatttagaaaaatgtattcagtgtatctaatactgaaatgcggaaaaaaatttattgtt

SEQ ID NO: 228324 - DNA, 684 bp, Homo Sapiens
ctttgtacaaaaaagttgggtcggagtcccgattttctcctgctgctgtggcccggacatggcgactcccggccctgtgattccggaggtcccctttgaaccatcgaagcccccagtcattgaggggctgagccccactgtttacaggaatccagagagtttcaaggaaaagttcgttcgcaagacccgcgagaacccggtggtacccataggttgcctggccacggcggccgccctcacctacggcctctactccttccaccggggcaacagccagcgctctcagctcatgatgcgcacccggatcgccgcccagggtttcacggtcgcagccatcttgctgggtctggctgtcactgctatgaagtctcgaccctaagcccagggtctggccttgaaagctccgcagaaatgattccaaaacccagggagcaaccactggccctaccgtgggacttactccctcctctcctttgagaggcccatgtgtcgctggggaggaagtgaccctttgtgtaactgtaaccgaaagttttttcaaaaatcctaaatgctgttgcttgaatgttacatacttctatttgtgcgacatctcccctccgctcccctgcttagtaaactctaataatccaaaaaggaaaaataaaacaaaccaaatgattatatactaggttagtataaaag

SEQ ID NO: 228325 - DNA, 241 bp, Homo Sapiens; identical to SEQ ID NO: 194756

SEQ ID NO: 228326 - DNA, 1107 bp, Homo Sapiens
ttggctcccgcgccccgcgaggctccggggtctcgggcttccgccttcttgctgccctcgttcttgccagggccgcggttagtccctgctggccaccccactgcgaccatgttcgttccctgcggggagtcggcccccgaccttgccggcttcaccctcctaatgccagcagtatctgttggaaatgttggccagcttgcaatggatctgattatttctacactgaatatgtctaagattggttacttctataccgattgtcttgtgccaatggttggaaacaatccatatgcgaccacagaaggaaattcaacagaacttagcataaatgctgaagtgtattcattgccttcaagaaagctggtggctctacagttaagatccatttttattaagtataaatcaaagccattctgtgaaaaactgctttcctgggtgaaaagcagtggctgtgccagagtcattgttctttcaagcagtcattcatatcagcgtaatgatctgcagcttcgtagtactcccttccggtacctacttacaccttccatgcaaaaaagtgttcaaaataaaataaagagccttaactgggaagaaatggaaaaaagccggtgcattcctgaaatagatgattccgagttttgtatccgcattccgggaggaggtatcacaaaaacactctatgatgaaagctgttctaaagaaatccaaatggcagttctgctgaaatttgtttcagaaggggacaacatcccagatgcattaggtcttgttgagtatcttaatgagtggcttcagatactcaaaccacttagcgatgaccccacagtatctgcctcacggtggaaaataccaagttcttggagattactctttggcagtggtcttccccctgcacttttctgatctaatttctgttttataccttatacccaaacacttactaccaacacagctgttaaacattctatacaaaaaaattgtatgatctggtattaggaaattactttcacagtaaatatcaaagaaaaaagattaagagtctctttgccatgcttttcatcatatgcaccaaatgtaaattttgtaccataaaattttatttcctaa

SEQ ID NO: 228327 - DNA, 708 bp, Homo Sapiens
aggatccccaaccgcctgcgaaacccaagccgccgcgtaggagcgtgcgttcgggccctcttctcccacctgttcgactccccatccccaggatgtcaacctcagtccctcaaggccatacctggacccaacgggtgaagaaagacgatgaggaggaggacccgctggaccagctgatctcccgctctggctgtgctgcctcccactttgcagtgcaggagtgcatggcccagcaccaggactggcggcaatgccagccacaggtgcaggcgttcaaggattgcatgagtgaacagcaggcgaggcggcaagaggagctgcagaggaggcaagaacaagccggtgcccaccactgagaccccaaaccacctatccccagtagatggccctgccaagaccagcacccagcaagattatagaggaagaaatcctaaatgctggtgtgggaggtctaaaacatggggagagtttttggatctggagttgagagccatgggtttggacatgactggcacaaacagctgtcatatgttcatggtcagatgtcatacattctcagctgtcttgttccaccagtatttaccaggaaaacaaagaatgtgttaagggatgctcccccaccccacatcttaagtcagtgtgccaagtactgagatgattttagggacattttattttaaattaaatttacaatctaatggtaaattg

SEQ ID NO: 228328 - DNA, 1509 bp, Homo Sapiens; identical to SEQ ID NO: 194760

SEQ ID NO: 228329 - DNA, 1208 bp, Homo Sapiens
  misc_feature (855)..(865): n is a, c, g, or t
ttggcggagaaccccacaaatttaagagagaatgggccagtgtcatgcgctgcatagcagtttttgttggcattaaccacgccagtgctaaattggattttgccaataatgtccagctgtccttgactttagcagccctatctttgggcctttggtggacatttgatcgttccagaagtggccttgggctggggatcaccatagcttttctagctacgctgatcacgcagtttctcgtgtataatggtgtctatcagtatacatccccagatttcctctatattcgttcttggctcccttgtatatttttctcaggaggcgtcacggtggggaacataggacgacagttagctatgggtgttcctgaaaagccccatagtgattgagtcttcaaaaccaccgattctgagagcaaggaagattttggaagaaaatctgactgtggattatgacaaagattatcttttttcttaagtaatctatttagatcgggctgactgtacaaatgactcctggaaaaaactcttcacctagtctagaatagggaggtggagaatgatgacttaccctgaagtcttcccttgactgcccgcactggcgcctgtctgtgccctggagcattctgcccaggctacgtgggttcaggcaggtggcagcttcccaagtattcgatttcattcatgtgattaaaacaagttgccatatttcaaagccttgaactaagactcaattaccaacccgcagttttgtgtcagtgcccaaaggaggtaggttgatggtgcttaacaaacatgaagtatggtgtaataggaataatatttatccaaaagatttttaaaaatagggctgtgtttnnnnnnnnnnncaaaacaagaaaagcagcagtgattatagagaggtcacactctaagtggggtcgcggcgtggccacgcttcacggtcacgctcgtccgtcctgcagtggcgtgtttacatggtcacacgtgtgtgtatcaccagtgggtcaactgcttgtcattcctcccgtggcagtttgtgtagacaatcttactgagcaaaaggcaatgaaaagtcttggttcccacactgcgatatattggaattttcacctcagtttatgaagtttatttcgaaatccatagtcatctaagaatgaatacctgtctgccatgtatttcaatcttagtgagccaaaattgtttgtttgt

SEQ ID NO: 228330 - DNA, 1201 bp, Homo Sapiens
ttggcgaagaaaagggagccgcgcagcgcctacgggagtccggcggcagcagccggtaccggcaaccacgggcagctctcagggaatctccgtcgtgaggccagaggctccagtccccgcgagtccagatgcctgtccagcctccaagcaaagacacagaagagatggaagcagagggtgattctgctgctgagatgaatggggaggaggaagagagtgaggaggagcggagcggcagccagacagagtcagaagaggagagctccgagatggatgatgaggactatgagcgacgccgcagcgagtgtgtcagtgagatgctggacctggagaagcagttctcggagctaaaggagaagttgttcagggaacgactgagtcagctgcggttgcggctggaggaagtgggggctgagagagcccctgaatacacggagccccttggggggctgcagcggagcctcaagattcgcattcaggtggcagggatctacaagggcttctgtctggatgtgatcaggaataagtacgaatgtgagctgcagggagccaaacagcacctggagagtgagaagctgctgctctatgacacgctgcagggggagctgcaggagcggatccagaggctggaggaggaccgccagagcctggacctcagctctgaatggtgggacgacaaactgcacgccagaggcagctccaggtcttgggactccctgccgcccagcaagaggaagaaggcacctctggtttctggcccatacatcgtgtacatgcttcaagagatcgacatcctggaggactggacagccatcaaaaaggtgggggccgctgctgcccacgtgacctgccccacctcagggccccccaccctggcagcagctctgccatctgcaggcctgggagttctctgctcaccaaggcttccccatcttcagcccagagtccctggatcgcagttggctcacaagtcctcttgctcaaggcggccctgggaaaagggatttctagtctgtgtcagccccttcccgttctggggcaggttttgatggggtgggagggtggcggggaggcgggagagccgctgagctggccagcagtcagagcatgggagctctgcctgggtggggcctatgctcccggtcctgggggcacagcactgaggcaacagcccacaagccacagagtggggggtggggca

SEQ ID NO: 228331 - DNA, 1017 bp, Homo Sapiens
ttggcttccctgttttctttcgtcgtcgtgggtgggaattgtcgcctaagtggttccgggttggtggatgaccttgagccctcaggaacgagatggcggttctctggaggctgagtgccgtttgcggtgccctaggaggccgagctctgttgcttcgaactccagtggtcagacctgctcatatctcagcatttcttcaggaccgacctatcccagaatggtgtggagtgcagcacatacacttgtcaccgagccaccattctggctccaaggctgcatctctccactggactagcgagagggttgtcagtgttttgctcctgggtctgcttccggctgcttatttgaatccttgctctgcgatggactattccctggctgcagccctcactcttcatggtcactggggccttggacaagttgttactgactatgttcatggggatgccttgcagaaagctgccaaggcagggcttttggcactttcagctttaacctttgctgggctttgctatttcaactatcacgatgtgggcatctgcaaagctgttgccatgctgtggaagctctgacctttttgacttcatactttgaagaattgatgtatgcctctttgcctctgctttgtcatgccattaagctcacaataaggaagaaataacagataagtccattggtggacagccttcttctcttaatcacaagattattttcagaatttaatctttgaggaaaaggtttgagaggaattatatctaagttgtgagactgagttctatattctggtgagttaatggggttgcctcccagcttcttataagactcacagtataactaaacatgatatatcagcttttgcctttcaatttatcaatctcttaaagagaatccaactttattacgattaagtatatgatcaaacttccatatttgccttggggaataatgggaccaaagggaaatactctttatttcatgaataaaaactttgcagaaatttagaacagtgtttaattt

SEQ ID NO: 228332 - DNA, 964 bp, Homo Sapiens; identical to SEQ ID NO: 194764

SEQ ID NO: 228333 - DNA, 1295 bp, Homo Sapiens
ttggctccaaacccagtcacttccatggttttgtctctgtcacggtcacctacaaacaggctctgagaggaatcaccgtagggtgcctccacaatgcccgatgatgcaggaaagaatgggaggtctgctgaacggctgccgggtcgcaaggaaccgcggcgctggatcacgcgacattagagctgcccgcggattggctctcacggcgttcaggtaggaaaggaggtgtgtatccagcttgggctccagttttctgcccgcctccttttacgttattgcggagcgacggcgccggacagtcaacgtcatctaggagcaccgagcagcttggctaaaagtaagggtgtcgtgctgatggccctgtgcgcactgacccgcgctctgcgctctctgaacctggcgcccccgaccgtcgccgcccctgccccgagtctgttccccgccgcccagatgatgaacaatggcctcctccaacagccctctgccttgatgttgctcccctgccgcccagttcttacttctgtggcccttaatgccaactttgtgtcctggaagagtcgtaccaagtacaccattacaccagtgaagatgaggaagtctgggggccgagaccacacaggccgaatccgggtgcatggtattggcgggggccacaagcaacgttatcgaatgattgactttctgcgtttccggcctgaggagaccaagtcaggaccctttgaggagaaggttatccaagtccgctatgatccctgtaggtcagcagacatagctctggttgctgggggcagccggaaacgctggatcatcgccacagaaaacatgcaggctggagatacaatcttgaactctaaccacataggccgaatggcagttgctgctcgggaaggggatgcgcatcctcttggggctctgcctgtgggtaccctcatcaacaacgtggaaagtgagccaggccggggtgcccaatatatccgagctgcagggacgtgtggtgtgctactgcggaaggtgaatggcacagccattatccagctgccctctaagaggcagatgcaggtgctggaaacgtgcgtagcaacagtaggccgagtatccaacgttgatcataacaaacgggtcattggcaaggcaggtcgcaaccgctggctgggcaagaggcctaacagtgggcggtggcaccgcaaggggggctgggctggccgaaagattcggccactaccctccatgaagagttacgtgaagctgccttctgcttctgcccaaagctgatatccctgtactctaataaaatg

SEQ ID NO: 228334 - DNA, 1332 bp, Homo Sapiens
  misc_feature (1063)..(1073): n is a, c, g, or t
gttgccgcggcttgttattcttaaaatggcgccgctagacctggacaagtatgtggaaatagcgcggctgtgcaagtacctgccagagaacgacctgaagcggctatgtgactacgtttgtgacctcctcttagaagagtcaaatgttcagccagtatcaacaccagtaacagtgtgtggagatatccatggacagttttatgacctttgtgaactgttcagaactggaggtcaggttcctgacacaaactacatatttatgggtgattttgtagacagaggttactatagtttggagaccttcacttaccttcttgcattaaaggctaaatggcctgatcgtattacacttttgcgaggaaatcatgagagtagacagataacacaggtctatggattttatgatgagtgccaaaccaaatatggaaatgctaatgcctggagatactgtaccaaagtttttgacatgctcacagtagcagctttaatagatgagcagattttgtgtgtccatggtggtttatctcctgatatcaaaacactggatcaaattcgaaccatcgaacggaatcaggaaattcctcataaaggagcattttgtgatctggtttggtcagatcctgaagatgtggatacctgggctatcagtccccgaggagcaggttggctttttggagcaaaggtcacaaatgagtttgttcatatcaacaacttaaaactcatctgcagagcacatcaactagtgcacgaaggctataaatttatgtttgatgagaagctggtgacagtatggtctgctcctaattactgctatcgttgtggaaatattgcttcgatcatggtcttcaaagatgtaaatacaagagaaccaaagttattccgggcagttccagattcagaacgtgttattcctcccagaacgacaacgccatatttcctttgaggccttcgcccatcctgctgacccatttttctgccctcttcttaccccaattttcttgtattaccctctacaatatactttttattgagcactttgctgctgaaatgctgcctcttgccnnnnnnnnnnnaaattttaaattatctaaatttattgtttgttgtggtgtctatagcaaagtttttctatcaattttccccccatcccatccccaccctggactcatttgagaaagacttgagaaatgtcttaatactcacactgctgcatgtagcttcttgcttatttactgggtctgggaaacaggaatgtgttttccttttttttaaaagccaattgacagaattacaccctaaatactccttcctttttgtatcattcagcctttt

SEQ ID NO: 228335 - DNA, 1059 bp, Homo Sapiens
ttggatagtgatccctgtcaaagatgaccctgatgaaggggaggccagacttgagaatgaaataccaaaaacgtctggcagcgagatggcaaacaaacgtatgaaagtaaaacatgatgatcactatgagttaatagtagatggaaggggctattatatctgtattgtatgcaaaaggtcatatgtctgtctgacaagcttgcggagacattttaacattcattcttgggagaagaagtatccgtgccgttactgtgagaaggtatttcctcttgcagaatatcgcacaaagcatgaaattcatcacacaggggagcgaaggtatcagtgtttggcctgtggcaaatctttcatcaactatcagtttatgtcttcacatataaagtcagttcatagtcaagatccttctggggactcaaagctttatcgtttacatccatgcaggtctttacaaatcagacaatatgcatatctttccgatagatcaagcactattcctgcaatgaaggatgatggtattgggtataaggttgacactggaaaagaacctccagtagggaccactacatctactcagaacaagccaatgacctgggaagatatttttattcagcaggaaaatgattcaatttttaaacaaaatgtaacagatggcagtactgagtttgaatttataataccagagtcttactaaactcctttgaaatactagaaagttttgttttggatgatggggcaggggtttcagaagatctgtaaaacaaattaaggtgcgaacaagttaatttgatctgccacattatctgaaggaagtgtagtgggatttttgttgataatttttagaagcaaattttcctgaaagttttgagtagaggtgagaccccctccccaagtatctgtttatatagttagttttcagctcatttaaaagaggcaaaaattaaaagcttggagagatagtttcctgaatagaatttgaagcagtctgaatgttctttgaaaataactggagttattagcataccctagtacatcttacagctttccccttccatgtta

SEQ ID NO: 228336 - DNA, 941 bp, Homo Sapiens
ttggctccctgtcagggcgtaattgagtcaaaggcaggatcaggttccccgccttccagtccaaaaatcccgccaagagagccccagagcagaggaaaatccaaagtggagagaggggaagaaagagaccagtgagtcatccgtccagaaggcggggagagcagcagcggcccaagcaggagctgcagcgagccgggtacctggactcagcggtagcaacctcgccccttgcaacaaaggcagactgagcgccagagaggacgtttccaactcaaaaatgcaggctcaacagtaccagcagcagcgtcgaaaatttgcagctgccttcttggcattcattttcatactggcagctgtggatactgctgaagcagggaagaaagagaaaccagaaaaaaaagtgaagaagtctgactgtggagaatggcagtggagtgtgtgtgtgcccaccagtggagactgtgggctgggcacacgggagggcactcggactggagctgagtgcaagcaaaccatgaagacccagagatgtaagatcccctgcaactggaagaagcaatttggcgcggagtgcaaataccagttccaggcctggggagaatgtgacctgaacacagccctgaagaccagaactggaagtctgaagcgagccctgcacaatgccgaatgccagaagactgtcaccatctccaagccctgtggcaaactgaccaagcccaaacctcaagcagaatctaagaagaagaaaaaggaaggcaagaaacaggagaagatgctggattaaaagatgtcacctgtggaacataaaaaggacatcagcaaacaggatcagttaactattgcatttatatgtaccgtaggctttgtattcaaaaattatctatagctaagtacacaatagcaaaacaaaagaaaagaaaatttttgtagtagcgtttttt

SEQ ID NO: 228337 - DNA, 1085 bp, Homo Sapiens; identical to SEQ ID NO: 194765
  misc_feature (898)..(918): n is a, c, g, or t

SEQ ID NO: 228338 - DNA, 887 bp, Homo Sapiens
gggagggggcctggggcttggagtccagcatgtgtgtgtgccaggaatggccctgggggcccaccctgtggtggtggacagctgcgggggcctctgccctcagtctggtccgtgcctgggccttctcgccagcacagctcccggctgagcgcgtacaccttgtgcgggtcggccgggtcccccgagttatctcgcagcatcacgaagcgacgcgtgctgcgcagtgcgcagcggaagttggttttccagccggcgcgctccgcagtctcagcctcggggggcgggccacctcccctgctgctaggcggccacctgccgcgggccacagcccaggccttgaagatgcgcgcgtcggcctcgctcaggtccttgcgcgcgaagtgcttccagggcacgcggaaacaggtgcgggcctcgtccagccactgcagcccctcatagcagccgctgctgatctctccaaggagccactctccgaacagcacgcgtggggctgccctctcaggagccaaggccattgctccttctgcaggggcagttaggtggcggtcaggtgttataacaggggaggtaagggctcctgtcgcagcagacgccaggccgcggccacaggtcgtgtggccaggtgtcacaggtgtccacaggtgtggactgagggcttgtagccaccgacgctgcctcggtatggatctcttggcagagggggctacaggtgtgactgcaggtgtggccggcgcgcacacatgaagtcacaggtgttgaaccagtgtccaggcctggcgggaaggcgcaggccggaccctgggtgccagagccgccgggacgggaagttccaacttttttgtacaaagttggtttttttagggaaagcattgcttcatcaattt

SEQ ID NO: 228339 - DNA, 890 bp, Homo Sapiens
ttggagacatattctgagcctacagcagaggaacctccagtctcagcaccatgaatcaaactgccattctgatttgctgccttatctttctgactctaagtggcattcaaggagtacctctctctagaactgtacgctgtacctgcatcagcattagtaatcaacctgttaatccaaggtctttagaaaaacttgaaattattcctgcaagccaattttgtccacgtgttgagatcattgctacaatgaaaaagaagggtgagaagagatgtctgaatccagaatcgaaggccatcaagaatttactgaaagcagttagcaaggaaaggtctaaaagatctccttaaaaccagaggggagcaaaatcgatgcagtgcttccaaggatggaccacacagaggctgcctctcccatcacttccctacatggagtatatgtcaagccataattgttcttagtttgcagttacactaaaaggtgaccaatcatggtcaccaaatcagctgctactactcctgtaggaaggttaatgttcatcatcctaagctattcagtaataactctaccctggcactataatgtaagctctactgaggtgctatgttcttagtggatgttctgaccctgcttcaaatatttccctcacctttcccatcttccaagggtataaggaatctttctgctttggggtttatcagaattctcagaatctcaaataactaaaaggtatgcaatcaaatctgctttttaaagaatgctctttacttcatggacttccactgccatcctcccaaggggcccaaattctttcagtggctacctacatacaattccaaacacatacaggaaggtagaaatatctgaaaatgtatgtgtaagtattcttattt

SEQ ID NO: 228340 - DNA, 659 bp, Homo Sapiens
ttggatcgtaaatctctttactatgtcctagctctgtcctgctacctaaaggatataaagaaatattattgctctagaatgtattactttgttctcccatgaaagaattcagtttgttagtacctatatttttaaactggtgaaactgacccaaatatgtaataaataccatagtagctcagacccaaggagatatttttctaaaatcagttttcgttaaagtacttctacttccgttattggatatggtatctcctaaagtgtaaaaaaaatctgttactatatagtgataaaccatctgctcatcgtaagtgtaaggcttaacaaataagtaatacatgctatatttattcaagtgtctattgcttaattgttaattgtgagcagatttattgaatgcctattctattttctgcagtttacaatacaataactctttgagtaagttgaagtttaattgtgcaacaaatttgtattaaagtacaatttaaagtgtttttctctatagccttttttgactggggaagcaaggggtaatgttaattagtacactttgttcttgtactagctatgtttctataagatatggtgcccctgtgtatcccagagatgctagaaaactgttctttgctcctatttgtgggttctgtttatgtggg

SEQ ID NO: 228341 - DNA, 915 bp, Homo Sapiens; identical to SEQ ID NO: 194767

SEQ ID NO: 228342 - DNA, 547 bp, Homo Sapiens
ataaaagccaactttgtacaaaaaagttggctttttcttcagcgaggcggccgagctgacgcaaacatgcagatctttgtgaagaccctcactggcaaaaccatcacccttgaggtcgagcccagtgacaccattgagaatgtcaaagccaaaattcaagacaaggagggtatcccacctgaccagcagcgtctgatatttgccggcaaacagctggaggatggccgcactctctcagactacaacatccagaaagagtccaccctgcacctggtgttgcgcctgcgaggtggcattattgagccttctctccgccagcttgcccagaaatacaactgcgacaagatgatctgccgcaagtgctatgctcgccttcaccctcgtgctgtcaactgccgcaagaagaagtgtggtcacaccaacaacctgcgtcccaagaagaaggtcaaataaggttgttctttccttgaagggcagcctcctgcccaggccccgtggccctggagcctcaataaagtgtccctttcattgactggagcagcaattg

SEQ ID NO: 228343 - DNA, 516 bp, Homo Sapiens; identical to SEQ ID NO: 194768

SEQ ID NO: 228344 - DNA, 1113 bp, Homo Sapiens
ttggcactgagcctcaaacagttgtttcgaaaacttgagcagtgcaacacagaattaaagaagtacagccatgttaacaaaaaggctttggatcagtttgtaaatttctccgagcagaaagaaaagttaataaagcgtcaagaagagttagataggggttacaaatcgatcatggaactgatgaatgtacttgaacttcggaaatatgaagctattcagttaactttcaaacaggtatctaagaacttcagtgaagtattccagaagttagtacctggtggcaaagctactttggtgatgaagaaaggagatgtggagggcagtcagtctcaagatgaaggagaagggagtggtgagagtgagaggggttctggctcacaaagcagtgtcccatcagttgaccagtttactggagttggaattagggtgtcatttacaggaaaacaaggtgaaatgagagaaatgcaacagctttcaggtggacagaaatccttggtagcccttgctctgatttttgccattcagaaatgtgacccggctccattttacttgtttgatgaaattgaccaggctctggatgctcagcacagaaaggctgtgtcagatatgattatggaacttgctgtacatgctcagtttattacaactacttttaggcctgaactgcttgagtcagctgacaaattctatggtgtaaagttcagaaataaggttagtcatattgatgtgatcacagcagagatggccaaagactttgtagaagatgataccacacatggttaattggaaaatactacctactggtttgggagatgtatatagtaatatgattctcatacccaggaactgtaaatttaaacctaaatatttggccaatagttttcagacttaaagcatcatagtccttttatatttgtctttgtattttataagatactctgtaatgtcatgtttgtactgatagtttaagaatttaatttcctgtacaactttttgtaaaatgttctgctcctattttaaatgttttgaaacatgctaaatattctttcctaattattttatcacttatactaccttttttatagcttcaattaaataatcggttttatgact

SEQ ID NO: 228345 - DNA, 958 bp, Homo Sapiens
ttgggtacgtgtccctctgtgtatgacataagaggagctcaaggccatcgtctcctcttccaatcaggccctgctgaggcaggggacctctgcccgagacctgctcagagagatggcccgggacaagccacgcctcctagctgccctggaagtggcttcagctgccatggccaaggaggaggccgccggcggggagcaggatgccctggacctgtaccagcacagcctgggggagctactgctgttgctggcagcggagcccccgggccggaggcgggagctgcttcacactgaggttcagaacctcatggcccgagctgaatacttgaaggagcaggtcaagatgagggaatctcgctgggaagctgacaccctggacaaagagggactgtcggaatctgttcgtagctcttgcacccttcagtgaccctagaagaatgattggacagatgtgagccatctggagcagaggggcactaacccaggctgacgccaagaatgaagtggcccactgcagccctggcgagcaggcttcttggatggacagtgctgagacccccatatcccagagtccccagcctccctcaggttactctgcaccccacagatggtttgatggctgtgctgtatactggaggggagggcaggactctgggagaacagcacttctttcatgagacctttgttactcggtggttactgggtcctgtgcctgtccgttttggggcatgcagccctctatcatttttggctccgagaagagggcaaggggcccccgcagggtacttctgtgcttgccctcgccctgccaacacgcagctgtgcccctggcctgcccttcccgggaccccttattccaactcagctcctctttgcactggaatggggcactccaacacccctcagggaccaccctccccacaatatgcactcagccccacagaacccaccagtcttt

SEQ ID NO: 228346 - DNA, 1401 bp, Homo Sapiens; identical to SEQ ID NO: 194773
  misc_feature (1113)..(1184): n is a, c, g, or t

SEQ ID NO: 228347 - DNA, 833 bp, Homo Sapiens
tgagctagatctgactttctagtgtcctagccttggcccgatggacatgtcatttctctcagctcgtttctgtcccctaaagtgagaatattgcctgggaagattacattagacgatgtatatgcgaagacacttgatagctggtattgtcatgattctgattatttcactactgctactttccctgtggcctaggctttgcctatttccagtgggcgagctagctagatcctcctcccttaaataagccagtgtttttaagacagaatactacttgcatagtggacaataatatcttaaagaactgagcaggatgaaaagaatttgatagaaagcaggtttgaggagcacattggaggttggcaggtttcgaggctgcttgagaggacttgggccgatctgggctgggcttggacgtgaccctggcacccaggcaggtggatcccagctggggcttccattcacgactttctggtccctggcaggacagagcgggatgccaccagcttgtccaaagggaagttccaggagctcctggtgggcatcgttgtggagaatgacgctggccgcggcgagatcaacgagttgaagcaggtggaaggggaggcttcgtgcagcagccgcaaaggaaagctgattttcttctatgagtggaacatcaaactgggctggaaaggcatcgttaaagaatctggagtgaagcacaagggattgattgaaatacccaatctttctgaggaaaatgaagtagatgacactgagaatttacaacgggaatgattttaccaacgaaagctatggcaacccaggaattgactgtcaaagaaaactga

SEQ ID NO: 228348 - DNA, 1107 bp, Homo Sapiens
ttggaaagcggagtgaaagagggaggcagggagccggagagccggaaccggagtcgcagcggcggtaatagagacccctgtgcggtgcggagggggcggcggccccgactctgacccgcgccgggggtgggccatggcggagatcagcgacctggaccggcagatcgagcagctgcgtcgctgcgagctcatcaaggagagcgaagtcaaggccctgtgcgctaaggccagagagatcttggtagaggagagcaacgtgcagagggtggactcgccagtcacagtgtgcggcgacatccatggacaattctatgacctcaaagagctgttcagagtaggtggcgacgtccctgagaccaactacctcttcatgggggactttgtggaccgtggcttctatagcgtcgaaacgttcctcctgctgctggcacttaaggttcgctatcctgatcgcatcacactgatccggggcaaccatgagagtcgccagatcacgcaggtctatggcttctacgatgagtgcctgcgcaagtacggctcggtgactgtgtggcgctactgcactgagatctttgactacctcagcctgtcagccatcatcgatggcaagatcttctgcgtgcacgggggcctctccccctccatccagaccctggatcagattcggacaatcgaccgaaagcaagaggtgcctcatgatgggcccatgtgtgacctcctctggtctgacccagaagacaccacaggctggggcgtgagcccccgaggagccggctacctatttggcagtgacgtggtggcccagttcaacgcagccaatgacattgacatgatctgccgtgcccaccaactggtgatggaaggttacaagtggcacttcaatgagacggtgctcactgtgtggtcggcacccaactactgctaccgctgtgggaatgtggcagccatcttggagctggacgaacatctccagaaagatttcatcatctttgaggctgctccccaagagacacggggcatcccctccaaaaagcccgtggccgactacttcctgtgaccccgcccggcccctgccccctccaacccttctgggccctcgcaccactg

SEQ ID NO: 228349 - DNA, 947 bp, Homo Sapiens
ttggcgacggcggctcaagtcagagttgctgggttttgctcagattggtgtgggaagagcctgcctgtggggagcggccactccatactgctgaggcctcaggactgctgctcagcttgcccgttacctgaagaggcggcggagccgggcccctgaccggtcaccatgtgggccttctcggaattgcccatgccgctgctgatcaatttgatcgtctcgctgctgggatttgtggccacagtcaccctcatcccggccttccggggccacttcattgctgcgcgcctctgtggtcaggacctcaacaaaaccagccgacagcagatcccagaatcccagggagtgatcagcggtgctgttttccttatcatcctcttctgcttcatccctttccccttcctgaactgctttgtgaaggagcagtgtaaggcattcccccaccatgaatttgtggccctgataggtgccctccttgccatctgctgcatgatcttcctgggctttgcggatgatgtactgaatctgcgctggcgccataagctgctgctacctacagctgcctcactacctctcctcatggtctatttcaccaactttggcaacacgaccattgtggtgcccaagcccttccgcccgatacttggcctgcatctggacttgggaatcctgtactatgtctacatggggctgctggcagtgttctgtaccaatgccatcaatatcctagcaggaattaacggcctagaggctggccagtcactagtcatttctgcttccatcattgtcttcaacctggtagagttggaaggtgattgtcgggatgatcatgtcttttccctctacttcatgatacccttttttttcaccactttgggattgctctaccacaactggtacccatcacgggtgtttgtgggagataccttctgttactttgctggcatgac

SEQ ID NO: 228350 - DNA, 631 bp, Homo Sapiens; identical to SEQ ID NO: 194774
  misc_feature (46)..(67): n is a, c, g, or t

SEQ ID NO: 228351 - DNA, 909 bp, Homo Sapiens
ttggcgtgtgttgccatatcgaccattttgcattaactggttgttggcttctatcctgggggctgagcgactgcgggccagctcttcccctactccctctcggctccttgtggcccaaaggcctaaccggggtccggcggtctggcctagggatcttccccgttgcccctttggggcgggatggctgcggaagaagaagacgaggtggagtgggtagtggagagcatcgcggggttcctgcgaggcccagactggtccatccccatcttggactttgtggaacagaaatgtgaagtttttgatgatgaagaagaaagcaaattgacctatacagagattcatcaggaatacaaagaactagttgaaaagctgttagaaggttacctcaaagaaattggaattaatgaagatcaatttcaagaagcatgcacttctcctcttgcaaagacccatacatcacaggccattttgcaacctgtgttggcagcagaagattttactatctttaaagcaatgatggtccagaaaaacattgaaatgcagctgcaagccattcgaataattcaagagagaaatggtgtattacctgactgcttaaccgatggctctgatgtggtcagtgaccttgaacacgaagagatgaaaatcctgagggaagttcttagaaaatcaaaagaggaatatgaccaggaagaagaaaggaagaggaaaaaacagttatcagaggctaaaacagaagagcccacagtgcattccagtgaagctgcaataatgaataattcccaaggggatggtgaacattttgcacacccaccctcagaagttaaaatgcattttgctaatcagtcaatagaacctttgggaagaaaagtggaaaggtctgaaacttcctccctcccacaaaaaggc

SEQ ID NO: 228352 - DNA, 911 bp, Homo Sapiens
actttgtacaaaaaagttggccctcttcctcctcctcaagggaaagctgcccacttctagctgccctgccatcccctttaaagggcgacttgctcagcgccaaaccgcggctccagccctctccagcctccggctcagccggctcatcagtcggtccgcgccttgcagctcctccagagggacgcgccccgagatggagagcaaagccctgctcgtgctgactctggccgtgtggctccagagtctgaccgcctcccgcggaggggtggccgccgccgaccaaagaagagattttatcgacatcgaaagtaaatttgccctaaggacccctgaagacacagctgaggacacttgccacctcattcccggagtagcagagtccgtggctacctgtcatttcaatcacagcagcaaaaccttcatggtgatccatggctggacggtaacaggaatgtatgagagttgggtgccaaaacttgtggccgccctgtacaagagagaaccagactccaatgtcattgtggtggactggctgtcacgggctcaggagcattacccagtgtccgcgggctacaccaaactggtgggacaggatgtggcccggtttatcaactggatggaggaggagtttaactaccctctggacaatgtccatctcttgggatacagccttggagcccatgctgctggcattgcaggaagtctgaccaataagaaagtcaacagaattactggcctcgatccagctggacctaactttgagtatgcagaagccccgagtcgtctttctcctgatgatgcagattttgtagacgtcttacacacattcaccagagggtcccctggtcgaagcattggaatccagaaaccagttgggcatgttgacatttacccgaatggaggtacttttc

SEQ ID NO: 228353 - DNA, 1010 bp, Homo Sapiens
tgtctttgcaaggggatcacacattattgacatttgctttctccatctcccctgttgaggattccatgaaggcagcagctgccttcatttccttactctgccatgtttggtgaatattataggatgagcatagatgggaaggagccttcattgcagtccagaagggctcctcatcctgtccctctgccccttaggcagcacgctggctcttctcctgaacttcctcgcctgcctggccagcttctgtgtggaaaccaacaatggcgcaggctttgggctttctatcctctgggtcctccttttcactccctgctcctttgtctgctggtaccgccccatgtataaggctttccggagtgacagttcattcaatttcttcgttttcttcttcattttcttcgtccaggatgtgctctttgtcctccaggccattggtatcccaggttggggattcagtggctggatctctgctctggtggtgccgaagggcaacacagcagtatccgtgctcatgctgctggtcgccctgctcttcactggcattgctgtgctaggaattgtcatgctgaaacggatccactccttataccgccgcacaggtgccagctttcagaaggcccagcaagaatttgctgctggtgtcttctccaaccctgcggtgcgaaccgcagctgccaatgcagccgctggggctgctgaaaatgccttccgggccccgtgacccctgactgggatgccctggccctgctacttgagggagctgacttagctcccgtccctaaggtctctgggacttggagagacatcactaactgatggctcctccgtagtgctcccaatcctatggccatgactgctgaacctgacaggcgtgtggggagttcactgtgacctagtccccccatcaggccacactgctgccacctctcacacgccccaacccagcttccctctgctgtgccacggctgttgcttcggttatttaaataaaaagaaaagtggaactggaa

SEQ ID NO: 228354 - DNA, 957 bp, Homo Sapiens; identical to SEQ ID NO: 194778

SEQ ID NO: 228355 - DNA, 435 bp, Homo Sapiens
tttgtacaaaaaagttgggttccaacttttccgcttatctgggaggtgttgggcgcggacagtcgagatgtcagagaaaaagcagccggtagacttaggtctgttagaggaagacgacgagtttgaagagttccctgccgaagactgggctggcttagatgaagatgaagatgcacatgtctgggaggataattgggatgatgacaatgtagaggatgacttctctaatcaattacgagctgaactagagaaacatggttataagatggagacttcatagcatccacaagaagtgttgaagtaacctaaacttgacctgcttaatacattctatggtttacaacccacgatgggacactaaaaaaatgtgtttatttcattatctgcttggatttatttgtgtttttgtaacacaaaaaataaatgttttgatat

SEQ ID NO: 228356 - DNA, 125 bp, Homo Sapiens
ctacagctaacattatccttgatgtttccaactagacactttcctactaagatcaggaacatggcaaggaacaccacaccactgcttttcagcattgtactggaagtgctatataatgcagtgtt

SEQ ID NO: 228357 - DNA, 551 bp, Homo Sapiens
ttggcttttattccccctgcatggtgctgggcctacagtttcttcacgaacacaagatcgtctacagggacctgaagttggacaatttgctcctggacaccgagggctacgtcaagatcgcagactttggcctctgcaaggaggggatgggctatggggaccggaccagcacattctgtgggaccccggagttcctggcccctgaggtgctgacggacacgtcgtacacgcgagctgtggactggtggggactgggtgtgctgctctacgagatgctggttggcgagtccccattcccaggggatgatgaggaggaggtcttcgacagcatcgtcaacgacgaggttcgctacccccgcttcctgtcggccgaagccatcggcatcatgagaaggctgcttcggaggaacccagagcggaggctgggatctagcgagagagatgcagaagatgtgaagaaacagcccttcttcaggactctgggctgggaagccctgttggcccggcgcctgccaccgccctttgtgcccacgctgtccggccgcaccgac

SEQ ID NO: 228358 - DNA, 886 bp, Homo Sapiens; identical to SEQ ID NO: 194781

SEQ ID NO: 228359 - DNA, 1106 bp, Homo Sapiens
aaataatgtgaaacccggttataaactagagtattaatgttattccgtggaaaattacataaacacaaatatctttggaaaggtaatttaaacaaagttgtagaaaagataaaataacattatgctaagtcctttcatgttttttcattgtccttatttatattagtttagaatactttatttcaaaaatttaaaagtttaaatacttaaaaggtttccaaatatttacagaattgtgtctgaaaaattatgcacagatgtttgtctattgtttttcattaataagattagctactgtctacagtgataagcattttaataataaaaaagtcaggaaagtgttatttcttaatattttaattatcattataatttggcagtaaaaatcacttttcacaaagacattacacttacattaacaaatcactcttgattcattcatttttgtttttccatttctcctggcagctttgtaagaatccataacttcaatatgtctaactcagttttgcttagctcatggtaaacatttggaaaactatgaaacttcgtggtcactcctagagattttaacattgagtttgtctcttctgcccaagaatgaagaactaactcatctgcagtaccatgacactgaaataattcaggaagtacaccattactcttctgaagagcctggtaaacagcagatgctttattcagaaaactagaaagagcaaatactcctgccacatcttgatgatttctatatgctaaatgcattgccatgcatcctcccatagagaatcctcctattaatatcctgttcttcttgatgccactttttacttcttcatcaatcaaatcagtaagcacttgacacatgacatcaattgattcaaggtgttctgggcagtcattggttattttaaatctgggaggagctgttggataaataatttttatgtgttggaatgttaaatcttgatttaaaacctgcttgatccacattcttaatccttgtccagaatcacctgagccatgcaggaagatcagagaggcgctatgcctccctgccggcgacacgatacagcgaaggcagaaccgacccaacttttttgtacaaa

SEQ ID NO: 228360 - DNA, 704 bp, Homo Sapiens
ctttgtacaaaaaagttgggagagcaccccccaaaaaagccagtgggttcccgcgcgtgccgagactctgaggccttgcacccccacgatcccgtacgatggccgtcaagaagatcgcgatcttcggcgccactggccagaccgggctcaccaccctggcgcaggcggtgcaagcaggttacgaagtgacagtgctggtgcgggactcctccaggctgccatcagaggggccccggccggcccacgtggtagtgggagatgttctgcaggcagccgatgtggacaagaccgtggctgggcaggacgctgtcatcgtgctgctgggcacccgcaatgacctcagtcccacgacagtgatgtccgagggcgcccggaacattgtggcagccatgaaggctcatggtgtggacaaggtcgtggcctgcacctcggctttcctgctctgggaccctaccaaggtgcccccacgactgcaggctgtgactgatgaccacatccggatgcacaaggtgctgcgggaatcaggcctgaagtacgtggctgtgatgccgccacacataggagaccagccactaactggggcgtacacagtgaccctggatggacgagggccctcaagggtcatctccaaacatgacctgtgccatttcatgctgcgctgcctcaccaccgatgagtacgacggacacagcacctacccctcc

SEQ ID NO: 228361 - DNA, 1020 bp, Homo Sapiens
tttgtacaaaaaagttggcagatgtggctcgtgtcatggtattgacatccaagatgtgtctatggttgtcaactatgatatggccaaaaatattgaagattacatcccccgcattggccgcacgggacgagcaggcaagagtggggtggccatcaccttcctcacaaaagaggactctgctgtgttctacgagctgaagcaagctatcctggaaagcccagtgtcttcctgtccccccgaactagccaaccacccagatgcccagcataagccaggcaccatcctcaccaagaagcgccgggaagagaccatctttgcctgacacagcactcttcctgtgggctgagggcatctccaaagctgcctgatgcctgtttttcagaaccctcacatccctctttccaggtcctcactcttgggatatgggggcttaggaaaacaatccaactccctagcccagaccctcaggtcaggaggcctgcgtgtggggctgcaaaaggagaggacgacgctgtcggaggcagggagagcaaattaccacagcttcttggcccagttctgcccttctttgctttgggattgcactgggccatcagctcatgccaggctatgggggcagccagttggcattgctccccagactgaacagaaacctggccgccggatgggacctcctttggcacagacttgactgtgtaactgcataaactgcagtagcatcattgccctagatgccccaggagacctggcaccatgaggattacagacagtggaatcttactgtcatctggacagctgttttcctgtttggatggtaaaggaagttgagagtctttagacctgtgcacagccccgcaccaaggggtgctgtatgctctaggcatcccctcccccaggggattttctaagtagatggggggacacggtgaactggctgtgtccatctttgtcactgagtgaaatctctgttttctattctctgagaagataagtttgtatgttctgagaataaatacatga

SEQ ID NO: 228362 - DNA, 947 bp, Homo Sapiens
agtgttttcagttccgcctccaatcgcccattcccctcttcccctcccagccccctccatcccatcggaagaggaaggaacaaaaggtcccggaccccccggatctgacggggcgggacctggcgccaccttgcaggttcgatacaagaggctgttttcctagcgtggcttgctgcctttggtaagaacatgtcgtccatcttgccattcacgccgccagttgtgaagagactgctgggatggaagaagtcagctggtgggtctggaggagcaggcggaggagagcagaatgggcaggaagaaaagtggtgtgagaaagcagtgaaaagtctggtgaagaagctaaagaaaacaggacgattagatgagcttgagaaagccatcaccactcaaaactgtaatactaaatgtgttaccataccaagcacttgctctgaaatttggggactgagtacaccaaatacgatagatcagtgggatacaacaggcctttacagcttctctgaacaaaccaggtctcttgatggtcgtctccaggtatcccatcgaaaaggattgccacatgttatatattgccgattatggcgctggcctgatcttcacagtcatcatgaactcaaggcaattgaaaactgcgaatatgcttttaatcttaaaaaggatgaagtatgtgtaaacccttaccactatcagagagttgagacaccagttttgcctccagtattagtgccccgacacaccgagatcctaacagaacttccgcctctggatgactatactcactccattccagaaaacactaacttcccagcaggaattgagccacagagtaattatattccagaaacgccacctcctgggatatatcagtgaagatggagaaacaagtgaccaacagttgaatcaaagtatggacacagctctccagcagaactatctcctactac

SEQ ID NO: 228363 - DNA, 739 bp, Homo Sapiens
ctttgtacaaaaaagttggctcgggaagctggagcgggccggcggtgcagtcacgggggagcgaggcctgctgggcttggcaacgagggactcggcctcggaggcgacccagaccacacagacactgggtcaaggagtaagcagaggataaacaactggaaggagagcaagcacaaagtcatcatggcttcagcgtctgctcgtggaaaccaagataaagatgcccattttccaccaccaagcaagcagagcctgttgttttgtccaaaatcaaaactgcacatccacagagcagagatctcaaagattatgcgagaatgtcaggaagaaagtttctggaagagagctctgcctttttctcttgtaagcatgcttgtcacccagggactagtctaccaaggttatttggcagctaattctagatttggatcattgcccaaagttgcacttgctggtctcttgggatttggccttggaaaggtatcatacataggagtatgccagagtaaattccatttttttgaagatcagctccgtggggctggttttggtccacagcataacaggcactgcctccttacctgtgaggaatgcaaaataaagcatggattaagtgagaagggagactctcagccttcagcttcctaaattctgtgtctgtgactttcgaagttttttaaacctctgaatttgtacacatttaaaatttcaagtgtactttaaaataaaatacttctaa

SEQ ID NO: 228364 - DNA, 1506 bp, Homo Sapiens; identical to SEQ ID NO: 194784

SEQ ID NO: 228365 - DNA, 1122 bp, Homo Sapiens; identical to SEQ ID NO: 194785

SEQ ID NO: 228366 - DNA, 687 bp, Homo Sapiens
taaaaaagccaactttgtacaaaaaagttgggtgaggacccagaacctgaagcagcagaggagccggagagagcagttctcccgggcacctgtgtcagccctgccccttgcccctaaccacctgggcggtggtgctgtggttctgggggcagagtcccatgcctccaaggatgtcgccatcgacatgatggactctcggaccagccagcagctgcagctcattgacgagcaggattcctacatccagagtcgggcagacaccatgcagaacattgagtcgacaattgttgagttgggctccatctttcagcagttggcacacatggttaaggaacaggaggaaaccattcagaggatcgacgagaacgtgctaggagcccagctggacgttgaggccgcccattcagagatcctcaagtacttccagtctgtcacctccaaccggtggctcatggtcaaaatcttcctcatcctcattgtcttcttcatcatctttgtggtcttccttgcttgaaccctctctactctgaggcactctgttggggtttgggaccctcctgggaaggcaagtggccagtgctgccactgagcctgtgcagggtacttgggagaaaggccctgtttccctggaactgctaagaatgaacactgcccctgatcccccaccccttgcctctggccaccctg

SEQ ID NO: 228367 - DNA, 1010 bp, Homo Sapiens
ttggcgccccactacccaggaaggcggagctgggtgcgagcgccctaccgctttcgctttcccttcgcggtgcccactccactccttgtgcggcgctaggccccccgtcccggtcatggccatgctcagggtccagcccgaggcccaagccaaggtggatgtgtttcgtgaagacctctgtaccaagacagagaacctgctcgggagctatttccccaagaagatttctgagctggatgcatttttaaaggagccagctctcaatgaagccaacttgagcaatctgaaggccccattggacatcccagtgcctgatccagtcaaggagaaagagaaagaggagcggaagaaacagcaggagaaggaagacaaggatgaaaagaagaagggggaggatgaagacaaaggtcctccctgtggcccagtgaactgcaatgaaaagatcgtggtccttctgcagcgcttgaagcctgagatcaaggatgtcattgagcagctcaacctggtcaccacctggttgcagctgcagatacctcggattgaggatggtaacaattttggagtggctgtccaggagaaggtgtttgagctgatgaccagcctccacaccaagctagaaggcttccacactcaaatctctaagtatttctctgagcgtggtgatgcagtgactaaagcagccaagcagccccatgtgggtgattatcggcagctggtgcacgagctggatgaggcagagtaccgggacatccggctgatggtcatggagatccgcaatgcttatgctgtgttatatgacatcatcctgaagaacttcgagaagctcaagaagcccaggggagaaacaaagggaatgatctattgagagccctctctcccattctgtgatgagtacagcagagaccttcctgctttttactggggactccagattttccccaaacttgcttctgttgagatttttccctcaccttgcctctcaggcacaataaatatagttataccactgc

SEQ ID NO: 228368 - DNA, 797 bp, Homo Sapiens
ttggggctcgggagatggacggccgccgtgttttgggccggttctggagtggctggcggcggggcctgggtgtccgcccagtgcccgaggacgcaggctttggcaccgaagcccggcatcagaggcaaccccgcggctcctgccaacggtcggggcccctcggggaccagcccttcgcggggctgctgccaaaaaacctcagtcgggaggagctggttgatgcgctgcgggcagccgtggtggaccggaaaggacctctagtgacgttgaacaagccacagggtctaccagtgacaggaaaaccaggagagctgacgttgttctcagtgctgccagagctgagccagtccctagggctcagggagcaggagcttcaggttgtccgagcatctgggaaagaaagctctgggcttgtactcctctccagctgtccccagacagctagtcgcctccagaagtacttcacccatgcacggagagcccaaaggcccacagccacctactgtgctgtcactgatgggatcccagctgcttctgaggggaagatccaggctgccctgaaactggaacacattgatggggtcaatctcacagttccagtgaaggccccatcccgaaaggacatcctggaaggtgtcaagaagactctcagtcactttcgtgtggtagccacaggctctggctgtgccctggtccagctgcagccactgacagtgttctccagtcaactacaggtgcacatggtactacagctctgccctgtgcttggggaccacatgtactctgccccgtgtggg

SEQ ID NO: 228369 - DNA, 944 bp, Homo Sapiens
ccttagcgtttagaatagccatcattgtcctgcaataggcagagctatcacgtccaggaaaaatgagggagggaaccacagaggcagcgtgagatccaaatacagcattcaaaggtaattggtccagtggtgcctggggagggaggaagggtgatactccagggttagccgtcttcttttgggggtgtgtaccagccgtttttttcgtggatctgcaccaaggacttgtaggactgctgtgctcttgtcagactgtattgagatttgttggctccaaactgcactcgtgctttccccttcaccagtgtggcactgatctgcatgatcactgactctatggagtaggcactgctccagccctgtttggtgagaagttccatgcagatggcccctccgcccagaacataccctccagagaggactggagacacaaccctgacaaatggtgggtcaaagggaaagttatctttaaaggaaaagttaagtagaatgaagtcggctccttctttctctttgaggatctggagatcgttgtgcaaagcgctgtcctggtcaactttgaggagtttgacattccaatcatacagactgtcattcacgagttcgactgcatagtttccgcctttgaaactctgtgatcggtatatatccctgagctccttcatcagccggtcagtggcctgcaccgagccagacactgcaccatttaagtaatcttgcctctggttctttttaattttctctaggatggccaagttttcttttccaatgccatcatcttcagatttcttgccctcagctggctcttcctctttcatttcatagtgatctaagtcttctgtgtcctcaggcatctcctcatcttcatcttctgaagacacgtcttcctgtgtgcactgctctgctggcaagggttgatccagcatctccacatctggatccaa

SEQ ID NO: 228370 - DNA, 1029 bp, Homo Sapiens
aattgatgagcaatgcttttcttttaaatagccaactttgtacaaaaaagttggctgaaaactgcagcttccttctcaccttgaagaataatcctagaaaactcacaaaatgtgtgatgcttttgtaggtacctggaaacttgtctccagtgaaaactttgatgattatatgaaagaagtaggagtgggctttgccaccaggaaagtggctggcatggccaaacctaacatgatcatcagtgtgaatggggatgtgatcaccattaaatctgaaagtacctttaaaaatactgagatttccttcatactgggccaggaatttgacgaagtcactgcagatgacaggaaagtcaagagcaccataaccttagatgggggtgtcctggtacatgtgcagaaatgggatggaaaatcaaccaccataaagagaaaacgagaggatgataaactggtggtggaatgcgtcatgaaaggcgtcacttccacgagagtttatgagagagcataagccaagggacgttgacctggactgaagttcgcattgaactctacaacattctgtgggatatattgttcaaaaagatattgttgttttccatgatttagcaagcaactaattttctcccaagctgattttattcaatatggttacgttggttaaataaactttttttagatttagaaggtgatgtaatgatgtattcattgtgcttatgatgtattcttagtcataactgagtgaaggaaatgggaaatttgcattatttctttgttctgatatgaataataacatatttcataataattcaaggtaaaaagggatatctatggatttccctaggtaggagataacaagtatgtaccattactgaatattaaatccttctttatcatagctacagttaagtaggtgtatctcagaaacctaaggtagttttaaatgtagtgaaattgtccacagcaagctggcccaagtgctcacattttatagccgctctgtcttagtgcgttgcaagagaggagtatata

SEQ ID NO: 228371 - DNA, 663 bp, Homo Sapiens
gaaactggtatgcccactttgaggaggttgtctgaccgttccagggtcaagctgcatcactgcaaggtggaaacgatggagtgaggcaggcttagagccgatgtgccttccaggacaggtaggagttccagataacagcaacacattggacaacggccaacctgtaatgaagggggaccaggtagaagttggctaactgcacagcaggccatagatagtagttggtgataagggcatcaggataatcccgctgtagtttggcccagttgtcctgggctgacagtccattaagtgcccctaccagtgggagaaagcagcctagaaaacacggggcaaagcccccctgatccaacaacatcttcttcagtgcatccactttggtggtgccagggatgaaccgatccaaaaccttgtaccagcctcctaccacagggcccacaaagccacagcccagggacaccatggtcagagtccggcctctctggtgttcctgcagaccccgcctctccaccagctgctgtgagataatgtcacccaggcccatcagggacccagctgtcaggacctgtactttccacgggtgagcggccagggcccgctggtatgcccgccagagtgccatgcttccttgtgggcactcatggcccaacttttttgtacaaa

SEQ ID NO: 228372 - DNA, 868 bp, Homo Sapiens
  misc_feature (746)..(755): n is a, c, g, or t
ttggggcaagaccccaatcctgtacaaactgaagttgggggagattgtcaccaccatcccaaccataggcttcaatgtagaaacagtggaatataagaacatctgtttcacagtctgggacgtgggaggccaggacaagattcggcctctgtggcggcactacttccagaacactcagggcctcatctttgtggtggacagtaatgaccgggagcgggtccaagaatctgctgatgaactccagaagatgctgcaggaggacgagctgcgggatgcagtgctgctggtatttgccaacaagcaggacatgcccaacgccatgcccgtgagcgagctgactgacaagctggggctacagcacttacgcagccgcacgtggtatgtccaggccacctgtgccacccaaggcacaggtctgtacgatggtctggactggctgtcccacgagctgtcaaagcgctaaccagccaggggcaggcccctgatgcccggaagctcctgcgtgcatccccgggatgaccagactcccggactcctcaggcagtgccctttcctcccacttttcctcccccatagccacaggcctctgctcctgctcctgcctgcatgttctctctgttgttggagcctggagccttgctctctgggcacagaggggtccactctcctgcctgctgggacctatggaaggggcttcctggccaaggccccctcttccagaggaggagcagggatctgggtttccnnnnnnnnnnctgttttgggtgtactctaagggccaggttgggagggggaaggtgagggcttcgggtggtgctataatgtggcactggatcttgagtaataaatttgctgtgggtttgtaaaa

SEQ ID NO: 228373 - DNA, 1184 bp, Homo Sapiens
ttggggtatttaaaggtcactgggagcatttctgattcccggccacactttgcatttcaacactcagcccggaaagatgctcgttcggttgttggacctctttcactccctgcgtgtaagaaggtgaatcacgtgggaaaaagtggcttttcagtaaacgggtacagctcattctttctgagaaggccccaggtcctgctccctcctcggatttgattgtcttccgtgctttgcctcactcgtagtaaatgaccatccatagaatatgtgaatctttggtgagcttcagtgggcagagtgaagtcccgcattagcatttaggtgccctgagctgtttctgccaatagattagaaagcagccatgagttgacagtctttagggcccctgccagtgtgcaattagtcattgacaagaacaatgccatttgagagtgaggtggtccctgctgctacgaggccattgtactgttttttccttgaggtcaaagcagtgcttcccatagagtttgctgcctcttctgtggacaggaagaaaacttcatgaccgaatcagagccttggtggccactgactctcgtgcttattgcagatgctgtggttggcctcacaagcaacgccttatgctgatgtgcagaggtgccagctgccatttgccaaactctgcatttcatttcatctaaggcttaacccctcttccttcctggtgtacctgtgtctcctcggaaggaagtcatagtttagatgaaaccattttttgtacaatgtaaagatcatctgagcaagatgagcattttgtaaaaatgaaaatgtgactcacataaaatcaggaacttggcacagtgttgcattaataactttagggtgcagacatgctgtgtgaatctcacaatgcgtcgtagatgtcgcgtgttggaagggagcaggaggaaggactgatactggcaaatcagtagagtgaggtgatccttagcaacgtgccaggacacttcctgtgtgcctgcagttgtcagggaccatttgggatcccgaatctcattctctaaaactgctttcttgaaacatgttacttccttagtataatcaatgtatactcccttactggcctgaaacgttgtatagctacttattcagatactgaagaccaacggactgaaaaaaagaacaaacattagctattttatgct

SEQ ID NO: 228374 - DNA, 913 bp, Homo Sapiens
ttggcgcgctcgcacgcatcccggcctcactgcccctcgactcctgttccgttggggggcctgaggcgagcctgagcgcgctgttggccggagggaagccggaggagaccgggtcgactgggcagagcggcagagggtcgaggagcctgctctgcacgcccagggagtagaagtgggcagggagcagggtcacgtgagggagcgcgccgcgactgagcttgggtccgactggagctcaggctcgcgacccagactggtgggccaggcctccaagccggccttacacccaatccaaggaggacagaccggacacagagggacggagcgagcaaggagacatggcttcatcattcctgcccgcgggggccatcaccggcgacagcggtggagagctgagctcaggggacgactccggggaggtggagttcccccatagccctgagatcgaggagaccagttgcctggccgagctgtttgagaaggctgccgcgcacctgcaaggcctgattcaggtggccagcagggagcagctcttgtacctgtatgccaggtacaaacaggtcaaagttggaaattgtaatactcctaaaccaagcttctttgattttgaaggaaagcaaaaatgggaagcttggaaagcacttggtgattcaagccccagccaagcaatgcaggaatatatcgcagtagttaaaaaactagatccaggttggaatcctcagataccagagaagaaaggaaaagaagcaaatacaggttttggtggggccagttattagttctctatatcatgaagaaaccatcagggaagaagacaaaaatatatttgattactgcagggaaaacaacattgaccatataaccaaagccatcaaatcgaaaatgtggatgtgaatgtgaaagatgaagaggg

SEQ ID NO: 228375 - DNA, 647 bp, Homo Sapiens
ttggaaattgacatgcttttagattgagtctgaaacagcagcttctgaggaaaccttgttcaacgcgtcccagcgcatcagcgagttagagaggaatgtggaagaacttaagcggaaagctgcccaaaactccggggaggcagaatatattgaaaaagtagtatatactgtgaagcaaagtgcagaagatgttaagaagactttagatggtgaacttgatgaaaagtataaaaaagtagaaaatttaattgccaaaaaaactgaagagtcagctgatgccagaaggaaagccgaaatgctacaaaatgaagcaaaaactcttttagctcaagcaaatagcaagctgcaactgctcaaagatttagaaagaaaatatgaagacaatcaaagatacttagaagataaagctcaagaattagcaagactggaaggagaagtccgttcactcctaaaggatataagccagaaagttgctgtgtatagcacatgcttgtaacagaggagaataaaaaatggctgaggtgaccaaggtaaaacaactacattttaaaaactgacttaatgctcttcaaaataaaacatcacctatttaatgtttttaatcacattttgtatggagttaaataaagtacagtgcttttgtatat

SEQ ID NO: 228376 - DNA, 688 bp, Homo Sapiens
ctttgtacaaaaaagttggcgccatggccccgccggccccgggcctcatctcggtgttctcgagttcccaggagctgggtgcggcgctagcgcagctggtggcccagcgcgcagcatgctgcctggcaggggcccgcgcccgtttcgcgctcggcttgtcgggcgggagcctcgtctcgatgctagcccgcgagctacccgccgccgtcgcccctgccgggccagctagcttagcgcgctggacgctgggcttctgcgacgagcgcctcgtgcccttcgatcacgccgagagcacgtacggcctctaccggacgcatcttctctccagactgccgatcccagaaagccaggtgatcaccattaaccccgagctgcctgtggaggaggcggctgaggactacgccaagaagctgagacaggcattccaaggggactccatcccggttttcgacctgctgatcctgggggtgggccccgatggtcacacctgctcactcttcccagaccaccccctcctacaggagcgggagaagattgtggctcccatcaatgactccccgaagccaccgccacagcgtgtgaccctcacgctacctgtcctgaatgcgcacgaactgtcatctttgtggcaactggagaaggcaagccagctgttctgaagcgcatatttggaggaccaggaggaaaa

SEQ ID NO: 228377 - DNA, 1343 bp, Homo Sapiens
gggagtgtcgcaaccacatgggggcgcccagagacccagacgccgcccgctggccttatatttagtattgcacttcaggtgagtcattggtagggaggcgagtgctggcgtgacgagatgctacgggtcggtggatctggagcacagcctgcagcttcacaccgggaacatccactcgtgggctctgattccgtactggatctccttcagctccttctggaagcggaggatcagctcaggcccattttccatggtgggaatgtggaggttcctgtctttgtacaggattcggtgcactgggcagacctggcaagcggtgcccgagccaaagacttcccgcacgcggccctcctccagggcccgcagcaactgcttcatggtgatcgtgcgctccaccacccggaactcaccccaggtctgagccatgtccagtagactctgtctgaccactccaggcaggataacaccattcagcgggggcgtcaccagctccagcaccccatcttcgtgggtccagtagacaaagatgttcatggttcccacctcggtgagctggtggtcgggcccatacagccagaggacctgttcacagccccgcttgagtgcctcctgttgcactaacacggtgggcccataattcccacctaacttgtagttgccgaccccgcccacccaggcccggatgaaggctgggtcggccaggagggagaccggggtcacggagcctccagggaagtaggcacccactgggcagagaatgacgaacaggagcgcgcgcgtgggctggctgacacccagcgagggctcgttcccaatgagcacaggccgcacatagaggctggtgccggcggcatcggggacccagtccttgtccacttcgatgagccggcggatgcactccagcaactccagcttgtcgaaactcggcaggcacaggcgcatggctgagcgcagcatccggtccatgttgagccaggggcggaagaggcgcacctgctggtctttgcctttgaacgccttcatgccctcaaacagctgcagggagtagtggaggctggaggaggctgggtgcagcgtgaggttctggaagggctggattcggggctggccccagcccttgtcattccattccaccatcagcatgtggtcggtaaatgtcttcccaaacaccaggggctcgccggggccaggcttcttatgaggcttctgtgtcatttccagctgcaggtctgcagccttgaaactggaggaggcatatcttctgggaccacacagaagccaagggacagagagaagctttcgtgcccagatctgccccagagcggctgcggccatgatcccaa

SEQ ID NO: 228378 - DNA, 480 bp, Homo Sapiens
aaattgatgagcaatgcttgacaataaaaaggaactttgtacaaaaaagttggctgtgaagaaacatggcggccgcgacgttgacttcgaaattgtactccctgctgttccgcaggacctccaccttcgccctcaccatcatcgtgggcgtcatgttcttcgagcgcgccttcgatcaaggcgcggacgctatctacgaccacatcaacgaggggaagctgtggaaacacatcaagcacaagtatgagaacaagtagttccttggaggcccccatccaggccagaaggaccaggtccacccagcagctgtttgcccagagctggagcctcagcttgaagatgatgctcaaggtactcttcatggaccaccattcgctgttggcaagaaacggctttacttacaaaacagactctttaccttctgctgtgtttgaagtatgtttagtcagcatgctcaggaaataaatgtgaattgccctt

SEQ ID NO: 228379 - DNA, 1084 bp, Homo Sapiens
ttggcaacgatcaactggctcttttgtgggagaactcatgtataaaaacagctttgactgttttaagaaagtgctacgctatgaaggcttctttggactgtatagaggtctgttgccacagttattgggagttgccccagagaaggccataaaacttacagtgaacgattttgtgagggataaatttatgcacaaagatggttcgggcccacttgcagcagaaattcttgctggaggctgcgctggaggctcccaggtgattttcacaaatcctttagaaatcgtcaagatccgtttgcaagtggcaggagaaatcaccactggtcctcgagtcagtgctctgtctgtcgtgcgggacctggggttttttgggatctacaagggtgccaaagcatgctttctgcgggacattcctttctcggccatctactttccgtgctatgctcatgtgaaggcttcctttgcaaatgaagatgggcaggttagcccaggaagcctgctcttagctggtgccatagctggtatgcctgcagcatctttagtgacccctgctgatgttatcaagacgagattacaggtggctgcccgggctggccaaaccacttacagcggagtgatagactgctttagaaagatactgcgtgaagaaggaccaaaagctctgtggaagggagctggtgctcgtgtatttcgatcctcaccccagtttggtgtaactttgctgacttacgaattgctacagcgatggttctacattgattttggaggagtaaaacccatgggatcagagccagttcctaaatccaggatcaacctgcctgccccgaatcctgatcacgttgggggctacaaactggcagttgctacatttgcagggattgaaaacaaatttggactttacctacctctcttcaagccatcagtatctacctcaaaggctattggttggaggcccataggaagatcagccctgggatagtgctgtctttttgtgggtactgcagtaaagaacatccctcctgggaatgaagcatgcttcatccctttaacgtccatctcttgttaaattcagtccaggcttttt

SEQ ID NO: 228380 - DNA, 1027 bp, Homo Sapiens
  misc_feature (750)..(771): n is a, c, g, or t
ttgggtcctcagccagctctcggtccccggccccagcccagaccaggaaggagaaaggaaaatctaagaaagaagacggtgttaaagaggaaaagcggaaaagggattcgtccacacaaccacccaaatctgcaaaacctccagcaggggggaggtcctcccagcagccctcgacaccccagcaggcaccccccgggcagccccagcagggcacatttgtggcccacaaggagatcaagttgacactgttgaataaggcggctgataaaggaagcaggaagcgctatgaaccatcagacaaggacaggcagagccctcctccagccaagcggcccaacacatccccagaccgaggttctcgggaccggaagtcaggtgggagactgggctccccgaagccagagcggcagagaggccagaactccaaagcccctgcagccccggctgacaggaagcgccagctgtcaccccagtccaagagctccagcaaggtcacgagcgtgcccggcaaagcctcggatcccggcgccgccagcaccaaatcagggaaggccagcacgctgtctcggcgggaggagctgctgaaacagctgaaggccgtggaggatgctattgcacgcaagcgggccaagatccccgggaaagcataggccgtgccccgaccggactggacgcatttttatacatagggtaagcgcagccattttggattttgcagttaatgtcttattttggctgtgattctttttnnnnnnnnnnnnnnnnnnnnnngtttctcagctggaaaagaagccacacaggaaatgacaacgacgctgaatcccagcctccctccccagagcagaagtcccgcaggacagacagacacagacagcgctagtgaccagcacggttctcatgtaaattacaagccccagccgccagccccgccttctcttcctcctcctccgtcttcttccctggccctggtcaggcctgtggagccccagctctgggtccctagcccgggtccaggcagccaggctcc

SEQ ID NO: 228381 - DNA, 875 bp, Homo Sapiens
tcgagaagccagtgagctgggccgccggagcctcgagaagccagtgagcggagccaccggagcctcgagaagccagtgagctgagccactgcagcctcaaggctgaggctcagcaaatttccatttcctctgtgaattaatggccataataatggcaagaacagcacaagcgagtggctgattctatcagacagcaagtgtgtgccaactgtcaggaaacagtccttaccatttggtcagcaagcagcaggacggttttgaggctgaatttcctggagcagaagttgaagaggtcctccaggcttggccccagcagctccatcaccatgacgttgtagtccccctctgccccgcaccatctgatggtggggatgcccactcctccctgcatcatcttgtagattttgctctcaatgtggagctgagggtgtttggttttgacacattcaagcttgatggcaacctcttctcctgcagcaatgtccgtaccgagatagatgtctccgaaggagccgctgccgatcttccggcccagccggtacctgttcccgactctcagctccatggcggcggcggcccgattcgctcctgccctcccggccgcttcctgggtctgaactctgggaggcggcgccgctgctgccgctactgcgggtccggctcccggctccgcccccctcacggccccgctttcaccatcgctttcctgtcgccccgccgctcccagcgcctcaatacggggcggatgggacagtccgagcgccgccgccgctgctccggcccctaccggtcccgcttgccctctccccgccgcggatggactcggatcttccgggcctaaatcccctttcagctgcctaaaggagccgccccaa

SEQ ID NO: 228382 - DNA, 1171 bp, Homo Sapiens
ttggctcctgatttattaatccctgatcgatcaccagaacctacaagggaacaattagatagtggtcgaataggagcagatgaagaaattgatgatttcaaaggaagatcagctgaggaagtagaagaaataaaggcagaaaaagaggctaaaactcaggctatacttttggagatggtgggagacctacctgatgcagatattaaacctccagaaaatgtactgtttgtgtgtaaattgaacccagtgaccacagatgaggatctggaaataatattctctagatttgggccaataagaagttgtgaagttatccgagactggaagacaggagagtccctctgttacgcttttattgaatttgaaaaggaagaagattgtgagaaagcattcttcaaaatggacaatgtgcttatagatgacagaagaatacatgtggattttagccagtcggttgcaaaggttaaatggaaaggaaaaggtgggaaatacaccaagagtgatttcaaggagtatgaaaaagaacaggataaaccacctaatttggttctgaaagataaagtaaagcccaaacaggatacaaaatacgatcttatattagatgagcaggccgaagactcaaaatcaagtcactcacacacaagtaaaaaacacaagaagaaaacccatcactgttctgaagagaaagaagatgaggactacatgccaatcaaaaatactaatcaggatatctatagagaaatggggtttggtcactatgaagaagaagaaagctgttgggagaaacaaaagagtgaaaagagagaccgaactcagaaccgaagtcgtagccgatctcgagagagggatggccattatagtaatagtcataaatcaaaataccaaacagatctttatgaaagagaaaggagtaaaaagagagaccgaagcagaagtccaaagaagtccaaagataaagaaaaatctaagtatagatgaaagatgaagaggcagaattgagaggctaacatatttactcttgtctaacttaagagtgccaggaaagcagatgcttagattttgtgtcaaagcttgttatttttttcatactaggattatggtctttagattatactgattatatagagcacggaaagataaagaattgaacattttctttgtatactttttt

SEQ ID NO: 228383 - DNA, 1283 bp, Homo Sapiens; identical to SEQ ID NO: 194789
  misc_feature (1000)..(1016): n is a, c, g, or t
  misc_feature (1155)..(1164): n is a, c, g, or t

SEQ ID NO: 228384 - DNA, 1096 bp, Homo Sapiens
ttggattctaaagatgatgatgaaactgaagaagataacaatcaagatgaatatgaccctatggaagcagaagaagctgaggatgaagaagatgatagggatgaggaagaaatgaccaaacgagatgacaaaagagatatcaacagatactgcaaggagaggccctctaaagataaggaaaaagaaaagactcaaatgatcacaattaacagagatctgttaatggcttttgtttattttgatcaaagtcattgtggttaccttcttgaaaaggatttggaagaaatactttatactcttggactacatctttctcgggctcaggtaaagaagcttcttaataaagtagtgctccgtgaatcttgcttttaccggaaattaacagacacctcaaaagatgaagagaaccatgaagagtctgagtcattgcaggaagatatgctaggaaacagattattacttccaacaccaacagtaaagcaggaatcaaaggatgtggaagaaaatgttggcctcattgtgtacaatggtgcaatggtagatgtaggaagcctcttgcaaaaattggaaaagagcgaaaaagtaagagctgaggtagaacagaagctgcagttactagaagaaaaaacagatgaagatgaaaaaaccatattaaatttggagaattccaacaaaagcctctctggtgaactcagagaagttaaaaaggaccttagtcagttacaagaaaacttaaagatttcagaaaacatgaatttacatttgaaaaccaaatgaataagacaatcagaaacttatctacggtaatggatgaaatccacactgttctcaagaaggataatgtaaagaatgaagacaaagatcaaaaatccaaggagaatggtgccagtgtatgataaaatccatgtagtgatgaggaatggtgttaaataatgtaatatataaaaatcatgatataagaatgtttgaaggtgatgcatgtttgattttagtagtataaatgtatcttagttcaaatgatgtataaagttttatgaatgtgagtttctgcttttgaaaattgcttgtaattcctagccttcaaattattaacact

SEQ ID NO: 228385 - DNA, 869 bp, Homo Sapiens
tcttgagactcattaccagacatctgcgtcctcacatatcctttctgagcccttagctggatgacgattcccaccagaaggaagattagcccaagtaggaaggctgcaatgccactcagcatctttctccaagaatattcagactgagctctccactccacagaaacagggctcagcaggctggagtgatcgacaaggcaggtgtagacatgtccaagttcaggagtcatttctagcatcaccacagtctgaaaggtccagtctccattcctgatagggccagtggacatgaccccagctctctcctcctgcccattcaggaaccacttgatcttgatatcccctggatagaagcctgtcacagagcagtgcagcagattatgctggtgcaggagtggggtcctctctgggtacactgtcacctctggttgcacttttctccccacagtgaagggtgcgcccagcctgtagttgtgtctacagaccccatccacggcctgtctgctcctctccaagagatccagccggctgttccactgctcagcatctggctgccccagcttggtcaatgccacaaacatccccacatcactgtcgaaacgtacatactcctccaagttaaagatgaatctgaccacaaactgcaccttttctgtcccgttggtgaagtaacagtcagcctttgcctgaatcacaaaatcttctggagagtctgtgccttgagtcatggaggaatccagtcgggtcagattcactagcagagccaccacccaggggacccacccagaacccattctggagaaaggaaaaaaatgagatagtaaaatcgtcagcctcttcagaatgagccaacttttttgtacaaagtt

SEQ ID NO: 228386 - DNA, 1517 bp, Homo Sapiens
ttggcctgggcttccggttggggtggcagggtggtggatctgttggtcccgttttcccgtcgcacgtggtggccactgttggcttctgaatggtttgcaaggcggatatccacgccaaggcctttggatcggccgtgggtacatccgtctgagccgttcctttccatcgcagagcggcggcctccggcggcgctctccagtcatggactaccggcggcttctcatgagccgggtggtccccgggcaattcgacgacgcggactcctctgacagtgaaaacagagacttgaagacagtcaaagagaaggatgacattctgtttgaagaccttcaagacaatgtgaatgagaatggtgaaggtgaaatagaagatgaggaggaggagggttatgacgatgatgatgatgactgggactgggatgaaggagttggaaaactcgccaagggttatgtctggaatggaggaagcaacccacaggcaaatcgacagacctccgacagcagttcagccaaaatgtctactccagcagacaaggtcttacggaaatttgagaataaaattaatttagataagctaaatgttactgattccgtcataaataaagtcaccgaaaagtctagacaaaaggaagcagatatgtatcgcatcaaagataaggcagacagagcaactgtagaacaggtgttggatcccagaacaagaatgattttattcaagatgttgactagaggaatcataacagagataaatggctgcattagcacaggaaaagaagctaatgtataccatgctagcacagcaaatggagagagcagagcaatcaaaatttataaaacttctattttggtgttcaaagatcgggataaatatgtaagtggagaattcagatttcgtcatggctattgtaaaggaaaccctaggaaaatggtgaaaacttgggcagaaaaagaaatgaggaacttaatcaggctaaacacagcagagataccatgtccagaaccaataatgctaagaagtcatgttcttgtcatgagtttcatcggtaaagatgacatgcctgcaccactcttgaaaaatgtccagttatcagaatccaaggctcgggagttgtacctgcaggtcattcagtacatgagaagaatgtatcaggatgccagacttgtccatgcagatctcagtgaatttaacatgctgtaccacggtggaggcgtgtatatcattgacgtgtctcagtccgtggagcacgaccacccacatgccttggagttcttgagaaaggattgcgccaacgtcaatgatttctttatgaggcacagtgttgctgtcatgactgtgcgggagctctttgaatttgtcacagatccatccattacacatgagaacatggatgcttatctctcaaaggccatggaaatagcatctcaaaggaccaagaagaacggtctagccaagatcatgtggatgaagaggtgtttaagcgagcatatattcctagaacttgaatgaagtgaaaatt

SEQ ID NO: 228387 - DNA, 927 bp, Homo Sapiens
ttggcgccagaggggccgggacatcatgacggtgggagccaggctccgaagcaaggcggagagcagcctcctgcgccgcgggccccgagggcgagggcgaaccgagggggacgaggaggcggccgccatcctggagcacctggagtacgcggacgaggcggaggcggcggccgagagcgggacgagcgcggcggacgagcggggcccggggacccggggcgcgcggagggtgcacttcgccctcctgcccgagcgctacgagccactggaggagccggcgccgagcgagcagcccaggaagaggtaccggaggaagctgaagaagtacggcaagaatgtcgggaaggtcatcatcaaaggatgccgctacgtggtcatcggcctgcaaggcttcgctgcagcctactccgccccgtttgcggtagccaccagcgtggtatccttcgtgcgctaatgggagctgctgtggcaggtgcccccagagtgaacgggagcccctgctgtgggaactttgtgaatcctggagcatctcagacttgaacacacagcatatttggaagagaaaacatgcctttctttgttgaatcacattagtatgatgagtgagtcatccctgcccatctgctgagcttctcacatctctcagtcacacgtggacccagtggtcaatcctgcagagaattcggcggaggttaggtttgggagtggagctagcgtgctaaagccagagccttcacgtgaaggtggcaggcactggggcggaagccaacactcaacagatgcaagcagtgtgggtgtgcagcagaacagtgatcttgggggaggaagaggatgttactagagtcagatgatttgctgtattctcctgaaaggtcgtaggctgacaggcgctcacattccttggctgcctcggttctgagggcagct

SEQ ID NO: 228388 - DNA, 1429 bp, Homo Sapiens
ttgggtgaatcggaaaatggtgcttacttagataatcctccaaaaggagctttgaagaaactgattcatgctgctaagttaaatgcttctttaaaaaccttagaaggagaaagaaaccaaatttatattcagttgtctgaagttgataaaacaaaggaagagcttacagagcatattaaaaatcttcagactcaacaagcatctttgcagtcagaaaacacacattttgaaaatgagaatcagaagcttcaacagaaacttaaagtaatgactgaattatatcaagaaaatgaaatgaaactccacaggaaattaacagtagaggaaaattatcggttagagaaagaagagaaactttctaaagtagatgaaaagatcagccatgccactgaagagctggagacctatagaaagcgagccaaagatcttgaagaagaattggagagaactattcattcttatcaagggcagattatttcccatgagaaaaaagcacatgataattggttggcagctcggaatgctgaaagaaacctcaatgatttaaggaaagaaaatgctcacaacagacaaaaattaactgaaacagagcttaaatttgaacttttagaaaaagatccttatgcactcgatgttccaaatacagcatttggcagagagcattccccatatggtccctcaccattgggttggccttcatctgaaacaagagcttttctctctcctccaactttgttggagggtccactcagactctcacctttgcttccagggggaggaggaagaggctcacgaggcccagggaatcctctggaccatcagattaccaatgaaagaggagaatcaagctgtgataggttaaccgatcctcatagggctccctctgacactgggtctctgtcacctccatgggaccaggaccgtaggatgatgtttcctccgccaggacaatcatatcctgattcagcccttcctccacaaaggcaagacagattttgttctaattctggtagactgtctggaccagcagaactcagaagttttaatatgccttctttggataaaatggatgggtcaatgccttcagaaatggaatccagtagaaatgataccaaagatgatcttggtaatttaaatgtgcctgattcatctctccctgctgaaaatgaagccactggccctggctttgttcctccacctcttgctccaatcagaggtccattgtttccagtggatgcaagaggcccattcttgagaagaggacctcctttctccccacctcctccaggagccatgtttggagcttctcgagattattttccaccaggggatttcccaaggtccaccacctgctccatttgcaatgagaaatgtctatccaccgaggggtttcctccttaccttcccccaagacctggatttttccccc

SEQ ID NO: 228389 - DNA, 907 bp, Homo Sapiens
ttggggccgttccttcagtgttttcagacgccctgggaacgcggctgcagggtccggtcttcggtttgcacagctagaggccgcgcagcagcaaaggatgagcggaaccttggaaaaggtgctgtgcctgaggaacaataccatttttaagcaagccttttctctcttaaggtttagaacttcaggagagaagcccatctattctgtaggtggaattctactaagtatcagtcggccctacaagacaaagcccacccacggcattggaaagtacaagcacttaattaaagcagaagagcccaagaagaagaagggaaaagtggaagtgagagccattaatttggggacagattatgaatatggggttttaaatattcatctgactgcatatgatatgaccctggcagagagttatgcccagtatgttcacaacctctgcaactctctctccattaaagtcgaggaaagttatgcaatgccaaccaaaaccatagaagtgttgcagttgcaggaccaaggcagcaaaatgctcctggactcagtgcttaccacccatgagcgagtggttcagatcagcggtttgagtgctacgtttgcagaaattttcttggaaataatccaaagcagtcttcctgaaggagtcagactgtcagtgaaggagcacactgaagaagacttcaagggacgattcaaagctcgaccagaactggaagaactgttggccaagttgaagtagctactgtagaccctttcatgccagcagtggtcatattgagtgccaaagagaagagcttactgggtagttagagttcatcaggagacccaacccttagatttcataaagtacccattcccatagccagtaatgtcctcactcctctgtggcttggctggtacttgccatttc

SEQ ID NO: 228390 - DNA, 781 bp, Homo Sapiens
ttggacagaataaagggggggatggacagggggttttcaaaaggaacatggctcactcagagctatatggttagacgtttctccccttttccctaccttccatggtcctggttggccctggctttgcctactagaaaaccaaaacttcccccctggggttttgtgcccactctctgagaagttggggctccatcaagccccattctagtcatgtgcccctttcctgtccctaacagtccacaggcaaacaaatggtacagtcataagagccatctgtcacggacccacgcccagaggaacgtgcagaaaaaagcagagctacatggctgtgggcaactataagccaaatatttggctcagaacaggtgtccatgggacaaaaaagaacgatcctccacttgaccaagaaaaaagtgattctcccagaagcacaaagcatactcttgcccctcaggtgttgcttgtgtacatcgtacccatccattcggcttcacctgcagccaacggcctggaatcgcaaagagacaccactctgggcagagcacagcagggtatggggtggggagagagggtggagggttttataaacaaacttaacagcaatattgaaaggaggtgggggattgagggagggacagagtgttggagggccagagactagtcctgagatggaaacagcaacttgtacagtggctgagaaaataggatatagttttgattttttttaattgtaaaatattttggagggagaaacaaaatcttttaacatttttgaataaat

SEQ ID NO: 228391 - DNA, 956 bp, Homo Sapiens
caactttgtacaaaaaagttggccagtattcactgctcttccttcttttacttctttgaccaacaattttcctttaactggcaacccatctcttaatccgtcagtatctctcccagggtcattaatagccacctcatctaccgctgccacctccacatctctccctcatcctagctcaacggcagctgttctctcagggctttctgcttcagcaccagtctcagcagcacctttccccctcaacctgtccactgctgttccctcacttttctctgttactcaaggacctctgtcatcttcaaatccctcctatccaggcttttctgtctctaataccccaagcgttacccctgctcttccctcattcccggggctgcaggcgccctctacagtcgcagctgtcacaccactacctgtggctgccacagccccatccccagctccagtcctcccaggattcgcctcagcattcagttccaatttcaactccgctcttgttgcacaagccggtttatcatctggacttcaagctgcaggcagttctgtttttccaggccttttgtccctcccgggtatccctgggtttcctcagaatccttcacaatcatccttgcaagaattacagcataatgcggctgcgcagtcagcattgttacagcaggtccattcagcttcggctctggaaagctatccagctcagcctgatgggtttcctagttatccttcagcgccaggaacaccattttctttgcaaccaagcctgtcccagagtgggtggcagtgaatacttttaacttttattctccttcagagcaacatcagaattgcctgagaactgcaatgaacaatctgacaaatgtgaagctggccaaaagtcggaaaatgagaatgaagggtaatcctgggagaaattgtgacaacaatttgaaaattgtggttgcattttaaagtgtgaa

SEQ ID NO: 228392 - DNA, 937 bp, Homo Sapiens
ttggcagaggaaacccttcttacctcagagctgagctgggcatgagtagatgctcagtaagtggtgcacagggttggtccctatggtggaggccccctaacaccgcccaacccccctccatgttctcacagctccacgcactgagcacgggcatgaaggccatgatgtcagaattctgcacccagggagctgagatgtgccgcagggcctgtggcggacatggctactcaaagctgagtggcctgccatcactggtcaccaaattgtcggcctcctgtacctacgagggtgagaacacagtgctctacctgcaggtggccaggttcctggtgaagagctacctgcagactcagatgtcccctggctccacgccacagagatctctctctccatctgtcgcatatctcaccgcacctgacctggccaggtgtccagcccagagggcagccgacttcctctgcccggagctctacaccacggcctgggcacatgtggcagtaaggctcataaaggactcagtgcagcatttacagaccctgacgcaatccggagctgaccagcacgaggcttggaaccagaccactgtcatacacctccaggctgctaaggtgcactgctactatgtcactgtgaagggttttacagaagctctggagaaactagaaaatgaaccagcgattcagcaggtgctcaagcgcctctgtgacctccatgccatacatggaatcttgactaactcgggtgactttctccatgacgccttcctgtctggtgcccaagtggacatggcaagaacagcctacctggacctgctccgcctgatccggaaggatgccatcctgttaactgatgcttttgacttcaccgatcagtgtttaaattcagcacttggctgttatgatgggaaacgtctacgaacgcctgttccagtgggctc

SEQ ID NO: 228393 - DNA, 535 bp, Homo Sapiens
actttgtacaaaaaagttggcagctccagaacttccggccagcgcagccattttggcttcctgaccttgggctacggctgaccgttttttgtggtgtactccgtgccatcatgtccgtcctgacgccgctgctgctgcggggcttgacaggctcggcccggcggctcccagtgccgcgcgccaagatccattcgttgccgccggaggggaagcttgggatcatggaattggccgttgggcttacctcctgcttcgtgaccttcctcctgccagcgggctggatcctgtcacacctggagacctacaggaggccagagtgaaggggtccgttctgtccctcacactgtgacctgaccagccccaccggcccatcctggtcatgttactgcatttgtggccggcctcccctggatcatgtcattcaattccagtcacctcttctgcaatcatgacctcttgatgtctccatggtgacctccttgggggtcactgaccctgcttggtggggtcccccttgtaacaataaaatctattt

SEQ ID NO: 228394 - DNA, 937 bp, Homo Sapiens
ttggcaagaagagccagcacgcgcccagaggcacccacctgtgggagttcatccgggacatcctcatccacccggagctcaacgagggcctcatgaagtgggagaatcggcatgaaggcgtcttcaagttcctgcgctccgaggctgtggccaactatggggccaaaagaaaaagaacagcaacatgacctacgagaagctgagccgggccatgaggtactactacaaacgggagatcctggaacgggtggatggccggcgactcgtctacaagtttggcaaaaactcaagcggctggaaggaggaagaggttctccagagtcggaactgagggttggaactatacccgggaccaaactcacggaccactcgaggcctgcaaaccttcctgggaggacaggcaggccagatggcccctccactggggaatgctcccagctgtgctgtggagagaagctgatgttttggtgtattgtcagccatcgtcctgggactcggagactatggcctcgcctccccaccctcctcttggaattacaagccctggggtttgaagctgactttatagctgcaagtgtatctccttttatctggtgcctcctcaaacccagtctcagacactaaatgcagacaacaccttcctcctgcagacacctggactgagccaaggaggcctggggaggccctaggggagcaccgtgatggagaggacagagcaggggctccagcaccttctttctggactggcgttcacctccctgctcagtgcttgggctccacgggcaggggtcagagcactccctaatttatgtgctatataaatatgtcaaatgtacatagagatctattttttctaaaacattcccctccccactcctctcccacagagtgctgggactgttccaggccctcattggggctgatgctggggaccctt

SEQ ID NO: 228395 - DNA, 843 bp, Homo Sapiens; identical to SEQ ID NO: 194795

SEQ ID NO: 228396 - DNA, 315 bp, Homo Sapiens; identical to SEQ ID NO: 194796

SEQ ID NO: 228397 - DNA, 958 bp, Homo Sapiens
actttgtacaaaaaagttggtgacaacggtggcagaggcatcatggagggtccccggggatggctggtgctctgtgtgctggccatatcgctggcctctatggtgaccgaggacttgtgccgagcaccagacgggaagaaaggggaggcaggaagacctggcagacgggggcggccaggcctcaagggggagcaaggggagccgggggcccctggcatccggacaggcatccaaggccttaaaggagaccagggggaacctgggccctctggaaaccccggcaaggtgggctacccagggcccagcggccccctcggagcccgtggcatcccgggaattaaaggcaccaagggcagcccaggaaacatcaaggaccagccgaggccagccttctccgccattcggcggaaccccccaatggggggcaacgtggtcatcttcgacacggtcatcaccaaccaggaagaaccgtaccagaaccactccggccgattcgtctgcactgtacccggctactactacttcaccttccaggtgctgtcccagtgggaaatctgcctgtccatcgtctcctcctcaaggggccaggtccgacgctccctgggcttctgtgacaccaccaacaaggggctcttccaggtggtgtcagggggcatggtgcttcagctgcagcagggtgaccaggtctgggttgaaaaagaccccaaaaagggtcacatttaccagggctctgaggccgacagcgtcttcagcggcttcctcatcttcccatctgcctgagccagggaaggaccccctcccccacccacctctctggcttccatgctccgcctgtaaaatgggggcgctattgcttcaactgctgaagggagggggctggctctgagagccccaggactggctgccccgtgacacatgctctatgaagctcgtttcttagacctcttcctggaataaa

SEQ ID NO: 228398 - DNA, 1461 bp, Homo Sapiens
ttgggtctccgtcccctccaacccccccggtccgaccagggaaggtgggatgctctgatggccgggcctgcggcgctgagcgcggcggcggcggctgctctggcggccgccctgctcctgctgcgtcgtgaggacccggggccgggggctggccccagcatggccgaaacagaagccctgtcgaagcttcgggaagacttcaggatgcagaataaatccgtctttattttgggcgccagcggagaaaccggcagagtgctcttaaaggaaatcctggagcagggcctgttttccaaagtcacgctcattggccggaggaagctcaccttcgacgaggaagcttataaaaatgtgaatcaagaagtggtggactttgaaaagttggatgactacgcctctgcctttcaaggtcatgatgttggattctgttgcctgggtaccaccagagggaaagctggggcggagggatttgttcgtgttgaccgagattatgtgctgaagtctgcagagctggcaaaagctggagggtgcaaacatttcaacttgctatcctctaaaggagctgataaatcaagcaattttttatatctacaagttaagggagaagtagaagccaaggttgaagaattaaaatttgatcgttactctgtatttaggcctggagttctgttatgtgataggcaagaatctcgcccaggtgaatggctggttagaaagttctttggctccttaccagactcttgggccagggggcattctgtgcctgtggtgaccgtggttagagcaatgctgaacaatgtggtgagaccaagagacaagcagatggaactgctggagaacaaggccatccatgacctggggaaagcgcatggctctctcaagccatgaccacactggagaaatggtttttattgtcaaccttaacacccatcaccaaatcggtaatttcagggtctaaaaaaagtcagcatgttttaactttgttgttttactatcctcaggcatccattccaatcaagaaatgatggtgctctgcatcagtggttcagagcctggttatacatatagatcactcagggagctttggaaaaataaagatttgtcagccctatctcaaacttgaatcaaaatttctggggtgtgggcacaataatctgtaattttctttgtttatacttcccctgatgccactggttccgatgccactggctggggggcctgctttgaaatgcttgtctgcagagtcacagcagccatgaaaaccttatgaccgtgcaaatgagctctgctctaaaattgttgacattcatgtctctgagttacaaagtgctaattcactacatgtaattgtgtaagtaaacattgtgcctttactacttctttatgtaatagaagttatatacctaagcttatataatacatggggaggattaaataaaggaataaagatgaatggacact

SEQ ID NO: 228399 - DNA, 999 bp, Homo Sapiens
ttggctcgctcccgcccccgcctggagtccgacgtggaagttgctggctgactgggcttgcgaggaaaccgcctcggagctgcagccgaaggccaaggaatcactgaagatcggcgagggaggacagggggttcatcatgggtggctttttctcaagtatattttccagtctgtttggaactcgggaaatgagaattttaattttgggattagatggagcaggaaaaaccacaattttgtacagattacaagtgggagaagttgttactactatacctaccattggatttaatgtagagacggtgacgtacaaaaaccttaaattccaagtctgggatttaggaggacagacaagtatcaggccatactggagatgttactattcaaacacagatgcagtcatttatgtagtagacagttgtgaccgagaccgaattggcatttccaaatcagagttagttgccatgttggaggaagaagagctgagaaaagccattttagtggtgtttgcaaataaacaggacatggaacaggccatgacttcctcagagatggcaaattcacttgggttacctgccttgaaggaccgaaaatggcagatattcaaaacgtcagcaaccaaaggcaccggccttgatgaggcaatggaatggttagttgaaacattaaaaagcagacagtaattcagtccattcttctcccctgaaatgaagactacatcacctctctccctttggaaacagtcaagtgtacttcacactactagatgttaaaactatatgattattggcatatactgactgactgcaatatttgtagtaaatagggaaaataagtatttagttggagggataatttgatcgaatcacctgaatgttctatgtaatgtaaaatattcttttcttgctttcttgtgttaaagtatatattctatttgtatggaatcttattcaaatacagttctattaaagagtatactcctattggaatgaaaaaacc

SEQ ID NO: 228400 - DNA, 771 bp, Homo Sapiens; identical to SEQ ID NO: 194799

SEQ ID NO: 228401 - DNA, 995 bp, Homo Sapiens; identical to SEQ ID NO: 194800
  misc_feature (79)..(119): n is a, c, g, or t
  misc_feature (847)..(863): n is a, c, g, or t

SEQ ID NO: 228402 - DNA, 999 bp, Homo Sapiens
aaaaaacatttcatctcttccccaggttcatctgaaagaggtcccctgggtaaacataggaaagcagttctgcaggctcatgaaggatgctcggctggaggtcggggggagcatggctgctttccccagcatagcccccatgttccccaccctctttgtgccccggatctgcgatcctgagtccagaagagctcagcaggaagtgggaactgagaagctgttgggagccaggagggccctggaccctctgttctctgccccagggcttcagccaccctgcaagcccctccggacaaggcaacgtcagcccaggtagaaaacttaagagtccctcctagaaaaccagtgatgtgctggccctttcagggacacaggccccttcagcttcaccggagatgagaaggtgccacccgcaacagggctgctggtcacagctcagtgcgcgatgccttggccacaatcaccagcttggacagctcagctttgaatgccccgggcctgtgagccactgctgttttggtcacttcaaattcctcagttttcagagggacatcactttccctttcaaatgcggctttagagtaggccatggcgtactcaatctcagcgccccgcacctctgccttgaactgtgtgaagtacagataggacttcccctggggcctccagatggtgcaggtgaagtgctggtggtcttcgctggtccccagactcatctgccattgctcattggtccctccttgagaggcgtaagtgaacatacacgtatatttgtcccccgggcccacgttatgggagaaggaatgcacgacgccgccgggccgcacgtcaaacgccaccgtcgtgggctcggacaccgcctccgccggcctcagcgccacggcccctaggagcagcgcggcccacaagctcgcgccgacgccgttccaccctccgctgggcgccgccatgttggactaggttttttcggggcaggggcgccaacttttttgtacaaag

SEQ ID NO: 228403 - DNA, 1182 bp, Homo Sapiens
ttgggttgaatttaatcaataaactgaataatgatgataatgtagatggcctccttgttcagttgcctcttccagagcatattgatgagagaaggatctgcaatgctgtttctccagacaaggatgttgatggctttcatgtaattaatgtaggacgaatgtgtttggatcagtattccatgttaccggctactccatggggtgtgtgggaaataatcaagcgaactggcattccaaccctagggaagaatgtggttgtggctggaaggtcaaaaaacgttggaatgcccattgcaatgttactgcacacagatggggcgcatgaacgtcccggaggtgatgccactgttacaatatctcatcgatatactcccaaagagcagttgaagaaacatacaattcttgcagatattgtaatatctgctgcaggtattccaaatctgatcacagcagatatgatcaaggaaggagcagcagtcattgatgtgggaataaatagagttcacgatcctgtaactgccaaacccaagttggttggagatgtggattttgaaggagtcagacaaaaagctgggtatatcactccagttcctggaggtgttggccccatgacagtggcaatgctaatgaagaataccattattgctgcaaaaaaggtgctgaggcttgaagagcgagaagtgctgaagtctaaagagcttggggtagccactaattaactactgtgtcttctgtgtcacaaacagcactccaggccagctcaagaagcaaagcaggccaatagaaatgcaatatttttaatttattctactgaaatggtttaaaatgatgccttgtatttattgaaagcttaaatgggtgggtgtttctgcacatacctctgcagtacctcaccagggagcattccagtatcatgcagggtcctgtgatctagccaggagcagccattaacctagtgattaatatgggagacattaccatatggaggatggatgcttcactttgtcaagcacctcagttacacattcgccttttctaggattgcatttcccagtgctattgcaataacagttgatactcattttaggtaccaaaccttttgagttcaactgatcaaaccaaaggaaaagtgttgctagagaaaattggggaaaatgtgaaaagacaaatggtagtaattga

SEQ ID NO: 228404 - DNA, 789 bp, Homo Sapiens; identical to SEQ ID NO: 194802

SEQ ID NO: 228405 - DNA, 935 bp, Homo Sapiens; identical to SEQ ID NO: 194803
  misc_feature (190)..(245): n is a, c, g, or t

SEQ ID NO: 228406 - DNA, 802 bp, Homo Sapiens
ttggcaccctggtgtcagggaggaagcggatcgcagggggtgcggatagagcctgagaggcttcctggagaggcaggctccggctccgggggctcggcccctctcccctcatcccgggcgcgtggcctctctccacccacccttgctgggtggcctcagctctggcgacccagcaacccgcagacaaccactgccaaaaaatatggtgtctcgtctttgtgaatctaaaaaggtttgtgctgcagctgatatgcaacttcaggtcttttatgccactctggatcaaatctaccatgggaagcatcccctgaggaattcaaccacagacattctcaaggaaacacaagagaaattctatggcctaccatatgttccaaatactgcctggcagctgcgattcagccacctcgtggggtatggtgctagatattactcttacctcatgtccagagcggtcgcctccatggtttggaaggagtgttttctacaggatcctttcaacagggctgccggggagcgctatcgcagggagatgctggcccacggtggaggcagggagcccatgctcatggttgaaggtatgcttcagaagtgtccttctgttgatgacttcgtaagtgccctcgtttccgacttggatctggacttcgaaactttcctcatggattctgaataaaagaaacactctacacctcttaaatcaagtcatgtagataatgactttgttataaatgctacagctgtgagagcttgtttctgatttcattgttcgcttctgtaattctgaaaaactttaaactgg

SEQ ID NO: 228407 - DNA, 970 bp, Homo Sapiens
caaaaaagttgggtccccccgggccgggtgggctgggccacgcagtcgccgctcaccgcgcgggacgcggctctctccctcccaccctcgggcccagagcgcgagcagctgcaggcggaagcgagcgagcgcttcgctgccggctacatccagtgcatgcacgaggtgcacacgttcgtgtccacgtgccaggccatcgacgctaccgtcgctgccgagctcctgaaccatctgctcgagtccatgccgctgcgtgagggcagcagcttccaggatctgctgggggacgccctggcggggccacctagagcccctggacggagtggctggcctgcggggggcgctccgggatccccaatacccagccccccgggtcctggggacgacctgtgctccgacctggaggaggcccctgaggctgaactgagtcaggctcctgctgaggggcccgacttggtgcccgcagccctgggcagcctgaccacagcccaaattgcccggagtgtctggaggccttggtgaccaatgccagccagagtcctgcgggggtgggcccggccctccctggatctcctccctcctcccaggggttcagatgtggtggggtagggccctggaagtctcccaggtcttccctccctcctctgatggatggcttgcagggcagcccctggtaaccagcccagtcaggccccagccccgtttcttaagaaacttttagggaccctgcagctctggagtgggtggagggagggagctacgggcaggaggaagaattttgtagagctgccagcgctctcccaggttcacccacccaggcttcaccagccctgtgcgggctctgggggcaaaggtggcaggaatggtgctgggcactagtgttccaggcagccctgggctcaacaaaagcttgaacttgccacttcagcggggagatgagaggcaggtgcactgagctgcactgcccaga

SEQ ID NO: 228408 - DNA, 813 bp, Homo Sapiens; identical to SEQ ID NO: 194806

SEQ ID NO: 228409 - DNA, 980 bp, Homo Sapiens
ttggcacggcggtatcttggggaaatggattcgggtagaacgaagtcgagagatgcagatgatagacttgcagacggggactccttgggaatctgtcaccttcacggccctgggcactgaccgaaaggttttcttcaacatcctggaggaagctcgagagctagccttgcagcaggaggaagggaagaccgtgatgtacacagctgtgggctctgaatggcgtccctttggctatccacgccgccggcgaccactgaattctgtggttctacaacagggtctggctgaccgaattgtcagagacgtccaggaattcatcgataaccccaagtggtacactgacagaggcattccttacagacgtggctacctgctttatgggccccctggttgcggaaagagcagttttatcacagccctggctggggaactggagcacagcatctgcctgctgagcctcacggactccagcctctctgatgaccgactcaaccacctgctgagcgtggccccgcagcagagcctggtactcctggaggatgtggatgctgcttttctcagtcgagacttggctgtggagaacccagtaaagtaccaaggcctaggtcgcctcaccttcagtggactgctcaatgccttggatggtgtggcttccaccgaggcccgcatcgtgttcatgaccaccaaccacgttgacaggctggaccctgccctgatacgcccggggcgagtggacctgaaggagtacgtgggctactgctcacactggcagctgacccagatgttccagaggttctatccagggcaggcaccttccttagctgagaactttgcaaacatgtccttcgagctacaaaccagatcagtcctgcccaggtgcagggctacttcatgctgtataaaaatgaccctgtaggggcaattcacaatgctgagtctctgaagaggtgatcaggctgggctcagctcagctctcctcc

SEQ ID NO: 228410 - DNA, 749 bp, Homo Sapiens
gccaactttgtacaaaaaagttggcagggcggcgcgtggtctacgccgagtgacagagacgctcaggctgtgttctcaggatgaccgagtgggagacagcagcaccagcggtggcagagaccccagacatcaagctctttgggaagtggagcaccgatgatgtgcagatcaatgacatttccctgcaggattacattgcagtgaaggagaagtatgccaagtacctgcctcacagtgcagggcggtatgccgccaaacgcttccgcaaagctcagtgtcccattgtggagcgcctcactaactccatgatgatgcacggccgcaacaacggcaagaagctcatgactgtgcgcatcgtcaagcatgccttcgagatcatacacctgctcacaggcgagaaccctctgcaggtcctggtgaacgccatcatcaacagtggtccccgggaggactccacacgcattgggcgcgccgggactgtgagacgacaggctgtggatgtgtcccccctgcgccgtgtgaaccaggccatctggctgctgtgcacaggcgctcgtgaggctgccttccggaacattaagaccattgctgagtgcctggcagatgagctcatcaatgctgccaagggctcctcgaactcctatgccattaagaagaaggacgagctggagcgtgtggccaagtccaaccgctgattttcccagctgctgcccaataaacctgtctgccctttggggcagtcccagccc

SEQ ID NO: 228411 - DNA, 710 bp, Homo Sapiens
ctttgtacaaaaaagttggagtgaactgagggccaccctgggaggaagccgactaggcgaattcacttactgaccggcctgggctgctctgagacatggaggaagccagtgaaggtggaggaaatgatcgtgtgcggaacctgcaaagtgaggtggagggagttaagaatattatgacccagaatgtggagcggatcctggcccggggggaaaacttggaacatctccgcaataagacagaggatctggaagccacatctgagcacttcaagacgacatcgcagaaggtggctcggaaattctggtggaagaacgtgaagatgattgtccttatctgcgtgattgtttttatcatcatcctcttcattgtgctctttgccactggtgccttctcttaagtaacagggaacctctcccacctgcccttcttttcagggacaaccctccataaatgtgtgccaagagggtctcctttcctgtcttcctctacagagaatgctgctcggtcctcctacccctcttcccgaggccctgctgccacgttgtatgccccagaaggtaccttggtcccccggaaggagagaaaaaagagagatggactgtggctgcatttcttgggtccttagagtgggctggagagacctagagggcccagcatgtggctgggaaactgttggtggccagtgggtaataaagacctttcagtatcc

SEQ ID NO: 228412 - DNA, 1009 bp, Homo Sapiens
ttggggctgccccaagagtctaggtaagagtttgttcccgtggtgcggagggtcaaggcccacacccggaaacctagcgaggtaaagttgcgtcttggttgtagagacgacaacttctccgcttcctcggcgatggcggcgtccgggagcggtatggcccagaaaacctgggaactggccaacaacatgcaggaagctcagagtatcgatgaaatctacaaatacgacaagaaacagcagcaagaaatcctggcggcgaagccctggactaaggagtgaggagtcaccattactttaagtactgcaaaatctcagcattggctctgctgaagatggtgatgcatgccagatcgggaggcaacttggaagtgatgggtctgatgctaggaaaggtggatggtgaaaccatgatcattatggacagttttgctttgcctgtggagggcactgaaacccgagtaaatgctcaggctgctgcatatgaatacatggctgcatacatagaaaatgcaaaacaggttggccgccttgaaaatgcaatcgggtggtatcatagccaccctggctatggctgctggctttctgggattgatgttagtactcagatgctcaatcagcagttccaggaaccatttgtagcagtggtgattgatccaacaagaacaatatccgcagggaaagtgaatcttggcgcctttaggacatacccaaagggctacaaacctcctgatgaaggaccttctgagtaccagactattccacttaataaaatagaagattttggtgtacactgcaaacaatattatgccttagaagtctcatatttcaaatcctctttggatcgcaaattgcttgagctgttgtggaataaatactgggtgaatacgttgagttcttctagcttgcttactaatgcagactataccactggtcaggtctttgatttgtctgaaaagttaaggcaatcaaaagcccacctgggacaaggaatttcctgttgggttaaaaa

SEQ ID NO: 228413 - DNA, 1051 bp, Homo Sapiens; identical to SEQ ID NO: 194809

SEQ ID NO: 228414 - DNA, 1015 bp, Homo Sapiens
ttggtcctgggtgccgacctggattttgtcatgtccctgaacaacctggatgaggagtccaacaagaagcacccattcccgtgccctacgtcctaacgcacggccctcacctactacctggacatcaccaacccgccgcgtaccaacgtgctgtacgagctggcgcagtacgcctcggagccctcggagcaggagctgctgcgcaagatggcctcctcctccggcgagggcaaggagctgtacctgagctgggtggtggaggcccggaggcacatcctggccatcctgcaggactgcccgtccctgcggccccccatcgaccacctgtgtgagctgctgccgcgcctgcaggcccgctactactccatcgcctcatcctccaaggtccaccccaactctgtgcacatctgtgcggtggttgtggagtacgagaccaaggccggccgcatcaacaagggcgtggccaccaactggctgcgggccaaggagcctgtcggggagaacggcggccgtgcgctggtgcccatgttcgtgcgcaagtcccagttccgcctgcccttcaaggccaccacgcctgtcatcatggtgggccccggcaccggggtggcacccttcataggcttcatccaggagcgggcctggctgcgacagcagggcaaggaggtgggggagacgctgctgtactacggctgccgccgctcggatgaggactacctgtaccgggaggagctggcgcagttccacagggacggtgcgctcacccagctcaacgtggccttctcccgggagcagtcccacaaggtctacgtccagcacctgctaaagcaagaccgagagcacctgtggaagttgatcgaaggcggtgcccacatctacgtctgtggggatgcacggaacatggccagggatgtgcagaacaccttctacgacatcgtggctgagctcggggccatggagcacgcgctgcggtggactacatcaagaaactgatgaccaagggccgctactccctgga

SEQ ID NO: 228415 - DNA, 901 bp, Homo Sapiens
ttggcgcctctgagagcgcccactcgagcgccccgggagccagagggcgggggtcctcgccgggaccctcctgtgggcccagggggacaaaagtggctctcaatccagcacatgcacattgaagcaagttaaaggatttaatatgaagcacagaagcagatagtgccaaatagcaagcagtagttgttacacatttggtgagcagggcagcatttccttctcccactgctgctgagatggcagaaattagtcgaattcagtacgaaatggaatatactgaaggcattagtcagcgaatgagggtcccagaaaagttaaaagtagcaccgccaaacgctgacctggaacaaggattccaagaaggagttccaaatgctagtgtgataatgcaagttccggagaggattgttgtagcagaaaactcctaggaaataatgaagatgtttcattttcaagaccagcagatcttgaccttattcagtcaactccctttaaacccctggcactgaaaacaccacctcgtgtacttacgctgagtgaaagaccactagattttctggatttagaaagacctcctacaacccctcaaaatgaagaaatccgagcagttggcagactaaaaagagagcggtctatgagtgaaaatgctgttcgccaaaatggacagctggtcagaaatgattctctgtatggcatttcaaatatagatacaaccattgaaggaacgtcagatgacctgactgttgtagatgcagcttcactaagacgacagataatcaaactaaatagacgtctacaacttctgggaagaggaggaacaaaagaacgtgctaaagagaaatgggtcatgtattcaattactggtagctttctggctgcttaatagctggctctggtttcc

SEQ ID NO: 228416 - DNA, 839 bp, Homo Sapiens
cagccgtcaccggcccaaggaggggtctggaggagggaaggggcccttgcgaggctctggtgctggtgatcccggcccccaccaccggaggagctgaaagcccttgctcagccgctgccctgctggtgaacccggcccccaccgccggaggagctgcaccctgtgtggtctgaggcagccctgcactgggcagcggccccgccccgcgctgaacccactaggagagcagctgcagcacctgtcggatgcgctgggccctccccggcagggggggatcagagccctcctcatccagctcccgcatcagggcttccgccttctgcaccgtcagctctcgggcccggccctgcagcccctccaggtaggccagcagggtggagaagtgctcatcgggaaccttgtcactgtcatacatgtgcagcaggagccacgtctgcctcgtcttctgaaacctccagttcttgtgcttttgggcccatctgcagaggtagtccagggccagttcggcccccgagcgcctggcaggcgggtgctgggccacaaggcctgcctcccgcagacgctgcctctcctctttcttccgttcctttttcagcttcctttccaggaccctctgctcctctggggacagctctggctctgcgtccagcccgggcctgagcacagcttcgcccttggagccggctccttcgccacttggtgcagcctcagggcccagcagtggcccctctgctgacgccttcttcagctttttgttctttttctctgtcacttcaggaacttttctcttctgttttgccatcctgcgcccacctaagcgtgaacagctgcgtcgccaa

SEQ ID NO: 228417 - DNA, 888 bp, Homo Sapiens; identical to SEQ ID NO: 194811

SEQ ID NO: 228418 - DNA, 757 bp, Homo Sapiens
  misc_feature (160)..(169): n is a, c, g, or t
ttggctaccagctccccgctgccctgagctcggcgggctggcattcggcccggggaaaagcggagcaggtctgcgaggctaagtgtctccgcggcgcacctcgcggcgagaatccggaggagaaggagactgcaaggataggcccagaaaaacaaccagnnnnnnnnnntctcatcatggcaaatattcaccaggaaaacgaagagatggagcagcctatgcagaatggagaggaagaccgccctttgggaggaggtgaaggccaccagcctgcaggaaatcgacggggacaggctcgccgacttgcccctaattttcgatgggccatacccaataggcagatcaatgatgggatgggtggagatggagatgatatggaaatattcatggaggagatgagagaaatcagaagaaaacttagggagctgcagttgaggaattgtctgcgtatccttatgggggagctctctaatcaccatgaccatcatgatgaattttgccttatgccttgactcctgccatttatcatgagattaatactgtgattcccgctgttttctttttccttgcattttcctaatatgcctttactgatccgtttgctgtgaaccctatgttatttccatgtgtcaagtgggtcttgtgttgccagcttctatttgaagattgcctttgcactcagtgtaagtttctgtcagcagtagtttcacccatttgcatggaaaaatttaaagctaatacaggcaatttaaaaagc

SEQ ID NO: 228419 - DNA, 1184 bp, Homo Sapiens
ttggcacagccaccgctctgtggctcgcttggttcccttagtcccgagcgctcgcccactgcagattcctttcccgtgcagacatggcctctggcaccaccaccaccgccgtgaagattggaataattggtggaacaggcctggatgatccagaaattttagaaggaagaactgaaaaatatgtggatactccatttggcaagccatctgatgccttaattttggggaagataaaaaatgttgattgcgtcctccttgcaaggcatggaaggcagcacaccatcatgccttcaaaggtcaactaccaggcgaacatctgggctttgaaggaagagggctgtacacatgtcatagtgaccacagcttgtggctccttgagggaggagattcagcccggcgatattgtcattattgatcagttcattgacaggaccactatgagacctcagtccttctatgatggaagtcattcttgtgccagaggagtgtgccatattccaatggctgagccgttttgccccaaaacgagagaggttcttatagagactgctaagaagctaggactccggtgccactcaaaggggacaatggtcacaatcgagggacctcgttttagctcccgggcagaaagcttcatgttccgcacctggggggcggatgttatcaacatgaccacagttccagaggtggttcttgctaaggaggctggaatttgttacgcaagtatcgccatggcgacagattatgactgctggaaggagcacgaggaagcagtttcggtggaccgggtcttaaagaccctgaaagaaaacgctaataaagccaaaagcttactgctcactaccatacctcagatagggtccacagaatggtcagaaaccctccataacctgaagaatatggcccagttttctgttttattaccaagacattaaagtagcatggctgcccaggagaaaagaagacattctaattccagtcattttgggaattcctgcttaacttgaaaaaaatatgggaaagacatgcagctttcatgcccttgcctatcaaagagtatgttgtaagaaagacaagacattgtgtgtattagagactcctgaatgatttagacaacttcaaaatacagaagaaaagcaaatgactagtaaacatgtgggaaaaaatattacattttaaggggg

SEQ ID NO: 228420 - DNA, 1326 bp, Homo Sapiens
ttggggagaagctacccaccatgcggtggattctgcggtcaatgttggcgtaactgcctacaatattaacaacattggtatcaaagcaatggtgaagaaaactgcaacacaaacaggacacactctccttgaggactatcagatagttgataattctcagagggaaaatcaagaaggagcagcaaatgtcaacgtgagaggggagaaggatgagcagacgaaggaagtaaaggaggcaaagaagaaagataaatgatgaagtgctgggaatcacttataccaaagccttatgaaatggatgaaattttgttaaataggcaaatgtggaattcctcacagattaaccagtattttttaaatgtattcattcctacaaattaactttcataaattttatggcatgtcttctatttaaaaggaaaagaataagtattcttgcatctggccttagaaatgtgaagttatattctcaagtttatttttttccaagtgtagctaaaatatttttgcaggtaaaataaagctgatagtacatgtgttgttcaaaccttgttaaacctaatattgaactatttttatatctgctgtctttcagaaggcaaataggaaactatatatttgcttaaaaattggcatttagtaaccttaattctttttatagaaggaatgacttaaagtattgtcccctctttttgcactaattgtggatttttttagatgcttctcaaaattttcagtgtgtaagctaaacaaaaactaaaactaagaattctcaaaaaaacttgttcaaaacagggaaagactgatgaaaagtaaaatggactacttttgtaacttacctgtttgttaggaaatggaatggtctctttgatttaaaatgaataaaaatagattattacgtcttttgtattgagactgtattgttatgagcctaggaaatttgggaacatgattgtattgtattaaaattcgaagtgattattatcagcttaattggattaaaaaagtacttcaagaaattattttatcatatctgcttctgtttttccaaaaggttaaaacttgtaaaaaaaatatatataaacaattgagtttactaatggtaaacatttttattctgggattcggtcattggaatttatattaaaagacaagttattaaaaaggaaaggttctattcataatcagggtaaagaatatgaaaaccttagacgtaatccatggtggataggcattatggtttccactttggcagaagcagactattcacagccctatttacttacatagctaaaaaactatgtaactaaatacctaatggtattt

SEQ ID NO: 228421 - DNA, 1310 bp, Homo Sapiens
ttggggggaccgttctcgtttcatccaactggtccagaaggcacggctagaggagagcaaggagcaggtggcagctatgcaggcaggtctgctgaaggtggtaccacaggctgtgctggacttgctgacctggcaagagttggagaagaaagtgtgtggggatccagaggtcactgtggatgctctgcgcaagctcacccggtttgaggacttcgagccatctgactcgcgggtgcagtatttctgggaggcactgaacaacttcaccaacgaggaccggagccgcttcctgcgctttgtcacgggccgcagtcgcctgccagcacggatctacatctacccagacaagctgggctacgagaccacagacgcgctgcccgagtcttccacttgctccagcaccctcttcctgccacactatgccagtgccaaggtatgcgaggagaagctccgctatgcggcctacaactgcgtggccatcgacactgacatgagcccttgggaggagtgaggcgtgccgccggctgtgggaccagcaagactgcacgtgtccctcttggccttgcccagggcgaagacaccttccctgccctggtttggctgacgtgctcagcaaaaccccatgtgccctgctcctgtgtgcagttggggtaggggcagctggcatggtcaggtaacactagtggcccagccccgcagacccacaagccctacccgtgctggggcttgcttcccgaggtatttcacctcttaagagggaatcttccacaagcccagcacaagctgccaggcctgagctacttgaagggggccatctaggtccccaacccatggactttgcctccattttcagctccgccttttttctcctattttctctctggctttcttcagccatgactcacaactaaaaacataaaacactggaggttagtggaggcccctccccaagcagggagcctgggatgggcagggagtgatagccaaactccttggtcacctgctccaagaaggaagcagtagctgagcacctgccctcacatactgctcttttcccctctccctccataccagagatgtggtgagctctgttcttctaccaacccagtctcaacacacaaagtgccaccaccttccctgactcagaacccacatccactcaatgtgaactctactaccacgacctccccatattcctcacttctccatcacctccagcctgactccctgtctgccctttcacccccaagattttgcacaggttaaaggccagataatggcctttttgaaatctgtaataactccccttt

SEQ ID NO: 228422 - DNA, 1152 bp, Homo Sapiens
ttggctgagttactaaacaacagactccatgctgatgtatacacatttaatgcattgattgaagcaacagtatgtgcgataaatgagaaatttgaggaaaaatggagtaaaatactggagctgctaagacacatggttgcacagaaggtgaaaccaaatcttcagacttttaataccattctgaaatgtctccgaagatttcatgtgtttgcaagatcgccagccttacaggttttacgtgaaatgaaagccattggagaaccctcgcttgcaacatatcaccatattattcgcctgtttgatcaacctggagaccctttaaagagatcatccttcatcatttatgatataatgaatgaattaatgggaaagagattttctccaaaggacccggatgatgataagttttttcagtcagccatgagcatatgctcatctctcagagatctagaacttgcctaccaagtacatggccttttaaaaaccggagacaactggaaattcattggacctgatcaacatcgtaatttctattattccaagttcttcgatttgatttgtctaatggaacaaattgatgttaccttgaagtggtatgaggacctgataccttcagcctactttccccactcccaaacaatgatacatcttctccaagcattggatgtggccaatcggctagaagtgattcctaaaatttggaaagatagtaaagaatatggtcatactttccgcagtgacctgagagaagagatcctgatgctcatggcaagggacaagcacccaccagagcttcaggtggcatttgctgactgtgctgctgatatcaaatctgcgtatgaaagccaacccatcagacagactgctcaggattggccagccacctctctcaactgtatagctatcctctttttaagggctgggagaactcaggaagcctggaaaatgttggggcttttcaggaagcataataagattcctagaagtgagttgctgaatgagcttatggacagtgcaaaagtgtctaacagcccttcccaggccattgaagtagtagagctggcaagtgccttcagcttacctatttgtgagggcctcacccagagagtaatgagtgattttgcaatcaaccaggaacaaaagaagccctaa

SEQ ID NO: 228423 - DNA, 1225 bp, Homo Sapiens
ttggctctttagcgctcagggcgctgacccactgctcttcctcttaagaaagtgctccattccttccggcgcccggagctgctggcccaaagggatccggagcgagctagggcagacaccatgaccacccttgatgataagttgctgggggagaaactgcagtactactatagcagcagtgaggatgaggacagtgaccacgaggacaaggaccgaggcagatgtgccccagccagcagttctgtgcctgcagaggctgagctggcaggcgaaggcatctcagttaacacaggcccaaaaggtgtgatcaatgactggcgccgcttcaagcagttggagacagagcagagggaggagcagtgccgggagatggaaaggctgatcaagaagctgtcaatgacttgcaggtcccatctggatgaagaggaggagcaacagaaacagaaagacctccaggagaagatcagtgggaagatgactctgaaggagtttgccataatgaatgaggaccaagatgatgaagagtttctgcagcagtaccggaagcagcgaatggaagagatgcggcagcagcttcacaaggggccccaattcaagcaggtttttgagatctccagtggagaagggtttttagacatgattgataaagaacagaaaagcattgtcatcatggttcatatttatgaggatggcattccagggaccgaagccatgaatggttgcatgatctgccttgccgcagagtacccagctgtcaagttctgcaaggtgaagagctcagttattggcgccagcagtcagttcaccaggaatgcccttcctgccctgctgatctataaggggggtgaattgatcggcaattttgttcgtgttactgaccagctgggggatgatttctttgctgtggaccttgaagcttttctccaggaatttggattactcccagaaaaggaagtcttggtgctgacatctgtgcgtaactctgccacgtgtcacagtgaggatagcgacctggaaatagattgaactgatagtctagttgcatagatttctcattgtttgggttggaatacacgtcattgtttatttttgttcctttgtcttctggcttttcagctgttctttgtagtcccttttattatgcataaaataaagaaattcttagattaaatcagatgctgaataaccttgtagctagcaataaagtgacttacagttgtataaa

SEQ ID NO: 228424 - DNA, 1246 bp, Homo Sapiens
ttggcccactttcaaggagggaatggctttggaagactatcagaggatgcttggttaccaagtaaaggattccaaagtggagcagcaagacaactttctaaaacgcatgtcagggatgatccgtctctacgctgctatcatccagctccggtggccatatggaaaccgacaggagattcaccctcatggcttaaatcatggatggcgctggttggcacagatcttaaacatggagcccttgtcagatgtgacagccaccctcctctttgacttcctggaggtgtgtgggaatgccctcatgaagcaataccaggttcagttctggaagatgctaattctcatcaaagaggactactttcccagaattgaagctatcacaagctcaggacagatgggctccttcatacgcctcaagcagttcttggagaaatgtttgcaacacaaggacattcctgtccccaagggctttctgacttcctccttctggcgctcctgatgtcactccatcacccaccatcaccgctgctgcaaagaggcaataataaaggaactgaagacagctgtatttgggagaagtcatgtcagattcagaaatttgccattatgtatttttatgtatttatgccttgtgactaggagaggagattttcatgggtcacaaaattcttggaggtcccttagtagatttggtagttccttaagagatccacgtgataaaataaatggagttggcctttcttgttttttgcaaaagtgataaaaggtctttagcacttggtctcctcccttgtctctagtgtctttcagaaagttggcaataccttaacaaatgcactctgagctggagggagcccaccatttgcacccacctacccaccctcacccctgttcagatgaatttccagaaagagctaaggctcataaggttcccttttaagtattatttaatagttgaggccagatacttacatgcaagtctgggttatggttgttttgcctttctcagcttgtgaagtcattctaaagctagaggaagtatgtgatatacacatggactaaggctcaggtgacactatggctagattaacatctgggattaggactggaaacacatgtcattttgaactaagggaaactctttgtcatcctaatttggaatttggtccctggatggctagggatccatgaaccaggcaggtacctttttgttttggtttggtttggttcctttccggtggaattaaaa

SEQ ID NO: 228425 - DNA, 948 bp, Homo Sapiens
tacaaaaaagttgggcctccttctgcctaggtcccaacgcttcggggcaggggtgcggtcttgcaataggaagccgagcgtcttgcaagcttcccgtcgggcaccagctactcggccccgcaccctacctggtgcattccctagacacctccggggtccctacctggagatccccggagccccccttcctgcgccagccatgcctttaaaccgcactttgtccatgtcctcactgccaggactggaggactgggaggatgaattcgacctggagaacgcagtgctcttcgaagtggcctgggaggtggctaacaaggtgggtggcatctacacggtgctgcagacgaaggcgaaggtgacaggggacgaatggggcgacaactacttcctggtggggccgtacacggagcagggcgtgaggacccaggtggaactgctggaggcccccaccccggccctgaagaggacactggattccatgaacagcaagggctgcaaggtgtatttcgggcgctggctgatcgagggaggccctctggtggtgctcctggacgtgggtgcctcagcttgggccctggagcgctggaagggagagctctgggatacctgcaacatcggagtgccgtggtacgaccgcgaggccaacgacgctgtcctctttggctttctgaccacctggttcctgggtgagttcctggcacagagtgaggagaagccacatgtggttgctcacttccatgagtggttggcaggcgttggactctgcctgtgtcgtgcccggcgactgcctgtagcaaccatcttcaccacccatgccacgctgctggggcgctacctgtgtgccggtgccgtggacttctacaacaacctggagaacttcaacgtggacaagaagcagggagaggcagatctaccaccgatactgcatggaaaggcgcagcccactgc

SEQ ID NO: 228426 - DNA, 877 bp, Homo Sapiens
ttggcgataaagttgttgttgcggcttcccccgcgggtggaacaagatggcgtcgggtggtggtggctgtagcgcttcggagagactgcctccgcccttccccggcctggagccggagtccgagggggcggccgggggatcagaacccgaggctggggacagcgacaccgagggggaggacattttcaccggcgccgcggtggtcagtaaacatcagtctccaaagataactacatcccttcttcccatcaacaatggctccaaagaaaatgggatccatgaagaacaagaccaagagccacaggatctctttgcagatgccacagtggagctatccttggacagcacacaaaataatcagaagaaggtgctagccaaaacactcatttctcttcctcctcaggaagccacaaattcttcgaagccccagccaacctatgaggagctagaggaagaagaacaggaggatcaatttgatttgacagtcggtataactgatcctgagaagataggggatggtatgaatgcatatgtagcctacaaagttacaacacagacaagcttaccattgttcagaagcaaacagtttgcagtaaaaagaagatttagtgactttctgggtctttatgagaagctttccgagaagcactctcagaatggcttcattgtccctccgcccccggagaagagcctcatagggatgacaaaagtgaaagttgggaaggaagattcttcttctgcagaatttcttgaaaaacggagggccgctttagaaaggtaccttcagaggattgtaaatcatcctaccatgttacagggaccctgacgtcagagagttcttggaaaaagaagagctgccacgtgccgtgggtacccc

SEQ ID NO: 228427 - DNA, 1098 bp, Homo Sapiens
ttgtacaaaaaagttggcttccggcaggccgggagcggggtcttggcgaacggtcttcggaagcggcggcggcgcgatgaccacgctacgggcctttacctgcgacgacctgttccgcttcaacaacattaacttggatccacttacagaaacttatgggattcctttctacctacaatacctcgcccactggccagagtatttcattgttgcagaggcacctggtggagaattaatgggttatattatgggtaaagcagaaggctcagtagctagggaagaatggcacgggcacgtcacagctctgtctgttgccccagaatttcgacgccttggtttggctgctaaacttatggagttactagaggagatttcagaaagaaagggtggattttttgtggatctctttgtaagagtatctaaccaagttgcagttaacatgtacaagcagttgggctacagtgtatataggacggtcatagagtactattcggccagcaacggggagcctgatgaggacgcttatgatatgaggaaagcactttccagggatactgagaagaaatccatcataccattacctcatcctgtgaggcctgaagacattgaataaccctgggcagtggttcttaggcagatactctagatgctttatggacaatattattttcattggatgattctggagctctattaggagaaaagtaatcattttaggtcttaaagacttcaagaaaatacaggttatcaatttattttaaatctcattgtttccagttagcaatatcatacctattaaagctgttcattgtaacaaaattcaatcaaaaaggcagctaggtcagaaggaaacataccactctcatggttcatagtattcactgtatgtatgctagggaaaagacttgctccagtctcctcctcagttctgtgcctgagaaccactgctgcatatatttgtttttaaattttgtattgaactgttaattgaagctttaaaagcatatatgaaatgtataaatctaagatgtataatacattattgactctatgaatgttttctgaagtttgttagtcatttgtaaaactaaatcagat

SEQ ID NO: 228428 - DNA, 1062 bp, Homo Sapiens
  misc_feature (584)..(679): n is a, c, g, or t
ttggcaaggattcccgtacagtgactgtgtctcaccgcccacaaccctatcgctggagctgtgagaggttttctaccagccaggtcttatgttcccaggccctgtcttctggaaagcattactgggaagtggacactaggaattgcagccactgggcagttggggtggcttcctgggagatgagccgcgaccaggtcctgggaaggactatggactcttgttgtgtggaatggaaggggactagccagctctctgcatggcacatggtcaaggaaactgtccttggctcagacagacctggggtggtgggcatctggctgaaccttgaggagggaaagcttgccttctattcagtggacaatcaggagaagcttctgtatgagtgtaccatctctgcctcctctcctttgtaccctgccttctggctgtatggcttacatcctggaaattacctgataataaagcaagtaaaggtgtaaggtttcctaagggattacaacacagtggtttcctggtctctctccctgtcatcaatcagggtagtaacttgacttaagaataccactttttagaaaaattacgannnnnnnnnnnnnnnnnnnnnnnnnnnnnnnnnnnnnnnnnnnnnnnnnnnnnnnnnnnnnnnnnnnnnnnnnnnnnnnnnnnnnnnnnnnnnnnngtgtgagccaccacacctggccaagaataccacttttgaagttaatccttttgtgtgatacaggatgaacttgggatgtttgaaccctggacattccaaataaagaataggcccctgcctggctcctgggagataacctctaagccattagaatatcttgcctgataagagtgtttttgtttacctgtgggccttgggccatgcagtatcagcttgaccttgcaaggtcaagctgaggagactaaattagccatgtgggcagtgaagcatgccaatgtgatcaatccctagtaaaagccctggacacctaggcctgggtgagctactctggttggtaatactctgtgcacacatcattgtatccacacatcattgctgggaga

SEQ ID NO: 228429 - DNA, 1361 bp, Homo Sapiens
ctgcctggcagcatctcagtgtcagagtgagcacggcacaggaaaggcccgtggtgacgagggtgaggtggccacagtgaccggacgacaaatgagactctgcaaatgagactccagagggtgaagatctgcggtctccagacatcataggccatgtgacccactaggggccgcttacccctggccgtccgctggctgaactgaacgcattccctctctccgcaactctcccgtgaggctgcacccgtgtgggtagcactggaagcggcactgtttgcattgtacataggaaggaaggaagttcttccagcctcaccagcacctggcagcgagtcagagcctgtgagggcatccgaagcagtgatgcagtgtcaacctcccagctggtgccactctgccctcgggggctccaagcattgtaactcagtcatgggagctgcctctttggaagtgcagatttattcctgtaataatcctgcctgcttttacctctcgtccactgaccagcaagtgtgagtcccggtgtcagtcggcacagtccagtgtccatctgcatttgctcatgcagagggggtgagttgggcactccctgttgttggttttccttttgcagcacactgggcagtctccctataaaacaaaaaccccaccttctgtgccttctgctttagagcagagctccccctcccatttcctcagtcttccctgcaaaatctgtccaccggggaaggcagcaggaaccctgggcagcgggtgttctgggaaggctagtgacagcagatgtcatccaggaacagccacacacggttctccaggccgccgtcagcagctcaaggtggggtatgagtgagaagctgaggatctcgcagcttgttgctgagcaaggtgcaaccgggctcatgctgtcatcagcacaagacgggatggcaagggctttcagacgcatttccaagagtccagcaagccagggggaagatgatctctttgccgaagtgtaccctctagccaacttttgggagcgcttctgtttgcaaagcgctggggatgtgcctgtctctgtgtgacccacgaacgggaagggagagcactggagtaatgacacttctgctgctgctttgattctcaaggctgatctttaaaactctcgccttgctgacaggtgctttaaaggcagtctgcatcttttcttctcttggtgtgggagaggtaaacactttgatttgctgaaagctgtatggagtatatttgaacagctagtagttagctttgaaagtggaagtgtgaacagacactacttgtgtcgctttgggtccttcactttacccccacagaagtctagaggcgttctgttataaagcgtt

SEQ ID NO: 228430 - DNA, 919 bp, Homo Sapiens
tttgtacaaaaaagttggcacgcctgagccccgtgcgactcgtggcctttgggctagaagccatggacgccttcacccgcttcaccaaccagacccagggccgggaccgactcttcagagccactcagtacacatgcatgttgcttagatatttgttagagcccaaagctggcaaagagaaggtggtaatgaagctcaagaaactggagtccagtgtgagcactggtcgtaaatggttcagactaggcaatgtggtacatgctatacaggcaactgagcagagcattcatgccactgacctggtacctcgcttatgcttaacattagccaacctgaaccgtgtgatttatttcatctgtgacaccatcctctgggtgaggagcgtaggtctcacctctggcatcaacaaagagaaatggcgaacgagggctgctcaccactactactattctcttctgctgagcctggtcagggatctgtatgaaatctccctgcagatgaaacgagttacatgtgacagggcaaagaaagagaaatcagcatcccaggatcctctttggttcagcgtggctgaggaggaaacagaatggctccaatcctttctacttcttttattccgatctctgaagcagcatcctcccttgctcctggacacagtgaagaacctttgtgatatcctgaaccctttggaccagctggggatctataaatccaatcctggcatcattggacttggaggtcttgtgtcctctatagcagcatgatcactgtggcatatcctcagatgaagctgaagacccgttagggtgtttttaggcttggaactagtacctactttaaaagatggcctcttggtgggacagacatttgtataagtcacaggccatgtcatactgtgcttaagttcttgttcatgtga

SEQ ID NO: 228431 - DNA, 1266 bp, Homo Sapiens
ttgggtaagtacctgtatgacttggtgcctaagggcacagctgttgtccctggggagaccctcccaccccaaataggtttgggcaggccagggacctgggtcttgagggagtgccgctctctgcgggcctggctcccagcgggcaccgaggtcgcagcagggcctgctgggagctgggcctcgacaggtgaggcaggctgggactcctctgccgggccccgtgccccagacgccctgctgggccctctgctcgcaccactgtcccgacgtctgtgtccctcctgcctccggccaagggcagtgctgactcgcggtggtttcccagggtgttcaggggctacgcggagaggaagcgccggaaacgggagaatgattccgcgtctgtaatccagaggaacttccgcaaacacctgcgcatggtcggcagccggagggtgaaggcccagacgttcgctgagcggcgcgagcggagcttcagccggtcctggagcgaccccacccccatgaaagccgacacttcccacgactcccgagacagcagtgacctgcagagctcccactgcacgctggacgaggccttcgaggacctggactgggacactgagaagggcctggaggctgtggcctgcgacaccgaaggcttcgtgccaccaaaggtcatgctcatttcctccaaggtgcccaaggctgagtacatccccactatcatccgccgggatgacccctccatcatccccatcctctacgaccatgagcacgcaaccttcgaggacatccttgaggagatagagaggaagctgaacgtctaccacaagggagccaagatctggaaaatgctgattttctgccagggaggtcctggacacctctatctcctcaagaacaaggtggccacctttgccaaagtggagaaggaagaggacatgattcacttctggaagcggctgagccgcctgatgagcaaagtgaacccagagccgaacgtcatccacatcatgggctgctacattctggggaaccccaatggagagaagctgttccagaacctcaggaccctcatgactccttatagggtcaccttcgagtcacccctggagctctcagcccaagggaagcagatgatcgagacgtactttgacttccggttgtatcgcctgtggaagagccgccagcactcgaagctgctggactttgacgacgtcctgtgaggggcagaggcctccgcccagtcaccatcagccactccctctgcaccgggacctgggg

SEQ ID NO: 228432 - DNA, 1205 bp, Homo Sapiens; identical to SEQ ID NO: 194818

SEQ ID NO: 228433 - DNA, 831 bp, Homo Sapiens
ttggcccagttcgggagacatggcgggcgttaaagctctcgtggcattatccttcagtggggctattggactgacttttcttatgctgggatgtgccttagaggattatggcgtttactggcccttattcgtcctgattttccacgccatctcccccatcccccatttcattgccaaaagagtcacctatgactcagatgcaaccagtagtgcctgtcgggaactggcatatttcttcactactggaattgttgtttctgcctttggatttcctgttattcttgctcgtgtggctgtgatcaaatggggagcctgcggccttgtgttggcaggcaatgcagtcattttccttacaattcaagggtttttccttatatttggaagaggagatgattttagctgggagcagtggtagcactttattctgattacagtgcattgaatttcttagaactcatactatctgtatacatgtgcacatgcggcattttactatgaaatttaatatgctgggttttttaatacctttatatatcatgttcactttaagaaagacttcataagtaggagatgagttttattctcagcaaatagacctgtcaaatttagattatgttactcaaattatgttacttgtttggctgttcatgtagtcacggtgctctcagaaaatatattaacgcagtcttgtaggcagctgccaccttatgcagtgcatcgaaaccttttgcttggggatgtgcttggagaggcagataacgctgaagcaggcctctcatgacccaggaaggccagggtggatccctctttgtgttgtagtccatgctatta

SEQ ID NO: 228434 - DNA, 919 bp, Homo Sapiens
aactttgtacaaaaaagttgggctgccgctgccgccgtcgttgttgttgtgctcggtgcgctgagctccgcggctccgcgagccggttccgtccccttcccgccgccgccatgaagtggatgttcaaggaggaccactcgctggaacacagatgcgtggagtccgcgaagattcgagcgaaatatcccgacagggttccggtgattgtggaaaaggtctcaggctctcagattgttgacattgacaaacggaagtacttggttccatctgatatcactgtggctcagttcatgtggatcatcaggaaaaggatccagcttccttctgaaaaggcgatcttcctgtttgtggataagacagtcccacagtccagcctaactatgggacagctttacgagaaggaaaaagatgaagatggattcttatatgtggcctacagcggagagaacacttttggcttctgagggccattgctgggctaggtgcaccgtaactgcttgtgtatcttgtaaatagccagccattttcagttattataccagaacctcttcacatagacctattagtgcatttgtaactggatttatttcttaatatattggaaggttttgtttccttagactagtaaattatcatacagagttttattttgagtttttctttttgtgcattgtcctcatgcctgtattctccaggaaacttgtccttctggaaatcatattgaatgatatttctatatcgaagtgaggtaagtgcggtattaaagtgaaaaggaaaggtgatgcatttattctgggttatgcttgaagtgttagatggctaagtatttaaattatccaatttaaatcccttagcagtcagaacacttgcttcactagaatatgccaactgcccaatcatgttggactgagctaatttg

SEQ ID NO: 228435 - DNA, 1273 bp, Homo Sapiens
ttggcccaagatggcggcggcggcggctcccggaaggccgcggcggcgtcccgactgctaaggcgggccccacgcggctggcagcggacaggccggacctacggccggaggacgggcggcagccgcctctgcgcggaccggggctgggccgtgcggcggcagcggcgccaggggatgctcttgctgggcctggcctctcccttctcaacttagggcggcggcgggcccgcgcccctggctcccgggccatggcgctgagggagctcaaagtgtgtctgctcggggatacaggtgtaggtaaatcgagtattgtgtggcggtttgtggaagacagttttgatccaaacatcaacccaacaataggggcatcttttatgaccaagactgtccagtaccaaaatgagctacataaattcctaatctgggatacagctggacaagaacgatttcgtgccttagcaccaatgtactatcgagggtcggctgcagctataatcgtttatgatatcacaaaagaagagacattttcaacattaaagaattgggtgaaagagcttcgacagcatggcccacctaatattgtagttgccattgcaggaaataaatgtgatcttatcgatgtaagagaagtcatggagagagatgcaaaggactacgccgactctattcatgcaatttttgtagagaccagcgcaaaaaacgcgataaacataaatgaactctttatagaaattagtcgaagaattccatccactgacgccaacctgccatctggcggtaagggcttcaaactccgaagacagccttcagagccaaagcggagctgctgctgaccgaacctcagcctctcagacttgatgatgaagtaggtggtcctgaaagttaacaggagggctggggtccctgccaccagttttcacctagccagtcttgagtcttctccgtgcaaaaaggattcacagaaatggaccagttctgttctccaaagactgcagcaatgatatttcagtctgtgaacttctattatgtaaagaatctctagtgtacaaagggactacatcgttggcttttgaccttgctgaaaaggaacatataattgtatggatggtaggattaagttgttgagtagttttgtaatcaagattttatgtaacatttgtaaagggaaaattagcacttttgtggttcttaaagggaaaagaacagaccttgtggagattataattttccttggtttctgttaccactgttagagggagttgtatcatttaac

SEQ ID NO: 228436 - DNA, 950 bp, Homo Sapiens
gaagtcaagcctggagatgacgctggccatgccgtgctcacagtcactggtgctatagatgctcagccgggccaggaggtccagcaggtgggctgagaagttcttgtcaaacttgttgatggtggcctcgaagccggacaccagctgcacagtgtctgcgtgctcagccaggtgcttcctggcgagctccttccgggcccgctcctcggcccctgcgggcagccccaggacggtgctgtgctccagcgtctgcccgcccagctcgccatctaatttcatgctctgtgtaaatttctgcatgcagttggtgaacatgacgcacacagacatgagcttggagaagaccttcagcagctcggggttggtgagcatgcagtccttcaggcaggtgtccaggaagcctgtgtggtggccaaggacgtcgtcaatgttggaggcggatttcaggtttttctccaggatgtgccaggtcggttccatcacttcgaacatcatgtagtattgaatattctggacgaagttgagcattcgctgccgcagagtgaaagccccagcaaaccactgggcggagtgcagcgagtgctgcttggcggttttgttgctgatccagacgctgcagagctgccgctccacgtgcttgcaatagaacatgtgcctgaagagcatctggtagcgagtgagggctttcctgttgatgatgagcgaaaggggccacttgacgatgtagtcgaaagagaaggcctccaggccgctcagcgccagctccgtggggtcggcgtgcgccatccccttctcctgcttggtctcgatggccaggacgcgcaagagctgagtgatgaggtcatggggcatcaggtcgatcttgaggtcgtccttgaaggggtcagtgttggccgtgctcatgcgcagcgccagctccaggagcgcttccaggcgagggagcgtgccaa

SEQ ID NO: 228437 - DNA, 993 bp, Homo Sapiens
ctttgtacaaaaaagttggcacaaccagatggaaagcaattgcagggtattcctagttcttctcatgtaagtaataacatgagtacaccagttttgcctgctccgacagcagccccaggaaatacgggaatggttcagggaccaagttctggtaatacttcgtcatcaagtcacagcaaagcctctaatgctgctgtaaaattggcagaaagcaaagtaagtgttgcagtggaagccagcgcagatagctcgaagacagacaagaaattgcaaattcaagaaaaagcagcacaagaggtaaaattggccatcaagccattttaccaaaataaagatatcaccaaggaagaatataaagaaattgtacggaaagcagtagataaagtttgtcatagtaagagtggagaagtaaattctactaaagtggcaaatctggttaaagcctatgtagacaaatacaaatattcacggaaggggagccaaaagaaaactctggaagaacctgtgtctactgaaaaaaacataggctgaaatggggaacgctgtcaaggacattatcaggatatctgcaaagtgcaatttcaacatgtaccattaactgaaaatcatacataactgtgattgaaatttggttttgataaaattatttttttaacataggatatgatgttttgttctaaataaatataggtctgcactgcaacttctgtatccttccttcccctccaccctcccccacaaaattcaagggaaagtaaagggtttaaaggaatgtgcatctttactaggactgtgttatagtgtggatactggaaaatgtatagctttttgattacggcaatgggagtgcataaattagaaacttctaagtgcactggttttcaaagagatatatataatgcatttattctgtcaggttaaaatataaagtatgatctttatgattttttccctctaattatagaaagttaaataatgtattaccatgaaaaa

SEQ ID NO: 228438 - DNA, 592 bp, Homo Sapiens
taaaagccaactttgtacaaaaaagttgggacatttctgccaaaagtaactacaactttgaaaagcccttcctctggcttgctaggaagctcattggagaccctaacttggaatttgttgccatgcctgctctcgccccaccagaagttgtcatggacccagctttggcagcacagtatgagcacgacttagaggttgctcagacaactgctctcccggatgaggatgatgacctgtgagaatgaagctggagcccagcgtcagaagtctagttttataggcagctgtcctgtgatgtcagcggtgcagcgtgtgtgccacctcattattatctagctaagcggaacatgtgcttcatctgtgggatgctgaaggagatgagtgggcttcggagtgaatgtggcagtttaaaaaataacttcattgtttggacctgcatatttagctgttttggaacgcagttgattccttgagtttcatatataagactgctgcagtcacatcacaatattcagtggtgaaatcttgtttgttactgtcattcccattccttttcgtttagaatcagaataaagttgtatttcaaatatct

SEQ ID NO: 228439 - DNA, 1324 bp, Homo Sapiens; identical to SEQ ID NO: 194822

SEQ ID NO: 228440 - DNA, 285 bp, Homo Sapiens; identical to SEQ ID NO: 194823
  misc_feature (265)..(273): n is a, c, g, or t

SEQ ID NO: 228441 - DNA, 933 bp, Homo Sapiens
ttgggaagcagaaagagatcatcaagaagctgattgagcgcaaacaggcccagatccgcaaggtctacccggggctcagctgcttcaaggagggcgtgaggcagatccctgtggagagcgttcctggcattcgagagacaggctggaagccattggggaaggagaaggggaaggagctgaaggaccccgaccagctctacacaaccctcaaaaacctgctggcccaaatcaagtctcaccccagtgcctggcccttcatggagcctgtgaagaagtcggaggcccctgactactacgaggtcatccgcttccccattgacctgaagaccatgactgagcggctgcgaagccgctactacgtgacccggaagctctttgtggccgacctgcagcgggtcatcgccaactgtcgcgagtacaaccccccggacagcgagtactgccgctgtgccagcgccctggagaagttcttctacttcaagctcaaggagggaggcctcattgacaagtaggcccatctttgggccgcagccctgacctggaatgtctccacctcggattctgatctgacccccaagcgtgcagctctgtcccagccttcactgtgtgtgagaggtctcctgggttggggcccagcccctctagagtagctggtggccagggatgaaccttgcccagccgtggtggcccccaggcctggtccccaagagctttggaggcttggattcctggggcctggcccaggtggctgtttccctgaggaccagaactgctcattttagcttgagtgatggcttcaggggttggaagttcagcccaaactgaagggggccatgccctgtccagcactggttctgtcagtctcccccaggggtggggggtatggggaccattcattcccctggcattaattcccttaaaaggaataataaa

SEQ ID NO: 228442 - DNA, 361 bp, Homo Sapiens; identical to SEQ ID NO: 194824

SEQ ID NO: 228443 - DNA, 870 bp, Homo Sapiens
ttggcgactgtcatggcggcggccgcccccaatgccggaggctcggcccctgagacagcgggttccgccgaagctccgctgcagtacagcctgctcctgcagtacctggtgggtgacaagcgtcagccccggctcctggagcctgggagcctgggcgggatcccaagtccagccaagagtgaggagcagaagatgatcgagaaggcgatggaaagctgcgctttcaaggctgcgctggcctgcgtgggaggatttgtcttaggaggtgcatttggggtgtttaccgctggcatcgataccaacgtgggctttgaccctaaggatccttaccgtacaccgactgcaaaagaagtgctgaaagacatggggcagagaggaatgtcctatgccaaaaatttcgccattgtgggagccatgttttcttgtactgagtgtttgatagaatcttaccggggaacatcagactggaagaacagtgtcatcagtggctgcatcacgggaggagctattggtttcagagctggcttaaaggctggggccattggttgtggaggttttgctgctttctctgctgcgattgattattacctccggtgagagtaattgcctgcagggaaggatgatgccagccccggatccgggctgctctctggaggacagtttctgtaccacaccagggccttgcttcagggcctgaagacattcattttccctcatgtcgttggtattctgagggagctgcctggcttctctgcctccagcctttggggtagccacactttgctgctcctggactccagccagccttcacagaggacgtcccgtgccagattctctcacagcagatcgggagacaggatgttgacatat

SEQ ID NO: 228444 - DNA, 574 bp, Homo Sapiens
actttgtacaaaaaagttggctgttggtttgctgctgtcgtttttgaggagggcccatgggggtaggagcagttgaacctgggaacaaacctcacttgagctgtgcctagacaatgtgaattcctgtgttgctaacagaagtggcctgtaagctcctgtgctccggagggaagcatttcctggtaggctttgatttttctgtgtgttaaagaaattcaatctactcatgatgtgttatgcataaaacatttctggaacatggatttgtgttcaccttaaatgtgaaaataaatcctattttctatggaagactggtacctggtttctggaagaggggtctgtgacttggagctgatctttactgagctcgccgtggcagatgccatgctcaggacgttcatgtggatggtttcatgtcatcgtgctggcaacttgtcctccctgccttagagatgaggctcagacaaacgaccttagcacccatagcctatgccatgagcactggctccaccctgaatcccagctcctccccttagtgaccccaagtctgtttccctcagctgcataaggaggc

SEQ ID NO: 228445 - DNA, 826 bp, Homo Sapiens
ttggcgacgtctttgatgcgtacttggagtagggtctcgactgctgttcccctcttccctacacgatccgcaacccatgccctggaccagccgcccagatcatgccgccgcagctggttgggggcaccatctggacggggatggttccccaggaggagaccctcccctgcctccgaggcctacctgctcccctcaaaagcttcgtgccaacagagaggttcctgtttgaacccaggagagtggaagagagattgggactgagtgctgaggttgggaaggcacctgctcccacagaagggggaacgcaagaggcatcccaagacctcatctgcctgcagtgtcaaatcgatggcctggccttggcttctgattatttgcagctgcgatgggtgtttacaggaacccagccagagtttgcctccctgcacttcatcccggagcgcacctgcttcccccacttcaccttcggagaggacacttcaaactgcggacacacgcaaaagcgactcccagctccgtttgatgtgagttgagccttcaggccagctgggtttagcccgaggctggtcttagatgcagcgactgtttcaggggtgactcagaagaaaaagaagctgaggaagctgttggggggctgagggtgggattctcgctccttcatttcaggttactcgttcttcagcaagttggcaaaacagacatcatgctggtgagtgccacgttactcccctggctggaaatgcttttctgaaagtatgagtgttgtgcctacttaattctgataaacctgtctaagcaatacttaggaggcttacttctttggatt

SEQ ID NO: 228446 - DNA, 638 bp, Homo Sapiens
ttggataggatttccaaaagtatttgtggacagttaaatgctaattaatatacatctgtagttattctacattttcttgaaatttgggaggttaataccaagtattcatttcatgatgtaaagaaactgaacagtgaagtggcttgattgcttaaactattgacttggtaagtctactgtatataacatctaatatatatattacaggccaaatgaactaaacattgccttgctatattcaccaaaaggacttaattcttgtttttttcccagttttatatagaggaaacactatgataggatttcctaaagtatttgtggacagttaaatgctaattatatacatctgtagttattctacattttcttgaaatttgagaggttaataccaagtattcatttcatgatgtaaagaaactgaacagtgaagtggcttgattgcttaaactattgacttggtaagtctactgtatataacatctaatatatatatattataggccagctacaaggggtttaaatatttaggattgtgtcttgaaaactaagtattggagtggattttcttctgctttcattgatacttgtcagaaaaaaatattagaccaaaatgtaaaatataagtaataattctcatg

SEQ ID NO: 228447 - DNA, 1206 bp, Homo Sapiens
ttggcctccctgcacctgtgctccctggcctggtcctttaccaggcttctccaccctcccctatctccaggtatttcccaggtggtgaaggaccacgtgaccaagcctaccgccatggcccagggccgagtggctcacctcattgagtggaagggctggagcaagccgagtgactcacctgctgccctggaatcagccttttcctcctattcagacctcagcgagggcgaacaagaggctcgctttgcagcaggagtggctgagcagtttgccatcgcggaagccaagctccgagcatggtcttcggtggatggcgaggactccactgatgactcctatgatgaggactttgctgggggaatggacacagacatggctgggcagctgcccctggggccgcacctccaggacctgttcaccggccaccggttctcccggcctgtgcgccagggctccgtggagcctgagagcgactgctcacagaccgtgtccccagacaccctgtgctctagtctgtgcagcctggaggatgggttgttgggctccccggcccggctggcctcccagctgctgggcgatgagctgcttctcgccaaactgccccccagccgggaaagtgccttccgcagcctgggcccactggaggcccaggactcactctacaactcgcccctcacagagtcctgcctttcccccgcggaggaggagccagccccctgcaaggactgccagccactctgcccaccactaacgggcagctgggaacggcagcggcaagcctctgacctggcctcttctggggtggtgtccttagatgaggatgaggcagagccagaggaacagtgacccacatcatgcctggcggtggcatgcatcccccggctgctgccaggggcagagcctctgtgcccaagtgtgggctcaaggctcccagcagagctccacagcctagagggctcctgggagcgctcgcttctccgttgtgtgttttgcatgaaagtgtttggagaggaggcaggggctgggctgggggcgcatgtcctgcccccactcccggggcttgccgggggttgcccggggcctctggggcatggctacagctgtggcagacagtgatgttcatgttcttaaaatgccacacacacatttcctcctcggataatgtgaaccactaagggggttgtgactgggctgtgtgagggtggg

SEQ ID NO: 228448 - DNA, 1145 bp, Homo Sapiens
gagggaaaggaataacatactcaacttcataaagatgtggggaagtcaaatcaatcacttatagtaattagcgctgtgcctaatacatgttaagtgcataaactttggctgtatttggaagtaccagccatacccaccaactgcatctgcctcccctatctactccccccaccgtcagcctattgccaatcagctgacgcgcttccctcgagagtagcctgacccttttcttgcccccataggctgatctactggctgacctttgccgtgggccgctccttccgaggcttcggctacggcctgacgtttctgccactgctgtcgatgctgatgtggaacctctactacatgttcgtggtggagccggagcgcatgctcactgccaccgagagccgcctggactacccggaccacgcccgctcggcctccgactacaggccccgcccctggggctgagcctctccgccctcgccctcggagtagggggtagcggcttgggtctgacacatctttgaaccttgtggccaggcctggacttcgcccccaggcctaggaccccggtgggtggaaccctgctactgccccaacagggactccaatcaatcggagttctccccttgccggagctgcccttcacctttggggcccgagacagtcataagggatggacttagttttcttgcagggaaaaaggtggacagccgtgtttcttaaggatgctgagggcatggggccaggaccaggggagaggcacagctccttcctgagcagcctctcaccactgccacaaggctccctaatgctggtctctgctccactccccggcttcccgtgaggcaggaggcagagccacagccaaggccctgaccacttctgtgccagttgtctaagcagagcgcctcagggacgctggaaatgccttaaggatagaggctgggcatcacatcaaatgggactgtggtgtttggtgaaaaccttcctgaggatctggattcaggaccctccatgactggcctatttactgtttacagctggccagtgcagagctgctgctcttttacctttttaggcccctgtaacttcccacctttaaactgcccagaaggcatgcctctcccacaggaagaggggagcagacaggccaa

SEQ ID NO: 228449 - DNA, 937 bp, Homo Sapiens
tttgtacaaaaaagttggtgaaccctgctgaaaggctcgcgatgcctctacacaagtatcccgtgtggctctggaagcggctgcagctgcgggagggcatctgttcccgcctgcccggccactacctgcgctccctggaggaggagcggacgcccactcccgtgcactataggcctcatggggccaagttcaagatcaaccccaagaacgggcagcgggagcgtgtggaggacgtgcccattcccatctactttccccccgaatcccagcgggggttgtggggcggcgagggctggatcctgggccaaatatatgccaacaacgacaagctctccaagaggctgaagaaagtgtggaagccacagctgtttgagcgagagttctacagtgagatcctggacaagaagttcacagtgactgtgaccatgcggaccctggacctcatcgatgaggcttacgggctcgacttttacatcctcaagaccccgaaggaggacctgtgctccaagtttgggatggacctgaagcgagggatgctgctgcggcttgcccggcaggacccccagctgcaccccgaggaccccgagcggcgggcagccatctacgacaagtacaaggaatttgccatcccagaggaggaggcagagtgggtgggcctcacgctggaggaggccattgagaagcagagacttttggaggagaaggaccctgtacccctgttcaagatctatgtggcggagctgatccagcagctgcagcagcaggcactgtcagagccgggcggtggtgcagaagagagccagtggccagtgaccacacagctcctccatgcctgaccaaacaggcccagctttctctgccaggcccttttgcactgaaggacacagatcccggggagctgtgagggccaccggtgggcagtgggtggatcctggtt

SEQ ID NO: 228450 - DNA, 636 bp, Homo Sapiens; identical to SEQ ID NO: 194827

SEQ ID NO: 228451 - DNA, 453 bp, Homo Sapiens
ttggctctgtggaccagaaggagcgctgcatcattgtcagaacaaccaacaagaagtactacaagaagttctccattcctgatctagatagacaccagctacctctggatgacgcctcgctgagctttgcccacgccaactgcaccctgatcatctcttaccagaagccaaaggaggttgtggtggccgagtctgagctacagaaggaactaaagaaggtgaagacagcccacagcaacgatggggactgcaagacccagtagttggcccctgagccttatacctccaccacagggggtgccgtgagacttcaaggcttggcccttcttgaccacggcagcctcctgtcttctaggagctatcaagggtctctaagaactgggcatggggcactcctagccagtgagtcatggtcatatttcctgagtaaagtcattctgagttacttactgc

SEQ ID NO: 228452 - DNA, 960 bp, Homo Sapiens
tttgtacaaaaaagttggcgaggaggccctgccagtgacgaccgccgagggaatggccaagaaggtgaccaaggctggcggctcggcggcgttgtccccatctaagaagaggaagaatagcaagaagaagaaccagccgggcaagtacagccagctggtggtggagaccatccgtaggctgggcgagcgcaacggctcgtcgctggccaagatctacaccgaggccaagaaggttccgtggttcgaccagcagaatgggcgcacctacctcaagtactcgatcaaggcgctggtgcagaacgacacgcttctgcaggtgaagggcaccggcgccaacggttccttcaagctcaaccgcaagaagctggagggcggcggggagcggcgcggagccccggcggccgccaccgccccggcccccaccgcgcacaaagcgaagaaggcagccccgggcgcggccggctcccggcgcgcggacaagaagcccgccaggggccagaagccggagcagcgctcgcacaagaagggcgctggcgccaagaaggacaaaggcggcaaggccaagaagacggcggccgccgggggcaagaaggtgaagaaggcggccaagcccagcgtccccaaagtgcccaagggccgcaagtgagcgtgtcggccggtcagagcggccggcgtgggcttttcggtgtttttgtttttctaccccaagtgacgtagattttgtacggctcacgccggccggggccgcgaggcctggtctgagcctcagggaggggccccgggtcctctcagtctcttcccctcccccaacgatgtagcgtttttcgttgtttgctttaggtttttgaaacagccccggcgacgcctctattggctctcggccttgacaacggccgtcgtcatggttactgggcccctacgcgccgatgggccgaggcccgcgcctgcccaccggggcgg

SEQ ID NO: 228453 - DNA, 341 bp, Homo Sapiens; identical to SEQ ID NO: 194830

SEQ ID NO: 228454 - DNA, 754 bp, Homo Sapiens; identical to SEQ ID NO: 194831
  misc_feature (413)..(603): n is a, c, g, or t

SEQ ID NO: 228455 - DNA, 729 bp, Homo Sapiens; identical to SEQ ID NO: 194832

SEQ ID NO: 228456 - DNA, 958 bp, Homo Sapiens
ttgggtgagaatggcgtcccgcggccggcgtccggagcatggcggacccccagagctgttttatgacgagacagaagcccggaaatacgttcgcaactcacggatgattgatatccagaccaggatggctgggcgagcattggagcttctttatctgccagagaataagccctgttacctgctggatattggctgtggcactgggctgagtggaagttatctgtcagatgaagggcactattgggtgggcctggatatcagccctgccatgctggatgaggctgtggaccgagagatagagggagacctgctgctgggggatatgggccagggcatcccattcaagccaggcacatttgatggttgcatcagcatttctgctgtgcagtggctctgtaatgctaacaagaagtctgaaaaccctgccaagcgcctgtactgcttttttgcttctcttttttctgttctcgtccggggatcccgagctgtcctgcagctgtaccctgagaactcagagcagttggagctgatcacaacccaggccacaaaggcaggcttctccggtggcatggtggtagactaccctaacagtgccaaagcaaagaaattctacctctgcttgttttctgggccttcgacctttataccagaggggctgagtgaaaatcaggatgaagttgaacccagggagtctgtgttcaccaatgagaggttcccattaagatgtcgaggcggggaatggtgaggaagagtcgggcatgggtgctggagaagaagagcggcacaggcgccagggcagggaagtcagacctgacacccagtacaccggccgcaagcgcaagccccgcttctaagtcaccacgcggttctggaaggcacttgcctctgcacttttctatattgttcagctgacaaagtagtattttagaaaagttctaaagttataaaatgttttctg

SEQ ID NO: 228457 - DNA, 1321 bp, Homo Sapiens
ggggcaaaagggtaatttcaagtgggaatgccaaagaaggggtgcttacatgggggcacaaaattccaaatcaggccacagtggggtgaggtgagtatgagacgcaggtgggtgaatgaaggaaagtttagtaccacttagggctacaggaccctggggttcttctgtcagaggattggggttcaggtttcaggctttagggtgtaacatgggggggcccagtaggggctatgctggttgcatgggaaggccccaggcccctccccaagagcccctccttttgggggaatctcactgacgaggcagagtcgttcactgtagtctggctgcagactctcagccagtcccttagacacaccactccaggccgaaaagttcccgtggtattcagtaacaagatcctctaggttcttcagggtgggaattcggggcatcgtccgttccagccagaaatacacacagagaaggctgataatcaatcccatggagccaacagagataaccacggcttccaatgcaaacaggaaaggattctcttttgaagtattgctcccccagtggattgggtggctccattcactccaatgctgagcacttccacagagtgggttaaagcggctccgaacacgaaacgtgtagcgtttctgcccatccacactaggcaaggagaacttatgtctataatccactgattgttcagtccagctgtggtcccagtcagtccggtactgcaccaagtgctccaaacagtggttcaagaatctgttgttccagttcagttctagctgggattcactcagtttgtgaagtgttaggttctctggagcccaggggatcaccagattctgcagttttagcatctgtgtggcctgtctcctgggttcccgtgggtcctggagctgaacaacaaatgtttggtagaggtggatctcctttttttgcaactgacagccagaagtgatttcttcagagaatagatagtggctgcacttctggactttatcattatccgagttcttgtaccaataatgcagagtgaggttggtaggctggggctcagagctgctgttccaagtgcaattcatgtactcgacattgaacacaaaacactgaacctctgggaggggcagagtggaaacactgagggagtcagtgggcatagtggtcaggaagaaatcagctgtggtgtcttcattcccattgggcgtcagaattgtcgtgttcagccccactcccagcaggggcagctgcaggaataagagggatgtgaatggtaatgatggcttcaacatggcgcttgcccaacttttttgtacaaagt

SEQ ID NO: 228458 - DNA, 1018 bp, Homo Sapiens
tccccttgcccgagctagaggatgaccagggatctctccgatgaacaatgttgttctggctcttcccaagttctccagtggatgttctggtttctctttcttgtgcttcacagtctttccatctctttggagtctacaaggtcttgagaatccagaacccaattccctggccctccttgaccctggttggtctccatcttcataatagtaactatctgcataagcacgggttgcagggaactctggaaagtgtttctttctctttttctcttcctgtaactccttttcttgcaaaaggcgagctatgtcctcatccttcttctcctgaatgcgtcgtctctctgcctcaatagccagcttctcctgaatttcctgagcaatttcacagtcttgttgttcaaggtctttgtagcgcttctggagctgggcctgcgctttcagatcttcctcttggagctgcttagccacctggagatcatgctggaccaaacggttccgctgaacgttcgatgccaaatgatgctcaatctcttgttcctgcaggctgtgagccagggtgtggtcctccaggacagcaaaatctcggcatacttccttgactccaggcagcttggactggtcgatgctgacttcagccataccgggccagggtcccggttgcccctttaacgcgggcttcccggtcaccgccggcgccgagcggggccccgagcgcagcagcagcgccggacgcggcgcaaagtccggccggcagggctcgcaggccggagaacggagcgggtcgggcgggcaggggctggtgaccaaagcagcgggagacggtccccgaggcaccaagctggcggcccagctgccccgccgcggccacctgctccgcgtccccggccccaatcgataccaaatatccggagcccggaaatggaccgggtcgagccagtacggagggagagaggagacagaaaggcgggcgggccggctgggggagggggagctgcaggtctttaacggcaattgcgcc

SEQ ID NO: 228459 - DNA, 620 bp, Homo Sapiens
aataggtgtcagccaccgcacccagcctggagtggccttttatgagaggggacccgtcaaatctgtgccttatggaggggtccggcagcggccacaattgtcttgtcccctcaccccccaactccccctggaacacctctcccaggcaagacattttcacagcaccattcacaacggttgggccaaaaagaaacttttccttcatcatttcctgcactcgctgaccacaactttggacaccccaggctgccacccctccccacccgttcacccccaggatgctgttgctgtaggacgcctgctgccctggagccctccccaggatgtgagccagtcccctcgctggtacggaatgccgctgggtgcccggaggcggccatggtgtctcgatggacggcagccaggatggagcacccatgggtctcacggccatgcttcagggtcttcaggtcctgcccccggccagtctgccaagaggcacccccttccccagcctctcgcctgcactgatgcagacaaaatctcacctgacaggcccaacccccaccccactcctcccccgccgtgtgtggcccctcgccgcatcgttggggttttgttacgtgaaaatatcctggaaa

SEQ ID NO: 228460 - DNA, 899 bp, Homo Sapiens
cccccagcgtgggcccttagagttgggtatgggggcagcagggccagaagaaaggcacaggtggtcgatttgccccagccttccccctaagatgcagaccctcagaacacgtcgcggaaggtgagctccttgctccgagaggcagactgggggtgtaacgcaaagacggtttctttcatcaataaggtccccactgcctcacagcccctaaggccacccgctggttctggcattctagacgggggtgcccttggcccttcctttgtcttcctgttttgcagggtaatcccagggttccatgcgtatcctctgcacattcagcatgggctcctcggtgcttgtgtctccatttttctgtcgttctgcgataatcatggcccggaggagaggcgggtacggcacggaggccaggctgtcttccggcgccggcgtgaacgcggtgaaggcctcctcctcgtgcttgggcaccagccgccagtcatggtacatgacgtgttcgatctcccgcgcctcgctctcagtcttccctttgaaggtcaggatgccccaggccttcccgtggtccaagttctgcgccgtgtagtcgggccgcacccgcgtgaggcgccagtagcacggctcgtcgtgctgccacagccaggacttgcgcgtgaccaggcggcccaggccgaagagcgggaggcggccgagcagctgcaagaggcggctctcgcggcgcacgtcggcccaggcccggaccggcagccggcgtccagagaacggccgcgtcaaggtctcgtagtccaccgcgtagagctgggagtcgcgcggcctgttcagttgctcccgcagggcgcgcacgcggcgggccagctccgcgatcagccgcggacgcaccttcttccgcgccatggcgccaa

SEQ ID NO: 228461 - DNA, 717 bp, Homo Sapiens; identical to SEQ ID NO: 194835

SEQ ID NO: 228462 - DNA, 1447 bp, Homo Sapiens
ttgggtctgattctacaatagtctattataaacttactgatggatttatgctgccagaccctcagaatatttctcttagaagatgacatccatgtttcctgatgcttgttttattcatacaagattggatttgagacccatcagactgcttcatcttttatctcagaaatagggttgacgtacatagtgagggttgacttccccattccataaggttttcattctgaagagtaaaacttccccaggtagaagactttctccttcttaaaaaatatagggtgatttctttaaaactttgttatctagagacagtttaattacagttatatacaggtttatgcctaggatgtattcagatgggtgggacctgtgtgctgcttttgtcatcccacactcaaagttgtctctttgtttcttgctgccactgccagctcattgttgagactgccatttctttctcttactcagctctccccagtgccttttggccactgcagctaccgtagaatggcattttatatgtaccttgtcacccacttctgtttactttttcctctccagtaaaaagtaaaagatttctttcaattggtcttcccattgcagttactgttatttctcttttttggttaactttaaatcaaaactcaaaatatgttcatccagagtgtgtcttaagtaacttacgtgtcttaagtaacagggaccagagacatgttacctacaagagttctgggctatccttttcattcttatcacatatcatagcttgaatattacaacagtgtgggagagaatcaaccgtaaaaatgtcttcattaattagacccagttattccacttttgttaatgtctctcaaattgtacaaagtataaaaaattatatgcacaaagatgttccaagtgacattacttttagtagcccaaattataaaccactttaaagtttggggtaaagattggcaaactttttctataaagggccagaaagtaactattttaggtttttaaacctactgtctctgtcataacttgtcaacactgctgtatgaagcacaaaagcagccatagacaatacataaacaatacgggcgtggctttgttccagtaaaactttgtttacaaatgtggtgccatagtttgtcatccctgggtctaggaaatagtcaataaacagatatatacaaatgatacataatgtacttattaaaaattagtaatgaatattattaaaaacatgaaaatattaccttaagtaaaaattgcaagacggaaaagtgtataagtgggtgtaatcatggctgaaataacagaccaagcatatgataaaaagataacaaagtaaatcaaattactaactggttatagtgggataggaggcagaaaatggatgactttgtcttttctcaatgtttttatttgtattttataataaaaatgttttaaaatt

SEQ ID NO: 228463 - DNA, 942 bp, Homo Sapiens
tgtacaaagaaccaggagtttggcgtgaccatggggaagcaaaagaaaacaaggaagtatgcgaccatgaagcgaatgcttagtctcagagatcagaggcttaaagaaaaggatagattaaaacctaaaaagaaagaaaagaaggatcccagcgcattaaaggaaagagaagttccccaacacccttcctgcttatttttccaatataatacacagctgggcccaccttaccacatcctcgttgataccaactttatcaacttttccataaaagccaaactggacttagtgcagtcaatgatggactgtctgtatgccaagtgtatcccatgtataaccgattgtgtaatggctgaaattgagaaattggggcagaagtatcgagtggctctaaggattgccaaggatccaagatttgaacgattaccatgtacacacaaaggaacctatgcagatgactgcttagtacagagagtaactcagcataagtgttacattgtggccacagttgaccgggacctgaaaagaagaatccgtaagattcctggagttcctatcatgtacatttctaaccatagatacaacattgaacggatgccagatgattatggagcccctcgattctaattcttacaagacacagttcctctgcctttcttcgaccaactttctcttgttgccagttcattacacaaaatgtagcgggatttttaaggaatcagagagactgatggagttcagggagatatttattatttaggtgcaccagcccagtcagattaacatccaaaggactgaaccctgaacagagttaagttaccttttaagcattttgtggggccgcgggggttggggggaatctgtgcagggggaagcatattacagaagcagaaagacagttattcaattaactgagacatgcattacatcatttcttacttt

SEQ ID NO: 228464 - DNA, 1552 bp, Homo Sapiens
ttggctgggaaattattgctgctgcagaaaatgctcaagaaccttaaggagggtgggcatcgtgtactcatcttttcccagatgaccaagatgctagacctgctagaggatttcttggaacatgaaggttataaatacgaacgcatcgatggtggaatcactgggaacatgcggcaagaggccattgaccgcttcaatgcaccgggtgctcagcagttctgcttcttgctttccactcgagctgggggccttggaatcaatctggccactgctgacacagttattatctatgactctgactggaacccccataatgacattcaggcctttagcagagctcaccggattgggcaaaataaaaaggtaatgatctaccggtttgtgacccgtgcgtcagtggaggagcgcatcacgcaggtggcaaagaagaaaatgatgctgacgcatctagtggtgcggcctgggctgggctccaagactggatctatgtccaaacaggagcttgatgatatcctcaaatttggcactgaggaactattcaaggatgaagccactgatggaggaggagacaacaaagagggagaagatagcagtgttatccactacgatgataaggccattgaacggctgctagaccgtaaccaggatgagactgaagacacagaattgcagggcatgaatgaatatttgagctcattcaaagtggcccagtatgtggtacgggaagaagaaatgggggaggaagaggaggtagaacgggaaatcattaaacaggaagaaagtgtggatcctgactactgggagaaattgctgcggcaccattatgagcagcagcaagaagatctagcccgaaatctgggcaaaggaaaaagaatccgtaaacaggtcaactacaatgatggctcccaggaggaccgagattggcaggacgaccagtccgacaaccagtccgattactcagtggcttcagaggaaggtgatgaagactttgatgaacgttcagaagctccccgtaggcccagtcgtaagggcctgcggaatgataaagataagccattgcctcctctgttggcccgtgttggtgggaatattgaagtacttggttttaatgctcgtcagcgaaaagcctttcttaatgcaattatgcgatatggtatgccacctcaggatgcttttactacccagtggcttgtaagagacctgcgaggcaaatcagagaaagagttcaaggcatatgtctctcttttcatgcggcatttatgtgagccgggggcagatggggctgagacctttgctgatggtgtcccccgagaagcctgtctcgccagcatgtccttactagaattggtgttatgtctttgattcgcaagaaattcagagtttgaacatgttaatgggcgctggagcatgcctgaactggctgaggtggaggaaaacaagaagatgtcccagccagggtcaccctccccaaaaactcctacaccctccactccaggggacacgcagcccaacactcctgcacctgtcccacctgctgagatgggataaaaat

SEQ ID NO: 228465 - DNA, 768 bp, Homo Sapiens
gcttttttcctttagaacaggctttgtacaaaaaagttggatccttcttcctgaagagcaacagctcctgctccttggaggtggtgggaactgcttttcctttggtacctacttcaacccccatacagtcacattagacctttcttccttaagtgctgggcagtaaggactggactaatattcaggacccactaaagtagacaataaagttttccacaaataggatgaccctctagctatagatactgccactcctcctttccccatcctttttttcccttagcactattcagtgcaaaaagtgaaaaaggttggtaaaataggtaaaatacctagaaacaatcactacagaaaacagctgaagacagtggccatgcagtccgagaggagtagtggtctgcctctaattttctaatctaagttcgtttattgagttacagtggtctttagtaaagtaaaacaatttcccaatcccaggccttgtgatttgagatggtaccttagaaaaagttacacgcagttccgtggttgaatatatttgagatggtaccttagaaaaagtttcacgcagatccttggttgaatatagttgagggagcgtagtattgacaattcttcatgtaggaaacctgaaatgaacacagtcacagtttgattaaaacattgtcctgtttgttgcaacagaaaactcggatagttttaacaacaagaaacacttgtagacttccttaccaacatacttttttaaatgttttgctattggttcca

SEQ ID NO: 228466 - DNA, 960 bp, Homo Sapiens
  misc_feature (729)..(753): n is a, c, g, or t
ttggggatgagaagccgtcaagcaggagtagaaattggtatgcttagaagcagattctaaaagcagtttctcttcagaacatcttttttcataccacttgataagcatcttgaaacaccatggctgtagctgcagtaaaatgggtgatgtcaaagagaactatcttgaaacatttatttccagtccaaaatggagctttatattgtgtttgtcataaatctacgtattctcctctaccagatgactataattgcaacgtagagcttgctctgacttctgatggcaggacaatagtatgctaccacccttctgtggacattccatatgaacacacaaaacctatccctcggccagatcctgtgcataataatgaagaaacacatgatcaagtgctgaaaaccagattggaagaaaaagttgaacaccttgaggaaggacctatgatagaacaacttagcaaaatgttctttactactaagcaccgttggtatcctcatggacggtatcacagatgtcgtaagaatctgaatcctccaaaagacagatgatgcggaggttcctgggggaatcaaagagaaatgtgcctcatttgccatttgagaaaatgcagtctggtgtattcagtaatatatagtaaagtaataatgataaaatatcttttcatatattagaatgtgtacttttatataaagtaattctggatttgacattctcatttagagaaacctnnnnnnnnnnnnnnnnnnnnnnnnnagtgtttcatttatgtgcggtctccaatttagacttttccatagtgccaaagccatacatattcagtagaacatcaataaattacatcagaaattcaacactttattataaaacgggcttcgtgttagataattttgctaaacagtaggctactgtaagtgttctgagcatatttaagacaggctagcattttcaatttacatattt

SEQ ID NO: 228467 - DNA, 925 bp, Homo Sapiens; identical to SEQ ID NO: 194836
  misc_feature (727)..(751): n is a, c, g, or t

SEQ ID NO: 228468 - DNA, 733 bp, Homo Sapiens; identical to SEQ ID NO: 194838

SEQ ID NO: 228469 - DNA, 1362 bp, Homo Sapiens
ttggcgcctgagagcggcagcgcggtcagtggcggcgctgaagagaccggttgccgccatgatagaacagcagaagcgtaagggcccagagttgccgctggttccagtcaagcggcagcggcatgagttgctgttgggagcggggtctggcccaggagccgggcagcagcaggcgacgccgggagccttgctgcaagcgggacctccaagatgttcctcccttcaagccccaatcatgctgctctctggacatgaaggggaagtctactgctgcaagttccaccccaacggatccaccttagcatctgcaggatttgaccgactgatattactgtggaatgtttatggtgactgtgataactatgccacactgaagggacacagtggagcagtgatggaattgcattacaacacagatggcagtatgcttttctcagcatccacagataaaaccgtggctgtgtgggatagtgaaacaggtgagagggttaaaaggctaaagggacatacttcctttgtgaattcctgttatccagccaggagaggccctcagcttgtctgcactggcagtgacgatggcacagttaagctttgggacatccggaagaaagcagccatccagacatttcagaacacgtaccaggtgttagctgtgaccttcaatgacacaagtgatcagattatttctggtggaatagacaatgatatcaaggtctgggacctgcgccagaacaagctaacctacaccatgagaggccatgcagattcagtgactggcctgagtttaagttctgaaggctcttatcttttgtccaatgcaatggacaatacagttcgtgtctgggatgtccggccatttgcccccaaagagagatgtgtaaagatatttcaaggaaatgtgcacaactttgaaaagaaccttctgagatgttcttggtcacctgatggaagcaaaatagcagctggctcagccgacaggtttgtttatgtgtgggataccacaagcaggagaatattgtataagctgcccggccatgctggctccatcaatgaagtggctttccaccctgatgagcccatcattatctcagcatcgagtgacaagagactgtatatgggagagattcagtgaagatatggactggaagactccaaggccgcttgtctttgagacctcagactgcataagtgatgccaaatgttggatgtccaggctagcaccctcccttcagatgaccattgctagcaagaaacaggaggcggtggccatattccaaaaaccacttctgtcccatttcaacaggatgactaatgcaagctccctgtggcctctaaaaaccacctgccagatttcagggactg

SEQ ID NO: 228470 - DNA, 901 bp, Homo Sapiens
attctgcagattaaagacactcaatctttaacttgaagggcaggcaaaaggtcggctatgctgtcaacatagaagtcagggaccattttcttcttagacacgcagtcactttcgtgattattcttcacatcccctagagtggagactccggtgagggtcaggatggtcttcaggccacaggtggcgcctaggaggatgtctgtgtccaggcggtctcccaccatgacggtgcgctcggggttgatgccgtattcctgggacacgcagtcgaaaatgaagcggctgggcttcccgatgatgtcggcctggcgctgggcggccatctccacggctcggaccagacacccggtacccgcgatgaagcggccgttctcaagcggaagccggttgtccatgttggtgcccacgagcaggcagccgggctgctgcaggtagcgcagggccttggtgagcttcatgtagctgaagtgcgggtcaaagcccaccaccaccgcgcgcacgtcgggctccagcggcgcgtgcagccagtcgccgggaccctcgccctgcagtggctcgggccccacgcccacgctggcgacgcccacggcctccagctccgcggccagggctgggctgcccagcacgtaggccttgggcgcgggggcgccggccaggcgctggcgcaggtagagcgcggtgcagtaggccgtgccgaagacctccaggctggcgccgggccccgcggggccgccgaagcccaggcgccgcagcttctcggcgtaggcagcgcgggtcttgctgctgttgttggtgaggaagcccaggcgcttgccgcgggctcgcagcgcccgcagggcctcgggcgcgccaggcacggcggtcttttttaaaggccacagcacgccaacttttttgtaca

SEQ ID NO: 228471 - DNA, 951 bp, Homo Sapiens
cagtcatcacctggacctagagctcatctcggggctggggtggaggctgtgcccgctgctgccagtcaggtccaggcgggggctgcgcagggtcttttgggagccgctccagctgatgaggcggccgctgtcatcatcccatggagaggatgtctccgtgtcactgagccactcggcgtccccggcatagtgggtaggggcagcgagcaggggctgggcggagaaggccaccaggtcccgtggccagaagtgtgccttgtactgctcgttggggtgctggtcgaacatgatgggcaggaactcgtccacgggcagcatgcggcgcagaggctgtgaggccagcagcttgcgggcacccgccagacgcagggcataggccagcgtccagtaggagtacccagccaccaccaggcccggcagcccctccacggccgtctccttctcagggttcacctgcttccgtccgaggtagatcaggtcccaagacagtttctctgcctccacatcctccatcagccgctccagccgccccctgaagttgctctcaaagcgcacgtcatcctcaaacaccaggacccgggccaggcccctggcaaccacctcttcccagatggagtaatggctgaggaagcagcccacctcgcccttggtcagagtgcggcccgagtaagggtcctggtagcccgggagcaggtctacgccgaggttcctgatggcactgctgttgagcatccagccatccacagcgtccaccaccctcccagagatctccatctcccagagcgaggcgagcatgcgttcccgacggtcaggcctgcgagccaggctgatgacaaagccctcgtcaaaccctatcttgctgggcctcttagagggccgagtcacatgagctgaggcctgcatgcgggggccgttcaaaaggtgcttctaagccaacttttttgtacaaag

SEQ ID NO: 228472 - DNA, 811 bp, Homo Sapiens
agcaatgctttcttaaaagggccaactttgtacaaaaaagttggctcaattttgcgcaagttgaaaagtgcaccagaccaggaggtgagaatacttctcctgggcttggataatgctggcaagaccactcttctgaagcagcttgcatctgaagacatcagccacatcacacctacacagggtttcaacatcaaaagtgtacaatcacaaggttttaaactgaatgtatgggacattggtggacagaggaaaatcagaccatactggaagaattattttgaaaataccgatattcttatatatgtaatcgacagtgcagacagaaaaagatttgaagagacgggtcaggaactagcggaattactggaggaagaaaaactaagttgtgtgccagtgctcatctttgctaataagcaggatttgctcacagcagcccctgcctctgaaattgcagaaggactgaacctgcataccatccgcgaccgagtctggcagatccagtcttgctcagctctcacaggagagggcgttcaggatggcatgaactgggtctgcaaaaatgtcaatgcaaagaagaaataaaatctagacgaatggagatgcaggagctgcgggagccgaattcggtcctgaaaaacactaatttgctgctttctgaccaaatgtttttccatctgtgtacagctccagctgtttgaagagagggaacaacacggtttagaaagaatccccattccagcagtagatttaactgatctctgaggttcagtatcatttttcaaataaaggaattatattatttcctctgcat

SEQ ID NO: 228473 - DNA, 1170 bp, Homo Sapiens
ttggttggtcttgcggagacgcgcgcgtcggggtttaacgcgtttctgggccgccgtaagcccggcctaggggcagctttgactcgagagccggctataggcgcatggaaggttccctggaacgggaggcgccagcgggggcgctggccgccgtgctaaagcacagctcgacgttgccgcccgaaagcacccaggtccggggctacgacttcaaccgcggtgtgaattaccgcgcactgctggaggccttcggcaccaccggcttccaagcaaccaacttcgggcgcgctgtacagcaagtcaatgccatgatcgagaagaagctggaaccactgtcacaggatgaagaccagcacgcggacctgacccagagccgccgcccacttaccagctgcaccattttcctgggatatacatccaacctcatcagttcaggcatccgtgagaccattcgctaccttgtgcagcacaacatggtggacgtattggtgaccacagctggcggcgtggaggaagacctcatcaagtgcctggcgcccacatacttgggcgagtttagcctcagggggaaggagctccgggagaacgggatcaataggatcggaaacctgctggtgcccaatgagaattactgcaagtttgaggactggctgatgcccattctggaccagatggtgatggagcagaacacagagggtgtaaagtggacgccttctaagatgatcgcccggctgggcaaggagatcaacaacccagagtccgtgtattactgggcccagaagaaccacatccctgtgtttagtcccgcacttacagacggctcgctgggcgacatgatcttcttccattcctacaagaacccgggcctggtcctggacatcgttgaggacctgaggctcatcaacacacaggccatctttgccaagtgcactgggatgatcattctgggcgggggcgtggtcaagcaccacattgccaatgccaacctcatgcggaacggggccgactacgctgtttacatcaacacagcccaggagtttgatggctctgactcagtgcccgaccagacgaggctgtctcctggggcaagatccgggtggatgcacagcccgtcaaggtctatgctgacgcctccctggtcttccccctgcttgtggctgaaacctttgc

SEQ ID NO: 228474 - DNA, 825 bp, Homo Sapiens
ttggctcccctgacctgtgagcccagctgggtcaggcagggtgcagtatcatgccctgtgcaacctcttggcctgatcagaccacggctcgatttctccaggatttcctgctttgggaagccgtgctcgccccagcaggtgctgacttcatctcccacctagcagcaccgttctgtgcacaaaacccagacctgttagcagacaggccccgtgaggcaatgggagctgaggccacactcagcacaaggccatctgggctcctccagggtgtgtgctcgccctgcggtagatgggagggaggctcaggtccctggggctagggggagccccttctgctcagctctgggccattctccacagcaaccccaggctgaagcaggttcccaagctcagaggcgcactgtgacccccagctccggcctgtcctccaacaccaagcacagcagcctggggctggcctcccaaatgagccatgagatgatacatccaaagcagacagctccaccctggccgagtccaagctgggagattcaagggacccatgagttggggtctggcagcctcccatccagggcccccatctcatgcccctggctgggacgtggctcagccagcacttgtccagctgagcgccaggatggaacacggccacatcaaagaggctgaggctggcacaggacatgcggtagccagcacacagggcagtgagggagggctgtcatctgtgcactgcccatggacaggctggctccagatgcagggcagtcaatggctgtctcctaggaaacccatatccttaccctccttgggactgaaggggaaccc

SEQ ID NO: 228475 - DNA, 1021 bp, Homo Sapiens
ttggctcagccaactgctcctgcgccgggcggggtcgtcgccgccagcggctccgagcgccggaagggccaggtcgcagggctcctggagctgcaggcggcgggaggggctacaaatgcttgactcagtgatgcagaacctttcagagttagctggaagccacagccctgcctcttgatgcagcctggatccagccggtgtgaagaggagaccccttccctcttgtggggtttggatcctgtgtttctagcctttgcaaaactctacatcagggatatcctggacatgaaggagtcccgccaggtgccaggtgtatttttgtacaatggacatccaataaaacaggtagatgtcttgggaactgtcattggagtgagagaaagagatgctttctacagttatggagtggatgacagcactggagttataaactgcatctgctggaaaaagttgaatactgagtctgtatcagctgctccaagtgcagcaagagagctcagcttaacctcacaacttaagaagctacaagagaccattgagcagaaaacaaagatagagatcggggacacgatccgagtcagaggcagtatccgcacatacagagaagagcgagagattcatgccaccgcttactataaagtggacgacccagtgtggaacattcaaattgcaaggatgcttgagctgcccactatctacaggaaagtttatgaccagccttttcacagctcagccctagagaaagaagaggcactaagcaatccaggcgccctggacctccccagtctcacgagtttgctgagtgaaaaagccaaagaattcctcacggagaacagagtgcagagcttttaccagcaagagctggaaatggtcgagtctttgctgtcccttgccaatcagccctgtgattcacagtgcctgctccgaccaagtgaattttaagaaagacaccacttccaaggcaattcatagtatatttaagaatgctatacaactgctgcaaggaaaaaggacttgtttt

SEQ ID NO: 228476 - DNA, 1260 bp, Homo Sapiens
gcgagggctggaagtctggagcaggtgcgcggctgcaacggcagccgcgggaagctcgggccggcagggtttccccgcacgctggcgcccagctcccggcgcggaggccgctgtaagtttcgctttccattcagtggaaaacgaaagctgggcggggtgccacgagcgcggggccagaccaaggcgggcccggagcggaacttcggtcccagctcggtccccggctcagtcccgacgtggaactcagcagcggaggctggacgcttgcatggcgcttgagagattccatcgtgcctggctcacataagcgcttcctggaagtgaagtcgtgctgtcctgaacgcgggccaggcagctgcggcctgggggttttggagtgatcacgaatgagcaaggcgtttgggctcctgaggcaaatctgtcagtccatcctggctgagtcctcgcagtccccggcagatcttgaagaaaagaaggaagaagacagcaacatgaagagagagcagcccagagagcgtcccagggcctgggactaccctcatggcctggttggtttacacaacattggacagacctgctgccttaactccttgattcaggtgttcgtaatgaatgtggacttcaccaggatattgaagaggatcacggtgcccaggggagctgacgagcagaggagaagcgtccctttccagatgcttctgctgctggagaagatgcaggacagccggcagaaagcagtgcggcccctggagctggcctactgcctgcagaagtgcaacgtgcccttgtttgtccaacatgatgctgcccaactgtacctcaaactctggaacctgattaaggaccagatcactgatgtgcacttggtggagagactgcaggccctgtatatgatccgggtgaaggactccttgatttgcgttgactgtgccatggagagtagcagaaacagcagcatgctcaccctcccactttctctttttgatgtggactcaaagcccctgaagacactggaggacgccctgcactgcttcttccagcccagggagttatcaagcaaaagcaagtgcttctgtgagaactgtgggaagaagacccgtgggaaacaggtctttgaagctgacccatttgccccagaccctgacaatccacctcatgcgattctccatcaggaattcacagacgagaaagatctggccactcccttgtacttccccagaagcttggatttcagccagattcctcccattgaagccgaga

SEQ ID NO: 228477 - DNA, 710 bp, Homo Sapiens
ctttgtacaaaaaagttggcgagaaaattccaaacgactgtagagaccctccggattactggacaatacatggactatggcccgataaaagtgaaggatgtaatagatcgtggcccttcaatttagaagagattaaggatcttttgccagaaatgagggcatactggcctgacgtaattcactcgtttcccaatcgcagccgcttctggaagcatgagtgggaaaagcatgggacctgcgccgcccaggtggatgcgctcaactcccagaagaagtactttggcagaagcctggaactctacagggagctggacctcaacagtgtgcttctaaaattggggataaaaccatccatcaattactaccaagttgcagattttaaagatgcccttgccagagtatatggagtgatacccaaaatccagtgccttccaccaagccaggatgaggaagtacagacaattggtcagatagaactgtgcctcactaagcaagaccagcagctgcaaaactgcaccgagccgggggagcagccgtcccccaagcaggaagtctggctggcaaatggggccgccgagagccggggtctgagagtctgtgaagatggcccagtcttctatcccccacctaaaaagaccaagcattgatgcccaagttttggaaatattctgttttaaaaagcaagagaaattcacaaactgcagctttct

SEQ ID NO: 228478 - DNA, 1316 bp, Homo Sapiens
  misc_feature (636)..(646): n is a, c, g, or t
  misc_feature (795)..(809): n is a, c, g, or t
  misc_feature (883)..(902): n is a, c, g, or t
aaaagttgggcagctgcagcggcagaggcagcatccagcggcggcgccagcagttccagtccgttgctttactttttgcttcaccgacatagtcattatgccgaagagaaagtctccagagaatacagagggcaaagatggatccaaagtaactaaacaggagcccacaagacggtctgccagattgtcagcgaaacctgctccaccaaaacctgaacccaaaccaagaaaaacatctgctaagaaagaacctggagcaaagattagcagaggtgctaaagggaagaaggaggaaaagcaggaagctggaaaggaaggtactgcaccatctgaaaatggtgaaactaaagctgaagaggtactttccataaatacctcccactgattgaatcagtgtctttaaagaaatttctcaatccttcagccggtgatagcacgttcttaatgtctctttttattgcctgtaatgttattgcagatccacatctctcgctcaactgttaatgtctcaacctccagaggcaccccacccagcacactgtcagtaaaggggcagattgaaacagtgagagttaagggtacagtagaaaattctgcatgtttgcagtgactagaatcagatagtagtgtggtggnnnnnnnnnnnaatcattatgaagagtgggagcttgcaggtaaggcttctgtggtggtttgaaaagcagaaagcaataaatgaaacaaagtgtttgtgtaatatattcctgccttgtcttcttcactcagagttgaaataggttttgcagtaaagctggnnnnnnnnnnnnnnncaaatgttcaaaactgtgtgtgttggtgggtggaatttcctttgcttatagtagtttcagtagtaactatatgnnnnnnnnnnnnnnnnnnnncacaggcacagaaaactgaatctgtaaataacgagggataatgaattgtcatgaaaaattggggttgattttatgtatctcttgggacaacttttaaaagctatttttaccaagtattttgtaaatgctaattttttaggactctactagttggcatacgaaaatatataaggatggacattttatcgtctcatagtcatgctttttggaaatttacatcatcctcaagtaaaataaatatcagttaaatattggaagctgtgtgtaagattgattcagcattccatgcacttgctttaaaatttagtcctgtgcatactgtggtgtttttactgtgcatatttgaatttttcatgcagtttttctagagcaataatcagtggtgcgttttgtacctaggttttatgtgatttt

SEQ ID NO: 228479 - DNA, 825 bp, Homo Sapiens; identical to SEQ ID NO: 194841

SEQ ID NO: 228480 - DNA, 1003 bp, Homo Sapiens
gggggcccacatagcctggtgtctcagcatggagcttagtgccaagtcctgtgccagagacactgatgtgtaaagagggaagagggcacacttgggagtggccacagcaagacggcatgctgtcccctacaggctcagtccccacaccctgagttccaggaaagaaggcagaggagaagcggccagcaagggcacagaggcagaacccatgactatacactctctcctcaagccggagggctttatgagggctttggcaattactacaaccatttgctgtgctgggtagggacagatcctgtttctctttgtttcagggctctgaaagccggagaagccagcagaagccgatttcagcataagaggctacacaatagttagggcagaagaaaagaaacctcactgttggctagagctgaccagtttttttctgaataatagcacctgtgtattagctctgggaaaagcgggaagggagggagggagggagcgagcttcaccatgtgcagtgaggggagctggaaacaggacctggagcccctctgcctttcagcctgcttcatggctgccaggcaccccccacccccaggcaggtactggcatggctgccagcctgagggactgaagtttccacagttggcagaatctttgtttaaattggggaaataaaagggggaggagttgcagaggaattgaaagcagcacctgtcaaagctgcctatccccttccttctctcactacttctggtcccccagagaggctggtcccaaggctatgtggttggctggtgacagaaaaggggcaacaaagaatgacaagagaggctatgaaggtctgagcagcaccgacagggctggcacagaccctgagccttcctactgggaccccaacctatggtgaggtctggagtagcaatacaactgagaaagctctgcccggactccagcaggtgcccattctttggtcccagaaagcacaggtgacttggaatcaggaacccaa

SEQ ID NO: 228481 - DNA, 844 bp, Homo Sapiens
tcatatttgttggccccctgtgtactcagggaagcagatggtcaggggactgtgtgtgatcttctcctcaaacaggtccttcttgttgaggaagaggatgatggacgtgtctgtgaaccacttgttgttgcagatgctatcgaatagcttcatgctctcatgcatgcggttcatctcctcgtcctcagctagcaccaagtcataggcgctcaaggctacgcagaagatgatggctgtgacgccctcaaagcagtggatccacttcttccgctcagaccgctgaccacccacatcaaacatcttgaagtgtaggtccttgaaggtgaagtgtgtctccacgatccccgtggtctttacgcgggtccgtagcacatcttgctgtgtggggatgtagtcactctgtgcaatacgctccaggtcgttcaggtagtaggcagctgagtcgttgagctggtattcccttgagcggccaaagcaggcctgcacaccatggtcagcccagagcctccggatgacgccggacaggtcatcagggagcacgccttgctcctcggcggtgcaggacagtgcaaatagctgcctggcgtcgtccgctctggaggggtcggcaaagtcgatctgcaggttgcccatggctttgacaatggccatgatggactggatggtgttgctgtagacaaccgcccggtactgccggcattcctcctcggagtagccatcctcgtggatgatcttcatctgcttgacgatggtgctcttccctgactccccagcacccaacagcagcaacttcacctcccgcgccgccttctccccagcacccaacagcaccaacttttttgta

SEQ ID NO: 228482 - DNA, 943 bp, Homo Sapiens; identical to SEQ ID NO: 194842

SEQ ID NO: 228483 - DNA, 910 bp, Homo Sapiens; identical to SEQ ID NO: 194843

SEQ ID NO: 228484 - DNA, 1338 bp, Homo Sapiens; identical to SEQ ID NO: 194844

SEQ ID NO: 228485 - DNA, 1199 bp, Homo Sapiens
  misc_feature (1035)..(1044): n is a, c, g, or t
ctttaaaaagccaactttgtacaaaaaagttggcttttccaaggctgtacagacatggcggcggcttttcggaaggcggctaagtcccggcagcgggaacacagagagcgaagccagcctggctttcgaaaacatctgggcctgctggagaaaaagaaagattacaaacttcgtgcagatgactaccgtaaaaaacaagaatacctcaaagctcttcggaagaaggctcttgaaaaaaatccagatgaattctactacaaaatgactcgggttaaactccaggatggagtacatattattaaggagactaaggaagaagtaaccccagaacaactaaagctgatgagaactcaggacgtcaaatatatagaaatgaagagggttgcagaagctaagaaaatcgaaagactaaaatcagagctccatctgctggatttccaggggaagcaacagaacaagcatgtgttcttttttgacaccaaaaaggaagttgaacagtttgatgtcgcaactcacctgcaaacagccccggagctagtcgacagagtctttaataggcccaggatagagaccttgcagaaagaaaaagtgaaaggagttaccaatcagactggacttaagcgaatagctaaagaaaggcaaaagcagtataactgcctgacacagcggattgaacgagagaagaaattgttcgttattgctcagaaaattcaaacacgcaaagatcttatggataaaactcagaaagtgaaggtgaagaaagaaacggtgaactccccagctatttataaatttcagagtcgtcgaaaacgttgacgtgttatagataagccttgtcattctgtatcaaaaatctgttgtcgttttctagtaacttcaaattccattactccaaatggcatggttttccggtttgtaaccataactaaattgtcagtctgacatttaatgtctttctatggacaacattaaatctccctcccttctgtaattgtttttggattgtgaaattagtcttatttttatatacttaannnnnnnnnnctttgagatagggtctttgttgccaggctggaagtgcagtgtgtgattatggctcactgcaactttgaactcctgggctcaagtgatcttcctgcatcagcctcttgagtagctgggaccacagacatgtgccaccatgtctgagtaatgtttaa

SEQ ID NO: 228486 - DNA, 1054 bp, Homo Sapiens
ggggccatctgcaccgggcgctctccctggccacaccaaggctgacacgcaggtctgggcagctcttctgggaaggctatgacgactgcgcggaaggtgtgggtgcccccccatccactgtccatcatgctgagtcctggtccatgctgcagcccagcgcctcaatgtcgctgctgatgtccgagatcatgcggtcccactcatccccctctgagggtgccgaccggtcatcagagctgcccgtggccctgttcccattggtggtggaactggatgtggtgctcagggcccgccggtgcctgccaaagctgtcagtgatgatgccgcggccatccttcacgccaatggtctccaggaagttctcgaagtgctggctgtccttctcagggatgaagggcctcagaccaagcagcaggaacttgcggctgtccccgtagagctgccgcaggttgatgcagaactcgtggatagaggccccattgcggtactcgtgcagcagtgctgcaaactgctggatctcctgtgatgacagcttggtgcgcagcgtcagcatgtagtcctgcagcagctcagtggcgctggcgctcagctcgctctcactgatggtcttgctgtggggtgatgcaccacccacatccacagattcagggaagcagaaagtgctggcttccacctcgtaggtctccttaatgtccacttttgtagaagagtcatcgctgtgcagggacaggtggtgggtcggggtagaggccccatcaaatatcgctctgtccagaaagtcgatggtggactccgtgtaaacaacctggaagacctggcctagcagacagcaaagctcctccgcagcgaccttgctctctgcagccaggatgaccaggcagcatgcctccacgggcccaactgcactctccgacagggagcctgcactgaggcctctggaactttccgcacacagactctggctgggggagatccctgggccctgggctgtcttcaggaccaccaggtgtgcagcgtcatcccgaacataggagacggcggcgatgtcatccaa

SEQ ID NO: 228487 - DNA, 531 bp, Homo Sapiens; identical to SEQ ID NO: 194846

SEQ ID NO: 228488 - DNA, 190 bp, Homo Sapiens
ttaggctcgggacatataccacctcacgtctctgccccacaggcttgcccacaggtgacgttcccatggatggcatgtccgtgtctgacctgggtcctgtggtgctcagccttttgaagatgccagaaaaatacgtctgccagaacatctggctgatcacttgcaggcacactgccgacgagtacgctgc

SEQ ID NO: 228489 - DNA, 986 bp, Homo Sapiens
ctttgtacaaaaaagttggggctgcgtcttcgagtggtgagaaggagaaggagcggctgggaggcggtttgggagtggcgggtggtaacagcacacgagagcggctgctgtctgcgcttgaggacttggaggtcctgtctagggaacttatagaaatgctggcaatttcaagaaaccaaaagttgttacaggctggagaggaaaaccaggtcctggagttgttaattcaccgagatggggaatttcaagaactaatgaaattggcacttaatcagggaaaaattcatcatgaaatgcaagttttagaaaaagaagtagagaagagagacagtgatattcagcagctacaaaaacagctaaaggaagcagaacaaatactggcaacagctgtttaccaagcgaaggagaaactcaagtcaatagaaaaagcaagaaaaggtgctatctcctctgaagaaataattaagtatgcacataggatcagtgcaagtaatgctgtatgtgctccactgacctgggttccaggggacccccggagaccctacccaactgatttagagatgagaagtgggttactgggtcagatgaacaatccttccactaatggcgtgaatggccatttaccaggagatgcacttgcagcaggaagattgccagatgtccttgctccacagtatccatggcagtcaaatgacatgtcgatgaatatgttaccaccaaatcatagtagtgactttttgttggaacctcctgggcataataaagaaaatgaagatgatgtagagattatgtcaacggactcctcaagcagtagtagtgagtctgattgaaaaaccttaaaagacaatatacagaattgaatactgtagaattctgtttctttaacagtagcagggaaatgtaaactacaggtgacaaaaaatacccaggtaaacactggctttggtagaattgtgcagtcattaaaagtcaaaattttttgactt

SEQ ID NO: 228490 - DNA, 931 bp, Homo Sapiens
ttggctttctgttcttttctccctccctcttcctgtagcttggaagctcgaagtctggctgtggccatgggagatacagtagtggagcctgcccccttgaagccaacttctgagcccacttctggcccaccagggaataatggggggtccctgctaagtgtcatcacggagggggtcggggaactatcagtgattgaccctgaggtggcccagaaggcctgccaggaggtgttggagaaagtcaagcttttgcatggaggcgtggcagtctctagcagaggcaccccactggagttggtcaatggggatggtgtggacagtgagatccgttgcctagatgatccacctgcccagatcagggaggaggaagatgagatgggggccgctgtggcctcaggcacagccaaaggagcaagaagacggcggcagaacaactcagctaaacagtcttggctgctgaggctgtttgagtcaaaactgtttgacatctccatggccatttcatacctgtataactccaaggagcctggagtacaagcctacattggcaaccggctcttctgctttcgcaacgaggacgtggacttctatctgccccagttgcttaacatgtacatccacatggatgaggacgtgggtgatgccattaagccctacatagtccaccgttgccgccagaacattaactcttccctccagtgtgccctgttgcttggggcctattcttcagacatgcacatttccactcaacgacactcccgtgggaccaagctacggaagctgatcctctcagatgagctaaagccagctcacaggaagagggagctgccctccttgagcccggcccctgacacagggctgtctccctccaaaatgactcaccagcgctctaagtcagatgccactgccagcataagtctcagcagcaacc

SEQ ID NO: 228491 - DNA, 385 bp, Homo Sapiens
tttgtacaaaaaagttggcgccgccgcgcccccatcatggacaccagccgtgtgcagcctatcaagctggccagggtcaccaaggtcctgggcaggaccggttctcagggacagtgcacgcaggtgcgcgtggaattcatggacgacacgagccgatccatcatccgcaatgtaaaaggccccgtgcgcgagggcgacgtgctcacccttttggagtcagagcgagaagcccggaggttgcgctgagcttggctgctcgctgggtcttggatgtcgggttcgaccacttggccgatgggaatggtctgtcacaatctgctccttttttttgtccgccacacttaactgaaatgctcctttaaataaagcgtttgtgtttcaagtt

SEQ ID NO: 228492 - DNA, 909 bp, Homo Sapiens
ttgggcacaaggtgcgggaccttgtcccaagcagcagggtggtccgcctgggtgagggtgggccagacagtgaccaagccatcagggaccggttctcccggctgcggtaccagagtgaggcgtagaggcacgccagccagagcctgtggagagactccgcctgctgacactaaacgtcctgggaagtgggcccttccctgggtctctgcactgactcccccactcctgaccctggtgatggtcgccactgggcagcagcagccttaccagtcctccatgatcacacccagggacctgcatgggtgaggggacaccctgggcctctctcccgcccagcatcctccctgagtccccacacagggcctcactctgcaccccaccagggtcccgctcacaccaggcagccttcatagtggtctccctggccaccttgggcagagctgggtcatgcagcaccccatccttacccggtgccctctccttgccagcttctccccaggccagagcggccatcgcgtagaaagaaccagggtgtccccgggacaggccgtcccccaccccatcctgtagaagtccattccccttttccctcctgtgctctgtcccccaaggagtcatggaactcagggtactgggcctcaacgggaacctgagacagctgcagcttcgcagcccttcccggagctacagggggatcctctagcatggggggtgtgacttggttcctctgaccaggtcctgtgaggaagcctggagcaagggtctcccccagcaggatgggtggggcctgctctggagctgaccccgtggccgctcacaggtgtccttaagtggtgttgcagctgtctactggctgcatgtgctgtgaatatcccaaggaacctggctgtgaaatgcgtgtttgggtca

SEQ ID NO: 228493 - DNA, 913 bp, Homo Sapiens
ttggctggagttttccattagtgagtttttgtgcaaggatcttatttgtgatgccttccctcccctagaaagattttgtgcaatatattaaatggggacagaattctaaatggataaaacaatggctggttctagccctgagtgacagtcttaaggctagatccttcccatagtatcatctgtcctctggaatgactctcctgtccctaaaggggttaagagagagatcacctagaaatccctctggacacttgtgggttctttagggtttgagtttcttcttccccttgagcttcagagaggagagttggcatggttaaatctgaatggttacctcactgctgaaaacccagaggggcgtggcacactcgcttgtgtggaaaagcctctaaatgcatcccttcctttctttcctgcttcctttgccttacaattgaagcagcccgtggtaccatcacagtatgcagagacttcctcacctttcatatctagggaccacccccgatgcattggtgagggtgggcacttataaatgcctgctattgttaagccattccagcctcttcctctgaatagaccagacgccctttcacttagttcagtgccagtccttttgccttcccaaccctgctgttaggcctgctgttccctttgctcttgattaggagagatggaaggagatgagctcccataactgaattggcctttggttcatgttttctccccatatgtatatatgccatatgtgaatatgccatatatatgtgccaacaaatctatctacgttgttcttttcaaattagcacgcagataggaattttgagtttcttcttcttttagtaactagtataacaagcactggtatttttgtacaaaaagaaaacaaaagattgactattgtggtctgcatgac

SEQ ID NO: 228494 - DNA, 762 bp, Homo Sapiens
gccacctttgtacaaaaaagttggctagtaggctttctggctttttaccggaaagcccctcttatgatgtttgttgccaatgatagattgttttcactgtgcaaaaattatgggtagttttggtggtcttgatgcagttgtaagcttggggtatgaaggtttgggccacgcctgggcgcttccggctgcgccggatgctgtttcctttccgctcccaggggcgttgggaacggttgtaggacgtggctctttattcgtgagttttccatttacctccgctgaacctagagcttcagacgccctatggcgtccgcctcgacccaaccggcggccttgagcgctgagcaagcaaaggtggtcctcgcggaggtgatccaggcgttctccgccccggagaatgcagtgcgcatggacgaggctcgggataacgcctgcaacgacatgggtaagatgctgcaattcgtgctgcccgtggccacgcagatccagcaggaggttatcaaagcctatggcttcagctgcgacggggaaggtgtccttaagtttgctcgcttggtcaagtcctacgaagccttttatcctgagatcgccagcctgtcaggcaagctgaaggcgctgtttctgccgcccatgaccctgccaccccatgggcctgctgctggtggcagcgtggccgcctcctgagagttggccctcccttgtgccactgccaggggaggaaaggccttgatgtttccagacaataataaatgcgcctgtgac

SEQ ID NO: 228495 - DNA, 470 bp, Homo Sapiens; identical to SEQ ID NO: 194851

SEQ ID NO: 228496 - DNA, 937 bp, Homo Sapiens
tttttccagaaaagcttacagactgaaaatattcaggagagatgccttccaattcaaggattttatcctcaagttttttaattctctgataaatgtctcttggcactggaccacctgtctgtaaccgcaagtgggcctcaatattttgtagtcgttcttctacagcgtgattaccacagtctcgaagcatgctgttaggtttatgacctgaccctggaattccttcaggtctagtctgtggtccgtatgtattcacaactctagaaacttttacgtgacttttaaatccggggtaaggggtaaaaatcgcatcagttcttgcacaactattttcttgattacaatcaataacattgcaaaattccctgacgttgttttcattgatttcagcttgctttctttcaataaatgcagatattcgtctgtcaatttctgcttttccagcctttatctgaactacttctggatcaaaatggatctgtgtctttttcacatctcttaaatcactttctttgtgcttttcttcctcttgtaggtcgccaatggaaaatttgtcatttacttcatttttgttccccatttctgttcttcctatctcttcaacagcagttgtattctcctctttaatcggagactgaagttttgctaaaaaaggctgtaaatataaaatgtgttgttcaagtgcactaaagagcaatgcaggctggaatgccgagaggctctggagcttgttccaatcgattgtaattttcaccacatcatctctgaggtcaagctgtccaaccagggtgtgtagggagcgaaagatttcgtagagcacctctcgggagaggttggggctgcatcttcgctccaggttcctgtcaccgctgctcgggcgattatgctccgtggcagcagccataatatcttctcaggccgccccaccaccacccaa

SEQ ID NO: 228497 - DNA, 1556 bp, Homo Sapiens
tttgtacaaaaaagttggcggctgcccgccccgcgcgtcttccctgcccgggtctcctcgctgtcgccgccgctgccacaccatggccttcgtcaccaggcagttcatgcgttccgtgtcctcctcgtccaccgcctcggcctcggccaagaagataatcgtcaagcacgtgacggtcatcggcggcgggctgatgggcgccggcattgcccaggttgctgcagcaactggtcacacagtagtgttggtagaccagacagaggacatcctggcaaaatccaaaaagggaattgaggaaagccttaggaaagtggcaaagaagaagtttgcagaaaaccctaaggccggcgatgaatttgtggagaagaccctgagcaccatagcgaccagcacggatgcagcctccgttgtccacagcacagacttggtggtggaagccatcgtggagaatctgaaggtgaaaaacgagctcttcaaaaggctggacaagtttgctgctgaacatacaatctttgccagcaacacttcctccttgcagattacaagcatagctaatgccaccaccagacaagaccgattcgctggcctccatttcttcaacccagtgcctgtcatgaaacttgtggaggtcattaaaacaccaatgaccagccagaagacatttgaatctttggtagactttagcaaagccctaggaaagcatcctgtttcttgcaaggacactcctgggtttattgtgaaccgcctcctggttccatacctcatggaagcaatcaggctgtatgaacgaggtgacgcatccaaagaagacattgacactgctatgaaattaggagccggttaccccatgggcccatttgagcttctagattatgtcggactggatactacgaagttcatcgtggatgggtggcatgaaatggatgcagagaacccattacatcagcccagcccatccttaaataagctggtagcagagaacaagttcggcaagaagactggagaaggattttacaaatacaagtgatgtgcagcttctccggctctgagaagaacacctgagagcgctttccagccagtgccccgagtgcctgtgggaatgctctttggtcagacattccctcacacagtacagtttaataaatgtgcattttgattgtaatctatcgaagtgattattacaccagttacagcagtaatagattctccattaagaaataattcccttttttagtctgttcatttctgtgtattttctaaacagctttacacccttggtgccttggagcaaacatgttttttgaaccttgtcatttttgtgaagaattgcctagattccttctctcatcaacgggaaagtacttcctctgagagtgcgagtgcaccatgctcactgttgctgcgtgggagagtcacaagccactggcaagcaagtggtatagtctgtgaagcactgcagcgagcagcacctggatcttgcctttataagaacattttactacctgcagctttgagtcttgccatacattttgggcatgacataagatgtgtcttta

SEQ ID NO: 228498 - DNA, 421 bp, Homo Sapiens
ttaaaagccaactttgtacaaaaaagttgggttaaggataacaaatgtgtattgttagtatatctattctaatcattttatcttaaatgctgctcttgggagtgaatattcaagtgtgcatcaattttttgaatacttaccctggaagatataaactgggcaagtattttgtgctctgtgtatttttttactgcattagacattgaatagtaatttgcgttaagatacgcttaaaggctctttgtgaccatgtttccctttgtagcaataaaatgttttttacgaaaactttctccctggattagcagtttaaatgaaacagagttcatcaatgaaatgagtatttaaaataaaaatttgccttaatgtatcagttcagctcacaagtattttaagatgattgagaagacttgaattaaag

SEQ ID NO: 228499 - DNA, 1102 bp, Homo Sapiens
ctttgtacaaaaaaagttggcaaaggaagaggaaaatgggcaaggtcatctcaaaaggaaacgacctgtcaaagacaggctagggaacagaccagaaatgaactataaaggtcgatacgagatcacagcggaagattctcaagagaaagtggctgatgaaatttcattcaggttacaggaaccaaagaaagacctgatagcccgagtagtgaggattattggtaacaaaaaggcaattgaacttctgatggaaaccgctgaagttgaacaaaatggtggctctttataatgaatggtagtcgaagaagaacaccaggtggagtttttctgaatctcttgaaaaacactcctagtatcagcgaggaacaaattaaggacattttctacattgaaaaccaaaaggaatatgaaaataaaaaagctgctaggaagaggagaacacaagtgttggggaaaaagatgaaacaagctattaaaagtctaaattttcaagaagatgatgatacatcacgagaaacttttgcaagtgacacgaatgaggccttggcctctcttgatgagtcacaggaaggacatgcagaagccaagttggaggcagaggaagccattgaagttgatcattctcatgatttggacatcttttaagtacattttcaacagtttgaggactaagcctttctaaaataacattgtaataaaccatttttactgagattgcaacgttttgcactgataaacatgagaatctggaggaaagacaattgttttcttgtttaaaatatgtgtggaaaggaatgcaattgatagaacatttaaagatatatctgacaaaatacttaagagtatatagcacaggatttaatttctcaatctgttgcatgtgctaattatgagtattactagttgataatcagttttgtctaggtcataacataccatttgtaagtttgtttgctttttcaggtttatctttgcagtgaattatgctttgctttaaaacattccgctaaaatcataatgggacatataaattattaagctgttagaaatgcattcaaatttgttttttctgtgttctaagaactcaggcaattttaaggat

SEQ ID NO: 228500 - DNA, 552 bp, Homo Sapiens
gcaggaatgggctggggagggtcccccgcaagctggaccccttgttccgttcggcccgtgaggagaacggaactggcggccaaggggaaccggcggaacgagatcagctggagcgcactgatttcgaggctttgtgttcatttcgccctaggccccttctcgatgggctttccaatgtcctttccccggagcttgaggccaatggcccgctcgattttgccaagcacctggttattgggtatggcccgtccgctctcatagtccgcgatcacctgtggcttctcattgattttcgtggccaggtccttctgcgtaagccccttgctctgccgaccttgctggatcaccttgcccacctccagggtcaccctgtcatggtgcagctcctctgtctcccggtccagcttggccgtgttcttggtaatagaatgttgtttgttctggccagcagcccatttcttggaagtctccacatcttctcctcgtctctgtgccgctaagatagcctgcttggatttggcctgggcggccgtagggcccttcttgcgccaa

SEQ ID NO: 228501 - DNA, 1184 bp, Homo Sapiens
  misc_feature (238)..(268): n is a, c, g, or t
ttgggtttatattaaaggcttcccaactgatgcaactcttgatgacataaaagaatggttagaagataaaggtcaagtactaaatattcagatgagaagaacattgcataaagcatttaagggatcaatttttgttgtgtttgatagcattgaatctgctaagaaatttgtagagacccctggccagaagtacaaagaaacagacctgctaatacttttcaaggacgattactttgcnnnnnnnnnnnnnnnnnnnnnnnnnnnnnnngtggaagctaaattaagagctaaacaggagcaagaagcaaaacaaaagttagaagaagatgctgaaatgaaatctctagaagaaaagattggatgcttgctgaaattttcgggtgatttagatgatcagacctgtagagaagatttacacatacttttctcaaatcatggtgaaataaaatggatagacttcgtcagaggagcaaaagaggggataattctatttaaagaaaaagccaaggaagcattgggtaaagccaaagatgcaaataatggtaacctacaattaaggaacaaagaagtgacttgggaagtactagaaggagaggtggaaaaagaagcactgaagaaaataatagaagaccaacaagaatccctaaacaaatggaagtcaaaaggtcgtagatttaaaggaaaaggaaagggtaataaagctgcccagcctgggtctggtaaaggaaaagtacagtttcagggcaagaaaacgaaatttgctagtgatgatgaacatgatgaacatgatgaaaatggtgcaactggacctgtgaaaagagcaagagaagaaacagacaaagaagaacctgcatccaaacaacagaaaacagaaaatggtgctggagaccagtagtttagtaaaccaattttttattcattttaaataggttttaaacgacttttgtttgcggggcttttaaaaggaaaaccgaattaggtccacttcaatgtccacctgtgagaaaggaaaaatttttttgttgtttaacttgtctttttgttatgcaaatgagatttctttgaatgtattgttctgtttgtgttatttcagatgattcaaatatcaaaaggaagattcttccattaaattgcctttgtaatatgagaatgtattagtacaaactaactaataaaatatatac

SEQ ID NO: 228502 - DNA, 536 bp, Homo Sapiens
tttgtacaaaaaagttggcatgtacactacataacaagttgatactcatgttgcatgttcttttaaattagtgattttgtgtcttaagtctttaacttccaatacttcatcatgtatgtaaccttccatgtttgcttctgataaatggaaatgtaggttcactgccacttcatgagatatctctgctcacgcttccaagttgttctcaatgacattagccaaagttgggtttgccattcatcccctaggcatggtaaatcttgtgttgttccctgctgtcctccgtattacgtgaccggcaaataaatctcatagcagttaatataaaacatctttggaggatgggagagaacaggagggaagatgggaaacaaaatagagaattcttaagattttgtttaaaccaaatgtttcatgtagaatgcaaaatgttggcacgtcaaaaatatgaatgtgtagacaactgtagttgtgctcagtttgtagtgatgggaagtgtattttactctgatcaaataaataatgctggaatactc

SEQ ID NO: 228503 - DNA, 1212 bp, Homo Sapiens
cccagcagggggtgccggccagtgtggacggagggcggggcggggacacgggtgagtcactgcggcaggggcacaagcacctccacgtagctgagcgggaagaagcccgactggccgtccagcatgccctcgtaccagttctcatcgatctggttggtcagcgtgatgacgtcgccctcatggaagcccagctccccgtcgttctcgggctcgaagtcgtacagcgccttgcagctcggctggtccaggggcggcatgctccggctaggggtccggatgggcttgtcggaagatcggaaagacgatgaagctgcgatcttgggggctgtggtgcaggggaagcccccgttggactgctcaggctctccaaggtcaaagggctcccggggcttgggcttatactcccgcttagggcgtgaggaagcttcccgcatcctgcgcttgagcttctccgccagctcgtccaggatctgcacggcctgccggtggtagtccagctgtgcatccaccagggccgagagctgactcacctgctcgatgtcagtctccaggaggttgtgcatgctggtttctgccacctccttggactcctcgaacttctccagcgcctggcgtagctcctcatcggggatcttgccctgccgcttcttcttgtagtcaaagtccaggcggcggccctccagtttcttcaggtggtgctggatctccttcaggtctttctcgcacaggttctggagggggtcaatgaagttctgcttgacctcgatgtccagggagtccttcacctctgccaggcgcttcatggactcgccggcatccagcaatgcgtcaccaaagttggactcgccgcccagctccttcccgtggcggatcatgcactcgcccagaagcccctccgactgcgggtagccggggttcttcacctggccccggatcttggacaccgtgttgagcatggtcagcttagcccgcgaggctgggttgggctgcaggtactcgatggtcctggccagcacttctgtcaccgccttgctggtgacatccaccttcttctccatctctttgaagtcatcatccagcttggtcccctcggcccctccgaccttctcactgaccagctggctcgccttgtagaactgcttcttcagccccgccaccgacatgctgccgcccgccgccgagcctcccgcccggaccgcgccagcgacccaa

SEQ ID NO: 228504 - DNA, 919 bp, Homo Sapiens
ttggaaaaggcttcgcggcccagggctcacttggcgctgagaacgcgggtccacgcgtgtgatcgtccgtgcgtctagcctttgcccacgcagctttcagtcatggcctccggtaacgcgcgcatcggaaagccagcccctgacttcaaggccacagcggtggttgatggcgccttcaaagaggtgaagctgtcggactacaaagggaagtacgtggtcctctttttctaccctctggacttcacttttgtgtgccccaccgagatcatcgcgttcagcaaccgtgcagaggacttccgcaagctgggctgtgaagtgctgggcgtctcggtggactctcagttcacccacctggcttggatcaacaccccccggaaagagggaggcttgggccccctgaacatccccctgcttgctgacgtgaccagacgcttgtctgaggattacggcgtgctgaaaacagatgagggcattgcctacaggggcctctttatcatcgatggcaagggtgtccttcgccagatcactgttaatgatttgcctgtgggacgctccgtggatgaggctctgcggctggtccaggccttccagtacacagacgagcatggggaagtttgtcccgctggctggaagcctggcagtgacacgattaagcccaacgtggatgacagcaaggaatatttctccaaacacaattaggctggctaacggatagtgagcttgtgcccctgcctagtgcctgtgctgggtgtccacctgtgcccccacctgggtgccctatgctgacccgaaaggccagacctgcccctccaaactccacagtatgggaccctggagggctaggccaaggccttctcatgcctccacctagaagctgaataatgacgccctcccctagcccacccagccgcacacaggc

SEQ ID NO: 228505 - DNA, 958 bp, Homo Sapiens
ttggatgaacactgctgttgaagatgcatcagatgacgaaagtattcctatcatgtataggaatttacctgaatataaagaactattacagtttaaaaagttaaagaagcagaaacttcagcaaatgcaagctgaaagtggatttgtgcaacatgtgggctttaagtgtgataactgtggcatagaacccatccagggtgttcggtggcattgccaggattgtcctccagaaatgtctttggatttctgtgattcttgttcagactgtctacatgaaacagatattcacaaggaagatcaccaattagaacctatttataggtcagagacattcttagacagagactactgtgtgtctcagggcaccagttacaattaccttgacccaaactactttccagcaaacagatgacatggaagagaacatcatttactagtcctcttcaacacatagcaatggtatcattgttaattatgtgcacagtttggaaagattctctgctttcccagaaatgacactcacagcatgagagcttcctgagtgttctcgtcaagtacagctctgcaccgttgtggctctagatcactgttcagcagctgaacattcctggtgagcaaaggtttccctggtgaatttttcaccactgcgttttaggtggtgatcttaaatgggtgagatggaacgagagcacacattaaagagagagtaaattccaaaggtttcaaagaacttggtcataaatatgataatgagaagacaaagtatttatattaaaacagtttagtagccttcagttttgtgaaaatagttttcagcacagaaactgacttctttagacaaagttttaaccaatgatggtgtttgcttctaggatatacactttaaaaaactcactgtcccagtggtggtcattgatgggctttagtaattggagctgcttaatcatattgatatcta

SEQ ID NO: 228506 - DNA, 960 bp, Homo Sapiens
gaagaatttgtaagaaaaaaggatgtaccctctgtaaaaagaggagatgttgcctccaacagcagggaggaatgagacctgggtggcttcccagaagtcagtgtttccggcatgactggctcctttcctggcaaacactacaatgtgtcacactacagctagcaattcctccccactccctcccagcccttcctccctccaccccacaaccctatagccatttgaggcaaatggctttctaaaggcccagggatagatgtgccaggcttgcctcttaatggggtcaaagtgagttttgctttggaaaaattcaaacaggaatgtaaaatggtttgagctctttctagtccaaccaaaggtgattacatccagcccctctcaagggaatgggggcagagactgtcgctcctgaatgtgcacacatggggtaaatggactatatcgcagtctgctctttatttgaatggagaatggaaacaggttataagaatatataacatccatgttcaagagtcactgagttctggagggcagagggagcacagaggcctgctgattccaacagtgctcctgatggctatcctcgagttgtagggatggttattcctctccagctggaagattgtcctcaatccgtatgatgaatctcatccggatttctgtcacaccgtctcctttcagggtgtcctggacaaacttggcctccacagccatctggaccatctccaaagctccccgcaacaccccacacaagagattggaataaataagggatgagtggttatcaggaagttccacaaagtccaccaaggggttattttccaaaatgagggagaattcatcaccagctgggctccaattagtaatgcttggagtgatgcccaagtacatcttgaacgccaccttggcaatgacatccgcagtttccttgaaagtcatggcaccccaacttttttgtac

SEQ ID NO: 228507 - DNA, 959 bp, Homo Sapiens
ctctcagagcatgcttttctttattaaaattactgatgcagaacatttgattcgttatcatttccatggtctttgttcaaagtgtctctttcctgagtctcttgagtttctttatatgccttctcctcatttttgctcaaagcacgaagaacacacattaaagcttttcctccttgaacagcttgtggcctagatgagaatgtagctattccaggcatagtctggagtatttgatgaaatatctcctccatttcattttctgacacgtctacattttttcctttctttatggtaatctggactaggtgttttttcttaatccactgctgaatctgtttagtctttgtgtccaaatcatgttgtccaatatttgaagacaaaatcagttcctttctcagggttggtccagttttggggttcgccttctccatctccctcagcctctgccgctcctggaggatctgcaatcctgtcatgagctgatactctgcaggttctgtgctggtgttcctttgaaccagtcgcaggtctcgctcatccataagtctaatcacatttgctcggtgcatgtttcccaaatcattgcccttctcatcaaataagtgaataactcgctgactaatttttcttccaacgttactaaaagctgttttattcttttttgtcttttttccttcattctgggtgtcttcagcggtactaaaggcttttgcatgaattaggaaggagagtcttggggcagaagcaataggggacaactgtgctggtgctgtcttttgcaggatgtgtttaccaaaacatctaatgcaactattttcagactttacagtttgtagtgttaacctctttagaaaaagagcagccatccttttttaggaagaactgtaatcatccccagttgatgaggagaagctcttctgtagagaagaatgacagctgtgctggggcaagcgatccaa

SEQ ID NO: 228508 - DNA, 1016 bp, Homo Sapiens
  misc_feature (788)..(806): n is a, c, g, or t
ttggagaagtccttatagtccagggcctgtttccctgtagcagctccttattgctggagaaggagaaaagtgcccaagatcctttcaggattaatttattcaaaaaggaaataaaaaatactcaatatgcaaaagtcttgtgaagaaaatgagggaaaaccacagaacatgccaaaggccgaggaagatcgccctttggaggatgtaccacaggaggcagaaggaaatcctcaaccttccgaagaaggcgtaagccaggaagcagaaggaaaccccagaggagggccgaatcagcctggccagggatttaaagaggacacacccgttaggcatttggaccctgaagaaatgataagaggagtagatgagcttgaaaggcttagggaagagataagaagagtaagaaacaagtttgtgatgatgcattggaagcaaagacattcacgcagccgtccttatcctgtgtgctttaggccttgaattcatttttgcctaatattaaaatctggccccagctttctttctgttagcattttctgatgtatctttgacctccattttacttttaatcatctgatgaaattttgttttaggtaatttccttggtaccagcatctcattggattttggattttgacccattttccaggtctatttttcaattggaaactttcacacatttgcatgggaatatgttcattccatgttgtaaagtaaaacataacaggttatggcaaagcagcatatttaatatcagctcacatatgtaggataaaattccaaacttnnnnnnnnnnnnnnnnnnnatacatacatccatataacatatatcacaaacttaaccaagcttatttctgtgtggtgtgaaattttatttgttttcttctttttgttctttttgcttatatgtactttttaaggaacacgtgtctcacacacaaaaagattcaggattttttttacagtagagagtcaaatatattggcaacgcctatgaagggcaatgggggggcccc

SEQ ID NO: 228509 - DNA, 947 bp, Homo Sapiens
gctttttccataataaaacaactttgtacaaaaaagttggcttgaccttttcttccctggctacagcaaaggacgatgatctgcctgctttcactgtgttgttcatggtggctttttggacaataaagaatctaaaatgggtggggagggtggaagaaatggtggactgtatctctcacgttctgaagcagctaatcctctttcccacatagccatcatcttgtgtgtgtagtaagaggcccatttctcaactgtcttttaaatatctaaaggtagttcctgtaacaactagttttaatgagtaaaaagtcaaagcctcagctctagttgatatccaagttatgatttattttgcaactacctcaggacagaaaagatttatggggattttaaaaatcattgaataactagttaaatgaaattttagctacacactgcctcccaaatattagttgtgcctggttcttgtaatttgattttacagaaaaggaaatgacacttgagatccttggaatgaacacagcttctaaagtgtgcatatacttttttaacgtctcttcttccattacaatgtgtgttttgcaaggacaggttcattttttttagcccactttgtgaactccattgtgcttttttctggtgttttatgcaagttgactactaatgactaatgagaacaataatgaatgcattgttgctgcattagtgtaatgtggtgtggttttgcacttaaaagaggtattcatatgctctagttgtaaatgttcatgaaaatccacttctctactagtcgaactgcttttagtgtctcaccagtggttttacatctgcagagttttgagggctgtgctgacctttgagaggatttgaaattgcttcatattgtgatcctaaattttatattcactatattccctaaagtataccttaataaatattttatgatc

SEQ ID NO: 228510 - DNA, 1239 bp, Homo Sapiens
ttgggttgagagcggtgtggcaggtgttgtagccgctatggtgaagttcgctttgtagcggccccggctagagagttgttctgttccctgcctttgtgacccggaggagcttttgggaactggtttgtggcctgtttgattcctgtcagaggtttgctgacccaagacagtatcgaaaatgcatattaagtcaattattctagagggattcaagtcctatgctcagaggaccgaagtcaatggttttgaccccctcttcaatgctatcactggcttaaatggtagtgggaaatccaacatattggactccatctgctttttgctgggcatctccaacctgtctcaggttcgggcttctaatttacaagatttagtttacaaaaatgggcaggctggtattaccaaagcctctgtgtcaatcacttttgataattctgacaaaaagcaaagtcctttaggatttgaggttcatgatgaaatcacagtaacaaggcaggtggttattggtggtagaaataaatatttaatcaatggagtcaatgccaacaacaccagagtacaggatctcttctgttctgttggccttaatgttaacaaccctcactttctcatcatgcagggccgaattacaaaagtattgaatatgaaacctccagagattttatccatgatagaagaagcagctggaaccaggatgtatgaatacaaaaaaatagctgcacagaaaactatagaaaaaaaggaggctaagctgaaagaaattaagacgatacttgaagaagagattactccaaccattcaaaaattaaaagaggaaagatcgtcctacttggagtaccaaaaagtaatgagagaaatagaacatttgagtcgtttatatattgcttatcagtttttgctggctgaagataccaaagtacgctcagctgaggaattaaaagaaatgcaagataaagttataaagcttcaggaagaattgtctgagaatgataaaaaaataaaagcacttaatcatgaaatagaagaattggaaaaaagaaaagataaggaaactggaggtatacttcgatctttagaagatgctcttgcagaggctcagcgagttaatactaaatctcaaagcgcatttgatctcaagaagaaaaatctggcatgtgaggaaagcaaacgcaaagagctggaaaaaaatatggttgaggactcaaaaactttagcagcaaaggaaaaagaggttaaaaa

SEQ ID NO: 228511 - DNA, 1397 bp, Homo Sapiens
tgcgtgttggaggcagtgtcatggagggtggagttggcgcaagccccgcgtggtaaatggctgactgctgctgtggactggccagatggagagcctgggcggcctggtgctgatggtgctgaacaggactgggtgcaggatgacttccaccatgttggctttgctgctgtccagtgggggtagctgaaggctgagggtgtggagtatgtgggtgcagggtagcgttagggtgcgcatactgctgagcaagggcagcccgtggaaatggcaaagtagaaagaagggcttgtctccttgttgtatggtaatttgggacatgcatacatcgcatgcgtctgctcatgagccccgtactgagttgctgaagaagatactaaaccaggctgggcgtgtgttggtggtgccatcattctagcattaccctgtattacaggactatagacatgaggatgctgagactgataatgtggcacatgctgaacaaggggctgatttgggaactgctgaggactgtaggcaacatattgcgtggagtaagctggtggggtggctgcaatcggtgggcccgctgctgacgctgggtgcatcatggcactctgatgatgctggtcttgccgctgttggggcatatttggtactttacctgctctatatgtcttggcttgattcactggcatgggcgtcataggtattgggtataaaggttgcacgcctgggctcactgggactggatacatcatatttggtgcaaaacaaacaggctgagtataaactggagttggctgttgatgacccaccatagatgggctaggttgtgcttgaggccgaggtgaagttggggtagtagaaggctttggctgagagaaggaacgtgggttgaactcctttgcattgggattcaatgttgatttcctaacttgctcagctgcgtctttcttctcttccttatcgtctttctcttgtttacatgctgggctggaagtctgaaccccttgggaagtgacctcaggtcccctcttgtgctccgtgttactaagtattgaaggggaaatgctggggctattcggcttgctgctgccactggtacagttgctgctgctattttcaatgaaagaatccttagcacttggttcaattttgtctttgatcaaatctcttgatttttctccctctctatttttgtttagtagttgatccatagattcagaagtagaacttggctgtaacctaaaatcattcttaaatttctttaaatcatcaatctgttttctatgttcagaaacaactggtgatatacctttgttttcagcttttgagaagctaggtgatgtttcattgggtttaatattttctttattccctgcaggagagttctgcctctgatcttgaagccccaa

SEQ ID NO: 228512 - DNA, 913 bp, Homo Sapiens
cccactctcacagccacttcacagtcaagtgtacacgtatgtgaacccagagggcaggagggtggttcgtatatttcactgccaatttttatcactctctcttgttctagcagtctgggactggagcatattgaaaacccaccaaccacagagactcctggaataaagaaatcaacccactggccagctttaaaggaaaagtcttgatcagcaacaagcaagcggaggctcttcactgacggtgactcactggcagctccacacaccttagctgctgacacaatctcccgtcgaaggacacttgcagttctctccatgtgatcagttttccttttggatttcattatgctggttagagtaagatggcgcaaagtgctgagtgtcaatctcagtgacgcagcctcaatacggatggctccaacagagcaccgcaacaacccaggaatcataacagcagcacaggccatggcgctttcttagaagtccacgagattttaggagtcattaagtatatggtcagctgattgacagaatattttggtcctgctattacactgagacttttggatgtacagcagttggaacatggacagcttttccatgcattaaaattctcacaaagttcctgcagccaggaattaacaagctgaccgtcgccctgggctcaaggtcactcggtgaagcgaaattctacgggaactgttcgtccgtcaccaggaagggaggtcgaggaggctaagctgctctcgcctccccaccccgcctttcccgagggccgggaggctgctacctagcacctgctgcagccttcagcgggctatttaaggcgttaaagcagacgataagaagcagggaaactttccccgctggcacctagcttgcagacccggccacgtttagccaacttttttgt

SEQ ID NO: 228513 - DNA, 984 bp, Homo Sapiens
ttggctcagcgggcgtggaggtcgcggctgagcgagcgagccctgggcgagtgaattgtggctcgcccccggaccgtgcagttctctgcaggaccaggccatggagctcgaagtccggcgggtccgacaggcgttcctgtccggccggtcgcgacctctgcggtttcggctgcagcagctggaggccctgcggaggatggtgcaggagcgcgagaaggatatcctgacggccatcgccgccgacctgtgcaagagtgaattcaatgtgtacagtcaggaagtcattactgtccttggggaaattgattttatgcttgagaatcttcctgaatgggttactgctaaaccagttaagaagaacgtgctcaccatgctggatgaggcctatattcagccacagcctctgggagtggtgctgataatcggagcttggaattaccccttcgttctcaccattcagccactgataggagccatcgctgcaggaaatgctgtgattataaagccttctgaactgagtgaaaatacagccaagatcttggcaaagcttctccctcagtatttagaccaggtaagaatttcttgactcatctccaacatacgtgtttactgtggaaaacacacattttattttcttgctattgcatgttattgctggccggggacccaattgcagtctctttaagccttcaacagttggcttagcaaaagaagttcggttccaaaatacacggagtgtattttgtgtggagtcacccagctcttggggttacacaatatatgtaggcccatggcttcatgccaaacagattctgtttgtctgggatttggggttaatttttgagctaacatgattttaggtgttttcatttaatggattatttaatgagggactggtactgtgctgggtgctgacatatttctgttactaacaatctcttttgttctaacaaaatgtacttttctgtgattatataagagtac

SEQ ID NO: 228514 - DNA, 826 bp, Homo Sapiens
ttggctgactgcatcccccaatggtctctacgtcctggcaggagttgcagaaagcatccacctgtgggaggtctccaccgggaaccttctggtcatcctgagtcgacactaccaggacgtctcctgccttcagttcacaggggacagcagccacttcatctcagggggcaaggactgcctggtgctggtttggagcctctgcagcgtgctgcaggccgacccctccaggattccggcgcccaggcacgtctggtctcaccacacgctccccatcacggacctgcactgcggctttgggggccccctggcccgggtggccacctcctcactggaccagacggtgaagctatgggaggtctcctcgggggagctgctgctctccgtcctctttgacgtgtccatcatggcagtgaccatggacctggctgagcaccatatgttctgcgggggcagtgagggctccatcttccaggtcgacctcttcacctggcccggacagagggagaggagcttccacccagagcaggacgccgggaaggtcttcaaagggcacaggaaccaggtgacttgcctgtcagtgtccactgacggcagcgtgctgctctcaggctcccacgacgagaccgtgcgcctctgggacgtgcagagcaagcagtgcatccggacggtggccctcaaaggcccagtcaccaatgccgccatcctgctggcgcccgtcagcatgctgagctcagacttcaggcccagcctgccgctgccccacttcaacaagcacctgctgggcgccgagcacggggacgagccgcgccacgggggcctcactctg

SEQ ID NO: 228515 - DNA, 1367 bp, Homo Sapiens
ttggcgctgcccgaccccgacgctatgtccagcaaaggctccgtggttctggcctacagtggcggcctggacacctcgtgcatcctcgtgtggctgaaggaacaaggctatgacgtcattgcctatctggccaacattggccagaaggaagacttcgaggaagccaggaagaaggcactgaagcttggggccaaaaaggtgttcattgaggatgtcagcagggagtttgtggaggagttcatctggccggccatccagtccagcgcactgtatgaggaccgctacctcctgggcacctctcttgccaggccctgcatcgcccgcaaacaagtggaaatcgcccagcgggagggggccaagtatgtgtcccacggcgccacaggaaaggggaacgatcaggtccggtttgagctcagctgctactcactggccccccagataaaggtcattgctccctggaggatgcctgaattctacaaccggttcaagggccgcaatgacctgatggagtacgcaaagcaacacgggattcccatcccggtcactcccaagaacccgtggagcatggatgagaacctcatgcacatcagctacgaggctggaatcctggagaaccccaagaaccaagcgcctccaggtctctacacgaagacccaggacccagccaaagcccccaacacccctgacattctcgagatcgagttcaaaaaaggggtccctgtgaaggtgaccaacgtcaaggatggcaccacccaccagacctccttggagctcttcatgtacctgaacgaagtcgcgggcaagcatggcgtgggccgtattgacatcgtggagaaccgcttcattggaatgaagtcccgaggtatctacgagaccccagcaggcaccatcctttaccatgctcatttagacatcgaggccttcaccatggaccgggaagtgcgcaaaatcaaacaaggcctgggcttgaaatttgctgagctggtgtataccggtttctggcacagccctgagtgtgaatttgtccgccactgcatcgccaagtcccaggagcgagtggaagggaaagtgcaggtgtccgtcctcaagggccaggtgtacatcctcggccgggagtccccactgtctctctacaatgaggagctggtgagcatgaacgtgcagggtgattatgagccaactgatgccaccgggttcatcaacatcaattccctcaggctgaaggaatatcatcgtctccagagcagggtcactgccaaatagaccccgtgtacaatgaggagctgggggcctcctcaatttgcagatccccccagtacaggcgctaattgttgtgagaatttgtaattgtgacttgttctccccgg

SEQ ID NO: 228516 - DNA, 975 bp, Homo Sapiens
tgtacaaaaaagttggcgcctgtgcagcccaagacctaggcgcggtagctggggctggcttttgaggggcgcgggcagccttctgactgggtcggaggcctgcgggcccgaagcctctgtccctcctgttcttgtccggcgctgcttagcccctccgcgtagtcatcatggatctgattttaaaccgaatggattatctgcaggtgggagtaacatctcagaagactatgaagctaattcctgcctcaagacacagagctacacaaaaggtggttattggagatcatgatggggtagttatgtgctttggcatgaagaaaggagaagcagcagcagtgttcaagactttacccgggccgaagattgcaaggctggaactgggaggggttatcaacacacctcaggagaaaatttttattgctgcagcatctgagattagaggcttcacaaaaagaggaaaacagttcctctcctttgaaacaaacctcactgaaagcattaaagctatgcacatatctggctcagacctctttctcagtgcaagttacatctataaccattattgtgactgcaaagaccaacattattacctttctggggataaaatcaatgatgtgatctgccttccagtggaaagattatctcgtatcacacctgtattggcctgccaggacagagtgctcagagttttacagggatctgatgtgatgtatgcagttgaagttcctggaccccctactgtcttagcactacacaatggaaatggcggtgactctggagaagaccttttgtttgggacatcagacggaaaacttgcgcttatacagattactacatccaaaccagtacgcaagtgggaaattcaaaatgagaaaaagagaggaggtattttgtgtattgacagctttgacattgtgggtgatggggttaaagatttacttgttgggagagatgacggaatggtggaagtgtata

SEQ ID NO: 228517 - DNA, 1117 bp, Homo Sapiens
ttggctacttctgtggccccagagccaccagtaccagtgcccaaggctgcctgttgcctgccccaaccaatgtggtgtgggcactgtggctcgggaggacctgccaggccatctgaaggacagctgtaacaccgccctggtgctctgcccattcaaagactccggctgcaagcacaggtgccctaagctggcaatggcacggcatgtggaggagagtgtgaagccacatctggccatgatgtgtgccctggtgagccggcaacggcaggagctgcaggagcttcggcgagagctggaggagctatcagtgggcagtgatggcgtgctcatctggaagattggcagctatggacggcggctacaggaggccaaggccaagcccaaccttgagtgcttcagcccagccttctacacacataagtatggttacaagctgcaggtgtctgcattcctcaatggcaatggcagtggtgagggcacacacctctcactgtacattcgtgtgctgcctggtgcctttgacaatctccttgagtggccctttgcccgccgtgtcaccttctccctgctggatcagagcgaccctgggctggctaaaccacagcacgtcactgagaccttccaccccgacccaaactggaagaatttccagaagccaggcacgtggcggggctccctggatgagagttctctgggctttggttatcccaagttcatctcccaccaggacattcgaaagcgaaactatgtgcgggatgatgcagtcttcatccgtgctgctgttgaactgccccggaagatcctcagctgagtgcaggtggggttcgaggggaaaggacgatggggcatgacctcagtcaggcactggctgaacttggagagggggccggacccccgtcagctgcttctgctgcctaggttctgttaccccatcctccctcccccagccaccaccctcaggtgcctccaattggtgcttcagccctggcccctgtggggaacaggtcttggggtcatgaagggctggaaacaatgaccccagggcctgtctcccttcttgggtagggcatgacatgccttggtgccggtcacactctacacggactgaggtgcctgc

SEQ ID NO: 228518 - DNA, 1178 bp, Homo Sapiens
ttggcctaatggtgcccctgagggcaccactacagagatatcatatgagatcacccctcgcattcgtgtctggcgccagaccctcgagcggtgccggagcgcagcccaggtgtgcttgtgcctgggccagctggagaggtccattgcctgggagaagtctgtcaacaaagtgacatgtctagtctgccggaagggtgacaatgatgagtttcttctgctttgtgatgggtgtgaccgtggctgccacatttactgccatcgtcccaagatggaggctgtcccagaaggagattggttctgtactgtctgtttggctcaggtggagggagaattcactcagaagcctggtttcccaaagcgtggccagaagcggaaaagtggttattcgctgaacttctcagagggtgatggccgccgacgccgggtactgttgaggggccgagaaagcccagcagcagggcctcggtactcggaagaagggctctccccctccaagcggcggcgactctctatgcggaaccaccacagtgatctcacattttgcgagattatcctgatggagatggagtcccatgatgcagcctggcctttcctagagcctgtgaacccacgtttggtgagtgggtaccggcgcatcatcaaaaatcctatggatttttccaccatgcgggagcggctgctcaggggagggtaagtagatgtgggtgaaccgcccggtctttgctactgctgcaactcctacccagctcacagttttgcccctgccctgtccaggtacaccagctcagaaggagtttgcggctgatgccctcctggtatttgacaactgccagactttcaacgaggatgactctgaagtaggcaaggctgggcacatcatgcgccgcttcttcgagagccgctgggaggagttttatcagggaaaacaggccaatctgtgaggcaagggaggtggggagtcaccttgtggcatctccccccaccttccaaacaaaaacctgccattttcacctgctgatgctgccctgggtccagactcaagtcagatacaaccctgatttttgaccttgcccttggcagtgccccacatcctcttattcctacatccctttctcccttccctcctcttgctcctcaagtaagaggtgcagagatgacgtccttctggactaaaagcc

SEQ ID NO: 228519 - DNA, 1251 bp, Homo Sapiens
gagcaatgcttttcctataaaagccaactttgtacaaaaaagttggctccggcagtggcagcggaggcctgtgtttgcggccttcggcaagcgactgagatggcgagcgcaactgcacctgcagccgcagtccccaccctggcttcgcctttggagcagctccggcacttggcggaggagctgcggttgctcctgcctcgagtgcgggtcggcgaagcccaggagaccaccgaggagtttaatcgagagatgttctggagaagactcaatgaggcagctgtgactgtgtcaagggaagccacgactctgaccatagtcttctctcagcttccactgccgtctccacaggaaacccagaagttctgtgaacaagtccatgctgccatcaaggcatttattgcagtgtactatttgcttccaaaggatcaggggatcaccctgagaaagctggtacggggcgccaccctggacatcgtggatggcatggctcagctcatggaagtactttccgtcactccaactcagagccctgagaacaatgaccttatttcctacaacagtgtctgggttgcgtgccagcagatgcctcagataccaagagataacaaagctgcagctcttttgatgctgaccaagaatgtggattttgtgaaggatgcacatgaagaaatggagcaggctgtggaagaatgtgacccttactctggcctcttgaatgatactgaggagaacaactctgacaaccacaatcatgaggatgatgtgttggggtttcccagcaatcaggacttgtattggtcagaggacgatcaagagctcataatcccatgccttgcgctggtgagagcatccaaagcctgcctgaagaaaattcggatgttagtggcagagaatgggaagaaggatcaggtggcacagctggatgacattgtggatatttctgatgaaatcagccctagtgtggatgatttggctctgagcatatatccacctatgtgtcacctgaccgtgcgaatcaattctgcgaaacttgtatctgttttaaagaagcacttgaaattacaaaagcaagtcatgtgacccctcagccagaagatagttggatccctttacttattaatgccattgatcattgcatgaatagaatcaaggagctcactcagagtgaacttgaattatgacttttcaggctcatttgtactctcttcccctctcatcgtcatggtcaggctctgatacctgcttttaaaa

SEQ ID NO: 228520 - DNA, 935 bp, Homo Sapiens
tctgcagacttagccgtgcattgcaggcatggggattaatcagtgacaggaagctgcgtctctcggagcggtgaccagctgtggtcaggagagcctcagcagggccagccccaggagtctttcccgattcttgctcactgctcacccacctgctgctgccatgaggcaccttggggccttcctcttccttctgggggtcctgggggccctcactgagatgtgtgaaataccagagatggacagccatctggtagagaagttgggccagcacctcttaccttggatggaccggctttccctggagcacttgaaccccagcatctatgtgggcctacgcctctccagtctgcaggctgggaccaaggaagacctctacctgcacagcctcaagcttggttaccagcagtgcctcctagggtctgccttcagcgaggatgacggtgactgccagggcaagccttccatgggccagctggccctctacctgctcgctctcagagccaactgtgagtttgtcaggggccacaagggggacaggctggtctcacagctcaaatggttcctggaggatgagaagagagccattgggcatgatcacaagggccacccccacactagctactaccagtatggcctgggcattctggccctgtgtctccaccagaagcgggtccatgacagcgtggtggacaaacttctgtatgctgtggaacctttccaccagggccaccattctgtggacacagcagcccatggcaggcttggcattcacctgtctgaagcgctcaaacttcaaccctggtcggagacaacggatcaccatgggccatcaaacagtgcgagaggagatcttgaaggcccaaacccccagggccactttgggaatgtctacagcacccattggcattacagttcctcatgacttccccatgcct

SEQ ID NO: 228521 - DNA, 904 bp, Homo Sapiens
ggaagtggaagggcaggaactcaagccgtgttactcggtcacagcggcggatacagtggagctcaatgccctgattgtcatagatgtggagccagcggttctgagcaacagcaagcagtgcctcagaatggagaaaccggatgtcccgcaccgcctccatgacgttgatctcgcacataagcttctttgttacccaatcaagggcagccacatgacctcggcgccctccaaaagccaggtgtcttccagttcgagagtagtttagtctgtagggtccaaactgccgcagattcaagtcaaagtgcttggctgcacttgcaatgtccacagcctccacaatgtcagcctggcatatctttgctgtgtcttccccatcctccccttccagaaacccaggttcttcagcaagcagcagctcagaacgagcagctttgatacttgtttcctcttcctcagcttcagccacctcaagtcggcttcgagttttggctttagaatgtggtagctttcgggatttgtcaatgcgacagaacttctggaccacttccacagggacgggggcggggcctgggaatggatcttgggccccggacaagccgcgctgggactccgggttcttccattctcggggtttcttcgggacctgaggcttcttagagatccgagacttctttaagatgtaagcattttttggtctctgaggacggagctcccgattcttcttgttacgaggaggccctggagaggctccggctgtggtcggaacggtctcttcctcccagtatcgccgcggtttctttctcttggtctgaagtttgtctttcttgggcgggacatccttgcccggcttgggggctgtctccatctcgcccacccgaacggcgatccacgtgcaaaatcccaa

SEQ ID NO: 228522 - DNA, 1048 bp, Homo Sapiens
ctttgtacaaagatggggcgcccgtaaggcggacgctgttaggggtggcggggggttggcggcggttcgagaggctctgggccggcagtctaagctctcgcagcctggctcttgcagccgcaccctcaagcaacggatccccatggcgcttgttgggcgcgttgtgcctgcagcggccacctgtagtctccaagccgttgaccccattgcaggaagagatggcgtctctactgcagcagattgagatagagagaagcctgtattcagaccacgagcttcgtgctctggatgaaaaccagcgactggcaaagaagaaagctgaccttcatgatgaagaagatgaacaggatatattgctggcgcaagatttggaagatatgtgggagcagaaatttctacagttcaaacttggagctcgcataacagaagctgatgaaaagaatgaccgaacatccctgaacaggaagctagacaggaaccttgtcctgttagtcagagagaagtttggagaccaggatgtttggatactgccccaggcagagtggcagcctggggagacccttcgaggaacagctgaacgaaccctggccacactctcagaaaacaacatggaagccaagttcctaggaaatgcaccctgtgggcactacacattcaagttcccccaggcaatgcggacagagagtaacctcggagccaaggtgttcttcttcaaagcactgctattaactggagacttttcccaggctgggaataagggccatcatgtgtgggtcactaaggatgagctgggtgactatttgaaaccaaaatacctggcccaagttaggaggtttgtttcagacctctgatgggccgagctgcctgtggacggtgctcagacaagtctgggattagagcctcaaggacattgtgtgattgcctcacatttgcaggtaatatcaagcagcaaactaaattctgagaaataaacgagtctattactgaaaaaaagtaacaaaaacacgactatgccaatatgagcaaaccccaactttcttgtacaaat

SEQ ID NO: 228523 - DNA, 565 bp, Homo Sapiens
ttggcctacctgtggcgtcgccagtgatggagcagatactcaaggaggcactgggctcagcctgggcattaaagggacagagtcagctcacacgctgtctgtgactaaagagggcacagcagggccagtgtgagcttacagcgacgtaagcccaggggcaatggtttgggtgactcactttcccctctaggtggtgccaggggctggaggcccctagaaaaagatcagtaagccccagtgtccccccagcccccatgcttatgtgaacatgcgctgtgtgctgcttgctttggaaactgggcctgggtccaggcctagggtgagctcactgtccgtacaaacacaagatcagggctgagggtaaggaaaagaagagactaggaaagctgggcccaaaactggagactgtttgtctttcctggagatgcagaactgggcccgtggagcagcagtgtcagcatcagggcggaagccttaaagcagcagcgggtgtgcccaggcacccagatgattcctatggcaccagccaggaaaaatggcagctcctaaaggagaaaatgtttga

SEQ ID NO: 228524 - DNA, 477 bp, Homo Sapiens
ttggctttggagcagagaggaggcaatggccaccatggagaacaaggtgatctgcgccctggtcctggtgtccatgctggccctcggcaccctggccgaggcccagacagagacgtgtacagtggccccccgtgaaagacagaattgtggttttcctggtgtcacgccctcccagtgtgcaaataagggctgctgtttcgacgacaccgttcgtggggtcccctggtgcttctatcctaataccatcgacgtccctccagaagaggagtgtgaattttagacacttctgcagggatctgcctgcatcctgacgcggtgccgtccccagcacggtgattagtcccagagctcggctgccacctccaccggacacctcagacacgcttctgcagctgtgcctcggctcacaacacagattgactgctctgactttgactactcaaaattggcctaaaaattaaaagagatcgatattaa

SEQ ID NO: 228525 - DNA, 1041 bp, Homo Sapiens
ttggcagaactccttacggttcctgatggttggaaggaaccagctttttccaaagaggacaatcccagaggacttttggaggagagcagtttcgcaactttgttcccaaaatacagggaagcttacttgaaagagtgttggccattggtgcagaaagccttaaatgaacatcatgttaatgcaaccctggacctgatcgaaggcagcatgactgtttgtactacaaagaagacttttgatccatatatcatcattagggccagagatctgataaaactgttagcaaggagtgtttcatttgaacaggcagtacgaattcttcaggatgatgttgcatgtgacatcattaaaataggttctttagtaaggaataaagagagatttgtaaaacgaagacaacggcttattggtcccaaaggatctacattgaaggcattggaactcttaactaattgttacattatggttcagggaaacacagtttcagccattggaccttttagtggcttaaaagaggttagaaaagtagtccttgatactatgaagaatattcatccaatttataacattaaaagcttaatgattaagagagagttggcaaaagattctgaattacgatcacaaagttgggagagatttttgccacagttcaaacacaaaaatgtgaataaacgcaaggaaccaaagaaaaaaactgttaagaaagaatatacgccattcccaccaccacaaccagaaagtcagatcgataaagaattggctagtggtgaatactttttgaaggcaaatcagaagaagcggcagaaaatggaagcaataaaggctaaacaagcagaagccatcagtaagagacaagaggaaagaaacaaagcatttattccacctaaggaaaaaccaattgtgaaacctaaggaagcttctactgaaactaaaattgatgtggccagcatcaaggaaaaggttaagaaagcaaagaataagaaactgggagctcttacagctgaaaaattgcacttaagatggaggcagatgaaaggaaaa

SEQ ID NO: 228526 - DNA, 1329 bp, Homo Sapiens
ttgggtcccgggcggatcccgggaaggcggaaggcttcggcagagctgcgccgccgaggctgagcggtcccttctcgctgcggccgcccaggtgcccgcgcccgtggcgctatggaggcggcgctgctggggctgtgtaactggagcacgctgggcgtgtgcgccgcgctgaagctgccgcagatctccgctgtgctagcggcgcgcagcgcgcggggcctcagccttccgagtttacttctggagctggcaggattcctggtgtttctgcggtaccagtgttactatgggtatccgccgctgacctacctggagtaccccatcctcatcgcgcaagatgtcatcctcctgctctgtatctttcattttaacgggaacgtgaagcaggccactccttacatcgctgtattggtgtcttcttggttcatccttgccctgcagaagtggatcatagacctggccatgaatctatgtactttcatcagcgcggccagtaagtttgcacagctccagtgtctgtggaagacgagagactcaggaactgtgagtgcgctgacttggagcctctcttcctatacctgtgcaacaagaataatcacaaccttaatgaccaccaatgattttacaattcttctacgttttgtgatcatgctggctttaaatatatgggtaacagtgacagtacttcgctaccggaagaccgctataaaggctgaatgatggatacattattccttcacacagtggattttgagtaactgaaccaaaggaaaaagaagctctttgctaaattaaggtcttttataaatttagtaaatcagtttataatctttaaagccaaaggtttttttagacttgaaagaaagagccacttaaattcttgtttaaaaataccaatttgcctcctccttcctcacttcgttaggttatggtagtgctcagacatctgcagtgttgaggccagtcactgttggaagtcatccaagaagcccattttgaggccattttgagccttactcttaagttctctatgaagaactacattgatttgttggctttcagaatcttttaggaaataaatcctctccaggacaaaaatgaacatgaatggagtggcattttgttccaagtcagaggtgggcacctataataaatgactagggttcactttctgggactgatgtttaattgtaacacagatacaacagggtggccttgttgtgtataatacggtattatacctgcatgtgctctagcaaggataccaaaggcaagcatacatgtagctggcttgagtttgtaccaaaacagtccttcaactttgcactg

SEQ ID NO: 228527 - DNA, 1063 bp, Homo Sapiens
  misc_feature (733)..(743): n is a, c, g, or t
ttggcggaaacatgctcggcaggccttgctcaccgcagccatcttggccagcaccgggaggttgtggtgagcaaggcctgcggaaacatgttcggcctcatgcacgggacctgcccggagacttcaggcggccttctgatctgtttaccacgtgagcaagcagctcggttctgtgcagagataaagtcccccaaatatggtgaaggccaccaagcatggattattgggattgtagagaagggcaaccgcacagccagaatcatagacaaaccccggatcatcgaggtcgcaccacaagtggccactcaaaatgtgaatcccacacccggggccacctcttaatctagacagaaatagctgtttggttttgtttttaaatagatctatttcccttatcacttcaattaaagactataaacaacaaaaatctcattgtgtctacacatcggggtgaccttaggtcggtttgtaagtggatacaattaataaaataaaatccattgcctttttttcctgttacattaactgaagatgcacctaatcttgaggcagcttctgagttgagaattatattgttatccaatactgttgattcattttgaatctttagacacttatctcttgccgcataggctttttaaaggtgctttcacatagcacaggcattacccgtagtcgtgtcaaatagcagttggtgtcttcattttatgtatatttatcatataagtctgannnnnnnnnnnaagcgtcttgaatggttttctggagagacagcattggtaagtggcacatgacggtatcccagtcataagagggttgcatgattcctttgagtgtttgatttgaaaagcctagtcttgtctctcaagagcatctcagacccagaacattctccagtagtgcattcagttcaacacagcaagtgcttcattgcatggaaaacactttgaagacaaaaaagaaatcttatttctttttttgtagccttcctgatatttacagtaataccattaactgttttatcgatagcaaaaaaggatactttttgcaatgttattagatg

SEQ ID NO: 228528 - DNA, 839 bp, Homo Sapiens
gccaactttgtacaaaaaagttggcattcaaactgatgcagctattgattttggaaactctggaggtcccctggttaacctggatggggaggtgattggagtgaacaccatgaaggtcacagctggaatctcctttgccatcccttctgatcgtcttcgagagtttctgcatcgtggggaaaagaagaattcctcctccggaatcagtgggtcccagcggcgctacattggggtgatgatgctgaccctgagtcccagcatccttgctgaactacagcttcgagaaccaagctttcccgatgttcagcatggtgtactcatccataaagtcatcctgggctcccctgcacaccgggctggtctgcggcctggtgatgtgattttggccattggggagcagatggtacaaaatgctgaagatgtttatgaagctgttcgaacccaatcccagttggcagtgcagatccggcggggacgagaaacactgaccttatatgtgacccctgaggtcacagaatgaatagatcaccaagagtatgaggctcctgctctgatttcctccttgcctttctggctgaggttctgagggcaccgagacagagggttaaatgaaccagtgggggcaggtccctccaaccaccagcactgactcctgggctctgaagaatcacagaaacactttttatataaaataaaattatacctagcaacatattatagtaaaaaatgaggtgggagggctggatcttttcccccaccaaaaaggctagaggtaaagctgtatccccctaaacttaggggagatactgggagctgaccatcctgaccttcctattaaa

SEQ ID NO: 228529 - DNA, 740 bp, Homo Sapiens
  misc_feature (560)..(584): n is a, c, g, or t
tgtacaaaaaagttggcatctatcagccgctccgggctgaagattgcttctcttctctcctccaaggtctagtgacggagcccgcgcgcggcgccaccatgcggcagaaggcggtatcgcttttcttgtgctacctgctgctcttcacttgcagtggggtggaggcaggtaagaaaaagtgctcggagagctcggacagcggctccgggttctggaaggccctgaccttcatggccgtcggaggaggactcgcagtcgccgggctgcccgcgctgggcttcaccggcgccggcatcgcggccaactcggtggctgcctcgctgatgagctggtctgcgatcctgaatgggggcggcgtgcccgccggggggctagtggccacgctgcagagcctcggggctggtggcagcagcgtcgtcataggtaatattggtgccctgatgggctacgccacccacaagtatctcgatagtgaggaggatgaggagtagccagcagctcccagaacctcttcttccttcttggcctaactcttccagttaggatctagaactttgccnnnnnnnnnnnnnnnnnnnnnnnnngagatgggttctcactatattgtccaagctagagtgcagtggctattcccagatgcgaacatagtacactgcagcctccaactcctagcctcaagtgatcttcctgtctccacctctctaagtaagattacaagcatgcgccgacgatgcccagaa

SEQ ID NO: 228530 - DNA, 980 bp, Homo Sapiens
tgagccaccatgcccggctgggcttgtatcttttagcttgtgttagtaaaaggattctagaaaattatgaagtccagattcaaagggatctctgttaattacccactgacaggcattatgacctaacaggaggttggtagcagtagatccaagcatgcatgttgcctggcctgtagattggccttatcaggtttctgggtgcctctgccttaagatcctgaaggcaaattttgtttcaacagtttggaagtcatctgtgggtccagcttgactttggaggaataagaagatacttctagagtatgggaatgattccagataatttctgggatttgaatctacttgagtttaagggcctgggacctaatttggtttagtatagaatttgaagaattaatttataggcagctgaatacccaaaacttgggtggtggtcctgtggtttggctgagctgtccgggcataacctggttctctgttatgttaaggctttctgggaagccagccactctgcgcaggagtgaaacatgaagttgttttctgaggacctgttttggtgggattgtttgggcagaggactgtgtttatgcagggcaaatcccagaaagataagaggaagctagagaaacttaatgtacctgaattcttcatggtgtatttgcaaactaacttaacatagattcttttgactatggtaagtttgaatctctccttgccaaacaacattataagtttagttttcttcttcctcttgcagccggtacagaaaggtgtaagtggtggctgaaaattgaggaagcttcatctgaccaatgtgggtgctgggtttcttgtgaaatgtgtccctaagcctccttctccttgcaggcagccacccacccaggtgtctaagataggacatgctcctttctttctctaatcccatcctgagttgccggcaaagccaatatgaccactactgagaatagtaatgacttcta

SEQ ID NO: 228531 - DNA, 931 bp, Homo Sapiens
  misc_feature (849)..(857): n is a, c, g, or t
ttggcttacctggaccataattgctatgccgtacattcagagtgccccctcccctgcaaggccttgccatgattaacaagtaacttgttagtcttacagataattcatgcattaacagtttaagatttagaccatggtaatagtagttcttattctctaaggttatatcatatgtaatttaaaagtatttttaagacaagtttcctgtatacctctgaactgttttgattttgagttcatcatgatagatctgctgtttccttataaaaggcatttgttgtgtgagttaatgcaaagtagccaagtccagctatatagcagcttcagaaacatacctgaccaaaaaattcccagtaaccaggcatgatcaatttatagtggtcgtttacatctaataattatcaggacttttttcaggagtgggttataaaaacattcaagttggtctgacagtattttgttaaggatatttgtttgtatgtttattcagtatacttacataaaaattatttcgccatcagccaaaactcagtaatcatgacagctgtctgttgttttatgaagtttatttctcaagaaaatgggaataaatttgggatttgttcagcttttttactaaagatgcctaaagccacaggttttattgcctaacttaagccatgacttttagatatgagatgacgggaagcaggacgaaatatcggcgtgtggctggagccttcccactggaggctgaaagtggcttgtggtattataatgttcagatttcaagaggaaggtgcaggtacacatgagttagagagctggtgagacagttgggaactctttgtgcttgtgatctactggacnnnnnnnnngcaggaagtgcattctctggtcttccctattttctgttctggatgtcagtgcagtgcactgctactgtttatcc

SEQ ID NO: 228532 - DNA, 478 bp, Homo Sapiens
aaagttggcgcttctctttctggtcaaaatggctggtaagcaggccgtttcagcatcaggcaagtggctggatggtattcgaaaatggtattacaatgctgcaggattcaataaactggggttaatgcgagatgatacaatatacgaggatgaagatgtaaaagaagccataagaagacttcctgagaacctttataatgacaggatgtttcgcattaagagggcactggacctgaacttgaagcatcagatcttgcctaaagagcagtggaccaaatatgaagaggaaaatttctaccttgaaccgtatctgaaagaggttattcgggaaagaaaagaaagagaagaatgggcaaagaagtaatcatgtagttgaagtctgtggatgcagctgttatgaagatggttaaacttgaaacaaacaattttaagaattatttggtctgaagatgttttactttaaataaatgtctattgt

SEQ ID NO: 228533 - DNA, 540 bp, Homo Sapiens
ttggcttcaactctcttgtgttcctggaattagaatgaagaatccctccattgttggagtcctgtgcacagattcacaaggacttaatctgggttgccgcgggaccctgtcagatgagcatgctggagtgatatctgttctagcccagcaagcagctaagctaacctctgaccccactgatattcctgtggtgtgtctagaatcagataatgggaacattatgatccagaaacacgatggcatcacggtggcagtgcacaaaatggcctcttgatgctcatatctgttcttcagcagcctgtcataggaactggatcctacctatgttaattaccttatagaactactaaagttccagtagttaggccattcatttaatgtgcattaggcacttttctgtttatttaagagtcaattgctttctaatgctctatggaccgactatcaagatattagtaagaaaggatcatgttttgaagcagcaggtccaggtcactttgtatatagaattttgctgtattcaataaatctgtttggagg

SEQ ID NO: 228534 - DNA, 1228 bp, Homo Sapiens
ctttgtacaaaaaagttggcaaatggaccaaggtgcacgagctcaaggagcacaacgggcaggtgacaggcatcgactgggcccccgagagtaaccgtattgtgacctgcggcacagaccgcaacgcctacgtgtggacgctgaagggccgcacatggaagcccacgctggtcatcctgcggatcaaccgggctgcccgctgcgtgcgctgggcccccaacgagaacaagtttgctgtgggcagcggctctcgtgtgatctccatctgttatttcgagcaggagaatgactggtgggtttgcaagcacatcaagaagcccatccgctccaccgtcctcagcctggactggcaccccaacaatgtgctgctggctgccggctcctgtgacttcaagtgtcggatcttttcagcctacatcaaggaggtggaggaacggccggcacccaccccgtggggctccaagatgccctttggggaactgatgttcgaatccagcagtagctgcggctgggtacatggcgtctgtttctcagccagcgggagccgcgtggcctgggtaagccacgacagcaccgtctgcctggctgatgccgacaagaagatggccgtcgcgactctggcctctgaaacactaccactgctggcgctgaccttcatcacagacaacagcctggtggcagcgggccacgactgcttcccggtgctgttcacctatgacgccgccgcggggatgctgagcttcggcgggcggctggacgttcctaagcagagctcgcagcgtggcttgacggcccgcgagcgcttccagaacctggacaagaaggcgagctccgagggtggcacggctgcgggcgcgggcctagactcgctgcacaagaacagcgtcagccagatctcggtgctcagcggcggcaaggccaagtgctcgcagttctgcaccactggcatggatggcggcatgagtatctgggatgtgaagagcttggagtcagccttgaaggacctcaagatcaaatgacctgtgaggaatatgttgccttcatcctagctgctggggaagcggggagaggggtcagggaggctaatggttgctttgctgaatgtttctggggtaccaatacgagttcccataggggctgctccctcaaaaagggaggggacagatggggagcttttcttacctattcaaggaatacgtgcctttttcttaaatgctttcatttattg

SEQ ID NO: 228535 - DNA, 889 bp, Homo Sapiens; identical to SEQ ID NO: 194865

SEQ ID NO: 228536 - DNA, 1604 bp, Homo Sapiens
  misc_feature (113)..(122): n is a, c, g, or t
tgtttcgtgcgcagaacagagttggggaacacagctgggttaagtttcaatggtaagcagcaataaagatcaagaaaatccccaacttttctaataaccgctatacaatatgnnnnnnnnnntagtatctatcaccacctcttaacaatggacatcaaaattaggattgtaggttttctaagtgcttggataaaaaatgcgaacacagttaagatccttggttaattatctttgatttttcaaacccccaaaacataaaatattttgcttgctggtgcattaacccattagcaataacctgagctatcttttcctcaccaagtattttgacagtgcaaaatgttagtagtctcagtagacgctgctcaccacattctgtcattgcagcctgatgatgaaccatgtcagggaggtatcactgccaagagaaatgcacagcagcctaaaagatacatgattcaatagcatgctggagtgtcaaaggtagataggcagttttatgcaaaatgtgaaatatataattcaaaatgcccacaagctaacagaaaatacagtattgaatcttttaatatcaaaacaaatacttattttgctactttgaacagtattccacatggacaagcagatcgcgatgctcagtggctggatactgtatattgcacttgggacattccaccaggctttcattgagtgcagcagtgggactttttggtgaggcggcaactttttctctgttttcagtctctccttggaaagtgactaatggctctgtgatgccaaactcatgaagctgtttcaaggattccaactgtgttatttgatttcttgcttttcggagctccttaagaattacaagcaattgatgctgcacatgttgacggtcgagtttttcattttcaaagtctaaagtacatgcctgcatctgttgttccaacagagctacccttgtttgttcttcttgctgctttagcagagatgtgtaaagaaactggacctgagataagagctcttcggatctcttcttctcttcttcaagttttcccctagcaatatcattctcttccctgagtttttgtatcttctctgttttatgcctatcatcttccagatgttgcacatctgcccttctttgtgaatacaacagctgatttaaattgtgaacttctttttgggtttcttcatattttcttcgaaattcactcagttcaaaactcagctgagttatggtttgtcgttcaacctcaagatctttttttgcacttgccaagagatcgttgtaacatttctgcttctcttcttgaagataaccttctgattcaggcttttttgtctgctgtgggagtgaatgagcagctgtttccgttttcttttccaactcaaagatctttgctaaaagtccttttacatagacttcccgctgctgatcatacacgagccactgctgatttttctccagagcatctttcagctgtatttccatttcatgaatattatttattgatgagttgaagcagtttggagccacagtctgtgataaacggagtgtattggttttgctttcaagttcagcaattcgtgaggttgcagcagacaactgttgccaa

SEQ ID NO: 228537 - DNA, 741 bp, Homo Sapiens
ctttgtacaaaaaagttgggaccttaatttcattgctaccactctgatctcttagcacatttcttaggattaagggtccaaaaatgctgatctaaggggttgccatggtgttgaacaatgcaactttttatttaaaaaagctctgcactgccatgtatgaaagtctctttatgatgtttgtttttttgtcatttttgttctttacatcaagaaattttatgtttaaatatgcggagaatgtatattgcctctgctcctatcagggttgctaaaccctggtacatcgtatataaaatgtattaaaactggggtttgttaccagttgctgtactttgtatatagaatttttataaattgtatgcttcagaaataatttatttttaaaaagaaattaaaagttttaaactcacatccatattacacctttcccccctgaaatgtatagaatccatttgtcatcaggaatcaaaacccacagtccattgtgaagtgtgctatatttagaacagtcttaaaatgtacagtgtattttatagaattgaagttaacattcttattttcaagagaatttatggacgttgtagaaatgtacaaatgcatttccaaactgccttaaacgttgtatttttatagacatgttttttaaaaatcctaagtttttaaataactatggatttgtgtattttttttggttatttgttttattaaaacatgtacatcagtaaagagttttaaacaatg

SEQ ID NO: 228538 - DNA, 1316 bp, Homo Sapiens
ttggcggagcagccgccttccttctggaagctccaggcggtctttctgccgagcctcggtcccggcccccatcctccccgccccatcggttgttgtctgggcggatttaaacagtcaagtaaaatcaagctgggtaatcatggcagaaggtggatttgatccctgtgaatgtgtttgctctcatgaacatgcaatgagaagactgatcaatctgttacggcagtcccagtcctactgcacagacacagagtgtcttcaggaattaccgggaccctctggtgataatggcatcagtgttacaatgatcttggtagcctggatggttattgcattgatcttgttcttactgagacctcctaatctaagaggatccagcctacctggaaagccaaccagtcctcataatggacaagatccaccagctcctcctgtggactaactttgtgatatgggaagtgaaaatagttaacaccttgcacgaccaaacgaacgaagatgaccagagtactcttaaccccattagaactgtttttccttttgtatctgcaatatgggatggtattgttttcatgagcttctagaaatttcacttgcaagtttatttttgcttcctgtgttactgccattcctatttacagtatatttgagtgaatgattatatttttaaaaagttacatggggcttttttggttgtcctaaacttacaaacattccactcattctgtttgtaactgtgattataatttttgtgataatttctggcctgattgaaggaaatttgagaggtctgcatttatatattttaaatagatttgataggtttttaaattgctttttttcataaggtatttataaagttatttggggttgtctgggattgtgtgaaagaaaattagaaccacgctgtatttacatttaccttggtagtttatttgtggatggcagttttctgtagttttggggactgtggtagctcttggattgttttgcaaattacagctgaaatctgtgtcatggattaaactggcttatgtggctagaataggaagagagaaaaaatgaaatggttgtttactaattttatactcccattaaaaatctctaatgttaagaaaaccttaaataaacatgattgatcaatatggcagatgatttacagtccattatatgacatttgtgagccactgtgcccggcaaatttttttacctttacagaaggttttgcttatttaattgtgagctcatttttctttgttacttttgtccccccagatttgggggacaaaataaaattaatcttttaaaatgtgtcagcc

SEQ ID NO: 228539 - DNA, 364 bp, Homo Sapiens
ctttgtacaaaaaagttggggcgaagcgagatgacgaagggaacgtcatcgtttggaaagcgtcgcaataagacgcacacgttgtgccgccgctgtggctctaaggcctaccaccttcagaagtcgacctgtggcaaatgtggctaccctgccaagcgcaagagaaagtataactggagtgccaaggctaaaagacgaaataccaccggaactggtcgaatgaggcacctaaaaattgtataccgcagattcaggcatggattccgtgaaggaacaacacctaaacccaagagggcagctgttgcagcatccagttcatcttaagaattgcaacgattagtcatgcaataaatgttctggtttt

SEQ ID NO: 228540 - DNA, 893 bp, Homo Sapiens
ttggcaccatttgtgccgctataatctgtacactctctgctattgtctgctgcatccaaatcttctccctggacctcgtgcatacgctggcccctgagcggtcagtctcaggcccactgggacctctgggctgcacgtccccgcccccagcccctctcctacacaccatgctggacctggaggaatttgtcccgcctgtgcccccaccgccctactatcccccagagtatacctgcagctcagaaacagatgcacagagcatcacgtacaatggctccatggacagcccagtgcccttgtaccctaccgattgccccccttcttatgaggcagtcatgggactacgaggagacagccaggccactctctttgaccctcagcttcacgatggctcgtgcatctgtgaacgagtggcctccattgtagacgtgtccatggacagcgggtctctggtgctgtcagccattggtgacctccctgggggctctagcccgtcggaggactcgtgcctgctggagctgcagggctccgtgcgctccgtggactacgttctctttcgctccatccagcgcagccgtgccggctactgcctcagcctggactgtggcctgcggggccccttcgaggaaagccccctgccacggcgccccccacgggctgcccgctcctattcctgctctgcccctgaagctccacccccactgggtgcccccacagctgcccgcagctgccaccggttggagggctggccgccctgggtgggaccctgcttccccgagctgaggcggcgggtcccccgggggagggggccgcccagccgcagccccgcccacccgagccccgactcgtcgcttcagcgatagctcaggttccctcaaccccaccggggcacc

SEQ ID NO: 228541 - DNA, 1012 bp, Homo Sapiens
ctttgtacaaaaaagttggcatttttctagtccctgcagggcataattggaatatcatttggagaaagtgtcatggaagttctgcgtccacagcttataagaattgatggccggaattacaggaagaatccagtccaagaacagacctatcaacatgaagaagatgaagaggacttctatcaaggctccatggagtgtgctgatgagccctgtgatgcctacgaggtggagcagaccccacaaggattccggtctactttgagggcccccagcttgctctataagcatatagttggaaagagaggggacactaggaagaaaatagaaatggagaccaaaacttctattagcattcctaaacctggacaagacggggaaattgtaatcactggccagcatcgaaatggtgtaatttcagcccgaacacggattgatgttcttttggacacttttcgaagaaagcagcccttcactcacttccttgcctttttcctcaatgaagttgaggttcaggaaggattcctgagattccaggaggaagtactggcgaagtgctccatggatcatggggttgacagcagcattttccagaatcctaaaaagcttcatctaactattgggatgttggtgcttttgagtgaggaagagatccagcagacatgtgagatgctacagcagtgtaaagaggaattcattaatgatatttctgggggtaaacccctagaagtggagatggcagggatagaatacatgaatgatgatcctggcatggtggatgttctttacgccaaagtccatatgaaagatggctccaacaggctacaagaattagttgatcgagtgctggaacgttttcaggcatctggactaatagtgaaagagtggaatagtgtgaaactgcatgctacagttatgaatacactattcagaaagaccccaatgctgaaggcaagtacaatctctacacagcggaaagcaatatatcttcaagaaagagaatcatttgatggcc

SEQ ID NO: 228542 - DNA, 870 bp, Homo Sapiens
ttggggaagccgtgtctcgcagtcgtggactcgtgcagctggggcgtccgcagccgctcgtcacccgcgtgatgctgtttctggcgttgggcagcccgtgggcggtcgaactgcctctctgcggaaggaggactgcattgtgtgcggccgccgcgctccgaggtccccgggcctctgtctcccgggcgtcctccagcagcgggccttcggggccggtagccggctggagtacggggccttcgggagccgcgcgccttctccggcgtccgggtcgagcgcagatccctgtttattgggaaggatatgttcgattcttaaatacgccatctgacaaatcagaagatggaaggctaatttatactggcaatatggcccgagcagtgtttggtgtgaaatgtttctcttattctacgagtctgattggccttacatttctgccatacatttttacacaaaataatgctatttctgaaagtgtgcctctgcctattcaaatcatattctatggcatcatgggaagctttacggtgatcaccccagtgctgcttcactttattacaaaaggctatgtcattcgattgtaccatgaggccacaacagacacttataaagccattacctacaatgctatgcttgcagaaacgagtacagtgtttcaccagaatgatgtgaagattccgatgctaaacatgtatttaccacatttttatgctaaaacaaaatcactgttagttaatccagtgctctttccaaaccgtgaagactatatccatctaatggggttatgaacataaaaaatttaatttgtatatggaagcaccaatgaaagagaacggcataaagatgacaaatgagcctatttgttagtgt

SEQ ID NO: 228543 - DNA, 908 bp, Homo Sapiens
ttggctcccggcaaagcccagctacaggcgggcgactgcggggggcccctgaggcggcgggggccatggctggggtcgcgtgcttgggaaaagctgccgacgcagatgaatggtgcgacagcggcctgggctccctgggtccggacgcagcggcccccggaggacctgggttgggcgcggagttgggcccggggctgtcgtgggctcccctcgtcttcggctacgtcactgaggatggggacacgcttctcggccggcactgagtacatggacctgcagaatgacctaggccagacagccctgcacctggcagccatcctgggggagacatccacggtggagaagctgtacgcagcaggcgccgggctgtgtgtggcggagcgtaggggccacacggcgctgcacctggcctgccgtgtgggggcacacgcctgtgcccgtgccctgcttcagccccgcccccggcgccccagggaagcccccgacacctacctcgctcagggccctgaccgtactcccgacaccaaccatacccctgtcgccttgtaccccgattccgacttggagaaggaagaagaggagagtgaggaggactggaagctgcagctggaggctgaaaactacgagggccacaccccactccacgtggccgttatccacaaagatgtggagatggtccggctgctccgagatgctggagctgaccttgacaaaccggagcccacgtgcggccggagcccccttcatttggcagtggaggcccaggcagccgatgtgctggagcttctcctgagggcaggcgcgaaccctgctgcccgcatgtacggtggccgcaccccactcggcagtgccatgctccggcccaaccccatcctcgcccgcctcctccgtgcacacggagcccctga

SEQ ID NO: 228544 - DNA, 1019 bp, Homo Sapiens
ttgggaccccacttcctcagaatgtaacggggccagagggaaacttctcacaaacttcgtagagcctcctcaggggaagctaggaagaagacatcaaatgtttttaagtcatgaccaaacaggcttgttggggacatatcatggggtgagctttgaagtgctggtggtccagaggggttgcagatacgtgacttggagcacccgtgtcttacgatggacagtgataaaggtgaacacacagagacagactattctctaagaatgtgagaaacctgatctggaagaggagctatataaacactatctgactatctttgtcttttggggccagtggctgttggcataatcacaagcctgtctgtcttcgagaagggacagtggagtcatccaggtgctgccacatgacaggcacggtgggcaccgatccacagtgggccccgccttccccagctcgcctccctgcctgtgctggcctggccttgcctgctggcaccattggagtaggagggggtggaacacagggggcccatcctgatcaggccccatctcaaggttggcactcctgcccatcacccttagaaggatcttttcccatggcttgacttccttcatttccctaactgaaatacacccactctcttggaataatgacgtaccactcagttggaccctcaagagtcactgctttgtctgtgctggtagtttgtgagaagtgacccgcacgcttccatttgatgcatttgatgtgagtgaatccatacatttgaatgtcattgtccttgagaccctacatgtgcagtttggctcatctcattaaagatgcttgatgtaataattggttagtttccttttattttcctgcagcttttccatgagtattatttttttcaaagacaaatctgtatggcttttccccatctccatattttgttttgctatgaatttgcttttgctttgggtgaaccttgtcctaaggatgctttgcctcacaaacggttttagcccattgtgaatttttc

SEQ ID NO: 228545 - DNA, 722 bp, Homo Sapiens
gccaactttgtacaaaaaagttggattgagctccccttacgccaccgtccccggcgaagttctgcgctggtcggcggagtagcaagtggccatggggagcctcagcggtctgcgcctggcagcaggaagctgttttaggttatgtgaaagagatgtttcctcatctctaaggcttaccagaagctctgatttgaagagaataaatggattttgcacaaaaccacaggaaagtcccggagctccatcccgcacttacaacagagtgcctttacacaaacctacggattggcagaaaaagatcctcatatggtcaggtcgcttcaaaaaggaagatgaaatcccagagactgtctcgttggagatgcttgatgctgcaaagaacaagatgcgagtgaagatcagctatctaatgattgccctgacggtggtaggatgcatcttcatggttattgagggcaagaaggctgcccaaagacacgagactttaacaagcttgaacttagaaaagaaagctcgtctgaaagaggaagcagctatgaaggccaaaacagagtagcagaggtatccgtgttggctggattttgaaaatccaggaattatgttataacgtgcctgtattaaaaaggatgtggtatgaggatccatttcataaagtatgatttgcccaaacctgtaccatttccgtatttctgctgtagaagtagaaataaattttcttaaat

SEQ ID NO: 228546 - DNA, 870 bp, Homo Sapiens
ttggcgttgaggtttgaaataaccggcaaagagtaaaggctgaaactagcttcctgaaagcttcgtagggcccgagccctgtgagcccaggttctgcgcccactaggaggtgtcatgctgactgctttttttaaagccctagaatcttggcttcggcgtttggggtaagctccgttctcgttctcaagcgcgtttccgcgaactctcgcgggattgacgggccgtctcgagagccggcatctcctaggagctagtcctggtcctcggctaggcggcttggggtcgcggcgtaactggggagccagcctgacgccggcggaccccgcctgtgatcctggcaacgatggatgatgacttgatgttggcactgcggcttcaggaggagtggaacttgcaggaggcggagcgcgatcatgcccaggagtccctgtcgctagtggacgcgtcgtgggagttggtggaccccacaccggacttgcaggcactgtttgttcagtttaacgaccaattcttctggggccagctggaggccgtcgaggtgaagtggagcgtgcgaatgaccctgtgtgctgggatatgcagctatgaagggaagggtggaatgtgttccatccgtctcagcgaaccccttttgaagttgaggccaagaaaggatcttgtagagaccctcctgcatgaaatgatacatgcctatttatttgtcactaataacgacaaagaccgagaagggcatggtccagaattttgtaaacatatgcatcgcatcaacagcctgactggagccaatataacggtataccatacttttcacgatgaggtggatgagtatcggcgacactggtggcgctgcaatgggccgtgccagcacag

SEQ ID NO: 228547 - DNA, 850 bp, Homo Sapiens
  misc_feature (289)..(304): n is a, c, g, or t
tttgtacaaaaaagttggcctgaatccccttcaaggtagattatgctgaacaacagtgagatgttattggaggtgtggatgagggagtttgttgttgcagtccttctttgcaccttattttaaagaataaatgaaacatttttctggttacttttttaaaaatttaaaatggaagggaagaataggggcagggcattattaggctatttctgatgcttcagtgttataaattcaacatagaggctgacaacctaaattcatggtgtaacacagctcttttccttttccnnnnnnnnnnnnnnnnggtatctgttcaatgaaaataaggtatgacccaagtttttacctagtctgactaaaagtattccacttcaaggtctgaagtaggacttttaccttaaaaaacaacaacaaacaaaactatcacacaggatagataagaagattggttaaacagttttgtgtagatctttttggtgctgaactatgacatgagccttatagattgtaaaatagggatagttggaactaatgtacagaactaaattttttaaactttatttgctgttaaattctgtgaagtttcagttatctaaaataaatatacacaaatatgaaatataatgtttcagattgcaaggtaatatgtaatagtagtgtttgtaagatactcttgtctaatattaactagtagtattttgatttgtacagtcataatttgttaaaatgacttcatttaacattcactgatgtagattaataatgtaaattctgatttaaagaatggtggaaaaatggtggatgtaatagttttgcaccaagttggggagatcggtatgttttgaacaaa

SEQ ID NO: 228548 - DNA, 1381 bp, Homo Sapiens; identical to SEQ ID NO: 194867
  misc_feature (1181)..(1207): n is a, c, g, or t

SEQ ID NO: 228549 - DNA, 845 bp, Homo Sapiens; identical to SEQ ID NO: 194868

SEQ ID NO: 228550 - DNA, 605 bp, Homo Sapiens
  misc_feature (374)..(382): n is a, c, g, or t
tttgttcgaatgccttatagccttcctcacagcacccaggattgtgactgactctgcatttttaattcttgaaacttggctttccataacatggtacatgcttcaggactacatatgacccagagagcaaggtggctgaactatagtctggaagccctcaggtaaagaggcacatctcaccactcattggttaaacaatgcatcatagcgagcacttttcctttccctggagaatgggatgtgaagcagtagaccgcagccacgccgatggttatacagtgaagaagacttcacctcttcctattgagtttgcttggaatgctgacagcatcaggcaactctgaactgaacatttgctttgtcagaaaatatcnnnnnnnnnactttgaagtttggcaaccttcatgttaccccaaagcaaaaccattgtgtcaggagtcaaacaaatgtttagaaagcaaacatgacgtctctattgtacaacctcctttctcttggctgtttaaaggatgtacttcgtgtattaaagggtactttatgttgaagtaacgaaaaaaccctaatgggtattcctaaaacctaaaccttttctttattccacattt

SEQ ID NO: 228551 - DNA, 908 bp, Homo Sapiens
agagtgtcaatatctcttttatcacagaggggttgtggtaaaagatcctgcgcatccactggttatctcggagtggcaggggcactcagtccctccgcaggttcttaagccgttcctccaggtctgcatcagcatcagctagggctgaggctgcggcctctgcttttttcccaccagcagccacactaagcgagcccccagttgaggggaggttcgacagctcatctgttaggctaagtcccagctcatccagaacctgggacaccacagcatcactctcctcttcatcttcctcatcacccatggcatcatcaatggcatcattcatcatctcctccttcatatccatgatctctgcctgccgctcaaactccatcatgatcttctggatctggggcaacttcagctgtctgttcatggtgcccatggccttggtgacacccttcatggcttgtgccatcgagttgttggacttgagtgtctggatcttgagggacacagcctggatgttggcccgcatcaatacaaacttgcgcacatagcgccgggtgcgcaccaagtcttttgccatgatgcgaacagcatccatctggccttgcttggccatcttcttaatgtctgcaatgattttcttctcctgggtctctagtttctgtcgctcgcggtccagctcccgcatggcacggttcagggccctctggttctgccgcagtagctcctctggcgtcttccggcgcccgaacaataggtccatgatggtagaagctcactggcaggccggagctgggacggacacccgtttccgcttccgggtcacgcttctctttctgggatccccgacttgcccaccaactaaggcccctcggtcctgtcgccgccgccgccgtttccggattaaacgacgccaa

SEQ ID NO: 228552 - DNA, 1134 bp, Homo Sapiens
ttggatcaagaacaaaataaagtcctgtggattccagcctgcccgctctaggagaatgctgtgctgtggatgactgcagctggccgcctgaggggacaccagactcagctcttttctagcgactgaaagtagaagtctgtccgtctatgaacatgcgggggaaggatccggaaccaggacccagaagcacctcctttgtagacagagggccacggctgcgtgcgatccaggcccaggcccacacactctgcccgtgtcacacgtgtgctttaacacaaaacagataacactaaagacgggttcagcacccacctttctttagccagctgatcagagatgctgcaaagagaacctttcggatcactcgtttacaagccttttctaagtatttggtggtttatgtttacttgaacggctccatgttgccggtgcccagcccctgtcccctctgtcaaccccctgtcgctttggtgttggtttcgttcccgtcttcagcaaaacgaccttggaacctcaatgggggctgctttgctttgggaggttcttgttggtgggaccagagctttgacaaacctcctgctccttggtggcacctctcctggaaggacgtcacaactccaggtgctcagactgcctgtggcagcagaaccagtgcctttggcattttcctcccacaatggggaaggtgactttggcattcttacaaactcgtctctcggcctttctctcctgccttccacagcctctcgtttctcctccatctgtgcttattacttgaggactgtgtctgctccgtgagagctgcgtgggcagggctgcagtggggtccaggtggtgttcagctgtgctgatgcctgccattgggtcctccttaggctctgtaagtcgtgacagccttcatcagtgcaatgtttgcagggtaattcttaaactttttagagggtggcaggtacatcagttctttttgatatgaaaacattcatgtttcagacattgaattgagagcttttaggggaagcataatggttattgtcactatcaacagtctaaaaagaaaaactgaggtctttttaatcttgattacagcactcacggcatgcaccctactcagtgtgggtgtcttcgtttgggggc

SEQ ID NO: 228553 - DNA, 1046 bp, Homo Sapiens
ttggccattttgtgtctgcttcctgtgggacgtggtggtagccgttgggttgggaaagtgagggatttttggcctcgtttctcctgcttcttttctcctcccttttactttgccggtagaacacagttatgggtcgcaagaagaagaagcagctgaagccgtggtgctggtattgtaatagagattttgatgatgagaagatccttattcagcaccaaaaagcaaagcattttaaatgccatatatgtcacaagaaattgtatacaggacctggcttagctattcattgcatgcaggtacataaagaaacaatagatgccgtaccaaatgcaatacctggaagaacagacatagagttggaaatatatggtatggaaggtattccagaaaaagacatggatgaaagacgacgacttcttgaacagaaaacacaagaaagtcaaaaaaagaagcaacaagatgattctgatgaatatgatgatgacgactctgcagcctcaacttcatttcagccacagcctgttcaacctcagcaaggttatattcctccaatggcacagccaggactgccaccagtaccaggagcaccaggaatgcctccaggcatacctccattaatgccaggtgttcctcctctgatgccaggaatgccaccagttatgccaggcatgccacctggattgcatcatcagagaaaatacacccagtcattttgcggtgaaaacataatgatgccaatgggtggaatgatgccacctggaccaggaataccacctctgatgcctggaatgccaccaggtatgcccccacctgttccacgtcctggaattcctccaatgactcaagcacaggctgtttcagcgccaggtattcttaatagaccacctgcaccaacagcaactgtacctgccccacagcctccagttactaagcctcttttccccagtgctggacagatggggacacctgtcacaagctcaagtacagcttcatccaattcagaaagtctgtctgcatcttctaaaagctctgtttcctagcacagc

SEQ ID NO: 228554 - DNA, 1290 bp, Homo Sapiens
ttggctgagagcggccaggccagcctcggagccagcagggagctgggagctgggggaaacgacgccaggaaagctatcgcgccagagagggcgacgggggctcgggaagcctgacagggcttttgcgcacagctgccggctggctgctacccgcccgcgccagcccccgagaacgcgcgaccaggcacccagtccggtcaccgcagcggagagctcgccgctcgctgcagcgaggcccggagcggccccgcagggaccctccccagaccgcctgggccgcccggatgtgcactaaaatggaacagcccttctaccacgacgactcatacacagctacgggatacggccgggcccctggtggcctctctctacacgactacaaactcctgaaaccgagcctggcggtcaacctggccgacccctaccggagtctcaaagcgcctggggctcgcggacccggcccagagggcggcggtggcggcagctacttttctggtcagggctcggacaccggcgcgtctctcaagctcgcctcttcggagctggaacgcctgattgtccccaacagcaacggcgtgatcacgacgacgcctacacccccgggacagtacttttacccccgcgggggtggcagcggtggaggtgcagggggcgcagggggcggcgtcaccgaggagcaggagggcttcgccgacggctttgtcaaagccctggacgatctgcacaagatgaaccacgtgacaccccccaacgtgtccctgggcgctaccggggggcccccggctgggcccgggggcgtctacgccggcccggagccacctcccgtttacaccaacctcagcagctactccccagcctctgcgtcctcgggaggcgccggggctgccgtcgggaccgggagctcgtacccgacgaccaccatcagctacctcccacacgcgccgcccttcgccggtggccacccggcgcagctgggcttgggccgcggcgcctccaccttcaaggaggaaccgcagaccgtgccggaggcgcgcagccgggacgccacgccgccggtgtcccccatcaacatggaagaccaagagcgcatcaaagtggagcgcaagcggctgcggaaccggctggcggccaccaagtgccggaagcggaagctggagcgcatcgcgcgcctggaggacaaggtgaagacgctcaaggccgagaacgcggggctgtcgagtaccgccggtctcctccgggagcagtggtccagctcaaacagaaggtcatgactcacgtcagcaacggctg

SEQ ID NO: 228555 - DNA, 956 bp, Homo Sapiens
ttggcattgatatttatgcttgtgcccttgatcaaactggacttttggagatgaagtgttgtgcaaatcttactggaggctacatggtaatgggagattctttcaacacttctctcttcaagcagacattccaaagaatctttactaaagattttaatggagatttccgaatggcatttggtgctactttggacgtaaagacctctcgggaactgaagattgcaggagccattggtccatgcgtatctctgaatgtgaaaggaccgtgtgtgtcagaaaatgagcttggtgttggtggcacgagtcagtggaaaatctgtggcctagatcctacatctacacttggcatctattttgaagttgtcaatcagcacaacaccccgatcccccaaggaggcagaggagccatccagtttgtcacgcattatcagcactccagcacccagagacgcatccgcgtgaccaccatcgcccgaaattgggcagatgtacagagtcagctcaggcacatagaagcagcatttgaccaggaggctgcggcagtgttgatggcacggcttggggtgttccgagcggagtcagaggaggggcccgatgtgctccggtggctggaccgacaactcatccgactgtgtcaaaagtttggacagtataacaaagaagaccccacttcttttaggttatcagattccttttctctatatcctcagtttatgttccatctgagaagatctccatttcttcaagtgtttaacaacagtcctgatgagtcgtcatattacagacatcattttgcccggcaggacctgacccagtccctcatcatgatccagcccattctctactcttactcctttcatgggccaccagagccagtactcttggatagcagcagcattctagctgacagaattttgctgatggatactttctttcaaattgtcatttatcttggt

SEQ ID NO: 228556 - DNA, 1361 bp, Homo Sapiens; identical to SEQ ID NO: 194869

SEQ ID NO: 228557 - DNA, 1406 bp, Homo Sapiens
gtcctcaaccactctgagaacacggacggtcaggaatgaggggctcagaccccgggttggtgagagggaggtgacagggagggaaggagcctgctggagggaaacctggctgggaggatgggtctgggcccaggctggggcctaaggagggggaagaacagagcagggaaaggcagaaaaactgacacggtgggaggagggagatgaatgggagatgaaacagaatgtctgaggggccacagacagcatgtatggtggtgggggtctgcctcccatctctccaagtccaggcagagctgtgctgggtgaggggctgggaggcagaggcaggagcatcattaacaagggtggaagccacgaagacagcgaccagtgcacagggtgtgtcacatggtacaaccaagagacttggcgtgcaaagaaccaaagaaacactcaggacacacacgacatctgcagggaacctgggggtggtgaggaagtcgtgcacgggtggtggggggagactgggaggcccctctgtcctagaaacgctgtgtcaccatagcaacagggtcctggaggcaggggagctgcctcctgcccctgtgagctgtgaagtaggggtcctgtgggctcagggtgcccccttaccctcccttgggaagctctggggcaggtggagaaccccataagagttgaaagtggccttgggtcctgctggaggcagcagagtgagtggatctggcagctgcatcctagaggacaccctggtggctggaggggctgggggaggactaggctctcctgctggggaccaggattccagctttctcatttccgagaaggaaactgatccacaaggaagagtttggaagtcgggtgaaggaaggcctgggggactcagtccaggggactatgggcaccagaaggcaaaaccaacacgccttgggcctggagcaggagggagaaggggaaaagcgggaaggaggaggggctgtgcaggggtgggctggaggggaggggagggaaggcgtccctgtggcagtgtccttcgggacctgggcgagtgagaggcagaccctggtgccagggaaggggtgctgggcccgggcctgctggcctccccctgcccgcaggcggtgaggctggtggcagtgccaggagggaaagtggctgggagacagggcctcaggtggccttgctgccactgaagagtcccactggaaagtgcttgacatgggtgggccactgggctgccagctggaagaacttgatgtcactccactcgaccccatcgatggacactctcagcatagtctgctgctgcttggctgagcagatgaggcggctgatgccttcaatgacctggctcttagaatccacctccttttctcggggtttcttgctcaggaagatggtgccaa

SEQ ID NO: 228558 - DNA, 1392 bp, Homo Sapiens
ttgggttggggggaccctccaggcggccaccatctgtgcctccagccaccagtttctctccacacactacaacctgcacaacctctacggcctgaccgaagccatcgcctcccacagggcgctggtgaaggctcgggggacacgcccatttgtgatctcccgctcgacctttgctggccacggccgatacgccggccactggacgggggacgtgtggagctcctgggagcagctcgcctcctccgtgccagaaatcctgcagtttaacctgctgggggtgcctctggtcggggccgacgtctgcggcttcctgggcaacacctcagaggagctgtgtgtgcgctggacccagctgggggccttctaccccttcatgcggaaccacaacagcctgctcagtctgccccaggagccgtacagcttcagcgagccggcccagcaggccatgaggaaggccctcaccctgcgctacgcactcctcccccacctctacacactgttccaccaggcccacgtcgcgggggagaccgtggcccggcccctcttcctggagttccccaaggactctagcacctggactgtggaccaccagctcctgtggggggaggccctgctcatcaccccagtgctccaggccgggaaggccgaagtgactggctacttccccttgggcacatggtacgacctgcagacggtgccagtagaggcccttggcagcctcccacccccacctgcagctccccgtgagccagccatccacagcgaggggcagtgggtgacgctgccggcccccctggacaccatcaacgtccacctccgggctgggtacatcatccccctgcagggccctggcctcacaaccacagagtcccgccagcagcccatggccctggctgtggccctgaccaagggtggggaggcccgaggggagctgttctgggacgatggagagagcctggaagtgctggagcgaggggcctacacacaggtcatcttcctggccaggaataacacgatcgtgaatgagctggtacgtgtgaccagtgagggagctggcctgcagctgcagaaggtgactgtcctgggcgtggccacggcgccccagcaggtcctctccaacggtgtccctgtctccaacttcacctacagccccgacaccaaggtcctggacatctgtgtctcgctgttgatgggagagcagtttctcgtcagctggtgttagccgggcggagtgtgttagtctctccagagggaggctggttccccagggaagcagagcctgtgtgcgggcagcatctgtgtgcgggcctgggggttgcatgtgtcacctggagctgagcactaaccattccaagccgcccgcatcgcttgtttccacctcctgggccgggg

SEQ ID NO: 228559 - DNA, 395 bp, Homo Sapiens; identical to SEQ ID NO: 194870

SEQ ID NO: 228560 - DNA, 673 bp, Homo Sapiens
ccaactttgtacaaaaaagttggctgatcagataaaacagtttaaggaatttctggggacctacaataaacttacagagacctgctttttggactgtgttaaagacttcacaacaagagaagtaaaacctgaagagaccacctgttcagaacattgcttacagaaatatttaaaaatgacacaaagaatatccatgagatttcaggaatatcatattcagcagaatgaagccctggcagccaaagcaggactccttggccaaccacgatagagaagtcctgatggatgaacttttgatgaaagattgccaacagctgctttattggaaatgaggactcatctgatagaatcccctgaaagcagtagccaccatgttcaaccatctgtcatgactgtttggcaaatggaaaccgctggagaaacaaaattgctatttaccaggaataatcacaatagaaggtcttattgttcagtgaaataataagatgcaacatttgttgaggccttatgattcagcagcttggtcacttgattagaaaaataaaccattgtttcttcaattgtgactgttaattttaaagcaacttatgtgttcgatcatgtatgagatagaaaaatttttattactcaaagtaaaataaatggaaatatcactgagcaattgtttatactg

SEQ ID NO: 228561 - DNA, 1110 bp, Homo Sapiens
  misc_feature (57)..(71): n is a, c, g, or t
ttggataatcattaactgctcagtaccagacgtggcaaatctcaagtgacagtggannnnnnnnnnnnnnngcccagcttatcaactcgtcccctcttccacaccttcccagcatcacagtcagaggtcagcaggaagctgagtcattaccttcttggtgacctcccccaccatcttgtctcacttggaaaccgttgtcagtttatttactatgcaatagacattcattgttttgtatccagctagctttggtttaatatgccactgctttgtctttctgttacacatacagttttgatttatttacaatatatgctgtgccattttgatttttatattgtttggttggttgaataaatttgcgacactcaaacacttgaggtgatagttgttaaaaacaataccagtatttgatccagtttcatctcaactatgttatacctggacattttagatgtttatcaaaggtcttttatggggaagaaagtaaatgtatgaaataataaatgtgtgacatttatagggaatgttggctctgaacaaacttttgaaaacttggttgacaaaattttggatcaactgaaaaaagcatgacttttgaaatctctgaatgccttggttctcagtattatcattctttattgaatttatttcttattaaaatatgtagtttttaagactttttttctgacagtattatgtaattttttagcgtgggtagatgggagtgtcgcttgtatgttatcgtacagctgacatgtatttttgtctattctttattatcttagtttcatgctatgtatgtaccataaccaacctattgcctatgagaaacatgtaagataatgtatttacagccattgttacaagtttataatgtatttttctatcttgttttatatgtatgttatataacattcaaaaagaatttttttcttgattgagaaaaggatacaaaatgcaaaatccacaattttgataactgaaaattgccaattgttttgcagtactttattatattgggtgtcttgtcttttttgggcttttagttagctaatgaatgaatacattagacacttttgggctttagttgggattttacataccttg

SEQ ID NO: 228562 - DNA, 1015 bp, Homo Sapiens
caggacgctcacacttagttttattagccacagtttcccacagttttctactcctaggaaatacacagctcaccaagggcacccagtcaccattctgtctgcttgcatggctgacactgttgctcaccgagggtgagcagatctgcaaagtcacccagggcctggtttcctcaggtacagagaaccccaaagaaagaagagccagaacttagagcccctttcttctccatatgggataggacacccaagacaaatgacccatgcatcatgaaacagaggcagggccctaagctgcccaagaggcctgggcacttggagttcctgccaacagccaggccactgaaccattgcctgtccaccctcccacagtggctaatccctggcctagttgtaaatgtcttttcagcgctgcacacttaatgcagtcggatgccttctgattactggtctctgagaccttcagctgctgaggtgcaagaatcaagcatgggcatgaaaggcaaagggctaccacagcagcatcgttctgcctccaccctgggctacgcgacccagcccagcaggctgtgacctaggagagctgctccagcctggggcatgaggggccctagagcaggatgccggggctaggagtggactgccctgctgatgggtcgtttttctgtgaagaagcttttcaacagtagcacctgactgaagctgaccacgaacagggcaatcgtctcgccaacagaccagtaagagactcggctattaaggtcttccgctcgggcccggtcctgggcctcccgcagccggtaatgcgtctgggagtcaatcaccgttttcagagcctcatggatggtcacgcaggcggactccatctgggcaggaagagaaaagcagtcacactgctaacccatagacaaatgtgggatccagcaaacagcaaatgctgttgtcaacatcctaggtgatatccactgaatgctaactatgagtctgtgctaagggttttacgtggttttatttccaa

SEQ ID NO: 228563 - DNA, 1220 bp, Homo Sapiens; identical to SEQ ID NO: 194871

SEQ ID NO: 228564 - DNA, 880 bp, Homo Sapiens
ttgggtctgtggctcccctcaaacaagtcctccgaggggcttgccttctctcgtgtccagtgaggtgctcagtgatcggcttaacttaaagaagcccgccccctccccttctccgtctgtcccaagagggtctgctctgagcctgcgttcctaggtggctcggcctcagctgcctgggttgtggccgccctagcatcctgtatgcccacagctactggaatccccgctgctgctccgggccaagcttctggttgattaatgagggcatggggtggtccctcaagaccttcccctaccttttgtggaaccagtgatgcctcaaagacagtgtcccctccacagctgggtgccaggggcaggggatcctcagtatagccggtgaaccctgataccaggagcctgggcctccctgaacccctggcttccagccatctcatcgccagcctcctcctggacctcttggcccccagccccttccccacacagccccagaagggtcccagagctgaccccactccaggacctaggcccagcccctcagcctcatctggagcccctgaagaccagtcccacccacctttctggcctcatctgacactgctccgcatcctgctgtgtgtcctgttccatgttccggttccatccaaatacactttctggaacaaatgcatggctccatgcctgtgtatctggactggtccctccaaaacgctattgccacgtcacctgccggagtcctcatctttgaagactggattcaagcatcacttctgagaggctcaatcctggtatttttccatctgcccctgatgagtctgcagccttcactcaaggtcccttcagccacaaagacagaaaacccaaacctgggattaagcaa

SEQ ID NO: 228565 - DNA, 862 bp, Homo Sapiens
ttggcggcgggcgggctggccaccacgggacaggaaggcacagagcatggagaatgatgaacttccgtcagcggatgggatggattggagtgggattgtatctgttagccagtgcagcagcattttactatgtttttgaaatcagtgagacttacaacaggctggccttggaacacattcaacagcaccctgaggagccccttgaaggaaccacatggacacactccttgaaagctcaattactctccttgcctttttgggtgtggacagttatttttctggtaccttacttacagatgtttttgttcctatactcttgtacaagagctgatcccaaaacagtgggctactgtatcatccctatatgcttggcagttatttgcaatcgccaccaggcatttgtcaaggcttctaatcagatcagcagactacaactgattgacacgtaaaatcagtcaccgttttttccctacgattacaaaactgccagtcctatatggagtctgatcacaagactgcagtttcttcacagatctcaggaagttgtcgtggggcagaggctttttaaaaacatgtgattagggagctatctttatctgaataataacgaatttttaggtaaaacctgagatagagtactacaaaatcatgttgatgacttcagattttggaagttaaatcatgtctgttatttgcattctttagaaacttgactaagtacctgaattcatatttctattctactgtgcaacatagtgatgattcagaaatttttctttggggaaaaaaatgaatatgaacatttccattgtgttaagtgtaaaaaagtccagacatgatcataaaatttaaatttttatac

SEQ ID NO: 228566 - DNA, 917 bp, Homo Sapiens
ttgggtgaacatggcgtgcgcccgttgtcacggccccgggcagagctctgctgcgggcgggcgctggacggctgcttcggggaggcgtccaggagctactgcggccgcgacatgaagggaacgcccctgacctggcctgcaacttcagcctttctcaaaatcggggcacggtcatcgtggagcgctggtggaaggtaccgctggccggggagggccggaagccgcgcctgcaccggcgacatcgcgtctataagctggtggaggacacgaagcatcggcccaaagaaaacctggagctcatcctgacgcagtcggtggagaatgttggagtccggggtgacctggtctcagtgaagaaatctttaggccggaatcgactccttcctcagggactggctgtatatgcatcccctgaaaacaagaagctgtttgaagaggagaaattgctgagacaagaaggaaaattagagaagatccagaccaaggcaggtgaggcgacagtgaaatttctaaaaagctgtcgcctggaggtagggatgaagaacaatgtcaaatgggagctgaaccctgaaatagttgcccgccacttctttaagaatcttggtgttgtggttgccccacatacattaaagttaccagaagagcctatcacacggtggggcgagtattggtgtgaggtgacggtaaatgggcttgatactgtgagagtgcctatgtctgtcgtgaactttgagaagcccaagaccaaaagatataagtactggttagcccagcaagctgccaaggctatggcccccaccagcccccagatctaaatctactctccctccaggcagcaaagcagaatcgggagcagtggagcagaaatgtgcaagcaccctgatctcactcccagctctgaccaaatacagaatttt

SEQ ID NO: 228567 - DNA, 910 bp, Homo Sapiens
ttgggttctcagcattcatcacagtgttgcaaatgaaggagatgaaagtaagtgacatcccccagtactcccagctggtgctgaatgtctgtgagaccctccaagaggaagtgattgcactcttcgaccagacccgccacagtctggcattaggcagtgccacagaggacaaggacagcatggagactgacgactgttctcggtcccggcacagggaccagcgtgatggggtgtgtgtcctgggcctgcacctggccaaggagctgtgtgaggtagacgaggatggtgactcctggctgcaggtaacccgcaggctccccatcctacccaccctcctcaccactctagaggtgagccttcgcatgaagcagaacctgcatttcactgaggccacattgcatctgctcctcaccctggctcgcactcagcagggagccacagcagtggctggagctggcatcacccagagcatttgtttgccccttctgagtgtgtaccagctgagcaccaacggcacagcacagacacctagtgcctctcggaagtccctggatgccccctcttggccaggagtctaccgcctgtccatgtccctgatggagcagctgctcaaaactctgcgctacaacttcctgcctgaggccctggacttcgtgggtgtccaccaggagcggaccttacagtgcctcaacgcagtgaggacagtgcagagtctggcctgcctggaggaggcggaccacaccgtgggttttattctgcagctctctaacttcatgaaggagtggcacttccacctgcctcagctcatgcgtgatatccaggtcaacctgggttacttgtgccaggcatgtacctctctcctgcacagtcgaaagatgctgcagcattacttacagaacaaaaatggggg

SEQ ID NO: 228568 - DNA, 878 bp, Homo Sapiens
tacaaaaaagttgggaccgggagcggctggagccggacgcgagcggggcgcgcgagttcgagcccagagccgacacgcagcaacaaagcttggggcttccttggtcgcacccaccacctgcctgcccactggtcagccttcagggaccctgagcaccgcctggtctctttcctgtggccagcccagaactgaagcgctgcggcatggcgcgcgcctgcctccaggccgtcaagtacctcatgttcgccttcaacctgctcttctggctgggaggctgtggcgtgctgggtgtcggcatctggctggccgccacacaggggagcttcgccacgctgtcctcttccttcccgtccctgtcggctgccaacctgctcatcatcaccggcgcctttgtcatggccatcggcttcgtgggctgcctgggtgccatcaaggagaacaagtgcctcctgctcactttcttcctgctgctgctgctggtgttcctgctggaggccaccatcgccatcctcttcttcgcctacacggacaagattgacaggtatgcccagcaagacctgaagaaaggcttgcacctgtacggcacgcagggcaacgtgggcctcaccaacgcctggagcatcatccagaccgacttccgctgctgtggcgtctccaactacactgactggttcgaggtgtacaacgccacgcgggtacctgactcctgctgcttggagttcagtgagagctgtgggctgcacgcccccggcacctggtggaagcgccgtgctacgagacgtgaagtgtggcttcagagaacctgctggctgtgggcatctttgggctgtgcacggcgctggtgcagatcctgggcctgaactttcgccatgaccatg

SEQ ID NO: 228569 - DNA, 964 bp, Homo Sapiens
aaaaacaaacatgagtgtgaagggcatggctatagccttggctgtgatattgtgtgctacagttgttcaaggcttccccatgttcaaaagaggacgctgtctttgcataggccctggggtaaaagcagtgaaagtggcagatattgagaaagcctccataatgtacccaagtaacaactgtgacaaaatagaagtgattattaccctgaaagaaaataaaggacaacgatgcctaaatcccaaatcgaagcaagcaaggcttataatcaaaaaagttgaaagaaagaatttttaaaaatatcaaaacatatgaagtcctggaaaagggcatctgaaaaacctagaacaagtttaactgtgactactgaaatgacaagaattctacagtaggaaactgagacttttctatggttttgtgactttcaacttttgtacagttatgtgaaggatgaaaggtgggtgaaaggaccaaaaacagaaatacagtcttcctgaatgaatgacaatcagaattccactgcccaaaggagtccaacaattaaatggatttctaggaaaagctaccttaagaaaggctggttaccatcggagtttacaaagtgctttcacgttcttacttgttgtattatacattcatgcatttctaggctagagaaccttctagatttgatgcttacaactattctgttgtgactatgagaacatttctgtctctagaagttatctgtctgtattgatctttatgctatattactatctgtggttacagtggagacattgacattattactggagtcaagcccttataagtcaaaagcatctatgtgtcgtaaagcattcctcaaacattttttcatgcaaatacacacttctttccccaaatatcatgtagcacatcaatatgtagggaaacattcttatgcatcatttggtttgtttataaccaattcattaaatgtaattc

SEQ ID NO: 228570 - DNA, 843 bp, Homo Sapiens
ttggcacttctccgagcgtgacgtgcggactccgctccactgcggcccgcccgcccgccggtctagccgccgcctccttcgctccctgagcacgccaggcgagggtcagctgccggggcgacgcggcgcggagagggcgggcgggggggctgtgggagcgccggtctctatatggcggcggctctgtcgggcctggctgtccggctctcgcgctcggccgccgcccgctcctatggggtcttctgcaaggggctgactcgcacgctgctcatcttcttcgacctggcctggcggctgcgtatcaacttcccctacctctacatcgtggcttccatgatgctcaacgtccgcctgcaggttcatattgagatccattgaaggccctcccagactgacgaaggcgtgacctcaggcccaccgcatccaagaacacgaagcatgagggacagaagagggcccctcggcacctgcctggcacaagtgcagcaggccggaggaggtgactcggacaaactatcatgcagccttaagaaaagaatgccggagggcccttggcctgcagatgcaccctcctggatgaataagcctgtggttgatggaaattcacaaagtgaggcattatcactggaaatgagaaaggatccgagcggggctggcctctggcttcacagtggcggcccagtgcttccatatgtgagagaatcagtaagaagaaatccagcctcagcagccactccgagcacagccgtgggtttgttccctgctccaacagagtgttttgctcgggtgtcctgcagtggtgttgaagctctggggcggcgagactggctgggaggagggccc

SEQ ID NO: 228571 - DNA, 946 bp, Homo Sapiens
  misc_feature (195)..(278): n is a, c, g, or t
gcccatcaaaaagctacaaccttgcattttttaaaagtattttctctacagagaatcttatccagctatacaaaaatctgtacagtttttatactgaagctagtatgagctgcacttgaattcacattcttagcaaaataattgcgtgagcacacacacacattccacacgcatcattaaaggatagccatttannnnnnnnnnnnnnnnnnnnnnnnnnnnnnnnnnnnnnnnnnnnnnnnnnnnnnnnnnnnnnnnnnnnnnnnnnnnnnnnnnnntgagcctgttggcctgccagggcccttctttcctgcttcacttttgcccttggcacgatatgcagcaatatccttttcatatttctcctttagcttagctgctttctgttcatatggttgtttatctttggctgactgctcagaccacatttcacccaatttctttgcagtatccccaatggataggccagggtgttcacttttgatctttgggcgatgttcagagcaaaacaggaagaaggcagatggtggccttttaggagcattggggtcctttttcttccccttcttatcacctttgggaggaacgtaatttttcatctccctgtcatagcgagctttgtcactttttgccatatcttcaaacttcgacttctcctttgcagacatggtcttccatctctccgaacacttcttggagaattccgcgaaattgacggaagagtccgggtgtttcttcttgtgctcttcccggcaggtctgcacgaagaaggcgtacgaggacattttgccccgcggcttgttggggtctcctttacccatgttgacagatccgcgtccacctggtgcgagcttttcctcagagtcccgcagagcggccggacccaacggagacgcttccctcacggggctccggcgtgaactggtttatctctaacgcaatccaa

SEQ ID NO: 228572 - DNA, 892 bp, Homo Sapiens; identical to SEQ ID NO: 194875
  misc_feature (631)..(684): n is a, c, g, or t

SEQ ID NO: 228573 - DNA, 1192 bp, Homo Sapiens
ttggggttcatgtaactagaaagtccataggtagtgctggctccaggtgaagacttgacccagtagttcagtatgtctctaaataccggactgacttttttctcactgttgcatcttctgtaggaccatttaagtctgggccacttaatggctgccagcattcctaagattacacttttccccatttatgtccaatcagaaaaagaaggcatctttgtaccagaaatctcagcaaaagccctaatattcacactgattaggcctgggtcacatgtccaccctgaccaatcactgtggccaggaggatgatacatgctaatttgcttattctatatcatggacaacacctttggggaaaagggtgggggtcagcctccccaaaatcacatggattccccaagtggaaactaggagcagggagttgcttgggtggccgctaacaccaggctactcttattttagcttgctaagttgagatcagctagacctgctttcttttctcctcagtcttgcatttccctcaatacaagctgcagcctctttcctcgtttctagtctcagaaggaaggagagggaagccattctcctctagggactcttcagtctcatttagatgatagtcccttttttttctacctccatattagagatggagctccttccttttcctgtttcttaatttttgtcttctcattcctgcttccctctcaccctattgccagttccaccaactagagtgaaagacttcctagccatttcattaaatctattctgtatccaccaggtggcagcatcttgtcatacgtgtcaggacttaggactgcggggtttaggttagatgtcacggaaaaagctagttctgtggtcaggcggcaccaatgagaaaggaatgcagaccctccagatgtatccttgggaaaagcagtaaaccaactaatatttattgaagacctactttgtcctctacatagggtagcttctgtcagggaatcttggttcttcccaagaaacactgattttctttcagggagacttcatgtgttcatttatttccaccacagcagattttaagaaattataatatgtaatatttgatatctataaagagtatatctaacgtgaataaattatgaagcatactaatgagtacctatgacccataacacatatacattaaaacattttaaatacc

SEQ ID NO: 228574 - DNA, 908 bp, Homo Sapiens
ttggtatagtcctgcctacttatctcctcccccagagtctagctggcgaaggacgatggcctggggcaatttccctgcagagaaggggcagttgtttcgactaccatctgcacttaacaggacaagctctgactctgcccttcatacaagtgtgatgaaccccagtccccaggatacctacccaggccccacacctcccagcatcctgcccagccgacgtgggggtattctggatggtgaaatggaccccaaagtacctgctattgaggagaacttgctagatgacaagcatttgctgaagccatgggatgctaagaagctatcctcatcctcttcccgacctcggtcctgtgaagtccctggaattaacatctttccatctcctgaccagcctgccaatgtgcctgtcctcccacctgccatgaacacggggggctccctacctgacctcaccaacctgcactttcccccaccactgcccacccccctggaccctgaagagacagcctaccctagcctgagtgggggcaacagtacctccaatttgacccacaccatgactcacctgggcatcagcaggggcatgggcctgggcccaggctatgatgcaccaggtgagtgactgtcctggccatgtgcccactgggtgctgcctgactggagggatgaaggggaggtaggtttgagcacctgagatcctgctgtgatcacccacaccgcctgtcacctctgcaccccaggattccctcacggcagttctcagccagtgataactggtagggtgtggtgtttcctagaaagaagaggaaaggcagtccccagatgggcagtgctgtcacggatagagtaaggaggacgttgtgttgccgctttcatagtctggtcactgccacccattctgggtggaa

SEQ ID NO: 228575 - DNA, 933 bp, Homo Sapiens
  misc_feature (706)..(714): n is a, c, g, or t
ttggcatttctttaagatttaacaaaagttcagccttttaggtagttgaagggaagtacaccccgtattcagcacatgttgagttttctacaccaggaattttcaatatgtatattgatgaaaacaagctcaattcaaactggacagttttaagataatgttaaaatcagcacttttagagacaacgaaggccaagaatcagtacagtagtattccaaaatgattttctctagaaatttgaaagtagatcgaacagaatgttgtcaaccgcctaccagtacaatcttttgtggaagatactttgaaatcactttctactttgttagtaaagttctgtctttccagagctgcaagttttaaagtgttacttatacagaccaaccaagaatagtgctgaattaagtggcatttagtatctagaagccattttgatccaagaagctacttaagtgtcaaagtcagcatgcagcacatgtagcttttctgtaaacaagggtgtgatatgaaagctgcttttttaagaagagtaaaagcacattccatatacgtaagtgaattttaaaaataaattgaggcaaacagttaagttttatttttagagcaacaagttaactgtaaatattttaatgttagtttgctcatctatgatctgagatcatgccgaagtgagaaaaatctccccaaaatacaatttaatgcattgggnnnnnnnnnctttaacagtaattccagccacaatctttagatcacccttgtaatgtgttacgggtccatttttcctggaatcgtttaatctaaagcagtttcccctgttttggagattttgtagttaattttaattttggctattgtttggaaaagatgagctgtctgtgtagatatgaagtatagttttttccataaaacagatgtttattttgtattaaaaaatac

SEQ ID NO: 228576 - DNA, 924 bp, Homo Sapiens
ttgggctcagttcagcatagcggagcggatccgatcggatcggagcggatcggagcacaccggagcaggctcatcgagaaggcgtctgcgagaccatggagaacggatacacctatgaagattataagaacactgcagaatggcttctgtctcacactaagcaccgacctcaagttgcaataatctgtggttctggattaggaggtctgactgataaattaactcaggcccagatctttgactacggtgaaatccccaactttccccgaagtacagtgccaggtcatgctggccgactggtgtttgggttcctgaatggcagggcctgtgtgatgatgcagggcaggttccacatgtatgaagggtacccactctggaaggtgacattcccagtgagggttttccaccttctgggtgtggacaccctggtagtcaccaatgcagcaggagggctgaaccccaagtttgaggttggagatatcatgctgatccgtgaccatatcaacctacctggtttcagtggtcagaaccctctcagagggcccaatgatgaaaggtttggagatcgtttccctgccatgtctgatgcctacgaccggactatgaggcagagggctctcagtacctggaaacaaatgggggagcagacgctgttggcatgagtacagtaccagaagttatcgttgcacggcactgtggacttcgagtctttggcttctcactcatcactaaacaaggtcatcatggattatgaaagcctggagaaggccaaccatgaagaagtctttagcagctggcaaacaagctgcacagaaattggaacagttttgtctccattcttatgggccagcattccactccctgacaaagccagttgacctgcctttggagtcgtcctggcatctcccacacaaaacccaagta

SEQ ID NO: 228577 - DNA, 913 bp, Homo Sapiens
actttgtacaaaaaagttggctcgggttcgtgaacttcccggaggcgcaatgagctgcattaacctgcccactgtgctgcctggctcccccagcaagacccgggggcagatccaggtgattctcgggccgatgttctcaggaaaaagcacagagttgatgagacgcgtccgtcgcttccagattgctcagtacaagtgcctggtgatcaagtatgccaaagacactcgctacagcagcagcttctgcacacatgaccggaacaccatggaggcactgcccgcctgcctgctccgagacgtggcccaggaggccctgggcgtggctgtcataggcatcgacgaggggcagtttttccctgacatcgtggagttctgcgaggccatggccaacgccgggaagaccgtaattgtggctgcactggatgggaccttccagaggaagccatttggggccatcctgaacctggtgccgctggccgagagcgtggtgaagctgacggcggtgtgcatggagtgcttccgggaagccgcctataccaagaggctcggcacagagaaggaggtcgaggtgattgggggagcagacaagtaccactccgtgtgtcggctctgctacttcaagaaggcctcaggccagcctgccgggccggacaacaaagagaactgcccagtgccaggaaagccaggggaagccgtggctgccaggaagctctttgccccacagcagattctgcaatgcagccctgccaactgagggacctgcgagggccgcccgctcccttcctgccactgccgcctactggacgctgccctgcatgctgcccagccactccaggaggagtcgggaggcgtggagggtgaccacaccttggcccttctgggaactctcctttgtgtggctgccccacctgcc

SEQ ID NO: 228578 - DNA, 378 bp, Homo Sapiens
ttggcatgctgggccccggggctgtgtgtgcgcagcgggcggcggcgcggcccggaaggctggcgcggcgacggcgttagcccggccctcggcccctctttgcggccgctccctccgcctattccctccttgctcgagatggatctgcccgtgggccccggcgcggcggggcccagcaacgtcccggccttcctgaccaagctgtggaccctcgtgagcgacccggacaccgacgcgctcatctgctggagcccgagcgggaacagcttccacgtgttcgaccagggccagtttgccaaggaggtgctgctctttttcttcaagcacaaaaacatggccagcttcttggggccactcaacatgtatggcttctggaaa

SEQ ID NO: 228579 - DNA, 1412 bp, Homo Sapiens
ggcgcagctgccttctggaaagttcagcagctgagggccttgagctcaatggtcgctttgggttcgcaaatccccggccagggacccgggaaggttttcaagttttgaattcggtgtgcgatgcgagccctgcagcctgtactcgcgctcctgcaggatctccacagggtcgaggccccgcggcttctggatgggggtgatgcggctctgcttctggtgcagtggcaccatgggcgcgggctgggccggctgcccgggggactgggtctgcggtggcatcacgggcgaggcggcgggtgggacggcagggggcgcgggggaagggcggcccgttggctgcgggggaatcagcttctgaggggtgctcgtgggggcagcagcattcgccatgggtccttcaggccagggcttgggaggccctccaggaggctggcctggcatcccggggggcacgcccgagggtcctgggggaggcatgttgggccctcccataccatgaggcctgctgtaatttggaggtgccgggccgggacccgggccggggccagggccagggccagggccgggtcctgttgcggacaccgagggtggaggtagcgttggcatctgctgctgcatcccgggcatcggccgcttgccctgcaccgccatctgcaggtggtcggggaggggctgccccctggccagcatcttgtaggccatgatctgagctctgagctggtgcagctggttctggttaaatggggttgggccccggttctgctgccccaaggcctgggggtcagcaccatccagcggggcacctcctggcccggaagacatctggggccccgaagacgggccactggctggaactggactagaggcatgctcagagccacccaggggcgaggggtaaccttgggagtgctggtccatggggctgggcgggggccccatcccagcatggccccctgaccgcatccccattcctttcatctggttgtagcgcgggtcgtccgacatgcccttctcatgcatggactccatgggcttgtgcatctggtgcatgttgtcctgagggtaccctccaggcccctgggtggggatggggtgtcctgctgagggcggccctgggctgggccccatcatgctgtgggcggagcccggcgagggacccgggctagggcccagcatggctccaggggaagggccagggcccggggaaggacctggccgaggagttccgcccaggggtgggtctggagtggacatcttcacgggagctgcagacagtggcctcctgcaggagccgccggcgccgtcgacttcccggcgcctcccccgcccctccgcgcggggccgggggcagaatgggcgtctcgcttctcttcacgaaacaaagaagccgccgccgccgcgaaacgagccaa

SEQ ID NO: 228580 - DNA, 919 bp, Homo Sapiens
ttggcaaaagcctgcaccactgcttgagtctccttttaaagatagagatcatttccagcttggcaccttatctcatactctcaacattaaagctactgggtacctggaattatctaattggccagaggtggcgcccgacccatcagttggaaatgtagaagtaatagagttggcaaaagaatggaccccagcaggaaaagcaaagcaagagaattctgctaagaagttttattctgaatctgaggaagaggaggactcttctgatagtagcagtgacagtgagagtgaatctggaagtgaaagtggagaacaaggcgaaagtggggaggaaggagacagcaatgaggacagcagtgaggactcctccagtgagcaggacagtgagagtggacgggagtcaggcctagaaaacaaaagaacagccaagaggaactcaaaagccaaaggaaaaagtgattctgaagatggggagaaggaaaatgaaaaatctaaaacttcagattcttcaaatgacgaatctagttcaatagaagacagttcttccgattctgaatcagagtcagaacctgaaagtgaatctgaatccagaagagtcactaaggagaaagaaaagaaaacaaagcaagatagaactcctcttaccaaagatgtttcacttctagatctggatgattttaacccagtatccactccagttgcacttcccacaccagctctttctccaagtttgatggctgatcttgaaggtttacacttgtcaacttcctcttcagtcatcagtgtcagtactcctgcatttgtaccaacgaaaactcacgtgctgcttcatcgaatgagtggaaaaggactagctgctcattatttctttccaagacagccttgcatttttggtgataagatggtctctatacaaataaca

SEQ ID NO: 228581 - DNA, 1178 bp, Homo Sapiens
  misc_feature (260)..(269): n is a, c, g, or t
tttggttcacttaatcatctcaatggagatggccctttcgtgccattcactcaaatctagaactcccaatatgtggctcacaaatacttcagtcatctacaaaagcatctggaaattagataattttagccagagtcagggacataaaacttctttaaagggatgcagtcaatcctggtattcaccacaaagaagatcctcatgtataaaaatgtggaatctgtgctgcttttaataatagaacctttaaggttcaaagnnnnnnnnnntgctttcctgaactacatcatttccagacacatcagccacacaaggagctgacaagacctgctgtttctattatagagaacgtgagactttaaaaccacatcaaaagaaaatggtgggagcttttctgctatgcagagaattccgcatagcactcctttgcccagactgggagacaaacatacccctccctcctgaactggatccccaccacctttccaaaggccactggacatgtctcttaaacgctgcatttcagctcttgatcattctgccctggggatcccttctctttaggttctttgttatggtctggggaaacactctgactttctatggtgttgacagcatctgagtccaatcttcttcttttcttcagttggttcaagtgggatttggattttatgtgcgctgcccattcgcgatccccaatgatgattcgatcacagaggtcacacaggtgataacttctcttgttctcagcttcattgtatggcatctttattggagtggctgtaggcttgtggccctggatgaaactttgcacgatttcaagagcaggttcaagaacagactcttcccacttcgagacatcagatacctctaagccatagacaggggggacaatgggaccaggtctgctcaaaaaacggtttttaacccatcggttttgtttccgggcatatctcttagttacttgtttcagagcctcaatacctttctttagaagctggttactagtctccagtgtgcattttccctcagtgatcaggtactcgtgaaattccttgaagccaattgattggaagataccatgttgatagtcctggctattttccgaaacattcttctgattatagcgtctgtgaaaatctcttagttcctccaagagcccagcagcaagcatccaa

SEQ ID NO: 228582 - DNA, 579 bp, Homo Sapiens
actttgtacaaaaaagttggcgcaggggcagcgcaagtttcaggcgcacaaacccgcaaagagtaagacggcagcggcagcctctgaaaagaatcggggcccaagaaaaggcggtcgtgttatcgctcccaagaaggcgcgcgtcgtgcagcagcaaaagctcaagaagaacctagaagtcggaatccggaagaagatcgaacatgacgtggtgatgaaagccagcagcagcctgcccaagaagctggcactgctgaaggccccagccaagaagaaaggggcagctgccgccacctcctccaagacaccttcctgaggacgctggccccagtgcaggccaacatcccaccccctacctccatatgggaccttgcaagtcatcccacaggctgcactgtcaggaagaggaccctgtcccccagcactgggcttcacctagaacttcagtgggggccaagggtgctgagaacccagcaatgaccaggaagatacagtcactaacttcatctgtccccgtgccccttcccaggtcctgcctccacaggtttaacccagaacaataaacctggctttgtcatc

SEQ ID NO: 228583 - DNA, 944 bp, Homo Sapiens; identical to SEQ ID NO: 194880
  misc_feature (191)..(222): n is a, c, g, or t

SEQ ID NO: 228584 - DNA, 880 bp, Homo Sapiens
tttgtacaaaaaagttggaccggagatggcgcctgccagcgggcggggcggcggcggcggcctcggacttgggctccgccgcagtgctcttggctgtgcacgccgcggtgaggccgctgggcgccgggccagacgccgaggcacagctgcggaggctgcagctgagcgcggaccctgagaggcctgggcgcttccggctggagctgctgggcgcgggacctggggcggttaatttggagtggcccctggagtcagtttcctacaccatccgaggccccacccagcacgagctacagcctccaccaggagggcctggaaccctcagcctgcacttcctcaaccctcaggaagctcagcggtgggcagtcctagtccgaggtgccaccgtggaaggacagaatggcagcaagagcaactcaccaccagccttgggcccagaagcatgccctgtctccctgcccagtcccccggaagcctccacactcaagggccctccacctgaggcagatcttcctaggagccctggaaacttgacggagagagaagagctggcagggagcctggcccgggctattgcaggtggagacgagaagggggcagcccaagtggcagccgtcctggcccagcatcgtgtggccctgagtgttcagcttcaggaggcctgcttcccacctggccccatcaggctgcaggtcacacttgaagacgctgcctctgccgcatccgccgcgtcctctgcacacgttgccctgcaggtccacccccactgcactgttgcagctctccaggagcaagtgttctcagagctcggtttcccgccagccgtgcaacgctgggtcatcggacggtgcctgtgtgtgcctgagcgcagccttgcctc

SEQ ID NO: 228585 - DNA, 953 bp, Homo Sapiens
tacaaaaaagttggggagatcgcaccaacctaaacttgcacgagccaccgttcgtgatcccaagacaggagtcctcactgtcgccagctaccgggtttccaaaagctcctggctagaggaagatgatgaccctgttgtggcccgagtaaatcgtcggatgcagcatatcacagggttaacagtaaagactgcagaattgttacaggttgcaaattatggagtgggaggacagtatgaaccgcacttcgacttctctaggcgaccttttgacagcggcctcaaaacagaggggaataggttagcgacgtttcttaactacatgagtgatgtagaagctggtggtgccaccgtcttccctgatctgggggctgcaatttggcctaagaagggtacagctgtgttctggtacaacctcttgcggagcggggaaggtgactaccgaacaagacatgctgcctgccctgtgcttgtgggctgcaagtgggtctccaataagtggttccatgaacgaggacaggagttcttgagaccttgtggatcaacagaagttgactgacatccttttctgtccttccccttcctggtccttcagcccatgtcaacgtgacagacacctttgtatgttcctttgtatgttcctatcaggctgatttttggagaaatgaatgtttgtctggagcagagggagaccatactagggcgactcctgtgtgactgaagtcccagcccttccattcagcctgtgccatccctggccccaaggctaggatcaaagtggctgcagcagagttagctgtctagcgcctagcaaggtgcctttgtacctcaggtgttttaggtgtgagatgtttcagtgaaccaaagttctgataccttgtttacatgtttgtttttatggcatttctatctattgtggctttaccaaaaaataaaatgtccctaccagaagcctt

SEQ ID NO: 228586 - DNA, 525 bp, Homo Sapiens
actttgtacaaaaaagttggctctcagcttccggctggtagtagttccgcttcctgtccgactgtggtgtctttgctgagggtcacattgagctgcaggttgaatccggggtgcctttaggattcagcaccatggcggaagacatggagaccaaaatcaagaactacaagaccgccccttttgacagccgcttccccaaccagaaccagactagaaactgctggcagaactacctggacttccaccgctgtcagaaggcaatgaccgctaaaggaggcgatatctctgtgtgcgaatggtaccagcgtgtgtaccagtccctctgccccacatcctgggtcacagactgggatgagcaacgggctgaaggcacgtttcccgggaagatctgaactggctgcatctccctttcctctgtcctccatccttctcccaggatggtgaagggggacctggtacccagtgatccccaccccaggatcctaaatcatgacttacctgctaataaaaactcattggaaaaaa

SEQ ID NO: 228587 - DNA, 927 bp, Homo Sapiens
ggagaggtccctttccagaggccccggaacccttcctttcgggcaatggttttgtaggcattgacggtgctttggtatctccgaccacctccagcccgggcttgagcttggaatcggacctttaccacatccgtgggctgggccacagccacagccagggcacctgtggtgctgctgctaggaggcggctcccaatgctggcatgctcagagcccttggtgtagaactgtttgacagaatcatacaggccgatgcggacagaggcaaagctcatttggcgctgcaggccggcaaccagcccattgtagaggcttcgggggccctcagtacgcaccatggtcagaatggtgcccatcacaccgcggtactgggcgctggctgtagcgcgcactggcccctgactttctccttggatctgtaaccggactttagcagtatccagaggaaaggtgatgagatctgcgatgcaggcagctgtgccagccccaagaaacttcacagtggcagtagggggcacatctgtggccttgaacccaaccatgatgctgatttcctgctacgtcccaggagatggagaaaaactggagacaggggcacctttaatcagcaacaagacgagatagaggaactctgccggaatccggctttgtaaggtctcacggtgaggcctccaagatcaagcttctctaaaggtgtcccattcttcaaagctgccagtggctatcatggcccgatccccttggttttccatagaaaatgggtgggagacgaaacacctaatggtcatactatgtgtccgagccgcagggagaacacggcagtgcgtgcggctgtgtctgtcggctggcggagggcgcgtcggacgagccgggcgagcgtggacagtcaatcccaaggcgcgcgcagctgggcttcgcagtgggccaa

SEQ ID NO: 228588 - DNA, 1222 bp, Homo Sapiens
  misc_feature (989)..(1028): n is a, c, g, or t
gccccagcccaacagccgggatggggcagggagcgtccctcaggccggcggcggggtcaccggcggaaacctacccagtgcatgcccctacgcggcctaccggaagaaggggaaaccgaaagcccctagagcaatgggaataaataagagtccctgccagaaggaaggtggcctgtgcgtccccgtctgtcccatgtagaagccggaatctggaggtgttcggatcagggccagtgacagccccaggcccggggcaggggaagctggaggcctggccgccaggcagaatgacaccccaagccaggcgttcgaggggctggggcagctctcctaaaatgaccctctgccaatgacaccacaccctcagtcccttcacacagaacgcggtaatttctgtaacttgtttccttaccccccagaagcagcaatcaccccatcagcaaagttgccggcaggcagagctcccaatttgggctttcggtgtgcagcgctccgtgtctaaccagcacagggactgtcggtacctcctggggacggggacagggacaggccctcttgtccttccaccaaatcttccaaaggcccccgggaaaaagccgtcaatccgggaacagccaccttctcgcctcctggccacagggccagtcctggccaaggcccctcgcaatggggccaaaagcaccttcctcaccggtgcggggccctgcgccgagtctaggcgggaagcagcttggcttctgagtccagcggagaacgagcagcttccaggctcggcgggcggctaccccagcagcctgatgccccgcagaaagaagccactggaagctaaaaccaacaacaaaactcctccggccgcggcacaggtgttgctcctcttctccaaaagcgctggcttgtttaaactgtttctggaagcttctcaaatctcccaggtccaccgctaagattttacagacaaacttaggaaagtattcttcagtactcctttnnnnnnnnnnnnnnnnnnnnnnnnnnnnnnnnnnnnnnnncccttattttctttaaatgaaggccctcggagaacacaggcagcgcgacctcggcgcgtccggtaggcgtggacagacgcgccctcccggggctctgccccgcacgctgctgtctttgcaaggagcctgctcgggcacagaaatgcgaagtttttttatacgggctaagacgtagccaacttttttgtacaaag

SEQ ID NO: 228589 - DNA, 912 bp, Homo Sapiens
ttggctgcgccggaggagttctgcgtctcggggtggtgactgggtccagaatggcttcggattcggggaaccaggggaccctctgcacgttggagttcgcggtgcagatgacctgtcagagctgtgtggacgcggtgcgcaaatccctgcaaggggtggcaggtgtccaggatgtggaggtgcacttggaggaccagatggtcttggtacacaccactctacccagccaggaggtgcaggctctcctggaaggcacggggcggcaggcggtactcaagggcatgggcagcggccagttgcagaatctgggggcagcagtggccatcctgggggggcctggcaccgtgcagggggtggtgcgcttcctacagctgacccctgagcgctgcctcatcgagggaactattgacggcctggagcctgggctgcatggactccacgtccatcagtacggggaccttacaaacaactgcaacagctgtgggaatcactttaaccctgatggagcatctcatgggggcccccaggactctgaccggcaccgcggagacctgggcaatgtccgtgctgatgctgacggccgcgccatcttcagaatggaggatgagcagctgaaggtgtgggatgtgattggccgcagcctgattattgatgagggagaagatgacctgggccggggaggccatcccttatccaagatcacagggaactccggggagaggttggcctgtggcatcattgcacgctccgctggccttttccagaaccccaagcagatctgctcttgcgatggcctcaccatctgggaggagcgaggccgcccatcgctggcaagggccgaaaggagtcagcgcagccccctgcccacctttgagcaggacctcaccttgggctctgttgctgtcctccagg

SEQ ID NO: 228590 - DNA, 1232 bp, Homo Sapiens
  misc_feature (1037)..(1045): n is a, c, g, or t
ttgggtaatgttccctgcagggttcatcaccagcagccagtcggcagcttatgctatcagcaagtttgtcagtggggtgctgtctgaccagatgagtgctcgctggctcttctcttctgggctgctcctggttggcctggtcaacatattctttgcctggagctccacagtacctgtctttgctgccctctggttccttaatggcctggcccaggggctgggctggcccccatgtgggaaggtcctgcggaagtggtttgagccatctcagtttggcacttggtgggccatcctgtcaaccagcatgaacctggctggagggctgggccctatcctggcaaccatccttgcccagagctacagctggcgcagcacgctggccctatctggggcactgtgtgtggttgtctccttcctctgtctcctgctcatccacaatgaacctgctgatgttggactccgcaacctggaccccatgccctctgagggcaagaagggctccttgaaggaggagagcaccctgcaggagctgctgctgtccccttacctgtgggtgctctccactggttaccttgtggtgtttggagtaaagacctgctgtactgactggggccagttcttccttatccaggagaaaggacagtcagcccttgtaggtagctcctacatgagtgccctggaagttgggggccttgtaggcagcatcgcagctggctacctgtcagaccgggccatggcaaaggcgggactgtccaactacgggaaccctcgccatggcctgttgctgttcatgatggctggcatgacagtgtccatgtacctcttccgggtaacagtgaccagtgactcccccaagctctggatcctggtattgggagctgtatttggtttctcctcgtatggccccattgccctgtttggactcatagccaacgagagtgcccctcccaacttgtgtggcacctcccacgccattgtgggactcatggccaatgtgggctgctttctggctgggctgcccttcagcaccattgccnnnnnnnnncagttggagcacagccttctgggtggttgaagtgatttgtgcggccagcatggctgccttcttcctcctacgaaacatccgcacctagatgggccgagtgtccaagaaggctgagtgaatagagtcctgattccggagcaccatccaatggtgtccttccccctgcacgctctgctgcgagaaaagg

SEQ ID NO: 228591 - DNA, 1007 bp, Homo Sapiens
ttggcccgctggctgtgatccaaaatcccttcagcaatggtggcagtccggcggccgaggctgtcagcggggaggcacgatttgcctatttcccagcgtccagtgtgggagatactacggctgtgtccgtacagaccacagaccagagcttgcaggctggaggccagttctacgtcatgatgacgccccaggatgtgcttcagacaggaacacagaggacgatcgccccccggacacacccttactctccaaaaattgatggaaccagaacaccccgagatgagaggagaagagcccagcacaacgaagtggagcggaggcggagggacaagatcaacaactggatcgtccagctttcgaaaatcattccagactgtaacgcagacaacagcaagacgggagcgagtaaaggagggatcctgtccaaggcctgcgattacatccgggagttgcgccagaccaaccagcgcatgcaggagaccttcaaagaggccgagcggctgcagatggacaacgagctcctgaggcagcagatcgaggagctgaagaatgagaacgccctgcttcgagcccagctgcagcagcacaacctggagatggtgggcgagggcacccggcagtgacgcccgccaccaccgcgcagccgccgccgcccacgccggcctctgctgcccccttccccagcccttagcacagagagggacacatgcccctcccccagctgcgtttttttatagtagatttttaacaaaaaatggggagaaataatgcatttctgtggatacagtgcccaccgccctcctccacttggaaacggtatcctccctgcccatccgtctgtctgtcgcccttctcccgggccctcactaagccccggcacttctagtggtctcacctggaggcaagagggaggggacagaggccctgccacgtcccgctgcctcctgctctctggaggtactgagacagggtgctgatgggaaggaggggagccctttgggggggcc

SEQ ID NO: 228592 - DNA, 395 bp, Homo Sapiens
ctttgtacaaaaaagttggattagccttcgcggggcaaaatggagctcgaggccatgagcagatataccagcccagtgaacccagctgtcttcccccatctgaccgtggtgcttttggccattggcatgttcttcaccgcctggttcttcgtttacgaggtcacctctaccaagtacactcgtgatatctataaagagctcctcatctccttagtggcctcactcttcatgggctttggagtcctcttcctgctgctctgggttggcatctacgtgtgagcacccaagggtaacaaccagatggcttcactgaaacctgcttttgtaaattacttttttttactgttgctggaagtgtcccacctgctgctcataataaatgcagatgtatagca

SEQ ID NO: 228593 - DNA, 652 bp, Homo Sapiens
ttggggttccgcgatggtaggcggcggcggggtcggcggcggcctcctggagaatgccaaccccctcatctaccagcgctctggggagcggcctgtgacggcaggcgaggaggacgagcaggttcccgacagcatcgacgcacgcgagatcttcgatctgattcgctccatcaatgacccggagcatccactgacgctagaggagttgaacgtagtagagcaggtgcgggttcaggttagcgaccccgagagtacagtggctgtggctttcacaccaaccattccgcactgcagcatggccacccttattggtctgtccatcaaggtcaagcttctgcgctcccttcctcagcgtttcaagatggacgtgcacattactccggggacccatgcctcagagcatgcagtgaacaagcaacttgcagataaggagcgggtggcagctgccctggagaacacccacctcttggaggttgtgaatcagtgcctgtcagcccgctcctgagcctggcctttgacccctcagcctgcatactggtatcctggtcccagctcctgccagggctgttaccgttgttttcttgaatcactcacaatgagaaactaacattttgctttttgtaataaagttaatttatattcagttcccagc

SEQ ID NO: 228594 - DNA, 877 bp, Homo Sapiens
  misc_feature (716)..(738): n is a, c, g, or t
ttggcaagaaagtattaaaagttgctcatgtagaacatgaagaaaccttatccagccgaagaagggaactaattcagaagttgaagtctttcatcagcttctatagtgctttgcctggctacatctgcagccatagccctgtggcggaaaacgacaccctttgctggaatggacaagaactcgtggagagatacagccaaaaggcagcaaggaatggaatgaaaaaccagttcaatctccatgagctgaaaatgaagggccctgagccagtggtcagtcaaattattgacaaactgaagcacattaaccagctcctgagaaccatgtctatgcccaaaggtagagttctggataaaaacctggatgaggaagggtttgaaagtggagactgcggtgatgatgaagatgagtgcattggaggctctggtgatggaatgataaaagtgaagaatcagctccgcttccttgcagaactggcctatgatctggatgtggatgatgcgcctggaaacagtcagcaggcaactccgaaggacaacgagataagcacctttcacaacctcgggaacgttcattccccgctgaagcttctcaccagcatggccatctcggtggtgtgcttcttcttcctggtgcactgactgcctggtgcccagcacatgtgctgccctacagcaccctgtggtcttcctcgataaagggaaccactttcttannnnnnnnnnnnnnnnnnnnnnngttatcctgtatacctcctccagccatgaagtagaggactaaccatgtgttatgttttcgaaaatcaaatggtatcttttggaggaagatacattttagtggtagcatatagattgtccttttgcaaagaaagaaaaaa

SEQ ID NO: 228595 - DNA, 742 bp, Homo Sapiens
ttggctttgagtcatgagaatgattctctccacctggtgctcatatgaaggtgggagtgatttctagattgggcccctactgggtaagatctcacttggtctgagaaaagtgactgctccagaaaggaagaggtatgggagtcatagggtggctactgcattccactcagctaattatgatccaggacttggcgctggacattggcagttctgctctgaatgaagtcagaacggaaccaaaatggcctcaggaaggaatgccagtgtttcccaagacctcctggagatgcactcacaccagactgcacagacccctccacattatgccacacacggcctagacgttgtgtttcctcagccattttccctctgctgccccagtttactctgtccaaaaccctaaggttcttctctcacttgaacacagacgaccttgcttgggtgatgagacatcccctttatctcttcctctactgctggccaagacctgtcactttataagaagctcagatgcagcagtgctggagagctctctctttatgcaaaaatctcatttcaccaggagctttcagaagtttcacctgggctaaattcagcagcatttctgttaggatatttagatggaggttttattttcacacttggattcttgctctgtaccaatatttgcctccttttctgtgactgaactgggtttttctgacatgcctagactcctaataaaggtatttcttccttggtg

SEQ ID NO: 228596 - DNA, 1104 bp, Homo Sapiens
ctttgtacaaaaaagttgggcctgagccctgcgggtgactgcttcagggcttctccgcgactggaccgggcgccgctcgaaagcacgccctccattcgcactgcttgttgggctcatcatgaagcgcttgggctccgtgcagcggaaaatgccgtgtgtgtttgtgacggaggtgaaagaggagccttcctccaaaagggagcatcagccatttaaagttttggcaactgaaactgtaagtcacaaggcattagatgcagatatatacagtgcaattccaacagaaaaagtggatggaacatgttgttatgttactacctataaagatcagccatacctttgggctcgactagatagaaaacccaacaaacaagctgaaaaaagatttaaaaattttctacattcaaaagaaaacccaaaagaatttttttggaacgttgaggaggacttcaaaccagctccggagtgctggataccagcaaaggagacagaacaaataaatgggaacccagtgcctgatgaaaatggacacattcctggttgggtaccagtagagaaaaacaacaaacagtattgctggcattcctctgtagttaattatgaatttgaaattgccctggtactaaaacatcatcctgatgattctggacttttggaaattagtgcagtgccactttcagatctctttagaacaaacactggaactcataggaacaaatatcaatggaaacccatatgggttagggagcaagaaacatccattacatcttcttataccacatggagcatttcaaataagaaatctacccttcattgaagcacaatgatctcgtgtcctggtttgaagattgcaaagagggtaaaattgaaggaatagtgtggcattgcagtgatggctgtttaataaaggtccatcgccatcatcttggcttatgctggccaattccagatacttacctgaattcaagaccagttattatcaacatgaacctgaacaaatgtgactctgcctttgatattaagtgtttgtttaatcattttttaaaaataaataatcacaaatttgttacactcaaagatataatatttgatgtataaaatgca

SEQ ID NO: 228597 - DNA, 1294 bp, Homo Sapiens
ttggctcctcccccagagatgtcaggaaccatgctgatgctggccgttctgctgccactggccttctttctgctccttgccaccgtcttctcctgcatctggaagagccacccttctctctgcaggaaactgggatcgctgctcaagaggcgtccgcagggagagggacccaatcctgtagctggaagctgggagcctccgaaggcccatccatacttccctgacttggtacagccactgctacccatttctggagatgtttccccagtatccactgggctccccgcagccccagttttggaggcaggggtgccgcaacagcagagtcctctggacctgaccagggagccgcagttggaacccggggagcagagccaggtggcccacggtaccaatggcattcatgtcaccggcgggtctatgactatcactggcaacatctacatctacaatggaccagtactggggggaccaccgggtcctggagacctcccagctacccccgaacctccataccccattcccgaagagggggaccctggccctcccgggctctctacaccccaccaggaagatggcaaggcttggcacctagcggagacagagcactgtggtgccacaccctctaacaggggcccaaggaaccaatttatcacccatgactgactgagtctgagaaaaggcagaagaaggggggcacaagggcaccttctcccttgaggctgccctgcccacgtgggattcacaggggcctgagtagggcccggggaagcagagccctaagggattaaggctcagacacctctgagagcaggtgggcactggctgggtacggtgccctccacaggactctccctactgcctgagcaaacctgaggcctcccggcagacccacccaccccctggggctgctcagcctcaggcacggacagggcacatgataccaactgctgcccactacggcacgccgcaccggagcacggcaccgagggagccgccacacggtcacctgcaaggacgtcacgggcccctctaaaggattcgtggtgctcatccccaagcttcagagaccctttggggttccacacttcacgtggactgaggtagaccctgcatgaagatgaaattatagggaggacgctccttccctcccctcctagaggagaggaaagggagtcattaacaactagggggttgggtaggattcctaggtatggggaagagttttggaaggggaggaaaatggcaagtgtatttatattgtaaccacatgcaaataaaaagaatgggacct

SEQ ID NO: 228598 - DNA, 680 bp, Homo Sapiens
gagcaatgcttttcctataagaaggcaactttgtacaaaaaagttgggtcaatgtcagtggtactgaggcagacgttgtggcggagaagggcagtggctgtagctgccctttccgtttccagggttccgaccaggtcgttgaggacttccacatggagattggcacaggaccagactcaagacacacaactcataacagttgatgaaaaattggatatcactactttaactggcgttccagaagagcatataaaaactagaaaagtcaggatctttgttcctgctcgcaataacatgcagtctggagtaaacaacacaaagaaatggaagatggagtttgataccagagagcgatgggaaaatcctttgatgggttgggcatcaacggctgatcccttatccaacatggttctaaccttcagtactaaagaagatgcagtttcctttgcagaaaaaaatggatggagctatgacattgaagagaggaaggttccaaaacccaagtccaagtcttatggtgcaaacttttcttggaacaaaagaacaagagtatccacaaaataggttggcactgactatatctctgcttgactgtgaataaagtcagctgtgcagtatttatagtccatgtataataaatacatctcttaatctcctaataaattggacctttaaactac

SEQ ID NO: 228599 - DNA, 547 bp, Homo Sapiens
  misc_feature (234)..(242): n is a, c, g, or t
ttggattttaatttattcgtgcgtcattttctgattctcatcattgggagatcttaaatcttagcaagcattagcaatattaaatgccaaaattccattgaaactttcaagttggagcaattgtctgtgtttgaaaagatgaaataaaaataataatcaagggcaaagctttgagtgcccagaagggaaagctgtaccagttgctaacctgtcttgtttcaggagccaccatgnnnnnnnnncagtgttaacaacaatcatgataattaaattaaaacactagtttgttcacttgtaggactgcagttctgaattttgggttaaaggttttggctgctgtaagaatgtgaatttgaatgtattttgaattgtaagagcaaaagaacgtttttgtacaattttttttcatttaattggaatgatcttcaggtttctacaaatagggtaattgtaaatttaaagcattagcatttattggtgaataatgtatatatccccattccaagaaatataagtgagtgaagttgaaataaaatctttaaaattt

SEQ ID NO: 228600 - DNA, 557 bp, Homo Sapiens; identical to SEQ ID NO: 194884
  misc_feature (249)..(257): n is a, c, g, or t

SEQ ID NO: 228601 - DNA, 1017 bp, Homo Sapiens
ttgggccttttacttcggcccgcttcttctggtcactccgccaccgtagaatcgcctaccatttggtgcaagcaaaaagcaatcagcaattggacaggaaaagaatggcattgaagcagatttccagcaacaagtgctttgggggattgcagaaagtttttgaacatgacagtgttgaactaaactgcaaaatgaaatttgctgtctacttaccaccaaaggcagaaacaggaaagtgccctgcactgtattggctctcaggtttaacttgcacagagcaaaattttatatcaaaatctggttatcatcagtctgcttcagaacatggtcttgttgtcattgctccagataccagccctcgtggctgcaatattaaaggtgaagatgagagctgggactttggcactggtgctggattttatgttgatgccactgaagatccttggaaaaccaactacagaatgtactcttatgtcacagaggagcttccccaactcataaatgccaattttccagtggatccccaaaggatgtctatttttggccactccatgggaggtcatggagctctgatctgtgctttgaaaaatcctggaaaatacaaatctgtgtcagcatttgctccaatttgcaaccctgtactctgtccctggggcaaaaaagcctttagtggatatttgggaacagatcaaagtaaatggaaggcttatgatgctacccaccttgtgaaatcctatccaggatctcagctggacatactaattgatcaagggaaagatgaccagtttcttttagatggacagttactccctgataacttcatagctgcctgtacagaaaagaaaatccccgttgtttttcgattgcagagggttatgatcatagctactacttcattgcaacctttattactgaccacatcagacatcatgctaaatacctgaatgcatgaaaaacttcaaataagagaatctcttcaggattataaagttgtaaaatgcaactgtattgctgagc

SEQ ID NO: 228602 - DNA, 360 bp, Homo Sapiens
  misc_feature (160)..(172): n is a, c, g, or t
ttggcacttctcgcctgtcagtgattccatgtttcgtaacgggggattctctgcctttttgtatcaaagaacaagcaaatggacccccgcccgctgcaggcgcccatagccatcgggtctctaaagctgagtggctagcagcgtttgtttgtttgtttgnnnnnnnnnnnnnctgaaggtgggacagtcacttcctcctccctccccacccctgtcgcatccacgtgcgacctggaggactggtcagaaccgttactgtgaatgagtgaagatcctggaggaccctgggccccaggccagctcccatcgctgggggacggtgaacggccatgtgttaatgttacgatgtttttaaaagac

SEQ ID NO: 228603 - DNA, 783 bp, Homo Sapiens
  misc_feature (704)..(726): n is a, c, g, or t
ctttgtacaaaaaagttgggtgttctccgagttcctgtctctctgccaacgccgcccggatggcttcccaaaaccgcgacccagccgccactagcgtcgccgccgcccgtaaaggagctgagccgagcgggggcgccgcccggggtccggtgggcaaaaggctacagcaggagctgatgaccctcatgatgtctggcgataaagggatttctgccttccctgaatcagacaaccttttcaaatgggtagggaccatccatggagcagctggaacagtatatgaagacctgaggtataagctctcgctagagttccccagtggctacccttacaatgcgcccacagtgaagttcctcacgccctgctatcaccccaacgtggacacccagggtaacatatgcctggacatcctgaaggaaaagtggtctgccctgtatgatgtcaggaccattctgctctccatccagagccttctaggagaacccaacattgatagtcccttgaacacacatgctgccgagctctggaaaaaccccacagcttttaagaagtacctgcaagaaacctactcaaagcaggtcaccagccaggagccctgacccaggctgcccagcctgtccttgtgtcgtctttttaatttttccttagatggtctgtcctttttgtgatttctgtataggactctttatcttgagctgtggtannnnnnnnnnnnnnnnnnnnnnnaaattaagcctcggttgagcccttgtatattaaataaatgcatttttgtcctttttt

SEQ ID NO: 228604 - DNA, 853 bp, Homo Sapiens; identical to SEQ ID NO: 194886
  misc_feature (774)..(796): n is a, c, g, or t

SEQ ID NO: 228605 - DNA, 711 bp, Homo Sapiens
ttgggtaattaacatcttttttgtttaggcatgttcaattaatgctgtatctatcatagctttgctcttacctgaagccttgtccccacccacacaggacagccttcctcctgaagagaatgtctttgtatgtccgaagttgagatggcctgccctactgccaaagaggtgacaggaaggctgggagcagctttgttaaattgtgttcagttctgttacacagtgcattgccctttgttgggggtatgcatgtatgaacacacatgcttgtcggaacgctttctcggcgtttgtcccttggctctcatctcccccattcctgtgcctactttgcctgagttcttctacccccgcagttgccagccacattgggagtctgtttgttccaatgggttgagctgtctttgtcgtggagatctggaactttgcacatgtcactactggggaggtgttcctgctctagcttccacgatgaggcgccctctttacctatcctctcaatcactactcttcttgaagcactattatttattcttccgctgtctgcctgcagcagtactactgtcaacatagtgtaaatggttctcaaagcttaccagtgtggacttggtgttagccacgctgtttactcatacagtacgtgtcctgtttttaaatataccattattcttagaaataaattcaaatctgtatacttacatttcgaaaaga

SEQ ID NO: 228606 - DNA, 1181 bp, Homo Sapiens
ggattcttattaaccaacatacttagtcttgacctggatgaatttacaaaagccagacaatgggatacagattaatgtggtttaatactgagattaatcaacattgccctttttccctgccaaaggcttattttctagacctgcttcactatgactactaaaagtgtacaactaaaattttattagaaatcgctcagcttacacactccaatcaggaagttatttaaatcacctcagataaaacctttgtgacctaacctaatacatcatatgcagatcatgaatactttcagaaaagaatcatttcaatatgtcaaggacatagtatctatgtgaataaaatgtgtgcttaaatgtctcactgtaaggaaaaaaaatcagtcaggcttcatatcaattagacaacttttactaaatgagaaaactacatttaaaatgtgctttaaaacaaaacggaattagaaaaaaagacatatgcattttaaagaacttttgcactgtgctgaaaatgaaatatctcttgcagtaagtaatacaatgtgccaattcataaaatgtaagttaacaggtttctcaatttaacattttcaaagacgatattaaggtcaaaaatgtcacatctatggtagcacatatagaagggcattatagatatgatgtccatccctatgaagcttacaaatttgacaatgctcaataaaagcttttagaatcacatccaatagtgtcacagtcaaagaatcacaaatctgtgtcctgtaagttctctccttctaaaatcttcatgttaacttttctactcattgccatttgttaatactaacccttaaaaaaaagaaataggaaaagaaaggctgcaataaacttgatcaggtacagaaattattgctactatacttcactacaaagcttgtctatacagtatcatatgacctttgattatgaaaaaatcagaataaaaatctttagtgacataagccttacaatcgtatacaacattcacatggcaatattagacagttaagcacccaatacccatagttgacaaaatgtcccactgaccagcattcatttaaatacatccttcgtatagagggaggaaaaagagacagtgtcagctttccaaggcttgtcaaaaaaggattttcatgtactgtggatttaaaaacaaacaacaactc

SEQ ID NO: 228607 - DNA, 1117 bp, Homo Sapiens
cctataaaagccaactttgtacaaaaaagttggctgcagatccccccggtcagccgcgcctacaccactgcctgcgtcctcaccaccgccgccgtgcagttggaattgatcacaccttttcagttgtacttcaatcctgaattaatctttaaacactttcaaatatggagattaatcaccaacttcttattttttgggccagttggattcaattttttatttaacatgatttttctatatcgttactgtcgaatgctagaagaaggctctttccgaggtcggacagcagactttgtatttatgttcctttttggtggattcttaatgaccctttttggtctgtttgtgagcttagttttcttgggccaggcctttacaataatgctcgtctatgtgtggagccgaaggaacccctatgtccgcatgaacttcttcggccttctcaacttccaggccccctttctgccctgggtgctcatgggattttccttgttgttggggaactcaatcattgtggaccttttgggtattgcagttggacacatatattttttcttggaagatgtatttcccaatcaacctggtggaataagaattctgaaaacaccatctattttgaaagctatttttgatacaccagatgaggatccaaattacaatccactacctgaggaacggccaggaggcttcgcctggggtgagggccagcggcttggaggttaaagcagcagtgccaataatgagacccagctgggaaggactcggtgatacccactgggatcttttatcctttgttgcaaaagtgtggacacttttgacagcttggcagattttaactccagaagcactttatgaaatggtacactgactaatccagaagacatttccaacagtttgccagtggttcctcactacactggtactgaaagtgtaatttcttagagcccaaaaactggagaaacaaatatcctgccacctctaacaagtacatgagtacttgatttttatggtataaaggcagagccctttcttcctcttcttgatagatgaggccatggtgtaaatggaagtttcagagaggacaaaataaaacggaattccctttttctctcactgt

SEQ ID NO: 228608 - DNA, 598 bp, Homo Sapiens
  misc_feature (394)..(440): n is a, c, g, or t
actttgtacaaaaaagttgggaaacaaattttagtccttctaactgtgctaaaacttggatatttgtgaaaactccttaccaccatacaagcatcagaagagctctcttgttgttagcacttattgtttgcaagaacagaatacatccttttatccttttatgaaaaatgacaagtgaaggcaaaaggggaaggttatttgatctggaagatgagtgttctgatgtggtggcttttgcaaaaatctttattggtgttgaaaactggaaaaaataactcatccagaattcatattgtcttgacaagaactatggttctctgtttttagatattgtggaaaatgtttttgggcatttttctctgattttatttcttctcccccacccctttttctnnnnnnnnnnnnnnnnnnnnnnnnnnnnnnnnnnnnnnnnnnnnnnngaagagagaaggaaattttatcaattaaaaatgctgtgtgataaaatcccagcccagattgctcagctgtttgtacctgacttgccgcctgcataggagccagttctgttccttctgactagcccctcttcctccaggggagaacttccaaatgttaa

SEQ ID NO: 228609 - DNA, 546 bp, Homo Sapiens
tacaaaaaagttggcactgaagaacccttccaatggcatcagtgtgcagcaaatttgttcttttggtttcatcactaacaaaagtgcctcatcataaaaatacagttggtttttagggtgccatattgttaaaattagataacttacttacattgaataaacgaatgcgttttattggtaacagatatcattacatttaccagttttaacacaggtggatacagaacttccattctttagtcattccaggtggatctgagttttatattcaaacttttaatacagtttttgagttttgtgtgacttgaatttttaatctttctgtaaaatacgtaacttaaatgaacatattaaatgtgtatcttttcttcagataccagatttgatataatgttgtaacataggtgtgtagatagtggatcctggatggaactggcttctttatcgagaagaatataattctgcatgaggacttaatgaatccaaacctgtgtcatgcctgtgtgcatacccaattaaacactggaaataaaaattgttttggtg

SEQ ID NO: 228610 - DNA, 1226 bp, Homo Sapiens
  misc_feature (1003)..(1016): n is a, c, g, or t
ttggggatatttatttaaacaaatgtgtaattttgagtacagaattcaacagttacctccaaaaaagaaacattgttaatataatttaacagaagttgtgaaactaaaattttctaagattaactggtagttcattgtaaatgaacataatgaacagaatttatgactccactgtggaaaatgctatcaaataactaaggaatatatatggaataagtgtacatatgtaaaatattgttactagagttagatatgtgccaaagtccatttatcccaaatcctgtctgaaaaggaggggtacattggtaaacattttggagtgcttaaaaatgccaaaaacaaaatggtaatttctactttgataaagtaaaaaagttaaatgtgtgtaaaaaagtgttctgtgtccttctactccagcatcgtctcatgtaaaataagaaagccctaaaatactattggagagaaaaaattaactaggttgctactttatttgcctaaatacttttttctattttgttagattttgcctttcttttggaaggaaggaggcgatattctgcattataaaaatgaattgggaacattatcacaattccagactttctattaatatttatgtgttttaataaacgtttgaaattatttatgactacttaaaatgaatctgaccagtgcttcctggtatatgtaatatgtggagttagcccctgaaatttgctttaagtgtttcagtgttgaatctgtttctaaatattcattattacatggtacacaagtgacactccatatattccacacagacttttaccttgctgtattattatgaaaacaatacattaatttgatttttcagtaattagtaattttaggttgaagattatccaaaagaaacaagcttatcacaagggaccatcatcaatatgatccaaatctggttcaaacattcaaaacttcaaagataattcatctttcgctaatgcttgtggttctgttgttcccttgnnnnnnnnnnnnnncagttgccttctaataaacattgttgagttaaaaattaatctgagctataatctaaatcgattcagtctcttaccagaactgaaagaaaaaagttagaaatagtgtttttggttcatatgattatttaaaaattaaagtataaatcttcaatatgtctggtttaatttttggtctgttggtaattattttcacatttaaattatttccaa

SEQ ID NO: 228611 - DNA, 730 bp, Homo Sapiens
ttggctctcctacatcaccaaggacaagcagacagagagcctggtggaaaagctgtgtcagcggttccgcacatcccgaactgagcggcagcagcgagacctggcctactgtgtgtcacagctgcccctcacagagcgaggcctccgtaagatgcttgacaattttgactgttttggagacaaactgtcagatgagtccatcttcagtgcttttttgtcagttgtgggcaagctgcgacgtggggccaagcctgagggcaaggctataatagatgaatttgagcagaagcttcgggcctgtcataccagaggtttggatggaatcaaggagcttgagattggccaagcaggtagccagagagcgccatcagccaagaaaccatccagtggttctaggtaccagcctctggcttctacagcctcagacaatgactttgtcacaccagagccccgccgtactacccgtcggcatccaaacacccagcagcgagcttccaaaaagaaacccaaagttgtcttctcaagtgatgagtccagtgaggaagatctttcagcagagatgacagaagacgagacacccaagaaaacaactcccattctcagagcatcggctcgcaggcacagatcctaggaagtctgttcctgtcctccctgtgcagggtatcctgtagggtgacctggaattcgaattctgtttcccttgtaaaatatttgtctgtctctttttttt

SEQ ID NO: 228612 - DNA, 535 bp, Homo Sapiens
ctttgtacaaaaaagttggcccgcagctcagctacagcacagatcagcaccatgaagcttctcacgggcctggttttctgctccttggtcctgggtgtcagcagccgaagcttcttttcgttccttggcgaggcttttgatggggctcgggacatgtggagagcctactctgacatgagagaagccaattacatcggctcagacaaatacttccatgctcgggggaactatgatgctgccaaaaggggacctgggggtgtctgggctgcagaagcgatcagcgatgccagagagaatatccagagattctttggccatggtgcggaggactcgctggccgatcaggctgccaatgaatggggcaggagtggcaaagaccccaatcacttccgacctgctggcctgcctgagaaatactgagcttcctcttcactctgctctcaggagatctggctgtgaggccctcagggcagggatacaaagcggggagagggtacacaatgggtatctaataaatacttaagaggtggaataa

SEQ ID NO: 228613 - DNA, 1620 bp, Homo Sapiens
gagcacggcggcggcggggacgagcaccggcctgcgcgcggagccggcaccggatggtgggcgggggccagccgtgcggacccaacatgagtgaagtttcctgcaagaaacgggacgactatttggaatggccagagtattttatggctgtggccttcttatcagcacagagaagcaaagatccaaattcccaggtcggcgcctgcatcgtgaattcagaaaacaagattgtcgggattgggtacaatgggatgccaaatgggtgcagtgatgacgtgttgccttggagaaggacagcagagaataagctggacaccaaatacccgtacgtgtgccatgcggagctgaatgccatcatgaacaaaaattcgaccgatgtgaaaggctgtagtatgtatgtcgccttgttcccttgtaatgaatgcgctaagctcatcatccaggcaggtataaaagaagtgattttcatgtctgataaataccatgatagtgacgaggcaactgctgcgaggctcctgtttaatatggccggggtgacattccggaaattcataccgaagtgcagcaagattgtcattgactttgattcaattaacagcagaccgagtcaaaagcttcagtgagttacatctcattcaatctccagaagattgggattatcgtcttctaagaggttgctaatgcctttcatcttgaagttacacataacttcttactagccagtatggcaaaagtaggcatctaaagaatataaagcctcaaatcttccttactgtctctcttgtcacatggaatctacatgtgtttgaactattgctttaggatttaaaataggggagcctgtggtggcctggtgcacagggctagaacgagagtgcctccccttcttgtgtcctggctggctgggatgctggtggctcttcagaggagcatcagctgtctgtcatctgctgcgatccggcagcctctcttcactgctacatgtgctggaaggacaaataaataattgtggttgtgttcttaatggggacgagcagacacactgatctgaacatctggcccaagtgaagcatggcatatagtgcccttggaagaaaattaggcctcaaatgacagtagcattgaagtgtttgctgcagagttgagggaaacccccagccaccctcccggaatccgagatagggtggcacatctgtcctgacagacgaggagtgtaactgaaccaggaatatttcctccattcctgctctcccactgcacacagggtggtggcacattatccctctggggggtggggacgcctgttgttttggctcaatttgggtttgttggtcacatggagctcttccatttcgtttagctgaataatgagttgttcctagaggagacagcctgtctctccttgttgcccccaaagcccatgccctgccgtggtggcagctggggctgtggatgggaggggtccccaacatggatgtgttgcccctcctccgcatgccaacgcagttcatgtacaaggcccctctgcaactggagagaaaattaattcctatcccgtgagtggattgtgagaaattccacccacgtggagacagcttactgcagcactgttggtgttcg

SEQ ID NO: 228614 - DNA, 445 bp, Homo Sapiens
taaagacaactttgtacaaaaaagttgggttgtctgcaggccctcaaaatggtccagcgtttgacataccgacgtaggctttcctacaatacagcctctaacaaaactaggctgtcccgaacccctggtaatagaattgtttacctttataccaagaaggttgggaaagcaccaaaatctgcatgtggtgtgtgcccaggcagacttcgaggggttcgtgctgtaagacctaaagttcttatgagattgtccaaaacaaagaaacatgtcagcagggcctatggtggttccatgtgtgctaaatgtgttcgtgacaggatcaagcgtgctttccttatcgaggagcagaaaatcgttgtgaaagtgttgaaggcacaagcacagagtcagaaagctaaataaaaaaatgaaacttttttgagtaataaaaatgaaaagacgctgt

SEQ ID NO: 228615 - DNA, 1423 bp, Homo Sapiens
ttggctcccgagcccttgccactgacagccgcgggcgctcccatctgagtaagagccagcccgtccgcggcctctccagccccgggttcgcgctctcgactctcctgcctgcccagctgcgcggcggagcggagcgaggcgcggcctgcgagtccccggcagcccccgacccctccctcggcgctgcgtgtaggccgcgccctcaggcccagtccgcggtgccccggcgggtgatgccaaatacagccatgaagaaaaaggtgctgctgatggggaagagcgggtcggggaagaccagcatgaggtcgataatcttcgccaattacattgctcgcgacacccggcgcctgggggccaccattgacgtggaacactcccacgtccgattcctagggaacctggtgctgaacctgtgggactgtggcggtcaggacaccttcatggaaaattacttcaccagccagcgagacaatatcttccgtaacgtggaagttttgatttacgtgtttgacgtggagagccgcgaactggaaaaggacatgcattattaccagtcgtgtctggaggccatcctccagaactctcctgacgccaaaatcttctgcctggtgcacaaaatggatctggttcaggaggatcagcgtgacctgatttttaaagagcgagaggaagacctgaggcgtctgtctcgcccgctggagtgtgcttgttttcgaacgtccatctgggatgagacgctctacaaagcctggtccagcatcgtctaccagctgattcccaacgttcagcagctggagatgaacctcaggaattttgcccaaatcattgaggccgatgaagttctgctgttcgaaagagctacattcttggttatttcccactaccagtgcaaagagcagcgcgacgtccaccggtttgagaagatcagcaacatcatcaaacagttcaagctgagctgcagtaaattggccgcttccttccagagcatggaagttaggaattccaacttcgctgctttcatcgacatcttcacctcaaatacgtacgtgatggtggtcatgtcagatccgtcgatcccttctgcggccactctgatcaacattcgcaatgcccggaaacactttgagaagctggagagagtggatggccccaagcacagtctccttatgcgttgaatattgccaaatgctctttctgaaaatgctgaattgccttttttgtttgcatcctttatttttaatattcataatgtcgtgtgcttaaaagtgggctttgaagtgtgtgctgcttactcctttcatctttctccccgcttccccagtcctttaaacattgggacgctatttactcagctacccagtagaagctggaagctgaacctttctgagaagttggtatggtgttaacactaaagtaggtgggt

SEQ ID NO: 228616 - DNA, 1071 bp, Homo Sapiens
ttggcccaggctccccgtgcgcgggccctgccctttcctcccgcgccccaccggctccgacgcgcaaccccgctcagcagtcacagaagcagggcccagccaccttggtctttttttgggagttcaggggagtaggagaatgtcttccagaaaaatacataagctagtttctgttctgtaaagtgatatctttcatacttgaccaaagttcccaataacttcccaaccactgttcaaaagctgtgatttttgtctccccttcccaccctccagccaaggagcagccctgcccagggggcattaggtgtgggtacccggggagcaccccgttcctggaccccagtgttgcatttcctggctgaggaagggtggtcatcccagctcctgccctaccctctcacttaactggagctttgggacgcaccctccacagtgggaggtggtggtgggtggcggtggcggggcctcacgacagcttggtgctggtaagaggaagcccgtggttctggctaggctctcatgtccagacagcggggaccaggggaaaacccagccccttctgtaatcccccttcatttcctaccttccttcctcctctgtttagcaaaggagggcagctcacttggatgtccttacaacgcccctggccccaggttgagcaataagaaaccagaaccttgcggcccagtggcccgggccagttcaggccgcctccccctcctctgcctggggccattgagcccagcctccagggcccgggtgcgtttgcaggccagtggccactgtccgggctgtgatggcaccaaggcaggtggagcaccaggtaccacacagctgggcttcccaccaggctttcccgcgggggtctcagggagcttctccccagcgctgctcggagtctgcaggaactggccttgttctccttagcccgtcactccatacagtattaggtgaggatggatgcgggcgctgtccttgccgggaagtcactgttgaagttgcagtggcttgttcacacctgtgggaagagaagtgaagactttctccttgcattaaaaagtctgaactgtg

SEQ ID NO: 228617 - DNA, 1630 bp, Homo Sapiens
  misc_feature (1289)..(1298): n is a, c, g, or t
ttggctacttcctaggcagaatgcttggaaaggctctctatgagaacatgctggtggagctgccctttgcaggcttctttctttccaagttgcttggaaccagtgccgacgtggacattcaccacctcgcctccctagaccctgaggtgtataagaatttgctctttctgaagagctacgaagacgatgtggaggagcttgggctgaacttcactgtggtgaacaatgacctgggagaggcgcaggtagttgaactaaaattcggtgggaaagacatccctgtcaccagcgccaaccggattgcgtacatccacttggtggcagactacaggctgaacaggcagatccgccagcactgcctggctttccgccagggccttgccaatgtcgtcagcctcgagtggctccgaatgtttgatcagcaagaaattcaggtattaatttctggtgcacaagttcccataagcctagaggacctaaaatcctttacaaactattcaggaggctattctgcagaccatcctgttattaaggtcttctggagagttgtggaagggttcactgatgaagaaaagcgcaaactgctgaagtttgtaacaagctgctctcgaccccctctcttggggtttaaggagttgtatcccgcattttgtattcacaacggaggctccgaccttgagcggctccccacagccagcacctgcatgaacctgctgaagctccccgagttctatgacgagacacttttgcgaagtaaacttctctatgcgattgaatgtgccgctggctttgagctgagctgaagctgatgctggggtcagacccctacagagaaccagtgcttccttcgtcagcagcgcctccccagacccacgaggatactcacactgcacgcctgaggctctcctaagctccttctttcattctgccattcctccctcccttccttttttaaatgatttttattacggtgtggtcacttatttagatggacattgcttttcaaataacttaaaataacacgttatgtgccatgtggctactttagtaatattgccaagaagagcacagtttttacactagtggcatctcagtgaaattaaccaaagatgaagctttggctttgctggtgagatcagagccctcctgagcaggcagcgccactccagggttcagacagggctgcacaggcggcagagatacagggtctgagggctgagacgccatggggccgctgctgcttatgtggttggattgtttacaagcctcattattaaaactgaaggcannnnnnnnnnctgctgcctttcccaaagtggttaggtttggaaaagagatgatgatggtaatattttatttgtgctttttaagccatttccccaaatgggactagcatgcttgttttcagtataccgtggcctgcctcatgatggtttggagatactgtctgtggatgtgaggtggggacttcattcattgtcctatttctatctccactttgtgcctggagagctttcatgggaggtggaggaggagggtctgccaagctactgcaacatctgtcacccactatacccagttacttggggggaggacagacactgtggtgtcatttaaagttgtttgaacc

SEQ ID NO: 228618 - DNA, 1061 bp, Homo Sapiens
aaaaagttggggagagattccttgaaatggggttctgaccctctcgggtggccccatttagctaatttgcatcaagattcagcagccgatgatgtctgtatgtgtgtgtgtgtctgtggacacgtcaacaccttggttaattaattaggtctggcggcttctctgttgacaactcagctggttccacaccctggcaattgtgaagagttggccaaatgtttgtccactgagctgatctcctctctggagcaccggggccaccaggagggagccaagacaatgcaaactccagtgaacattcccgtgcctgtgctccggctgccccggggccctgatggcttcagccgtggctttgcccctgatggacgcagagcccccttgaggccagaggttcctgaaatccaggagtgtcccatagctcaagaatccctggaatcccaggagcagcgggcacgagccgcccttcgggagcgttacctccgcagcctgctggccatggtgggtcatcaggtgagcttcacgttgcacgagggtgtgcgtgtggccgcccactttggagccaccgacctggatgtggccaacttctacgtgtcacagctgcagactcccataggtgtgcaagcagaggcgctgctccgatgtagtgacattatttcatataccttcaagccataaagatattgtgttcacttttctgcttgaggctaaggcactgtatcccaggcctcccaatgttcccgagccaggaactctgggccccatggagttatgagctcccttggaattttgagccaagctttaagcaagtctggactcctgagacctcctgggtctagtcagtaaaattctgcaactctaggaattctaagatcccattggaaggaatgctctacctcacagaactctgaaccctacagaaatatgggcctgctgccatttcctgaagaccggggcatcggggtggggtgataaaggatacaacctgcacagggggaagttattaaagaggctgcaaagtccagccaccctgaagatatccccagtgctcccctcctgctaaa

SEQ ID NO: 228619 - DNA, 1181 bp, Homo Sapiens
  misc_feature (1018)..(1058): n is a, c, g, or t
ctttgtacaaaaaagttggtaccctttggtcgagagggaaagcagaagaagtctgctggtcacagcggggcacctcgaggagaggacgactaggagcacacggcccggaaaggtccagaataactgtgcttgaagaagaaaattcccaacatggacaaaccacgcaaagaaaatgaagaagagccgcagagcgcgcccaagaccgatgaggagaggcctccggtggagcactctcccgaaaagcagtcccccgaggagcagtcttcggaggagcagtcctcggaggaggagttctttcctgaggagctcttgcctgagctcctgcctgagatgctcctctcggaggagcgccctccgcaggagggtctttccaggaaggacctgtttgaggggcgccctcccatggagcagcctccttgtggagtaggaaaacataagcttgaagaaggaagctttaaagaaaggttggctcgttctcgcccgcaatttagaggggacatacatggcagaaatttaagcaatgaggagatgatacaggcagcagatgagctagaagagatgaaaagagtaagaaacaaactgatgataatgcactggaaggcaaaacggagccgtccttatcctatttaatgtgttcggcctttaattctgttttgcctgctaatagtattgccattgccacctggactttctgtttgcattttcttaatgccttttcccatattctgaattttaactttttgtgaggctttattttagatgtttagcatgtaactcgcttaaagttgaggtttccccctaaaatctacaagtttccctctttcagtcatgagccctacacatttgcatgaaagatgtacattatatattgtgaaacgaaaaaagcaattttcaaatggtatatattgtatcccatttttgtaaaaaaaatgtatatttatatattaatatgcaaagaaaaagctaaaagtatagacttcaaaggcataacagtggttgtgtggtaagataataggtnnnnnnnnnnnnnnnnnnnnnnnnnnnnnnnnnnnnnnnnncaggacaaacgttttacttgtgttgcaaaaatatataatgaaaaaatcacacaattttgaagaaaactgtcaatcagcttataacgacaatgtgggcacttaataaatacttgtcagaacttt

SEQ ID NO: 228620 - DNA, 905 bp, Homo Sapiens
ttgggcctgtgggagcggctggaatttgtcaatggctggtacatcctgctcgtcaccagcgatgtgctcaccatctcgggcaccatcatgaagatcggcatcgaggccaagaacttggcgagctacgacgtctgcagcatcctcctgggcacctcgacgctgctggtgtgggtgggcgtgatccgctacctgaccttcttccacaactacaatatcctcatcgccacactgcgggtggccctgcccagcgtcatgcgcttctgctgctgcgtggctgtcatctacctgggctactgcttctgtggctggatcgtgctggggccctatcatgtgaagttccgctcactctccatggtgtctgagtgcctgttctcgctcatcaatggggacgacatgtttgtgacgttcgccgccatgcaggcgcagcagggccgcagcagcctggtgtggctcttctcccagctctacctttactccttcatcagcctcttcatctacatggtgctcagcctcttcatcgcgctcatcaccggcgcctacgacaccatcaagcatcccggcggcgcaggcgcagaggagagcgagctgcaggcctacatcgcacagtgccaggacagccccacctccggcaagttccgccgcgggagcggctcggcctgcagccttctctgctgctgcggaagggacccctcggaggagcattcgctgctggtgaattgattcgacctgactgccgttggaccgtagccctgggactgcagagacccccgcccccgaccccgcttatttatttgtagggtttgcttttaaggatcggctccctgtcgcgcccgaggagggcctggaccttttcgtgtcggacccttgggggcggggagactgggtggggaaggttgttgaataaa

SEQ ID NO: 228621 - DNA, 715 bp, Homo Sapiens
ttgggtccggcccccgcccgctccggagcaacccgcgagcttacaccggcttctctctgtcctcagcccgcgcgccgccatcgccgtcatgctgggcgccgctctccgccgctgcgctgtggccgcaaccacccgggccgaccctcgaggcctcctgcactccgcccggacccccggccccgccgtggctatccagtcagttcgctgctattcccatgggtcacaggagacagatgaggagtttgatgctcgctgggtaacatacttcaacaagccagatatagatgcctgggaattgcgtaaagggataaacacacttgttacctatgatatggttccagagcccaaaatcattgatgctgctttgcgggcatgcagacggttaaatgattttgctagtacagttcgtatcctagaggttgttaaggacaaagcaggacctcataaggaaatctacccctatgtcatccaggaacttagaccaactttaaatgaactgggaatctccactccggaggaactgggccttgacaaagtgtaaaccgcatggatgggcttccccaaggatttattgacattgctacttgagtgtgaacagttacctggaaatactgatgataacatattaccttatttgaacaagttttcctttattgagtaccaagccatgtaatggtaacttggactttaataaaagggaaatgagtttgaactg

SEQ ID NO: 228622 - DNA, 608 bp, Homo Sapiens
  misc_feature (411)..(420): n is a, c, g, or t
gaagaagtagataatctgaatagccctatatctatagaaacttaatagtgctgggagatataggtattattatcctcattttacagatgtgaaaattgaggctcagagaagtaaagtctattgctcaaggtcatgtggctagaatatggcagagccatgattcagatccaggtcttctgattcttattccagtgtcctttctagcataccatgttgcctctaaagattgcagctccttatttactagaaaattgttcctgcccaatctacatctccacctcaccccatcttttcttaagcactatgtttgtgtttttatcagtattatattcattgtctttggaatacatgttcttgtttgtgtttggaaaaaaaatctcttttaccagcttgcactcggaccaacttggnnnnnnnnnngcttaaatgttgttgctatgtacagtttaaaaatgtgaagtttgtagctttaactttttgtaagaaaatctaataacactggcttaagtgctgacttgaaatgctattttgtaagggtttgggatgtaagtaatcaattgaggtcagcagtttgtatgagacatagcttcctccattgcccccactcc

SEQ ID NO: 228623 - DNA, 826 bp, Homo Sapiens
gtcctcttgcacttgctttgcagaacctgcctcccacacaggggcagcccactcggggatgggtgactcaacctctcttcccggctggcttcctcactgccgtggagactcaggtgtgtgagggctcgtccaggctgcagctggacagagtggcagaggcggctgaggcttgggcagccaggtcccggtaagcaggcgacttcaggaagcgtgggtaggagtccttctccatcagggtacgtgtcttcccctgagccgcatcaaagcatgtggctgtggcagtctgcaggttcatcctcgtcagctcgcgggtctcatggtcaatgttgacctctttaggggcctcactgcaaatgaactcctcaaagatctggtgtgccctggaggccagcttggtagctgatcggatcttcttgaactcctcacaggccagccagaactccaggttctcctcactgaactctgtcttcaggaaagcgtggaaggcagccactccatttttactgctcagcagcaggtcgaacgactctctccaccccagcacatcttctgagaagtttctattctctttgctgtgtttactgccccactcgaacttgccagtactcccagtatcgcagcccagctctgatttgtgaagaaagatccccagacgtgtcttgaactctttggctctctccaggcaggtggtggggaaggcggccagggtgcggcacatggctgcgggcgcagggcagcacgtagtaggcaggatggtggcaggctccaggaggctccgcgtgcgccaggaagcaaaggcgcggtagcaggtgctagtcaactccaa

SEQ ID NO: 228624 - DNA, 1119 bp, Homo Sapiens
  misc_feature (317)..(330): n is a, c, g, or t
  misc_feature (710)..(718): n is a, c, g, or t
  misc_feature (946)..(966): n is a, c, g, or t
  misc_feature (1029)..(1052): n is a, c, g, or t
gtgtagtgttacaattctatattcaaacaaggaaaattgacagtatgttacattcacttacaagtagacaaaatgcaaaatacagttcatcttctgtacaaaagggaagggcgattcacactttacaaggtgagaggggctctgattgtaaggaaagctcgggcaaggctagacttttgcacgtccttttgactgtcacaaaatcaaaacattacttttttaggattaaaaaaacactagtgagaactcaatcttgaataacatttagaaagaatctcgctatacttgagactagatgacaaataaaaccaagctannnnnnnnnnnnnnaaacattaactaggctgtataaagaacatttattccttcaaaagaaaaaaatttacttctggttgaaattacaatttacaatatacaacactatatgctacgaccataaaaggtgagaatatacactgaatgcacagggctggctaattctcttttcttaccaaaaaacgtgtttatgttgattcaaacttctccacatttacattacaggtatacaaatgtacaattgtacaatcaaaagtatgttcgactactagggtacattatagatacagattagacatcaaaacaagaaaatactacaaatttgtatatatgcaaagtctacaccaagtatacactatatatttatagaagcaagaccaaaagcagagttggannnnnnnnnctcatgctaaataatcagattttacctttcaatgttaatagaaaaaaatccagtaggcagtaaacaatcacacccgcccagcctcaaaagacgttctgggtgctcgcatctcctcctcacgaacagccttcttcagcataatatagtctccaaaaaaggcattttttagaatttcataaacttaatgtcacaaactgaagctttagcaactctgaaacctttttcatnnnnnnnnnnnnnnnnnnnnntttttataaacagtgttaaatgccagtttggggtcatttaactacaattcaaacttctcaggnnnnnnnnnnnnnnnnnnnnnnnnactaaaatgaggaggtggggaagagctatttgcaaaacttgccagccaggcaaatgagctaaaaacc

SEQ ID NO: 228625 - DNA, 1313 bp, Homo Sapiens; identical to SEQ ID NO: 194888
  misc_feature (68)..(91): n is a, c, g, or t
  misc_feature (154)..(180): n is a, c, g, or t
  misc_feature (408)..(416): n is a, c, g, or t
  misc_feature (801)..(801): n is a, c, g, or t

SEQ ID NO: 228626 - DNA, 905 bp, Homo Sapiens
  misc_feature (139)..(231): n is a, c, g, or t
ttggtgaataatgacatacagtactgaagtaatctgattttattctttggaaattcaatgcattggtcacactaatgacatcaacatctgctatcacttatctttttaaaactaaccaaaagaggccgggtgcagtggnnnnnnnnnnnnnnnnnnnnnnnnnnnnnnnnnnnnnnnnnnnnnnnnnnnnnnnnnnnnnnnnnnnnnnnnnnnnnnnnnnnnnnnnnnnnnatgagccactgcacccaactcctctttcgtctttctttaacacacactaggctctttgtgtattatgattcagtgctatttgtaactgtgtcccagtgaccaaattgcactcgactcgatcagctgttcatccatttcgtgttttttcctgtcaaacattaatccagcaaatatatgaggtatttaccaatttattttcttagtattacaaaataattcattagcataaagtacaatagtgaaatatttgagttgttcggaacctcaattaatcctgttttacatttcagacctaaagctggcaatcaggagaagaagcactttgttttaaatgtggagaagataacacttgattccatttcattgtcattagtgtattaaccagcaggagaggtgatgagccatttttcaaatgaaataccttttatttccatataatttttttattttagagttcaatagctgtttctatgattatcctcaatttccatatgttactgaatctgaaaaacatctttaaaattcaaacagttccattttctctcttgtaagtgttaaatgtgataaaagtacatattttaaattgttttcagctcttggatatagcagcaataaaaacactaatttgtgggtatttaagaaaacctggagaataaactcatactttaaaagat

SEQ ID NO: 228627 - DNA, 1126 bp, Homo Sapiens
  misc_feature (397)..(408): n is a, c, g, or t
ttgggccgtggagacagctgaggaagcaaaggagcctgctgaagctgacatcactgagctctgccgggacatgttctccaaaatggccacttacctgactggggaactgacggccaccagtgaagactataagctcctggaaaatatgaataaactcaccagcttgaagtatcttgaaatgaaagatattgctataaacattagtaggaacttaaaggacttaaaccagaaatatgctggactgcagccttatctggatcagatcaatgtcattgaagagcaggtagcagctcttgagcaggcagcttacaatttggatgcatattcaaaaaaactggaagccaagtacaagaagctggagaagcgatgagaaacttatttctatgggacagagtcnnnnnnnnnnnnaatgtggaagaatgtcttataaaacctgaatcctgaggctgatgaattgtgaaaattcctcaaaaggaaattatgctggtcatcacaggaacatctcaacgttcgagtaaactggaggactgtggctattcctgaaccttctttgagacagaatccctcagaatctcacacttataacttcctaccttttacttgaatgctttgccatattcaggacagagactctcacaaagttcagaaaacagctggacttaccagtaaaatcaaatgagaggacctattttctctggtagtggttgattactacattattttcttaagtggctggttttttagttactatgtaaatggtcgtttttctgttaatgatgctaatgtgttgtaaacaagattctaaatttaaaaaggaaaacaaaacaaacttgttctttgcagcttatcaccttgtgaatgtcggtaacttacttttccataatattgcaaataacataaaatcttaaaataattccaagctgagtcttctagattgagcagaaatggtgaaaggagtattgataacttggcgtatgtgatgggcccctcttgtttattttctatgtgagtcacattgacatgcgatcagtttgggaaatgtgatgaaaacaaagactagatgggtatgtgtgtttatgtgttgggtagggaggtgacgattgccactcataaaataaaggatttt

SEQ ID NO: 228628 - DNA, 975 bp, Homo Sapiens
ttggctcaaagctcttaaatgcttatctctggtaccctcagtcatgggacaactcaaattcaatacgtcggaggaacaccatgctgacatgtatagaagtgacttacccaatcctgacacgctgtcagctgagcttcattgttggagaatcaaatggaaacacagggggaaagatatagagcttccgtccaccatctatgaagccctccacctgcctgacatcaagttttttcctaatgtgtatgcattgctgaaggtcctgtgtattcttcctgtgatgaaggttgagaatgagcggtatgaaaatggacgaaagcgtcttaaagcatatttgaggaacactttgacagaccaaaggtcaagtaacttggctttgcttaacataaattttgatataaaacacgacctggatttaatggtggacacatatattaaactctatacaagtaagtcagagcttcctacagataattccgaaactgtggaaaatacctaagagacttttaaaaataggctttcttatatttgatatttggaagaaaaagccgtaaggtgtatgtagaccacttaatcactaaatatctttgcctataggactccattgaatacattagccattgataatctacctgtttaaatggcccctgtttgaactctcaagctttgaagacctacctgttcttccagaagagaacgttgaaagtgccatgtttccttttgcgtgatctctgttgatggcactctggaattgtttcagttaagtcattttagacatagcatttattatcactgtggatctctacttgttgggtgttatgaattctttgaagaaatatattttgaagaggtgtgggaggaaggaatacattttataaatgttgtagtgaagcccacaattgacctttgactaataggagttttaagtatgttaaaaatcctatactggaccgttacaagaaaatttaccggagaaaa

SEQ ID NO: 228629 - DNA, 354 bp, Homo Sapiens; identical to SEQ ID NO: 194889

SEQ ID NO: 228630 - DNA, 862 bp, Homo Sapiens
tacaaaaaagttggcctggccgtggcgaaagagccggcggagccggagacccgctcccggagacgccgcctcgcgatccccgcgcgggcgggaccgggcggccggcatcatgaccctgtttcacttcgggaactgcttcgctcttgcctacttcccctacttcatcacctacaagtgcagcggcctgtccgagtacaacgccttctggaaatgcgtccaggctggagtcacctacctctttgtccaactctgcaagatgctgttcttggccactttctttcccacctgggaaggcggcatctatgacttcattggggagttcatgaaggccagcgtggatgtggcagacctgataggtctaaaccttgtcatgtcccggaatgccggcaagggagagtacaagatcatggttgctgccctgggctgggccactgctgagcttattatgtcccgctgcattcccctatgggtcggagcccggggcattgagtttgactggaagtacatccagatgagcatagactccaacatcagtctggtccattacatcgtcgcgtctgctcaggtctggatgataacacgctatgatctgtaccacaccttccggccagctgtcctcctgctgatgttcctcagtgtctacaaggcctttgttatggagaccttcgtccacctctgctcgctgggcagttgggcagctctactggcccgagcagtggtaacggggctgctggccctcagcactttggccctgtatgtcgccgttgtcaatgtgcactcctaacttggtgtctcagacattgatgtaccttttccctgcctcgctccaggttttagtgaagtaaacagtatttggaaagtt

SEQ ID NO: 228631 - DNA, 854 bp, Homo Sapiens
ttggggagaggaacgcgcagccagccttgggaagcccaggcccggcagccatggcggtggaaggaggaatgaaatgtgtgaagttcttgctctacgtcctcctgctggccttttgcgcctgtgcagtgggactgattgccgtgggtgtcggggcacagcttgtcctgagtcagaccataatccagggggctacccctggctctctgttgccagtggtcatcatcgcagtgggtgtcttcctcttcctggtggcttttgtgggctgctgcggggcctgcaaggagaactattgtcttatgatcacgtttgccatctttctgtctcttatcatgttggtggaggtggccgcagccattgctggctatgtgtttagagataaggtgatgtcagagtttaataacaacttccggcagcagatggagaattacccgaaaaacaaccacactgcttcgatcctggacaggatgcaggcagattttaagtgctgtggggctgctaactacacagattgggagaaaatcccttccatgtcgaagaaccgagtccccgactcctgctgcattaatgttactgtgggctgtgggattaatttcaacgagaaggcgatccataaggagggctgtgtggagaagattgggggctggctgaggaaaaatgtgctggtggtagctgcagcagcccttggaattgcttttgtcgaggttttgggaattgtctttgcctgctgcctcgtgaagagtatcagaagtggctacgaggtgatgtaggggtctggtctcctcagcctcctcatctgggggagtggaatagtatcctccaggtttttcaattaaacggattattttttcagaccg

SEQ ID NO: 228632 - DNA, 505 bp, Homo Sapiens
  misc_feature (134)..(183): n is a, c, g, or t
  misc_feature (255)..(263): n is a, c, g, or t
ttggaaagaactgtgcagacgctggtatccagaagaatatgaatttgcaccaaagaaggctgcttctcatagggcacttgatgacattagtgaaagcatcaaagagcttcagttttaccgaaataacatcttcnnnnnnnnnnnnnnnnnnnnnnnnnnnnnnnnnnnnnnnnnnnnnnnnnntgagaagaccgtgagttgatgccagttatcatgctgccactacatcgttatctggaggcaacttctggtggnnnnnnnnnctcacgctgatggcttggcagagcaccttcggttaacttgcatctccagattgattactcaagcagacagcacacgaaatactatttttctcctaatatgctgtttccattatgacacagcagctcctttgtaagtaccaggtcatgtccatcccttggtacatatatgcatttgcttttaaaccatttcttttgtttaaataaataaagaagtaaataaagctagttctattgaaatgcag

SEQ ID NO: 228633 - DNA, 203 bp, Homo Sapiens
ttggctcagttccaacttgtgattcctgatagaacagactttacttttctagcccagcattgatctagaagcagaggaatcccagcgccttttaaaagttgttatgtggttttcttttaaaaagctcctgtttttggaaagtagaatttatgggtacaacgtatgttcattatttgtacataaaataaaaccatttaaaaagt

SEQ ID NO: 228634 - DNA, 537 bp, Homo Sapiens
tttgtacaaaaaagttgggtaggagctaggtgaccctcggctgctgcagggatctgcagcgactgcagccatgggggcccacctggtccggcgctacctgggcgatgcctcggtggagcccgaccccctgcagatgccaaccttcccgccagactacggcttccccgaacgcaaggagcgcgagatggtggccacacagcaggagatgatggacgcgcagctgaggctccagctgcgggactactgcgcccaccacctcatccggctgctcaagtgcaagcgtgacagcttccccaacttcctggcctgcaagcaggagcggcacgactgggactactgcgagcaccgcgactatgtgatgcgcatgaaggagtttgagcgggagcggaggctgctccagcggaagaagcggcgggagaagaaggcggcagagttggccaaaggccagggacccggggaagtggaccccaaggtggccctgtagggggtgcaccccccaccctatggaccagtcaaataaaagccttcaggcccctc

SEQ ID NO: 228635 - DNA, 201 bp, Homo Sapiens
ctataaaagccaactttgtacaaaaaagttggcgaggcttgtgatgccttgtgagaaataagggccttaatttgtactgtctgcggcattttttataatattgtatatagtgactgacaaatattgtattactgtacataaagagacaggtgggcatttttgggctacctggttcgtttttataagattttgctgggttgg

SEQ ID NO: 228636 - DNA, 315 bp, Homo Sapiens
gtacaaaaaagttgggcaaggagatagggtagacattgtactcagtgggccttggggcctagcccagctctgagcagaggactgtggcattcactgtccttgagtgtttcaccttcttggataacacacgggccttctcttctggatttcatcagagattacagccagatgggggctgaagaccatcctcttgaccacagaggtgtgactgtgggaattcctcccaatttatggtttcccagaaaatcttagttccttttatttatagaatgcatgtcttttgtgttaagaaaccaaagagaaataaagagaaca

SEQ ID NO: 228637 - DNA, 898 bp, Homo Sapiens
  misc_feature (828)..(837): n is a, c, g, or t
ttgtacaaaaaagttggcctgaagcctggcccacccctaaggctctggctgggaaacccgggtcgtggggacgtgaaagggtgaggtggcagtgcctctgacctcttgccttttgaaggagggccctcctggacccgggagcggaccctggtggcggtgaagcccgatggcgtgcaacggcggctcgttggggacgtgatccagcgctttgagaggcggggcttcacgctggtggggatgaagatgctgcaggcaccagagagcgtccttgccgagcactaccaggacctgcggaggaagcccttctaccctgccctcatccgctacatgagctctgggcctgtggtggccatggtctgggaagggtacaatgtcgtccgcgcctcaagggccatgattggacacaccgactcggctgaggctgccccaggaaccataaggggtgacttcagcgtccacatcagcaggaacgtcatccacgccagcgactccgtggagggggcccagcgggagatccagctgtggttccagagcagtgagctggtgagctgggcagacgggggccagcacagcagcatccacccagcctgaggctcaagctgcccttaccaccccatcccccacgcaggaccaactacctccgtcagcaagaacccaagcccacatccaaacctgcctgtcccaaaccacttacttccctgttcacctctgccccaccccagcccagaggagtttgagccaccaacttcagtgcctttctgtaccccaagccagcacaagattggaccaatcctttttgcaccaaagtgccggacaacctttgtggtnnnnnnnnnntcttcacattatcataacctctcctctaaaggggaggcattaaaattcactgtgcccagca

SEQ ID NO: 228638 - DNA, 300 bp, Homo Sapiens
ttggctttgttcattgtattgtgatccaataacactttgtattaaattgtttagcagccatttgtgttgtgaaggggtagaagatctctgaaacttgtcttgagattgaactcattccctgttccacaaacccatatgtatcctttcctctacctcctcctttcccaattaatttcaaccatagtacgatgtttggggttgtatattttgttaaaaagattaaagaatttatgagttggcttggacaagtttaactttatttttaatgtgttaattacttggaataaatgcattaatctc

SEQ ID NO: 228639 - DNA, 919 bp, Homo Sapiens
ggccggggggcccaggggcgcagaaggagactcgcaggtggctgccccccagggacaggccgtccgctgctgctgtgcctcctccgccatctcagccgtctcatactccagcaccgcgaagcccttcagctgcccatcctggccgcacgccagctggcagaaggtggggctgtggacagctgacagcgcccggcacagagcgtccacatcgttgaagccaggtggcaggcggtccacacagaggcagcgggagtggagaagggcaggcgtcagttgcccggcatccgtccagtgcacgtagagggtgcgtggtcccagcggcttgcccagcaggtccgacttggcacgggcagccgagtccttcttcatgtactcagcaaagccatagcccttggattggccagtgcgctcactgtagaccaggaagcagcgctccaggctgccgaagggccgcaccagctcctcgaactgctgctgtgtgaggctggggggcaggttggccacacacagcagggcatccgtgggctgcagctgcaccgacagttcacgctcccgcaggcggctctggtggaaagcattgattgcggcctcggcctgctccccattcagcagggtcacgaaggctgtccctttgtatttgtccacaaaacagtatttgagctcatagtcactgagcaggtcatgtacttcctggttggtcacgtcccccgggaggccccggatcagtatcttgcggcggttacggaactggcgctcggtgtgttccaggcgtttccggatctcttctggatctagaggcggcagctcttcttccggcgcccggcgctccgcggcatcgccggcttcgacttcggccccagacttagggctcagcgggggccggtgagtaacggacacgtcccccgccatcttgggccaa

SEQ ID NO: 228640 - DNA, 938 bp, Homo Sapiens
ttggagcagagctggggcgcctgtgtacagggatagagcccggcggcagcagggcgcggcttccctttcccggggcctggggccgcaatcaggtggagtcgagaggccggaggaggggcaggaggaaggggtgcggtcgcgatccggacccggagccagcgcggagcacctgcgcccgcggctgacaccttcgctcgcagtttgttcgcagtttactcgcacaccagtttcccccaccgcgctttggattagtgtgatctcagctcaaggcaaaggtgggatatcatggcatctatctgggttggacaccgaggaacagtaagagattatccagactttagcccatcagtggatgctgaagctattcagaaagcaatcagaggaattggaactgatgagaaaatgctcatcagcattctgactgagaggtcaaatgcacagcggcagctgattgttaaggaatatcaagcagcatatggaaagggcgcgggaacaaacgaagatgccttgattgaaatcttaactaccaggacaagcaggcaaatgaaggatatctctcaagcctattatacagtatacaagaagagtcttggagatgacattagttccgaaacatctggtgacttccggaaagctctgttgactttggcagatggcagaagagatgaaagtctgaaagtggatgagcatctggccaaacaagatgcccagattctctataaagctggtgagaacagatggggcacggatgaagacaaattcactgagatcctgtgtttaaggagctttcctcaattaaaactaacatttgatgaatacagaaatatcagccaaaaggacattgtggacagcataaaaggagaattatctgggcattttgaagacttactgttggccatagttattgtgtgaggaacacgccggcctttttagccgaa

SEQ ID NO: 228641 - DNA, 930 bp, Homo Sapiens
tttgtacaaaaaagttggctatcgctgtttttagccttttcacatcatgtaatgtgaggccttgtacttgttaatttatatctcagatcatatttgatggtttttatatatatcaattctagactgttacaggtgacggacgcctcaagagagagaagagaaaatgaaagcagctggttttgcagaagtgtgtgtcgcatgcgccagttgggcctggaccctcctgtgtccatccctgttcccccaggggctctatcagcccctgtaccccacactgccctctgaagacaacacaggctcctgcttccacctcggcccttgcccagggtggggcctggccctcatcttgaccaaagctgctgtgtggcagctcggcctctctacgaccccatcttggtggctgcacactcttcctggcccgcacccccatccccagtccctgttccccaagaggatacagagcacggtgctggctgactcaactgtgcgtcccaggttcagggtcttacagagctccaccccctggggtcttacctcactgggaatgtgttttgaaaatgaatttgaagacaagccaacaaaccctgcactccaaaaaagcaaaacagaccctaatttttttgtgccaaaaactgtggacatgctggctcagcatcctcaggaccaagttgttgcttaatttattgttttttaataactaatccagataaaaaagttgtggggcttcagggtgacctgggcccaaaggttctgaagggcagttcctggcagcccccaggcttgctgtgggaaggggccgtgccgtcactttctcatcattccagggggtgtgtctgcctgggccaactctgcatggagaggccagggctgggggacagtccgcactctgccaccctccctgccccttccacccaccccagctctatgtct

SEQ ID NO: 228642 - DNA, 896 bp, Homo Sapiens; identical to SEQ ID NO: 194891

SEQ ID NO: 228643 - DNA, 683 bp, Homo Sapiens
actttgtacaaaaaagttgggaatatccttgctcaggctctttatgaattattttctgccacagatgattccctgcatcaactaagaaaagcctgttttctttatttcaaacttggtggcgaatgtgttgcgggtcctgttgggctgctttctgtattgtctcctaaccctctagttttaattggacacttctttgctgttgcaatctatgccgtgtatttttgctttaagtcagaaccttggattacaaaacctcgagcccttctcagtagtggtgctgtattgtacaaagcgtgttctgtaatatttcctctaatttactcagaaatgaagtatatggttcattaagcttaaaggggaaccatttgtgaatgaatatttggaacttaccaagtcctaagagacttttggaagaggatatatatagcatagtaccataccacttataaagtggaaactcttggaccaagatttggattaatttgtttttgaagttttttgtatataaatatgtaaatacatgctttaatttgcaatttaaaatgaaggggttaaataagttagacatttaaaagaaatgattgttaccataaattagtgctaatgctgaggagaactacagtttttcttttgaatttagtatttgagatgagttgttgggacatgcaaataaaatgaagaat

SEQ ID NO: 228644 - DNA, 902 bp, Homo Sapiens
ttggagctcagtttctcactccgaagtggcagcagccagagagggagtcggtgtggacgcgaggagccgggcgcttagaacagaggcttgcacaggtggagatgtggaagtctgtagtgggccatgatgtgtctgtttccgtggagacccagggtgatgattgggacacagatcctgactttgtgaatgacatctctgaaaaggagcaacgatggggagccaagaccatcgaggggtctggacgcacagaacacatcaacatccaccagctgaggaacaaagtatcagaggagcatgatgttctcaggaagaaagagatggagtcagggcccaaagcatcccatggctatggaggtcggtttggagtagaaagagaccgaatggacaagagtgcagtgggccatgagtatgttgccgaggtggagaagcactcttctcagacggatgctgccaaaggctttgggggcaagtacggagttgagagggacagggcagacaagtcagcagtcggctttgattataaaggagaagtggagaagcacacatctcagaaagattactctcgtggctttggtggccggtacggggtggagaaggataaatgggacaaagcagctctgggatatgactacaagggagagacggagaaacacgagtcccagagagattatgccaagggctttggtggccagtatggaatccagaaggaccgagtggataagagcgctgtcggcttcaatgaaatggaggccccgaccacagcttataagaagacgacgcccatagaagccgcttctagtggtacccgtgggctgaaggcgaaatttgagtccatggctgaggagaagaggaagcgagaggaagaggagaatgcacagcaggtgggccaggaggcaacagga

SEQ ID NO: 228645 - DNA, 807 bp, Homo Sapiens
ccaactttgtacaaaaaagttggctgagcggccttccatagaaaccggatggcaacagtagttctagggggagacaccatgggccctgagcgtatcttccccaatcagactgaggaactgggacatcagggcccttcagaaggcactggggattggagcagtgaggagcctgaggaagagcaggaggaaacggggtcgggcccagctggctactcctaccagcccctgaaccaagatcctgaacaagaggaggtggaactggcaccagtgggggatggagatgtagttgctgacatccaggatcgaatccaggccctggggcttcatttgccagacccaccattagagagtgaagatgaagatgaggagggagctacagcgttgaacaaccacagctctattcccatggacccagaacatgtagagctggtgaaaaggacaatggctggagtaagcctgcctgcgccaggggttcctgcctgggctcgggagatatcggatgcccagtgggaagatgtggtacagaaagccctccaagcccggcaggcatcccctgcctggaagtgaccacagtgagagctgccttatattcctacattccaggccagaaccagcacaggactgaacacatccctggttgtaatgtccatttccatcttccccgtctccctttccacatcaaggcacatcagacttctcagagacccactttattcagttctgtacatatggggacatcggtccaagcccaacccaccttagcatgtatcactctgtggagaataaagcaccctatgtacacagccc

SEQ ID NO: 228646 - DNA, 895 bp, Homo Sapiens
  misc_feature (101)..(109): n is a, c, g, or t
ttgggtgtcgcttgaaaagactgggcttgtccttgctggtgcatgcgtcgtcggcctctgggcagcaggtttacaaaggaggaaaacgacttcttctagannnnnnnnncagtttcttctataaatcaaaacatctcaaaatggagacctaaaatccttaaagggacttagtctaatctcgggaggtagttttgtgcatgggtaaacaaattaagtattaactggtgttttactatccaaagaatgctaattttataaacatgatcgagttatataaggtataccataatgagtttgattttgaatttgatttgtggaaataaaggaaaagtgattctagctggggcatattgttaaagcatttttttcagagttggccaggcagtctcctactggcacattctcccattatgtagaatagaaatagtacctgtgtttgggaaagattttaaaatgagtgacagttatttggaacaaagagctaataatcaatccactgcaaattaaagaaacatgcagatgaaagttttgacacattaaaatacttctacagtgacaaagaaaaatcaagaacaaagctttttgatatgtgcaacaaatttagaggaagtaaaaagataaatgtgatgattggtcaagaaattatccagttatttacaaggccactgatattttaaacgtccaaaagtttgtttaaatgggctgttaccgctgagaatgatgaggatgagaatgatggttgaaggttacattttaggaaatgaagaaacttagaaaattaatataaagacagtgatgaatacaaagaagatttttataacaatgtgtaaaatttttggccagggaaaggaatattgaagttagatacattacttaccttttgaggaaataattg

SEQ ID NO: 228647 - DNA, 927 bp, Homo Sapiens
ttggcttgcgctcggtggaaatgcccagccgagggacgcgaccagaggacagctctgtgctgatccccaccgacaattcgaccccacacaaggaggatctaagcagcaagattaaagaacaaaaaattgtggtggatgaactttctaaccttaagaagaataggaaagtatataggcaacaacagaacagcaatatattctttcttgcagaccgaacagaaatgctgtctgagagcaagaatatattggatgaactgaaaaaagaataccaagaaatagaaaacttagacaagaccaaaatcaagaaatagtcaacctgatttcacataacaatgtgtggcatttgttgttctgtaaacttttctgctgagcatttcagtcaagatttaaaagaggacttactatataatcttaaacagcggggacccaatagtagtaaacaattgttaaagtctgatgttaactaccagtgtttattttctgctcacgtcctacacttgaggggtgttttgactacccagcctgtggaagatgaaagaggcaatgtgtttctatggaatggagaaatttttagtggaataaaggttgaagctgaagagaatgacactcaaattttgtttaattatctttcctcctgtaagaatgaatctgagattttgtcactcttctcagaagtacaaggtccctggtcatttatatattatcaagcatctagtcattatttatggtttggtagggatttttttggtcgccgtagcttgctttggcattttagtaattggggcaagagtttctgcctctcttcagttggcacccaaacatctggattggcaaatcagtggcaagaagttccagcatctggactttcaaattgatcttaagtctactgtcatttccagatgcattattttacactgtatcttggaa

SEQ ID NO: 228648 - DNA, 1339 bp, Homo Sapiens
  misc_feature (67)..(105): n is a, c, g, or t
gaggatttattggcgtaaatgcaaccatataaaaacataagttatgaaaaacacagtcacgatgtgnnnnnnnnnnnnnnnnnnnnnnnnnnnnnnnnnnnnnnntctgcgggagggagggagaggaagggggagccccgaaaccgcctaggaacgctcagcccctgggctcgtgcagggcgggagagccgggcctcagcgcatccggtagtcggtggagcaggacagctcgcacagctggcccttgaagtccaggtcgatggtgaagtccaggtcccggttgttcttggcgttgggccgcatgccgatggtgccgaagatctcctcgcccgtcttcacggtcaggtagtcctccatgtagaacaccgtctgcttccagtgcgtgtacggggactcggggctggtggagaagccggtcctcttgtggcagcgtgtgaactcgatgttgaagtaggccaccagggcgtgcacgtagtcattccgcttcacttgcaggcagaacggggaggtgaaggtcaggtcttccaccttgacggtatagatgtccacctcctttatgaggcaggcgttggtgaccagctgtttggggtccacgacatccactaggggctccttaatggccacatctttgatgcaagacatgtcgaagccatacacgttctcccaccagtggatcttgtagtctttgtactgccggtcctcgatggccgtcacatacagcgtggcccggtctgggaagatgaggccatcgggcgccagccacttgtcccgggcatagagcacggtgttgagcatggactcgtagaagaggcagtagcccatccactcgctgatgatgatgtccaccttctccactgggagctccacctcctccaccttccccttgatgatggtcaccacgtggtctaacttgttggctttgacgatcttcaccgcataatcagagatactggaacactcgatcccgatgaccttgcgggccccggccttggcagcaaacatgcagaggatgccggtgcccgagccgacgtccagcaccaccttgtccttgaagaggtgccggttatgaaacatggagttgcggtaagtgagggtgcgcacctcgtccttcagcatctcctcgtggatgccaaagtgtgcgtaggagtcaaagtagtaatctttggatgtcatgtcctcagcgttgggcttctcactgctttccgcctggccacaggacacttcttcaagaggcggctggaggctcatcccattagccaaggtggctacaaaattctccatgatgcagttcgcggcctcggctgccgccatcccaacttttttgtacaaagttggcttt

SEQ ID NO: 228649 - DNA, 1013 bp, Homo Sapiens
ctttgtacaaaaaagttggctggaataaagccgtgctggaattgatgttcgtctgtgtgatgttggtgaggccatccaagaagttatggagtcctatgaagttgaaatagatgggaagacatatcaagtgaaaccaatccgtaatctaaatggacattcaattgggcaatatagaatacatgctggaaaaacagtgccgattgtgaaaggaggggaggcaacaagaatggaggaaggagaagtatatgcaattgaaacctttggtagtacaggaaaaggtgttgttcatgatgatatggaatgttcacattacatgaaaaattttgatgttggacatgtgccaataaggcttccaagaacaaaacacttgttaaatgtcatcaatgaaaactttggaacccttgccttctgccgcagatggctggatcgcttgggagaaagtaaatacttgatggctctgaagaatctgtgtgacttgggcattgtagatccatatccaccattatgtgacattaaaggatcatatacagcgcaatttgaacataccatcctgttgcgtccaacatgtaaagaagttgtcagcagaggagatgactattaaacttagtccaaagccacctcaacacctttattttctgagctttgttggaaaacatgataccagaattaatttgccacatgttgtctgttttaacagtggacccatgtaatacttttatccatgtttaaaaaagaaggaatttggacaaaggcaaaccgtctaatgtaattaaccaacgaaaaaagctttccggacttttaaatgctaactgtttttccccttcctgtctaggaaaatgctataaagctcaaattagttaggaatgacttatacgttttgttttgaatacctaagagatactttttggatatttatattgccatattcttacttgaatgctttgaatgactacatccagttctgcacctataccctctggtgttgctttttaaccttcctggaatccattttc

SEQ ID NO: 228650 - DNA, 918 bp, Homo Sapiens
caactttgtacaaaaaagttggctgtagtgttggtgtagcacagaagaaagacctgtgtcctagagagtaggccaaggtgatctgcctcttctattgggagaaattctaatttctttcccactttctcaacaagcccaatattccctccaagttcttcttggtgctgagggctgtaggaattattgaaagcttctgcctcacttagtatcgtctggggcccagcacccagcaataactctaataatgtttcttaatggtatagcctcctgagattaaatgtaaaatcaaaaattaggaaatcttggagggagtcctcaagttgtattgctttgctgtgcttttggaagaagggacgacctggaggacacaggctcatgtgtgggtcttcatcctgcctgaccggcagatcttcctctacaccttgggcaaagtctatgcgaagatggtttcttagctctccatttgccatgattttcctcccattcatcatgagggagtttctcaaaccaggagtttatatttattttttagaaaatacacacttttcaggagaaacctgagcatgattttggattctccacctccccccagtctctgcacctgggattcagctcaaggattcagtgtcttcatttttacaaaagttcccccaagaaatcagcaaccagcctctgtttcatctgggagcccctcccttggccccctgggtttgggggtgctgccctactgggaacagcgggggtctgtcacccgtctgagccgcacccccctgtgtggatttcaggaagagcctccctttctttgcgtctccctttctttaattaacattttcaaaagtaataaattcttactgacgacttgtaacttagtcatattttatacttgtagcctttaataaagccatttaaaaaaatgct

SEQ ID NO: 228651 - DNA, 1017 bp, Homo Sapiens
ttggtgcaaacacattggggcttatttcttttatacttattttacttcttattgctctagattgctaatttacctttaacacttccctggttttaggatattaacattcattgctaatatatgtacatactgatttttaatttcttttaaatagtgctgggcctaaaggagataacatttatgaatggagatcaactatacttggtccaccgggttctgtatatgaaggtggtgtgttttttctggatatcacattttcatcagattatccatttaagccaccaaaggttactttccgcaccagaatctatcactgcaacatcaacagtcagggagtcatctgtctggacatccttaaagacaactggagtcccgctttgactatttcaaaggttttgctgtctatttgttcccttttgacagactgcaaccctgcggatcctctggttggaagcatagccactcagtatttgaccaacagagcagaacacgacaggatagccagacagtggaccaagagatacgcaacataattcacataatttgtatgcagtgtgaaggagcagaaggcatcttctcactgtgctgcaaatctttatagcctttacaatacggacttctgtgtatatgttatactgattctactctgcttttatcctttggagcctgggagactccccaaaaaggtaaatgctatcaagagtagaactttgtagctgtagattagttatgtttaaaacgcctacttgcaagtcttgcttctttgggatatcaaaatgtattttgtgatgtactaaggatactggtcctgaagtctaccaaatattatagtgcattttagcctaattcattatctgtatgaagttataaaagtagctgtagatggctaggaattatgtcatttgtattaaacccagatctatttctgagtatgtggttcatgctgttgtgaaaaaatgtttttacctttttacctttgtcagtttgtaatgagaggaatttcctttttaccctttg

SEQ ID NO: 228652 - DNA, 1386 bp, Homo Sapiens
ttggctctgcccctctacctcagcacagaatcgccccgggtcctactacagaatcaatccttgaacactgcctccacgtcgccggctcaatctgggcgagaacccagacttccaccgcagccccgcaatctgcagacctcagcggcagcgcaggtggcagacctgcctcctttgcctgtgagtcatggcagctcccatgaatggccaagtgtgtgtggtgactggtgcctccaggggtattggccgtggcattgccttgcagctctgcaaagcaggcgccacagtttacatcactggccgccatctggacacccttcgcgttgttgctcaggaggcacaatccctcgggggccaatgtgtgcctgtggtgtgcgattcaagccaggagagtgaagtgcgaagcctgtttgagcaagtggatcgggaacagcaagggcgtctagatgtgctggtcaacaatgcttatgcaggggtccagacgatcctgaacaccaggaataaggcattctgggaaacccctgcctccatgtgggatgatatcaacaacgtcggactcagaggccactacttttgctcagtgtatggggcacggctgatggtaccagctggccaggggctcatcgtggtcatctcctccccaggaagcctgcagtatatgttcaatgtcccctatggtgtgggcaaagctgcgtgtgacaagctggctgctgactgtgcccacgagctgcggcgccatggggtcagctgtgtgtctctgtggccggggattgtgcagacagaactgctgaaggagcatatggcaaaggaggaggtcctgcaggatcctgtgttgaagcagttcaaatcagccttctcatctgcggaaaccacagaattgagtggcaaatgtgtggtggctttggcaacagatcccaatatcctgagcctgagtggtaaggtgctgccatcctgtgaccttgctcgacgctatggccttcgggatgtggacggccgccccgtccaagactatttgtctttgagctctgttctctcacacgtgtccggcctgggctggctggcctcctacctgccctccttcctccgtgtgcccaagtggattattgccctctacactagcaagttctaaccctcctggtctgacactacgtctctgcttgtcttctcatttggacttggtggtttgtcctgtctcagtgaaacagcagcctttcttgtttacccatacccttgatatgaagagaagccctctgctgtgtgtccgtggtgagttctggggtgcgcctaggtcccttctttgtgccttggttttccttgtccttctttttactttttgccttagtattgaaaaatgctcttgggagctaataaaagtctcatttctctttc

SEQ ID NO: 228653 - DNA, 904 bp, Homo Sapiens; identical to SEQ ID NO: 194893

SEQ ID NO: 228654 - DNA, 1359 bp, Homo Sapiens
ggcaagagataacacaatttatttaaatatattccgactcaagatgaaggcaagcggtttacctagaaaggtttacatattttagctatagtttttcattgaaccatttttttgaaatgtcattcttttcattcatgcttcttttatcctctttctttagaagttcacagtgttatataagtgaaaaacaagacagatagaaaccaccctaaacatatggctttatgtacataaaaaattcaataatgttgccataacccctaatacagtgtgatccttatttatttattatccagaataaacttctgtacatattaaattcttcaagtatatctagagcagtgcttgtaaaagtgaggtcccactgctaagttaatggccatctctttgaagatcacttctaccttcaacataattatggtacagttctaatagtttttttaattttacatgtatcatacattctcaaatattccaaaatgctcaaatgagccaaacatatactttgatttacatctagtttaatattccctttatacagcaccagaggttaaaaatggatctgagtaaccaaatattctctttcctttattagttagagtttatcatcatttatttctataacattaaacccaaattgaagatgaagacaccctgggtcaaatgctttcaccttaaataaataaacatttcatccacttcatacttaaataccaagttgttttcctataacatatgtttcttggtaacaactactgaatcaactaagctgaacaccaacttcttatctttgaggactaggcaagtcggataggattctctaggtttgctttaaaacttttaagaaacctggttgccagttcgtcatcaaccactcgactgtcacttgacattgtgactgttatgagctggcgctgctgcagtttggcatttccctcttcatcctcagtgagcttcagcacaggtcggaacctcccaaccgccaaaatgcaggcctgaggagggttaatcactgcagtaaattcgtcgatgccaaacatccccaagttggaaatactaaaagatcctccttggtattcttcaggcaacaattttccatctcttgctttctttgatagagcctttacagagtcagcaatttcctggatacctttagcagcagcatcttttatgattggagtaagtaagcctttatctgttgccacagccactgaaatgtcaataaatggcagttgctttgggccctctccatcccagcttacattaacatctggcatttgtttaagggtaacagctgctgccttgatgataaaatcatttactgatactttaatgtcatctgaaagaaaaataagccaa

SEQ ID NO: 228655 - DNA, 1231 bp, Homo Sapiens
ttggctgtactatattattcagatggacagtgagtaaaacaaaattgctcatccttaccagctgctgtttgtttctttttaatctttaagttttacatggacggatggcaaattaaacagcagtaacttggtaattctgtctggccaagtggttgaacactttgatctggagttccgaatcctgtatgcccagtccaagcccatcagccccaaactcctgtctcacttccagagcagcaacaagtttgatcacctcaccaaccgaaaaccacagtccaaggagctcaccctgggcaacctgctgcggatgcggctggctaggctgtcaagtactcccaggaaggcggacctggacccagagatgcccgcagagggcaaggcagagcgcaagccccatgactgtgagtcctctactgttagtgaggaagactacttcagcagccacagggacgagctccagagcagaaaggccattgacgctgccactcaaacagagccaggagaggagatgccagggctgagtgtgagtgaggtgggaacacaaaccagcatcaccacagcatgtgctggtacccagactgcagtcatcaccaggatagcaagctctcaaaccacgatttggtccagatcgaccactactcagactgacatggatgagaacattctctttcctcgaggaactcaatctacagaagggtcaccagtctcaaaaatgtctgtatcgagatcttccagtttgaagtcttcctcctctgtgtcttcccaaggctctgtggcaagctccactggttctcccgcttccatcagaaccactgacttccacaatcctggctatcccaagtacctgggcaccccccacctggaactgtacttgagtgactcacttagaaacttgaacaaagagcggcaattccacttcgctggtatcaggtcccggctcaaccacatgctggctatgctgtcaaggagaacactctttactgaaaaccaccttggccttcattctggcaatttcagcagagttaatttgcttgctgttagagatgtagcactttatccttcctatcagtaactgctccgtgttcagactcctggtttcttccaggcttacagtggacatcatcagcttcctgctttaaaaaatatcttatgtccctaattgcctttcttttacctgactttgtcacctttgttgtctttgaattctttaggctgcatattattttacatg

SEQ ID NO: 228656 - DNA, 934 bp, Homo Sapiens
tacaaaaaagttggcctcgctttacccggacgaaagacacgggcctgattcgtcgagtctcactgagccttagtcgtcggcaggtcccaggcgcgaagtttctcggcctggaggagggggtcgcgcgaagtgccagatgcaggcggggaagcccatcctctattcctatttccgaagctcctgctcatggagagttcgaattgctctggccttgaaaggcatcgactacgagacggtgcccatcaatctcataaaggatgggggccaacagttttctaaggacttccaggcactgaatcctatgaagcaggtgccaaccctgaagattgatggaatcaccattcaccagtcactggccatcattgagtatctagaggagacgcgtcccactccgcgacttctgcctcaggacccaaagaagagggccagcgtgcgtatgatttctgacctcatcgctggtggcatccagcccctgcagaacctgtctgtcctgaagcaagtgggagaggagatgcagctgacctgggcccagaacgccatcacttgtggctttaacgccctggagcagatcctacagagcacagcgggcatatactgtgtaggagacgaggtgaccatggctgatctgtgcttggtgcctcaggtggcaaatgctgaaagattcaaggtggatctcaccccctaccctaccatcagctccatcaacaagaggctgctggtcttggaggccttccaggtgtctcacccctgccggcagccagatacacccactgagctgagggcctagctcccaaatcctgccccgttggcacagggccacaggagcagaagctgggtgggctgaagaggcctggaaacgagagtcttattgaggagatgggagactcgaactctagccctggatctgccttcctgctgaaacttgttccacctc

SEQ ID NO: 228657 - DNA, 440 bp, Homo Sapiens
tttgtacaaaaaagttggcgtcgaggggagaggcagcagccgcgatggacgtgttcctcatgatccggcgccacaagaccaccatcttcacggacgccaaggagtccagcacggtgttcgaactgaagcgcatcgtcgagggcatcctcaagcggcctcctgacgagcagcggctgtacaaggatgaccaactcttggatgatggcaagacactgggcgagtgtggcttcaccagtcaaacagcacggccacaggccccagccacagtggggctggccttccgggcagatgacacctttgaggccctgtgcatcgagccgttttccagcccgccagagctgcccgatgtgatgaagccccaagactcgggaagcactgccaatgaacaagccgtgcagtgagacccccaagaggcccatttcccccaataaaagagattt

SEQ ID NO: 228658 - DNA, 1324 bp, Homo Sapiens
ttggggataaattggcaagaaaactggcatctttaactccagggttttcaggtgctgatgttgctaatgtctgtaatgaagctgcgttgattgctgcaaggcatctgtcagattccataaatcagaaacactttgaacaggcaattgagcgagtgattggtggcttagagaagaaaacgcaggttctgcagcctgaggagaagaagactgtggcataccacgaagcaggccatgcggttgccggctggtatctggagcacgcagacccgcttttaaaggtatccatcatcccacgtggcaaaggactaggttatgctcagtatttaccaaaagaacaatacctctataccaaagagcagctcttggataggatgtgtatgactttaggtggtcgagtctctgaagaaatcttctttggaagaattacaactggtgctcaagatgacttgagaaaagtaactcagagtgcatatgcccaaattgttcagtttggcatgaatgaaaaggttgggcaaatctcctttgacctcccacgtcagggggacatggtattggagaaaccttacagtgaagccactgcaagattgatagatgatgaagtacgaatacttattaatgatgcttataaaagaacagtagctcttctcacagaaaagaaagctgacgtggagaaggttgctcttctgttgttagaaaaagaagtattagataagaatgatatggttgaacttttgggccccagaccatttgcggaaaaatctacctatgaagaatttgtggaaggcactggcagcttggatgaggacacctcacttccagaaggccttaaggactggaacaaggagcgggaaaaggagaaagaggagcccccgggtgagaaagttgccaactagaggcccagagggaggccatctcagtctgtccactgtggtttcagctggtgcattatttcagctgtggctttcagaagaatgggaatgctgcgctgattttagccagccactggcccagctgaaatgatggggaaaggagtccttagtcctttcagcctcagaggtcacagtgggtggcaggtgactttccggaggccttgagggaaatgcacactgtcccatagcctcattgggctcccagacgtgctggaaaggttgagcccagagtggccgagctggaccctgtggcaccaagtggggtcggctgaccgtgtggcagggatcgttgcactggactcttggcgtgtgggaagggatgctttctctttgtcgcccactcttcattcctgtttctcctcaggttcccctgtgcagatgggctgtgaaattaa

SEQ ID NO: 228659 - DNA, 1180 bp, Homo Sapiens
  misc_feature (1081)..(1095): n is a, c, g, or t
ttgggtctgtcatgatttttactctttcactccaattcagtaattgttgatagtattacttacctagtccatccatactcatattattcaaatatataggtggtacttttgaaacaattacattggttctcttggtttaactgaggtttatgaatattcaaacctttgctgggggaaagaaatgaaagttaatgagcatgcttgctatgagagagggatttttaatttaacttgtagttatagtttacttattgtttttagaattacttttacattttcccaactagatggcctagagtccaacattaccttttgagatgacattattgtctccataattgagtgatagctttaaaaaaaagattagttttgcttaagaagttatgttacaactgatcagccctatatgaattaactgatcagccctatatgaaacataagtcgtgttataacttatcagccgtatatggaacataaatagtttctacctgcttgttagagaagctttaatttggttctaataaatacagtatggtagtgattataggaatccaggatgttgaagaaatggcataatgtctatattttggaaacagaaaggaaaagtcacttaagatagtattaagtaattaaattcctatgtcagttgccaaatcttttaaacttatgtattcaccaagcccaaaaatagattgtggctcccaggattccaattttaattggagagctaagtaagtaaagttttataactgttaggtttcttaatgatcatattttgcagttttagtaaaagggaaatattgttatacatttattaaatatacttcccccatgaagtgaaaaggttaattttgctgaatgttttaagttgaagttacttcatggatgtcatacccatgaagtgcatttggatgagatagaagaaattgttttttaaaaagtttaagtaccaaaggtagtctagtctagaacgataagttaatacgtgttggcttttctaatttgtactgtaacatccttatactttctattttaagtatatctgtttcttaagtaaacaacttaaatattttccacaccnnnnnnnnnnnnnnnctgatgcagagttcaggttaatattttactgcatctgataatgtattatacgtttgaagcctagtgacttttcattttgacattc

SEQ ID NO: 228660 - DNA, 1404 bp, Homo Sapiens
  misc_feature (93)..(154): n is a, c, g, or t
ttgggtttcaagattaccagttcaaacaaacaaaggaagaagttctaaaggattttgaagacttggctggaaaactcccatggtcaaaccccnnnnnnnnnnnnnnnnnnnnnnnnnnnnnnnnnnnnnnnnnnnnnnnnnnnnnnnnnnnnnntcagaattcaagtaaagagaagattaataatggacaagaagtcaaaatcgatcagagaaatgttaaaaaagagttcactagccatgctttagattctcatatcttagattattatgaaaatccagccatcaaagaggatgtatcaacattaataggtgatgatttggcatcttgcaaagatgagactgatgaaagctcaaaagaagaaactgagcctcaagtgctgaagtttagagtcacatgcaacagggcaggagagaaacattgctttacctcaaatgaggctgcaagagattttgggggtgctgttcaagattattttaagtggaaggccgacatgaccaactttgatgtggaggttcttttgaacatccatgataatgaagtcattgtgggcattgcattgactgaagagagtctccaccgaagaaatataacacattttggacctacaactcttagatcaactcttgcctatgggatgctcaggctctgtgatcctctaccttatgatataatagtcgatccaatgtgtggaactggggcaataccaatagagggggccactgaatggtctgactgtttccatattgctggtgataataatccactggctgtgaatagagcagcaaataacattgcatctttattgaccaagagccaaattaaagaaggcaaaccctcctggggcttgcccatagatgctgttcagtgggatatctgcaatctgccattgagaactggctctgtggatattattgtaacagatttgccatttggaaaaaggatgggatccaagaaaagaaactggaacctttatccagcttgcctacgggagatgagccgtgtctgcacacctaccacaggccgagctgtactacttactcaagacacaaaatgctttaccaaggcgttatctggaatgcgacacgtatggcgaaaggtggatacagtctgggtgaacgttggtggtcttcgtgctgcagtttacgttctgatacgtacacctcaagcttttgttcatccttcagaacaagacggagaaagaggaactctttggcaatgcaaagaatgaagatgactaatagtacttgtacttcccaccactggaaatgttagcataaaagaacttggagaggaaaaaagtattaacaaaactgcagtctgcactctttaaacctgtttaaggctcttcatcctggttagcaaaaggtgtgaatgtaatgtgatggaatttaaaagttttatga

SEQ ID NO: 228661 - DNA, 849 bp, Homo Sapiens
  misc_feature (136)..(161): n is a, c, g, or t
ccatttctgattccactttcaaagtcttggatatattctttgaaaaatgagtagtatggaatattaagattatgttccttatactcagaatactttttatgagctctcttgtttttttgttactattattcctttnnnnnnnnnnnnnnnnnnnnnnnnnntgtttatagtgttcatgtaattttttttgctgtttaccaatgaactttgccctgttgtggttttgggggatcagaaggattcctaaactgtcatttcatttattggtaggtcatgattgctgagggttttgctttggatttttcatacctataaagtcaatcttgagttgatcagagaaagggaaacttactcctaataaacagactcagaacagaagggacatatgcataaatcaggataccatctcattaatttacaaaggataatctttcttttcattgacaacacctacacccacctgttttccagtgttcttctctctaaacagcaaagccaaagcactctgcacaccaaatcacctgttcagaggtttatgcatgagcatatttcttttaggccgtggtgaagttgataaaccacccctgctttgtaacaaaattattttaaagtgactggaattatctagtccccagattgatcatctcccctggcaacgtgactctgttttttgtgtgtgtttccatgctgactagtcccctactgttaatatcactactaattaggctataaccaggtctttcctggcctgagaaatattctcttaaaatgacctttgttttaatctcattcatgatgttgattttttttcaatgtggtgcaatatatacaataaaatttgtcataact

SEQ ID NO: 228662 - DNA, 728 bp, Homo Sapiens
  misc_feature (246)..(331): n is a, c, g, or t
ttactatcatgctggctgcctccatttccttctggaccaccaataattcccccaccacctcccatatgtccagattctcttgatgatgctgatgctttgggaagtatgttaatttcatggtacatgagtggctatcatactggctattatatgggtttcagacaaaatcaaaaagaaggaaggtgctcacattccttaaattaaggagaaatgctggcatagagcagcactaaatgacaccactannnnnnnnnnnnnnnnnnnnnnnnnnnnnnnnnnnnnnnnnnnnnnnnnnnnnnnnnnnnnnnnnnnnnnnnnnnnnnnnnnnnnnaaaaaggaagtggaatgggtaactcttcttgattaaaagttatgtaataaccaaatgcaatgtgaaatattttactggactctattttgaaaaaccatctgtaaaagactggggtgggggtgggaggccagcacggtggtgaggcagttgagaaaatttgaatgtggattagattttgaatgatattggataattattggtaattttatgagctgtgagaagggtgttgtagtttataaaagactgtcttaatttgcatacttaagcatttatgaatgaagtgttagagtgtcttaaaatgtttcaaatggtttaacaaaatgtatgtgaggcgtatgtggcaaaatgttacagaatctaactgggcggacatcgctgttcattgtactgttttttt

SEQ ID NO: 228663 - DNA, 1005 bp, Homo Sapiens
aaatcagtaagatggggagtgggggaagagtcagagggaactttgcccacctttgaagatcaaatcaagaaatcagggaaagcaaagacttaggagaggagaaagacattctctcaatccatcctccttccccagggcagagaattaaacaacgttactgagtgagcctctggagcagaaggctctcccatctatgcacagacttcactcctcctccccaggctttcctggacaatgtccagggctggccttagccaacagaaatagaggggtcaagggggtccaggagtacggaagggtcagcagggaccctcaatactgattcttctctggctggaggtgggcaggaagcagacatagctcaaatactgagcagccaaaaaaagaagaagatggcgagaaacaggaagagggaatcctgccagctggaggctgggtgaccctgtcccagatccacacctgtaccccggcggaaaggctcatgggcattgaagacggtggtgaaaaagccaaagggaaaagcaccaacaccaaatgagaagtggaagcccccggtatcaccaaatggctggaatccccctctgctctccggagctggtctctggccctgggggcggggtggagtttttaatctgggatcctggggcttctggctccctcgcccataaagcgggacaaccttctctctgctgatcccagctttacatactggacactcttgccgttctggccgtgtctccagccactgatgaagacatggccaacagtacaggtggccacacacactgaccacagcttcccgagcagtctccaaacatatattacattcgaaggtcgcgcccgccccgccccgctcgcgatttggcccttcggggcccccgtcctcctcctccgctgctgccatggccggttttgtttcgccccacgtacccttcagtccccccaaatacacatacacacgccccaacaaaccagaaaccacctcctgcccacgatcgttgccaa

SEQ ID NO: 228664 - DNA, 926 bp, Homo Sapiens; identical to SEQ ID NO: 194897

SEQ ID NO: 228665 - DNA, 431 bp, Homo Sapiens
cctataaaagccaactttgtacaaaaaagttggctcagaggggcccatggattaacgccctcatcccaaggtccgtcccatgacataacactccacacccgccccagccaacttcatgggtcactttttctggaaaataatgatctgtacagacaggacagaatgaaactcctgcggctctttggcctgaaagttgggaatggttgggggagagaagggcagcagcttattggtggtcttttcaccattggcagaaacagtgagagctgtgtggtgcagaaatccagaaatgaggtgtagggaattttgcctgccttcctgcagacctgagctggctttggaatgaggttaaagtgtcaggtacgttgcctgagcccaaatgtgtaatgtggtctgggcacgcagacctttacgttttgctgcttattcct

SEQ ID NO: 228666 - DNA, 719 bp, Homo Sapiens; identical to SEQ ID NO: 194898

SEQ ID NO: 228667 - DNA, 994 bp, Homo Sapiens
ttggcggtagttgctgtggtttccgttctgagctcgcagcttaggagctgaagatcgcggacttagcgttgccgcgtccgagtccggccatcagtggctgcagatccggaggccaggagctcaaccacccttcttcggaacagggccggcctgctgctgtgccctcgacgctcggtgcctgtatctactccggggcctaggtcggctccgggggcggcttaggagaaggccgccggcgagatgttcaaaaacacgttccagagcggcttcctctccatcctctacagcatcggcagcaagcctctgcaaatctgggacaaaaaggtacggaatggccacatcaaaagaatcactgataatgacatccagtccctggtgctagagattgaagggacaaatgtaagcaccacatatatcacatgccctgcagaccccaagaagacgctgggaattaaacttcctttccttgtcatgattatcaaaaacctgaagaagtattttaccttcgaagtgcaggtactagatgacaagaatgtgcgtcgtcgctttcgggcaagtaactaccagagcaccacccgggtcaaacccttcatctgcaccatgcccatgcggctggatgacggctggaaccagattcagttcaacttgctagacttcacacggcgagcatacggcaccaattacatcgagaccctcagagtgcagatccatgcaaattgtcgcatccgacgggtttacttctcagacagactctactcagaagatgagctgccggcagagttcaaactgtatctcccagttcagaacaaggcaaagcaataactggaattgtgactcgagggatagaaccctggatgtgactcttctttttaaaaggaaactatgtggaggacgatgcaaaaacatatttatcttagtttgctctgctgtaattctgttatttatacttggtgttgcttgtcatggacaccggtgaacatgccgtaactctgtg

SEQ ID NO: 228668 - DNA, 814 bp, Homo Sapiens
gagcaatgctttccttataatagccaactttgtacaaaaaagttgggtgatgcttttgccagtggatgatctggaatgcgaccggagcacttgctctgaggaatcccagggtgactctgtcggggaagaatccggtcacagcctcccctcagagacaggcctcagttcgagggcagcccattatctgtcgcagacatctgccatgtccctgagactgcgggaggcaggggatgcatgggtgtccccatctgtccctggtgagaagcaaggctagctctgccttccacatgcttctcaggatgccaagaggcctaggaacccagaaacccccttggaggagctgtgtatgcgggggtgccaggaagggcatagctcctgcccccaggcctaggcatgctgcttgctcggccatccccacttcctcctctaccccaacacatgcaggctaggccttgccctggaacgtggaggccctgcccggggctggggcctagtccagcagccaccaaagtctggcagactttctgcatttgagaaacatgacaaagggccccgcagcccttctgcacccagcacagcctgcccagcccagccctgcccccgggcactgcacagcctgtctgggggccagaccaccccattgtccatccttgttgtccgtgagtccttggcctccaccaagcacgtgtggccattgtgtgcctgccttagtgactccgtggttttgtgaggagcagagtgtgtatgatttttgcctcagaaactatactcttctgtgtaacagaccaataaacaacatttgtcaacactggga

SEQ ID NO: 228669 - DNA, 1540 bp, Homo Sapiens
  misc_feature (1376)..(1387): n is a, c, g, or t
  misc_feature (1450)..(1473): n is a, c, g, or t
actttgtacaaaaaagttggaggctatccactcgggatggcttactttttaaaagggtagggggaggggctggggaagatctgtcctgcaccatctgcctaattccttcctcacagtctgtagccatctgatatcctaggggaaaaggaaggccaggggttcacatagggccccagcgagtttcccaggagttagagggatgcgaggctaacaagttccaaaaacatctgccccgatgctctagtgtttggaggtgggcaggatggagaacagtgcctgtttgggggaaaacaggaaatcttgttaggcttgagtgaggtgtttgcttccttcttgcccagcgctgggttctctccacccagtaggttttctgttgtggtcccgtgggagaggccagactggattattcctcctttgctgatcctgggtcacacttcaccagccagggcttttgacggagacagcaaataggcctctgcaaatcaatcaaaggctgcaaccctatggcctcttggagacagatgatgactggcaaggactagagagcaggagtgcctggccaggtcggtcctgactctcctgactctccatcgctctgtccaaggagaacccggagaggctctgggctgattcagaggttactgctttatattcgtccaaactgtgttagtctaggcttaggacagcttcagaatctgacaccttgccttgctcttgccaccaggacacctatgtcaacaggccaaacagccatgcatctataaaggtcatcatcttctgccacctttactgggttctaaatgctctctgataattcagagagcattgggtctgggaagaggtaagaggaacactagaagctcagcatgacttaaacaggttgtagcaaagacagtttatcatcaactctttcagtggtaaactgtggtttccccaagctgcacaggaggccagaaaccacaagtatgatgactaggaagcctactgtcatgagagtggggagacaggcagcaaagcttatgaaggaggtacagaatattctttgcgttgtaagacagaatacgggtttaatctagtctaggcaccagatttttttcccgcttgataaggaaagctagcagaaagtttatttaaaccacttcttgagctttatcttttttgacaatatactggagaaactttgaagaacaagttcaaactgatacatatacacatatttttttgataatgtaaatacagtgaccatgttaacctaccctgcactgctttaagtgaacatactttgaaaaagcattatgttagctgagtgatggccaagttttttctctggacagtaatgtaaatgtcttactggaaatgacaagtttttgcttgannnnnnnnnnnnaaacaaaaaatgaaatataacaagacaaacttatgataaagtatttgtcttgtagatcaagtnnnnnnnnnnnnnnnnnnnnnnnnaaaatgcaaccctgccccctccccagcaaagtcacagctccatttcagtaaaggttgggagtcaata

SEQ ID NO: 228670 - DNA, 483 bp, Homo Sapiens
gaaaaaataagttctccaccccacatgtataccaataccatgatcacataaagtcgagttcttcaaatccaattctaaagtgaaacattgcatgattttgaattgtacactgcatgattaatagtatcagtgaaataagaatcaattcacttacattacaaaatcaccaaatatacaaagcaattttgcatattagttacaacttaacccccagtctcatattaactgaagtaaatttcatgagtgaagccacagagattggttaaaaagtataatatagttccagtttcaaatctttatgtcttactagttaatgtagaaagacaaaatctcatgggagaagagtaaaccaaacttgctaaaaataaagggttgctttctacaattggtgtgtttaagtatttaaaatacaatctgaatgctaagaggttgtttcagaaccaacattaataatttcattttagggccgggcacggtggctca

SEQ ID NO: 228671 - DNA, 1723 bp, Homo Sapiens
ttggataacttgccccctgaagcatatccatgaaaggcactatacttgttaaaagattgtatccagaattatttgcaaacttgcccatacgacaaagaacaggaatactgttgtatggtccgcctggaacaggaaaaaccttactagctggggtaattgcacgagagagtagaatgaattttataagtgtcaaggggccagagttactcagcaaatacattggagcaagtgaacaagctgttcgggatatttttattagagcacaggctgcaaagccctgcattcttttctttgatgaatttgaatccattgctcctcggcggggtcatgataatacaggagttacagaccgagtagttaaccagttgctgactcagttggatggagtagaaggcttacagggtgtttatgtattggctgctactagtcgccctgacttgattgaccctgccctgcttaggcctggtcgactagataaatgtgtatactgtcctcctcctgatcaggtgtcacgtcttgaaattttaaatgtcctcagtgactctctacctctggcagatgatgttgaccttcagcatgtagcatcagtaactgactcctttactggagctgatctgaaagctttactttacaatgcccaattggaggccttacatggaatgctgctctcgagtggactccaggatggaagttccagctctgatagtgacctaagtctgtcttcaatggtctttcttaaccatagcagtggctctgacgattcagctggagatgggagaatgtggcttagatcagtcccttgtttctttggagatgtccgagatccttccagatgaatcaaaattcaatatgtaccggctctactttggaagctcttatgaatcagaacttggaaatggaacctcttctgatttgagctcacaatgtctctctgcaccaagctccatgactcaggatttgcctggagttcctgggaaagaccagttgttttcacagcctccagtgttaaggacagcttcacaagagggttgccaagaacttacacaagaacaaagagatcaactgagggcagatatcagtattatcaaaggcagataccggagccaaagtggagaggacgaatccatgaaccaaccaggaccaatcaaaaccagactggctattagtcagtcacatttaatgactgcacttggtcacacaagaccatccattagtgaagatgactggaagaattttgctgagctatatgaaagctttcaaaatccaaagaggagaaaaaatcaaagtggaacaatgtttcgacctggacagaaagtaactttagcataaaatatacttctttttgatttggttctgttaagttttttgatggcttttccatatgttgtaacaggaaaaaaatggtgtctatgaatttcttcttaatttaacaaatttggttaatttataaaatcacagattggtaaatgctataattatgtaatgatcaggattgagattaatactgtagtataaattgggacattataacagattccatattttatttcctaaaatctaaattcagtctttaatgaaataatattagccaaatggtggaactaatttatttcttttgaggaaaagataataaagaatgtaattaaatttaaatttcttggaattcccagttgtatattcatcacctttgtagcatttgacaaattttatgcttagcagcttc

SEQ ID NO: 228672 - DNA, 826 bp, Homo Sapiens
ctttgtacaaaaaagttggcaggggaaccccgacgggcgggcggcgagcaggcccgggagccgggaggctgcgggcggcggcgctggacccgacgcggcgagagaggccccgagatgccgagcaagaagaagaagtacaacgcgcggttcccgccggcgcggatcaagaagatcatgcagacggacgaagagattgggaaggtggcggcggcggtgcctgtcatcatctcccgggcgctcgagctcttcctagagtcgctgttgaagaaggcctgccaggtgacccagtcgcggaacgcgaagaccatgaccacatcccacctgaagcagtgcatcgagctggagcagcagtttgacttcttgaaggacctggtggcatctgttcccgacatgcagggggacggggaagacaaccacatggatggggacaagggcgcccgcaggggccggaagccaggcagcggcggccggaagaacggtgggatgggaacgaaaagcaaggacaagaagctgtccgggacagactcggagcaggaggatgaatctgaggacacagatactgatggggaagaggagacatcacaacccccaccccaggccagccacccctctgcccactttcagagccccccgacacccttcctgcccttcgcctctactctgcctttgcccccagcgcccccgggcccctcagcacctgatgaagaggacgaagaagattacgactcctagcgccttctgccccccagaccatagccccttttagttggttttagttgctctggggggaggagagaaggtagagctgttcttaaatttattataa

SEQ ID NO: 228673 - DNA, 841 bp, Homo Sapiens
ttggggttctctccggtcttgtccacgctagggggtgcacgtactcccaactgtggtcgcgctctcaccccttctgctgctctcgtggccccctcgcgatggcgggcatcctgtttgaggatattttcgatgtgaaggatattgacccggagggcaagaagtttgaccgaggtaagtaagtgtctcgactgcattgtgagagtgaatctttcaagatggatctaatcttagatgtaaacattcaaatttaccctgtagacttgggtgacaagtttcggttggtcatagctagtaccttgtatgaagatggtaccctggatgatggtgaatacaaccccactgatgataggccttccagggctgaccagtttgagtatgtaatgtatggaaaagtgtacaggattgagggagatgaaacttctactgaagcagcaacacgcctctctgcgtacgtgtcctatgggggcctgctcatgaggctgcagggggatgccaacaacctgcatggattcgaggtggactccagagtttatctcctgatgaagaagctagccttctgaacctcgcctgaagccagcctctctgccaagtcactcaggtcatgggcattgttcaagcctgagtggcagccgctcttgctcacctgttgaggaagggctggctcactgtccaccgtggcggcatctttaactggcctccactcaatgggaaactgactcgcctgtgaaagacacagtgggagagctgaaaatgaatcagaagctttatgtatatgatttttaaattaaactttactttttcagactgcccctcctctttttgtaaaaagtccatttactgt

SEQ ID NO: 228674 - DNA, 744 bp, Homo Sapiens; identical to SEQ ID NO: 194900

SEQ ID NO: 228675 - DNA, 343 bp, Homo Sapiens; identical to SEQ ID NO: 194901

SEQ ID NO: 228676 - DNA, 953 bp, Homo Sapiens
ttggccaaagtcaagcagaggattgattacgccaacctgaccggaatctctgtcagcagcctgagcgacagtctttttgtgcttcatgtacagcgtgcggacaataagcaaaagggagatgtggtgctgcagagtgaccacgtgattgagacgctgaccaagacagccctcagtgccaaccgcgtgaacagcatcaacatcaaccagggcagcatcacgtttgcagggggccccggcagggatggcaccattgacttcacacccggctcggagctgctcatcaccaaggccaagaacgggcacctggctgtggtcgccccacggctgaattctcggtgataaaggcgcccactggaccctcccaacgcccaatgctttgcttttctcctcctccccttcccagttaccaaagactcgaacttccagacagggacccagggacaccccgaagcccacctgcaatctcccacctcctgcccatccctctcttgagggagcagcaggggccaggagctaccccaggagtgggccaggccgggccacagcaataggaaagccagggccagagcgagccatgccagccctactgccgatgccaaatatttgagagaagggaacttttgctgaggttttctctgaggtttttttgatgctttataggaaactattttttaaaaaaagccatttcccacccaaggacacagtggatgtgttttccctgactccagcagggcaaggaatgtagccgagaggttgtgtgggctgggctctggtgccctcttccctggccaggacacctctcctcctgattcccttggcaccttgtctttctgtctgtttacctgtctccctgcctgcccatctgcatcttttgcagcccactctgacttccatctgggggctgagaccacccttgcctgcccccttctttctgccttaagaatgtcctttta

SEQ ID NO: 228677 - DNA, 766 bp, Homo Sapiens
ttggcttgttgatcctggtttagaaacttgacttacttgtctgatttattattattattcttttgttatttttttagacacagctccgaattgattccttctttagattagcacaacaggagaaagaagatgctaaacgtattaagagccagagactaaacagagctgtgacatgtatgctaaggaaagagaaagaagcagcagccagcgaaatagaagcagtttctgttgccatggagaaagaatttgagctacttgataaggcaaaacgaaaaacccagaagagaggcataacaaataccttagaagagtcatcaagcctgaaaagaaagaggctttcagattctaaacgaaagaatacatgcggtggatttttgggggagacctgcctctcagaatcatctgatggatcttcaagtgaagatgctgaaagttcatctttaatgaatgtacaaaggagaacagctgcgaaagagccaaaaaccagtgcttcagattcgcagaactcagtgaaggaagctcccgtgaagaatggaggtgcgaccaccagcagctctagtgatagtgatgacgatggagggaaagagaagatggtcctcgtgaccgccagatctgtgtttgggaagaaaagaaggaaactaagacgtgcgaggggaagaaaaaggaaaacctaattaaaaaatatgtatcctctataattagttatgacagccatttgtaatgaatttgtcgcaaagacgtaataaaattaactggtagcacggaa

SEQ ID NO: 228678 - DNA, 1308 bp, Homo Sapiens
ctagtaaaattattttatttagttgtaatatccatctctaattggtttgaaataaaaatttccatggtcttaatggagctgtatgttactttcttttagaatatccttttttcattaaaataatttctaaacccactctatgtgttcaaccttctgtttaacactaagatatgggtttttggaaaggccacaagtcaccagctccatgaagtggcgaattggtccttgttttggaaagctctccaggtgtttctccagaaatatatgttcatgaaattctgaaccatcatcatcaaaacctgcttcattgttaattgggaactcccatagtttcccctcttttgtccactggatcagctcttcaaatccattctgaaggggttgttcatttactgtggctaactgcttagcaaattccacatcccaaagtgaaggtgatgtgtctgtttcaggtgcttctttagtaactgccatcatgtcaaaaatattaagtcttttccctgtgaatatatttttcctttttttaagatcatccgtcttctcctggccaggataattgtcatagccttcatcaaactgaatccgaagctctggtcttgaacgaactctagctgtagcagatctggcaactttcatatctgatattatgttactgaaactaattttaggtcgctttgcatctctctgtgcccttgactcttcctcatgctgctggagctggctcagcagctctgacttggttgtttgcttatcaaaagggagagaatctgccacagcagatgcagctgccaccaactcaggactcaggggctcaattctcttctttggagcatattctgtagctcttcgaagcctgccaagtgtagcttccaaacttttaagtggtcttcttttggggggctttgttgttcgtacatttactgtgcttaattcaactttcatgcccttaataatgcctaacaagtcttttttcgtattttccttttcactgtcttggctctctgaagtctccttggaagtctcctcagttcgaacagactgcttatctttcttgctacagatcacactgttagtgccaaaatatctttggatgttattttttgtccgggccaacagcgctgaactgcggtacctgactgttccgtgccgaacagtgagtagcataatcgcagccgctgatgtctccgggcttccagaggacaaagggtggcgggaaagggggcgaagaggtaggaacgtcgagactctaggaaacatcgccgagacacgaaatgaaccaagaacacaactgaaatggtgcgtccccaa

SEQ ID NO: 228679 - DNA, 915 bp, Homo Sapiens
ctttgtacaaaaaagttggggtctatcctcaccataatagacacgagtgggtggaattaggaggagaatgcaatattaattgttccaaaacaggctatagtgcaaatatcatcttccacactaaacccttctatgggggcaagaagcacagaattactgccgagattttttctccaaatgacaagaagtctttttgctcaattgaaggggaatggaatggtgtgatgtatgcaaaatatgcaacaggggaaaatacagtctttgtagataccaagaagttgcctataatcaagaagaaagtgaggaagttggaagatcagaacgagtatgaatcccgcagcctttggaaggatgtcactttcaacttaaaaatcagagacattgatgcagcaactgaagcaaagcacaggcttgaagaaagacaaagagcagaagcccgagaaaggaaggagaaggaaattcagtgggagacaaggttatttcatgaagatggagaatgctgggtttatgatgaaccattactgaaacgtcttggtgctgccaagcattaggttggaagatgcaaagtttatacctgatgatcagggcagtaggcataattcagcaacaaacaatcttcctttgggagaaacctgttcattccaatcttctaattacagtggttcctatctcagggatactggactttctgacgcagatgaacaattaaggggaaaagcttcccttttccctctgtggcagttacgattttgacttcagtcctgagaaaaacttcaggttttgaaaatcagatgatgtcttctccttttccaaacaccacacgttgaaagcatttataaatccaagtctgaaactctgcgctctagtactgctgttaagatacacaacttgtttcttagttcatataatctcggg

SEQ ID NO: 228680 - DNA, 585 bp, Homo Sapiens
ttggctctcggcttccactgcagccatgtcactcctcttgctggtggtctcagcccttcacatcctcattcttatactgcttttcgtggccactttggacaagtcctggtggactctccctgggaaagagtccctgaatctctggtacgactgcacgtggaacaacgacaccaaaacatgggcctgcagtaatgtcagcgagaatggctggctgaaggcggtgcaggtcctcatggtgctctccctcattctctgctgtctctccttcatcctgttcatgttccagctctacaccatgcgacgaggaggtctcttctatgccaccggcctctgccagctttgcaccagcgtggcggtgtttactggcgccttgatctatgccattcacgccgaggagatcctggagaagcacccgcgagggggcagcttcggatactgcttcgccctggcctgggtggccttccccctcgccctggtcagcggcatcatctacatccacctacggaagcgggagtgagcgccccgcctcgctcggctgcccccgccccttcccggcccccctcgccgcgcgtcctccaaaaaata

SEQ ID NO: 228681 - DNA, 513 bp, Homo Sapiens
ctttgtacaaaaaagcgatgaccttctgccggctgctgaaccggtgtggcgaggcggcgcggagcctgcccctgggcgccaggtgtttcggggtgcgggtctcgccgaccggggagaaggtcacgcacactggccaggtttatgatgataaagactacaggagaattcggtttgtaggtcgtcagaaagaggtgaatgaaaactttgccattgatttgatagcagagcagcccgtgagcgaggtggagactcgggtgatagcgtgcgatggcggcgggggagctcttggccacccaaaagtgtatataaacttggacaaagaaacaaaaaccggcacatgcggttactgtgggctccagttcagacagcaccaccactagagcgtgtggcacgccgggggtcccgcagcatcctgtgagcatttccgcggggaagctgagcacgtgaagctcgctggttctgtgcgaagggtattcctggtgctgaataaagggtgttgctgtcaaggctgac

SEQ ID NO: 228682 - DNA, 1227 bp, Homo Sapiens
tttgtacaaaaaagttgggaatggaggaggtgcctcacgactgtccaggggccgacagcgcccaggcgggcagaggggcttcatgtcagggatgccccaaccagcggctgtgcgcttctggagcgggggccactccggacacggctatagagggaatcaaagagaaaatgaagactgtaaaacacaaaatcttggtattgtctgggaaaggcggtgttgggaaaagcacattcagcgcccaccttgcccatggcctagcagaggatgaaaacacacagattgctcttctagacatcgatatatgtgggccatcgattcccaagataatgggattggaaggagagcaggttcaccagagtggctcaggctggtctccagtgtacgtggaagacaacctgggggtgatgtcagtgggcttcctgctcagcagtcctgatgatgctgttatctggaggggacccaagaaaaacggcatgatcaagcagttcctccgagatgtggactggggagaggtcgactacctcattgtggacaccccacctgggacgtcggatgaacacctctcggtcgtccggtacctggccacagcacacatcgatggagcagtgatcatcaccactccccaggaggtgtcactccaggatgtccggaaagaaatcaacttctgccgcaaggtgaagctgcccatcatcggggtggtggagaacatgagtggcttcatctgtcctaagtgcaagaaagaatctcagatattccctcccacaaccgggggcgcggagctcatgtgccaggacttggaggtccctctcctcggcagagtgcccctggatccgctcataggtaagaattgtgacaaaggccagtcttttttcattgacgccccagattccccagccacgttagcctacagaagtataattcagagaatccaagagttttgtaatctccatcagtcaaaagaagagaacctcatcagttcctgaaacgagagaatgttcaggaccaagcagttaccgagcgaggcactcactgggcagcacatccagccagacccgaccagctccgggatggggtgggtcacagcaaaaggaccagatgctggtgtggtccgaagccactttctcagagacactttaatcattgagtatttgtacacttttctttagaacatatataaagggcattctctacaaatgtgccgttttaagaataaaaccccctcaaatc

SEQ ID NO: 228683 - DNA, 1326 bp, Homo Sapiens
ttggcagcatttgcttggaatcagtaagctaaaaacaaaatcaaccgggaccccagcttttcagaactgcagggaaacagccatcatgagtgaggtcaccaagaattccctggagaaaatccttccacagctgaaatgccatttcacctggaacttattcaaggaagacagtgtctcaagggatctagaagatagagtgtgtaaccagattgaatttttaaacactgagttcaaagctacaatgtacaacttgttggcctacataaaacacctagatggtaacaacgaggcagccctggaatgcttacggcaagctgaagagttaatccagcaagaacatgctgaccaagcagaaatcagaagtctagtcacttggggaaactacgcctgggtctactatcacttgggcagactctcagatgctcagatttatgtagataaggtgaaacaaacctgcaagaaattttcaaatccatacagtattgagtattctgaacttgactgtgaggaagggtggacacaactgaagtgtggaagaaatgaaagggcgaaggtgtgttttgagaaggctctggaagaaaagcccaacaacccagaattctcctctggactggcaattgcgatgtaccatctggataatcacccagagaaacagttctctactgatgttttgaagcaggccattgagctgagtcctgataaccaatacgtcaaggttctcttgggcctgaaactgcagaagatgaataaagaagctgaaggagagcagtttgttgaagaagccttggaaaagtctccttgccaaacagatgtcctccgcagtgcagccaaattttacagaagaaaaggtgacctagacaaagctattgaactgtttcaacgggtgttggaatccacaccaaacaatggctacctctatcaccagattgggtgctgctacaaggcaaaagtaagacaaatgcagaatacaggagaatctgaagctagtggaaataaagagatgattgaagcactaaagcaatatgctatggactattcgaataaagctcttgagaagggactgaatcctctgaatgcatactccgatctcgctgagttcctggagacggaatgttatcagacaccattcaataaggaagtccctgatgctgaaaagcaacaatcccatcagcgctactgcaaccttcagaaatataatgggaagtctgaagacactgctgtgcaacatggtttagagggtttgtccataagcaaaaaatcaactgacaaggaagagatcaaagaccaaccacagaatgtatctgaaaatctgcttccacaaaatgc

SEQ ID NO: 228684 - DNA, 489 bp, Homo Sapiens
ttgggaaatattctatgcctaatactcacacgcaacatttcttgtactttgtaagtcgtttgcgagaatgcagaccacctcactaaactgtaaacggtaaagagatttttacttttggtctccgtgagtcgcatctctactaaggtttacacaggaattccacctgaagacttgtgttaaagttctacagcgcgcactgttaactgaacgtctttttcttcagcctatacgcggatccttgttttgagctctcagaatcactcagacaacattttgtaactgctgctgttgctttctacatacaccttataaagtgacatttcaaaagaaataaggtgccacagttttaaaccagaaggtggcactctgtggctccttgtagtattatagctatactgggaaagcatagatacagcaataaagtacagtaattttactttttttcttgtgtaacatctaaattacaacccttatttgccacgtgtgcac

SEQ ID NO: 228685 - DNA, 331 bp, Homo Sapiens
acaaaaaagttggcgttgaaagacaccagctgcggaatttgcggctttggcagattgaaatcatggcaggtccagaaagtgatgcgcaataccagttcactggtattaaaaaatatttcaactcttatactctcacaggtagaatgaactgtgtactggccacatatggaaacattgcattgattgtcttatatttcaagttaaggtccaaaaaaactccagctgtgaaagcaacataaatggattttaaactgtctacggttcttaacctcatctgttaagttcccatgcctggagaagctaatgccaactcatcatgtgataattcaat

SEQ ID NO: 228686 - DNA, 1619 bp, Homo Sapiens
tttgtacaaaaaagttgggtaaacacccgccagtcacagagagctccaaggcccgggaggtcagaaaaccgggccgcgggcggcaccgacagctggggcccgggtcagggacacgcggaggtcaggccggtgaaggcggcaggaagctggagcacgatcccaggaggaacaatcctgcaccatgactcaacagccacttcgaggagtgaccagcctgcgtttcaaccaagaccaaagctgcttttgctgcgccatggagacaggtgtgcgcatctacaacgtggagcccttgatggagaaggggcatctggaccacgagcaggtgggcagcatgggcttggtggagatgctgcaccgctccaaccttctggccttggtgggcggtggtagtagtcccaagttctcagagatctcagtgctgatctgggacgatgcccgggagggcaaggactccaaggagaagctggtgctggagttcaccttcaccaagccagtgctttctgtgcgcatgcgccatgacaagatcgtgatcgtgctgaagaaccgcatctatgtgtactccttccccgacaatccccgaaagctgtttgagtttgatacccgggacaaccccaaggggctctgtgacctctgccccagcctggagaagcaactgctagtgttcccgggacacaagtgtgggagtctgcaacttgtggacctggcgagcacaaagcctggcacctcgtctgctccattcacgatcaatgcacatcagagtgacatagcctgtgtgtctctaaaccagccaggcactgtagtggcctcagcctcccagaagggtacccttattcgcctctttgacacacaatccaaggagaaactggtggagctgcgccgaggcactgaccctgccaccctctactgcattaacttcagccacgactcctccttcctctgcgcttccagtgataagggtactgtccatatctttgctctcaaggatacccgcctcaaccgccgctccgcgctggctcgcgtgggcaaggtggggcctatgattgggcagtacgtggactctcagtggagcctggcgagcttcactgtgcctgctgagtcagcttgcatctgcgccttcggtcgcaatacttccaagaacgtcaactctgtcattgccatctgcgtagatgggaccttccacaaatatgtcttcactcctgatggaaactgcaacagagaggctttcgacgtgtaccttgacatctgtgatgatgatgacttttaaggaccctgggggctgtgctagggacctgcagtggcagaactgcagagctgagccttggcagtggggcgtgcttggaagccaccagccagcaagcattaatggggctggtgcccactttccactcagcagagctatgtctaaataaagagctcacttccccccagcacttcttgatgactgtgtgccccaagggccaggccagagacccaggaaggcagcgaccccttgggatccctaacctggaggaaattgccagggacccagagggagtgccctaatccaacctggggattttttaaaagcttcctaggaagagatgatctccgatgtgatgaatacgaataaaaagccctta

SEQ ID NO: 228687 - DNA, 541 bp, Homo Sapiens
  misc_feature (444)..(478): n is a, c, g, or t
ctttgtacaaaaaagttggttccaaaatggcggcagcgatggatgtggataccccgagcggcaccaacagcggcgcgggcaagaagcgctttgaagtgaaaaagtggaatgcagtagccctctgggcctgggatattgtggttgataactgtgccatctgcaggaaccacattatggatctttgcatagaatgtcaagctaaccaggcgtccgctacttcagaagagtgtactgtcgcatggggagtctgtaaccatgcttttcacttccactgcatctctcgctggctcaaaacacgacaggtgtgtccattggacaacagagagtgggaattccaaaagtatgggcactaggaaaagacttcttccatcaagcttaattgttttgttattcatttaatgactttccctgctgttacctaattacaaattggatggaactgtnnnnnnnnnnnnnnnnnnnnnnnnnnnnnnnnnnnctgtagccatattgtattctgtgtcaaataaagtccagttggattctggaaaaataaaataat

SEQ ID NO: 228688 - DNA, 443 bp, Homo Sapiens; identical to SEQ ID NO: 194911

SEQ ID NO: 228689 - DNA, 435 bp, Homo Sapiens; identical to SEQ ID NO: 194912

SEQ ID NO: 228690 - DNA, 867 bp, Homo Sapiens
ttggggaggcagtgtacctggtagtgaatgggttgggcctggtgctggacgtgctgaccttggtgttggacctcaacttcctgctggtgtcctccctcctggcttccctggcctggctcctggccttcgtctacaacctgccgcacacggtactgactagtcttctgcacttgggccgcggagtcttgctttcattgctggccttgatcgaagccgtggtccggttcacatgtgggggcttgcaggccttgtgtactctgctgtatagctgctgctctggcctagagagcctaaagctcctggggcacctggcctctcatggggcactgcggagcagggagatactgcaccggggcgtcctcaatgtggtctccagtggccatgctttgctgcgccaggcctgtgacatctgtgccattgccatgagcctggtggcttatgtgatcaacagcctggtcaacatctgcctcatcggcactcagaacctcttttccctggtgctggccctgtgggatgcagtgaccgggcctctgtggaggatgacggacgtagtggctgccttcctagcccacatttccagcagtgctgtggccatggccatcctcctttggacaccctgccaactagccctggagctgctggcctcagctgcccgcctcctggccagctttgtgcttgtcaatctcactggcttggtgttgctagcttgtgtgctggcagtgacggtgactgtgttgcatccggacttcaccctgaggctggctacccaggcactcagccagctccatgcccggccatcctaccaccgtcttcgagaggatgtcatgcggctctctcgcctagcactgggctcagaggcctggcgcc

SEQ ID NO: 228691 - DNA, 403 bp, Homo Sapiens
tttgtacaaaaaagttggcagaagacctggtggggcaagtccgtgggcatcatgttgaccgagctggagaaagccttgaactctatcatcgacgtctaccacaagtactccctgataaaggggaatttccatgccgtctacagggatgacctgaagaaattgctagagaccgagtgtcctcagtatatcaggaaaaagggtgcagacgtctggttcaaagagttggatatcaacactgatggtgcagttaacttccaggagttcctcattctggtgataaagatgggcgtggcagcccacaaaaaaagccatgaagaaagccacaaagagtagctgagttactgggcccagaggctgggcccctggacatgtacctgcagaataataaagtcatcaatacctc

SEQ ID NO: 228692 - DNA, 905 bp, Homo Sapiens; identical to SEQ ID NO: 194913

SEQ ID NO: 228693 - DNA, 931 bp, Homo Sapiens
  misc_feature (314)..(325): n is a, c, g, or t
  misc_feature (678)..(689): n is a, c, g, or t
ttggagcattttatgtacaaaacagaagtcaatgcaacagtatgtatgtgtgcctgtgtgtgtataaaaataaccattgaagctaacttgctaatgtacttaggcaagccacttcccatctctgggcctcgtctttcctccctctaaaatcaaagagctgaattatgtgatccttgaggtctcttccacttataataccaactgtcttgtcagactggcaaattatattggcctctccttatgtggtggtttttttggtaggtcatagttccttatacacagacacctgcatcatcgaaggtctttttttcctnnnnnnnnnnnntgggattttagttcttattctgtgataactatcctcctcatataatactattctttttgacaccatttgaaggaaccaatatttggaccttattttgaggttgtctgtctcgaagaaaaagaaaataaaatgtataggcagggttccttcaattggcattttccccagaattgtgagccaaagcctatagtaattgcagacagcaaatgattccggatctctaaaaggctctctcagatgaaaagggagtaaaggaaaaaagaggtcaaccactgtttctgataatgtacttgagtttcattgttcttttagtttgtattcttataaaaaatgtttacactctgcagattgannnnnnnnnnnnagtactgtggctttcttttcctattttatgaaaaaaatgataatctttttgtaaaattgtctgtgaaaatataaacattaatatataaagaaaaaccttgaaagtgctgtatagtgaagtataaattaatgttttattgatttgtgaagaatttaaggactattatataatcatcttggtggatctattttatggcatgaccttttaaacctttgactttgcttatttcccactacgagggg

SEQ ID NO: 228694 - DNA, 1718 bp, Homo Sapiens
ttggctactttgaacctgctgggcaaggaagagattttcaaggaaaccatctaccgtgtgcaagctcctgccggccaaccccagaccccagcacggagccaggcgcctgtgcccgccgaccctcagcatcctcctcagaaaggctggtggcatcaggaagcccctggccagcctccacctgagcccagtgagctcagctttaaggatggagtcaggcagggggtcctcaacccctccaggacccattgctgccctagggatgccagacactgggcctggcagttcctccctagggaagcttcaggcgctccctgttgggcccagagcccactgtggggaccctgtcagcctggctgcagcaggggacggctctccagacataggccccacgggagagctgagtggtagcttaaagatccccaaccgggacagcgggatcgacagtccctcctccagtgtggctggagagaactttccctgcgaggagggcttggaggctggcccaagccccactgtactgggggcgcacgcagagatggccctggacagccaggtcccgaaggtcaccccccaggaggaggcggacagcgacgtgggtgaggaacctgactctgagaacaccccccagaaggctgacaaggatgccggcctggcccagcactctggcccccagaagcttctccacattgcccaggagctcctgcacaccgaggagacctatgtgaagcggctgcacctgctggaccaggttttctgcaccaggctgacggatgcggggatccctccagaagtcatcatgggcatattctctaacatctcctccatccaccgcttccacgggcagttcctgctgccggagctgaagacgcggatcacggaggagtgggacacaaacccacggctcggggacatcctgcagaagctggccccattcctgaagatgtacggcgagtatgtcaagaactttgaccgagccgtagggctggtgagcacgtggacccagcgctccccactgtttaaagacgtcgtccacagcatccagaagcaggaggtatgcgggaacctgacgctgcagcaccacatgctggagcccgtgcagagggtcccccggtacgagctgctgctcaaggactatctgaagaggctcccgcaggacgccccagaccggaaggatgcggagaggtccttggagctcatctccacagccgccaaccactccaatgctgccattcggaaagtggagaaaatgcacaagctcttggaggtgtacgagcagctgggtggggaagaagacattgtcaacccggccaatgaactgatcaaggagggccaaatccagaaactgtcagccaagaacggcaccccccaggaccgccacctcttcctgttcaacagcatgatcctttactgtgtgcccaagctgcggctcatgggccagaagttcagcgtccgggagaagatggacatctcaggcctccaggtgcaggatatcgtcaagccaaacacagcacatacattcatcataacgggaagaaaaaggtccctggagctgcagacgcggacagaggaagagaagaaagaatggattcagatcatccaggccaccatcgagaagcacaaacagaacagcgaaaccttcaaggcttttggtggcgccttcagccaggatgaggaccccagcctctctccagacatgcctatcacgagcaccagccctg

SEQ ID NO: 228695 - DNA, 422 bp, Homo Sapiens
ttggggggaacaaggtcgtgaaaaaaaaggtcttggtgaggtgccgccatttcatctgtcctcattctctgcgcctttcgcagagcttccagcagcggtatgttgggccagagcatccggaggttcacaacctctgtggtccgtaggagccactatgaggagggccctgggaagaatttgccattttcagtggaaaacaagtggtcgttactagctaagatgtgtttgtactttggatctgcatttgctacacccttccttgtagtaagacaccaactgcttaaaacataaggatgtttcagttcctccatttaacagatatgaagagcattttaagaggtgcagcctctggaagtggatcaaactagaactcatatgccatactagatatgtttgtcaataaacttatgacgtgaaagatt

SEQ ID NO: 228696 - DNA, 1210 bp, Homo Sapiens
  misc_feature (433)..(453): n is a, c, g, or t
ttgggttaatcactggcaaaagcatcagatctttgtatatgctaagatttattgtttccccttctaaagctcaagatcatttctttccagtttttggggaaatggtggtggttatttggtctttaagtgaactgtcttaaatgagaaacgtttttgtcattttgacttttaacaggtacaggtgatctcttcctttgttctttcagtactttgaggcgacaactttcaagtatataatttcattgtggaagtcatagtttatatatttcgaggttgccaaaggtgacttcagattaaagccttctgtgtaaatatatactgataatgcctatggacatttgggtaaaaccctgtatagaattaattatccttttactttggagtgaaccttggaaaatttataattataataccatggattttgaattttccnnnnnnnnnnnnnnnnnnnnnggataactcagtttcagataaaccatcttggttactgtgcttaatttggaccaaattttatttagcttaatatggacactgacacattttggggggtatacattaaacatatcaaaacagtgtatttctggatcattttttaaatgacctcttctaaaacataactgtcacttacctgaaatgctgcatcctaaaattccaaaattatattgagcaatcgccaaggcctaaagccaactgacttaaaggtaatcatttcagctaaaattaaatttaaagcctaaaaatgtatagagctagttttaaaataatgatctcagatttttaaaaaggatataggaacctgcattgtcattctctgaattaagaactgatggtttctatcattatttaaccccacctttgtattttaaaatccttcagaatacatttatgaaccaatgcgactggacttagccacacacaatggaaattcagaccttgactatttggtgtttccagttcacaaaggtgatgaagactgtcctgggagcagcttaatcccaaaatttgtacatttcttgctgctcctggcgtggaaacttaagtgagaccaccaaatacattggtcctgtccaattctactgaatgggggtggacctggcatttatctggccaaaaacaggagccagaaaaatatgaatataccaaagttgtttgtttaacctccaacttaaattacattagtcaactatagatactcatatgatcacttttc

SEQ ID NO: 228697 - DNA, 618 bp, Homo Sapiens; identical to SEQ ID NO: 194916

SEQ ID NO: 228698 - DNA, 811 bp, Homo Sapiens
ttggctcctgtctctcccctacagaaggatctgaagagctgggtccaagggaacctcactgcctgtggccgctccctcttcctcttcgatgagatggacaagatgcccccaggcctgatggaagtcctgcggcctttcctgggctcctcctgggtggtatacgggaccaattaccgcaaagccatcttcatcttcatcagcaacacgggtggcgagcagatcaaccaggtggcattggaggcgtggcgcagccggcgggaccgcgaggagatcctcctgcaggagctggagccggtcatctcccgcgcggtgctggacaacccgcaccatggcttctcaaactcgggcatcatggaagagcgcctcctagacgcagtggtgcccttcctcccgctccagcggcaccacgtccggcactgcgtgctcaacgagctggcccagctgggcctggagccaagggatgaggttgtccaggctgtgctggacagcaccaccttcttccctgaagacgagcagctcttctcctccaacggctgcaagaccgtggcctcccgaatcgccttcttcctctgactctctgagtggtgtcctcggcccccctgatggccaggccatgcaggaaaggccaggggcctctgtcacaggaacccagagcaccaagtgagatgaacggagtgtcggctaggccacgggacagatggccaggaagggccctggcctctaaactggctcgagagcatcttggccccggccaccttccccagggaaacccctggtcaccccagaacctcactgagccttgacctccccc

SEQ ID NO: 228699 - DNA, 968 bp, Homo Sapiens
ttggcgtgaagcctcttatggctactattatagttcatgagatgttggacagcatttggtttgtttggtaagagaagaacaaatatggctaattgttaataaggtcccctggctatggtttttgttcttataacagagtttagaatatcagagcatttcttgaatcatacatcattattgtccagtgaattcaagaccaaatacaatatcgggagaaaatacaaactccctgtgtttaagaataggggattacaatggctcaaattggttcatttgatttctaaaaataccatgacctttaaaaattcttttaatagatcatgttattggcagtatttatataaaaaccatggatttagaaaggtatatttagctttattataatagatacgttactattttggaaatatatatattttcacacctgtagtactcttccccatttcctctgacactcatgcagaatgagatcaggcatatttgtggttgacatactctagatagcttttccaacaaatctttgaaaagcaatcttggaaaggaattcattaactaaatggggtaaaaggtttctttttctttgagagttaagtccttcctcaaaaaattttcttatgctccataaaattgaggtagaatattttcattattcttgcagctaagcaagacagccatatgatgcaggttatgcagtgccttcatatctaaaacttttatactgcactttttaaagcttttatgttgaggaaaggaaaagggcatttgtctaaacatggattctgagttgtatatatttcctatcattctaaaaaagtgaatttgtgaagcaaagttttgccagatgttaaactttgaatttaatataccagattattaaaatattgtccattaactagttcatagattttaaaagtaaaatacttctgactgttaaaactatataaagaaaatctcatttgtctaattgc

SEQ ID NO: 228700 - DNA, 846 bp, Homo Sapiens
acaaattgatgagcaatgctttacattaaagggcaactttgtacaaaaaagttggcctcgcccggcggcagctgtccccgaggcgggaggagcccgagggggcgcgagccccgcatggattttatattggaagacatggatcttgctgccaacgagatcagcatttatgacaaactttcagagactgttgatttggtgagacagaccggccatcagtgtggcatgtcagagaaggcaattgaaaaatttatcagacagctgctggaaaagaatgaacctcagagaccccccccgcagtatcctctccttatagttgtgtataaggttctcgcaaccttgggattaatcttgctcactgcctactttgttattcaacctttcagcccattagcacctgagccagtgctttctggagctcacacctggcgctcactcatccatcacattaggctgatgtccttgcccattgccaagaagtacatgtcagaaaataagggagttcctctgcatgggggtgatgaagacagaccctttccagactttgacccctggtggacaaacgactgtgagcagaatgagtcagagcccattcctgccaactgcactggctgtgcccagaaacacctgaaggtgatgctcctggaagacgccccaaggaaatttgagaggctccatccactggtgatcaagacgggaaagcccctgttggaggaggagattcagcattttttgtgccagtaccctgaggcgacagaggcttctctgaaggtttttcgccaagtggtggcgctgctttcctgagcggtgggttcccatttccttatccatggaggagaactctgaaca

SEQ ID NO: 228701 - DNA, 1005 bp, Homo Sapiens
  misc_feature (794)..(828): n is a, c, g, or t
ttggttggcctccagccgggggagcagggaacttctctaggttccacttccagtctctctgtccccagctcctgagtcagtgggcacagaggagatgcctgaggatggagagcccgatgcagcagagctccgccggcgccgcctgcagaagctggagtctcctgttgcccactgacactgccccagcccagccccagcctctgctcttttgagcagccctcgctggaacatgtcctgccaccaagtgccagctccctctctgtctgcaccagggagtagtacccccagctctgagaaagaggcggcatcccctaggccaagtggaaagaggctggggttcccatttgactccagtcccaggcagccatggggatctcgggtcagttccagccttcctctccaactcttcagccctgtgttctgctggggccatgaaggcagaaggtttagcctctgagaagccctcttcttcccccacccctttccaggagaaggggctgcccctccaagccctacttgtatgtgcggggtcacactgcagtgccgaacagtattagctcccgttcccaagtgtggactccagaggggctggaggcaagctatgaacttgctcgctggcccacccctaagactggtacccatttccttttcttaccctgatctccccagaagcctcttgtggtggtggctgtgccccctatgccctgtggcatttctgcgtcttactggcaaccacacaactcagggaaaggaatgcctgggagtgggggtgcaggcgggcagcactgagggannnnnnnnnnnnnnnnnnnnnnnnnnnnnnnnnnntgcagcttctcaagttagactgacctgtctcacccagcagccactgcccagccgcactccaggcaagggccagtgcgcctgctcctgaccactgcaatcccagcgcccaaggaaggccacttctcaactggcagaacttctgaagtttagaattggaattacttccttactagtgtc

SEQ ID NO: 228702 - DNA, 781 bp, Homo Sapiens; identical to SEQ ID NO: 194918
  misc_feature (241)..(275): n is a, c, g, or t

SEQ ID NO: 228703 - DNA, 373 bp, Homo Sapiens
attgctcccagccattagaaagattgttaatcctatgaactcccttttgtaggagagaaagggccaatctgtaggggtagccctgtccaggtaaagttgttttcagcctcatgtctactgttaggtgagggagtcacagccagacagagagtattgctggagggtgagagaattgtggagaccaactaccacatagcaagagcccagctcttgggagcattgagatgtaagctcagggttacacagttccaaatcttgggaaggggcttttcagacagactgtttgctttctgctgagataaggaatgcatcactctgccagagtatgactttttacagattattaaataaagctgcatatgtctcattgtta

SEQ ID NO: 228704 - DNA, 980 bp, Homo Sapiens
gagcaatgctttccttataatagccaactttgtacaaaaaagttggcatttcttcaagaattttttcctgatcagggctccagtggtccagaatcttttactgtctaccactacaatggattgaagcagtcaaattataatgaaaaggtcatgtacgtagaagggactgcagttgtgatgggttttgaagatcccatgctacagacagatgacactcctattaaacgctgtctgcaaaccaaatggccatacattgagttactctggaccacagatcgctctccttcactaaattaatttgtctaagtatttataaggaagatcttaataacagatgttgaaagaaggagtcaagactggcaattggctggattaagctaaacactggtatcactgattaactgtaaataacaattaaaaacacattttcagtgtttatgatatgtttaaattatttgtcctaaagctttatgttaaagattatcctattttaccccttcgtgtgaaatttactagcaaaattaagctttcatcaaagttcatcacttttgcattcagatacttggtcatttacttaccaaattacaaacgcaatactacagcatttgtatattaagtatcacagttactattgataaactacttttgggttttatttcattgaggcactttttttattgtttgaatgattccggcttgtaatatatcagcctctacaatgaaatgcagaagagttcatttttctaagatctgtttttcattagaaatattgacaaataacacattgtcaacctggatcctttgacaatttacttaactctggcatgttcacaaaaagtagaaactctaagagaccattaccatttattcacagatgtataggggatgtattctaaaaactgacagaaaagagaatctgatagtcaacactgttaacttttactgtgtaattgccaaatacacttttccaaatttgtccc

SEQ ID NO: 228705 - DNA, 1332 bp, Homo Sapiens
ttggcagggactcctgcccgcggcccccgcatgacacccagcgacctgcgcaacctcgacgagctggtgagggagattctgggccgctgcacctgccctgaccagtttcccatgatcaaggtctcagaggggaagtaccgtgtgggggactcgagcctgctcatctttgtgcgggtgctgaggagccacgtgatggtgcgagtgggtggtggctgggacacgctggagcattacctggacaagcacgacccgtgccgctgctcctccactgctcatcgcccaccccagccgagggtctgcaccttttctccacagagggtgtcgcccaccaccagtccccgccctgctagcccagtccctgggagtgagcgccggggctcccggcctgagatgactcccgttagcttacgaagcacaaaggaggggcccgagaccccacccaggccccgggatcagctgcccccccatccccgctcccgccgctactccggggacagtgactcctcagcctcctccgcccagagcggcccccttggtacccgcagtgatgacacaggcactggcccccggagggagcgacccagccggcggctgaccacaggcaccccggcctctccgagacggcctcctgccctgcgcagccagtcccgagaccggctggatcgcggccggccccggggggccccaggaggcaggggagcccagctgtcggtccccagccctgcccggcgggcccggagccagagccgcgaggagcaggctgtgctgcttgtgcgcagggatcgagacgggcagcactcatgggtgccaaggggcaggggcagtgggggctcgggcaggagcaccccccagactccccgtgcccgcagccctgcagcaccccggctttcccgggtctccagccccagtccagagttgggcaccacaccggccagcatcttccgcacacccctgcagctcgacccgcagcaggagcagcagctgttccggcgcctggaagaggagttcctggccaatgcccgggcccttgaggctgttgctagcgtgacccccactggaccagcccctgacccagctcgggcccccgaccctccagctcctgactctgcctattgttcctccagttcctcctcttcgtccctcagcgtcctgggtggcaaatgtggccaacctggggactctgggccggacggccaatgggctgcctgggccccgaagccaagccctttccagctcctccgatgaaggcagcccctgccctggcatgggggggccactacatgcacctgggagccccctggcttgcactgaacccttaggacctgggcacgg

SEQ ID NO: 228706 - DNA, 857 bp, Homo Sapiens
ttggccatcgcaatgacctgtattaaacacaagccccccaagcaaaagaagaggttgagtttgctgccaggattcagatcagcccttcccagggtctgcaggtgtcacatgatcacagttcagcgggaggctttccgtacccacactggctgtagccacttcagtccatctgccctccagaggaggggtttcttcctgatttttagcaggtttagaggctgcagcttgagctacaatcaggagggaaattggaaggattagcagcttttaaaaatgtttaaatattttgctttgctaatgtgctgatccgcactaactcatctttgcaaaaggaactgctccctcggcgtgccccagctggggcctctgaagggattcctcactgtgggcagctgccctgagcttcaggcagcagtgttcatctctggccagttgtctggtttccatgtattctaggccaggtaggcaacacagagccaaggcgggtgctggaagccagacggaacagtgttggggcaggaaggtggatgctgttgtcatggagctgtgggagttggcactctgtctgctggtggccctctcggctcacatgttcacagtgcagctcctggcagacttgggttttctctttggtggtttctaaagtgccttatctgcaaacaacttcttttctccttcacgaactgtgaatggctagaaaaaggagctcactaaactataagtccagggttgcttggtttactggtttataaaaaatctgaaagcacctctgactttccttttattaactcacctctcagttgaaagattcttctttgaaaggtcagaccgtgaactgaaaaattgttggccttttt

SEQ ID NO: 228707 - DNA, 383 bp, Homo Sapiens
actttgtacaaaaaagttggctgcttcctttctctctcgcgcgcggtgtggtggcagcaggcgcagcccagcctcgaaatgcagaacgacgccggcgagttcgtggacctgtacgtgccgcggaaatgctccgctagcaatcgcatcatcggtgccaaggaccacgcatccatccagatgaacgtggccgaggttgacaaggtcacaggcaggtttaatggccagtttaaaacttatgctatctgcggggccattcgtaggatgggtgagtcagatgattccattctccgattggccaaggccgatggcatcgtctcaaagaacttttgactggagagaatcacagatgtggaatatttgtcataaataaataatgaaaacct

SEQ ID NO: 228708 - DNA, 773 bp, Homo Sapiens
gtacaaaaaatttggcaccaatcactccagatggttttgggggaaccattctactcttctggtgggctttggggtatccccaccaactttcccttcaaaatagcaccttacaccccatctttgactcagttccccacacccaaagatcccagcctagggatggggtacagggactttaaatagtccctaatccctaatttgcactagttaaccctggtcagggtccctgtatttccttccagtgggggagataaatgtttgctcctaattctctttgaaaactgggcctccctgctctgtgattggataaatatttcccatcccacccacctccccccaaaaaatagctcacaaggggagagccagtatgggggagcaaatttgacaaatgggaattagaggagtgcagttttaaaaggaaaagttgctgtcatcaaaatggcagccttttccccagctactgtttttggggccaagatggctgccctagcagcaatcactgccaagggcaagatcatggcttttggagggaggtgagtttagggagggccaggaccatcctcctacccctcataccctcccagcatatacaaaaggggaggttttagacaggctccctgaatgttaaccacagaggagtcactccttcattcctcctctgtctctttgcacttttcttggtcttggccacagcctgagtgacgaatttcctactgaatgtaccaagttccaatttttaagggggggaaaggtttcaaatggggaaaacacac

SEQ ID NO: 228709 - DNA, 543 bp, Homo Sapiens
ttggctttgtttacacaaaaaactgaagatgaaatatatattgtaaagaagggatattaagaatcttagataacttcttgaaaaagatggcttatgtcatcagtaaagtacctttatgttatgaggatataatgtgtgctttattgaattagaaaattagtgaccattattcacaggtggacaaatgttgatgttgtcctgttaatttataggcgttttttggggatgtggaggtagttgggtagaaaaattattagaacattcacttttgttaacagtatttctcttttattctgttatatagtggatgatatacacagtggcaaaacaaaagtacattgcttaaaatatatagtgaaaaatgtcactatatcttcccatttaacattgtttttgtatattgggtgtagatttctgacatcaaaacttggacccttggaaaacaaaagttttaattaaaaaaaatccttgtgacttacaatttgcacaatatttcttttgttgtactttatatcttgtttacaataaagaattccctttggt

SEQ ID NO: 228710 - DNA, 650 bp, Homo Sapiens
  misc_feature (176)..(189): n is a, c, g, or t
ttggcacaggtacagtcattctttgaaggtgacactgttctgtatattccctataggcagctggagagatctgtgtgacacaagatgcttttgtacgggttcccatgaatcttctgctcttgtttgtgtgacatggaacaaataacttctttgccaccactttgccttagataacnnnnnnnnnnnnnnccagtttgaactctgacaccacattttccttctatgcaatcatgcctgtctgataatcttgcattgctttcctctgagctttagtgggtcctagttgcacactggcctttctgtgctgtttttctttttgcctaataatagcagttaccctgattgtaatttatgtaactttaaacaggatcacactgtaccccctgcctgccttatttgcttactgagcacaggacagaggcaatatacaactctgggttcacacacaagctgagatgagaagaggaatgagccatatattggggaaaatcatagtttgtaggtataattatatagtgcttttctccctcaaagtatttttctagccttgaattcattttatcttcattatccctgtgaagtaggtgggacaagtataaggggaagaggggtgctgaatttttaggccaaagactgatattaatacaaat

SEQ ID NO: 228711 - DNA, 911 bp, Homo Sapiens
actttgtacaaaaaagttggctgctggctggcaggagtcatcttcatcgaccggaagcgcacgggggatgccatcagtgtcatgtctgaggtcgcccagaccctgctcacccaggacgtgagggtctgggtgtttcctgagggaacgagaaaccacaatggctccatgctgcccttcaaacgtggcgccttccatcttgcagtgcaggcccaggttcccattgtccccatagtcatgtcctcctaccaagacttctactgcaagaaggagcgtcgcttcacctcgggacaatgtcaggtgcgggtgctgcccccagtgcccacggaagggctgacaccagatgacgtcccagctctggctgacagagtccggcactccatgctcactgttttccgggaaatctccactgatggccggggtggtggtgactatctgaagaagcctgggggcggtgggtgaaccctggctctgagctctcctcccatctgtccccatcttcctccccacacctacccacccagtgggccctgaagcagggccaaaccctcttccttgtctcccctctccccacttattctcctctttggaatcttcaacttctgaagtgaatgtggatacagcgccactcctgccccctcttggccccatccatggactcttgcctcggtgcagtttccactcttgacccccacctcctactgtcttgtctgtgggacagttgcctccccctcatctccagtgactcagcctacacaagggaggggaacattccatccccagtggagtctcttcctatgtggtcttctctacccctctaccccacattgggccagtggactcatccattctttggaacaaatcccccccactccaaagtccatggaattcaatggactcatccatttgtgaag

SEQ ID NO: 228712 - DNA, 1035 bp, Homo Sapiens
ttggccaactttaagaaggcaaacatggcatcaagttctcagcgaaaaagaatgagccctaagcctgagcttactgaagagcaaaagcaggagatccgggaagcttttgatcttttcgatgcggatggaactggcaccatagatgttaaagaactgaaggtggcaatgagggccctgggctttgaacccaagaaagaagaaattaagaaaatgataagtgaaattgataaggaagggacaggaaaaatgaactttggtgactttttaactgtgatgacccagaaaatgtctgagaaagatactaaagaagaaatcctgaaagctttcaagctctttgatgatgatgaaactgggaagatttcgttcaaaaatctgaaacgcgtggccaaggagttgggtgagaacctgactgatgaggagctgcaggaaatgattgatgaagctgatcgagatggagatggagaggtcagtgagcaagagttcctgcgcatcatgaaaaagaccagcctctattaagatcagtgtcttctttttctactgcaagcacatgtaactagatttagtgcctgccatggtgtgaaatctggcttttgagaacacaaacttttcccccacggacctccctttatcactttaatagtgaccttgagcctattttagccgtttggaagtgttctttgatattacagttctttgtaaaatgacctgcgaattaccctaattctcaaaagcaaaacaagagcacacaagcgtgaagaaaaggatcttaaagctttgagcacctgccattttgccttgcatcgtttccctcgtcatgcatttccacatatccacaaacacagaacgactttagacaagcacatgttacacctgtgttgccacaagcagtcattcttgacggctccagtttttatttgacacttgagtttagttttctcttttataaacccagtgaactcctgcactggcatttggatgtgtgttaatgctatttgttttgtcttaaaagtaaaaactttctccagtttgaacttg

SEQ ID NO: 228713 - DNA, 669 bp, Homo Sapiens
ttgggttgtcacagttgagacttaatttctcctaatttcttctgcccgaagggtaagtggtgcgtccagcttacacaatcataattcaaaggttggtgggcaatgtaatacttaattaaaataatgatggaagagctatctggagattatgagtaagctgatttgaattttcagtataaaactttagtataattgtagtttgcaaagtttatttcagttcacatgtaaggtattgcaaataaattcttggacaattttgtatggaaacttgatattaaaaactagtctgtggttctttgcagtttcttgtaaatttataaaccaggcacaaggttcaagtttagattttaagcacttttataacaatgataagtgcctttttggagatgtaacttttagcagtttgttaacctgacatctctgccagtctagtttctgggcaggtttcctgtgtcagtattccccctcctctttgcattaatcaaggtatttggtagaggtggaatctaagtgtttgtatgtccaatttacttgcatatgtaaaccattgctgtgccattcaatgtttgatgcataattggaccttgaatccataagtgtaaatacagcttttgatctgtaatgcttttatacaaaagtttattttaataataaaatgtttgttctaaa

SEQ ID NO: 228714 - DNA, 951 bp, Homo Sapiens
cctataaaagccaactttgtacaaaaaagttggggtgcttctgttgctcacaggttgacttggatcagctgatggttcttttgtcccatggatgttctgctggtactgcagtcatctggtagcccacttaaactagaatgtccatgacagctcattcacatggctagtgccttggatgtttgccacacgagtcactcgagagaatctctgagtcctggcgagggctttctgaggcttcgtgtattagcagctgttgtcttccaactcagcggcaggacaacttgcctttgatgattttcaagagagttgtgctatgatgtggcaaaagtatgcaggaagcaggcggtcaatgcctctgggagcaaggatccttttccacggtgtgttctatgccgggggctttgccattgtgtattacctcattcaaaagtttcattccagggctttatattacaagttggcagtggagcagctgcagagccatcccgaggcacaggaagctctgggccctcctctcaacatccattatctcaagctcatcgacagggaaaacttcgtggacattgttgatgccaagttgaagattcctgtctctggatccaaatcagagggccttctctacgtccactcatccagaggtggcccctttcagaggtggcaccttgacgaggtctttttagagctcaaggatggtcagcagattcctgtgttcaagctcagtggggaaaacggtgatgaagtgaaaaaggagtagagacgacccagaagacccagcttgcttctagtccatccttccctcatctctaccatatggccactggggtggtggcccatctcagtgacagacactcctgcacccagttttccagccaccagtgggatgatggtatgtgccagcacatggtaattttgggtggtaattctaacttggggcacaacgaaatgcctatt

SEQ ID NO: 228715 - DNA, 1042 bp, Homo Sapiens
ttggcccaccgtgaccttgggcaaaccctggctcggagcccagggcagaggcagctcagagtggaggctctaggcaggtttgacaaaggtcagtaatacggtttcccctggggttgaccagatgttccaaaatatctgcatccacctggagatgcagctaagtgggtccttatgtacacaccacgttcacacacacacagagggaccacgtgtgcacgcatgaccgtgtgggtggcggcgtttgctgtgaaccacgctcaggccacacagagacacatacttggtttctgggactgagacccaggcctggcaggaccgtgcctacagatactgcaaacgttcctacagcctagaggtgcgtatacacacccaagtacacgcagccaggcattcaggggtgtgtttgccacatggagcatcccttcctggtcttgccaggcacctgcacagagcgtctccagccccatctcctaacgggggctgggggtaagagaaatctaactgcgctcccccaacccctcgccctgccatcttcccctcaagcctgctaagttatcccaggcctgtgcgtggtggaaaaagccagccttggccctgcagcctccacctcgccgctgggggaccaacaggttgcttacagctttgcaccccggcatcagcacaggggtccctgccccaccctccggcagctcatggagtgttttcctgtgaggcctcccccatcagtggaccagagggagaagcccgatgccccatcccggctttcccgtaacgcacaggacacgtgtgcaattcataggaacggcccagatcgccctcatgagtgccacctggtacaggtaggtggcgctcacgttcctgcccaaatgcagcccatcggggagtcacagtcagtccccccggcccccctcccagtccctgttggctttcggtagctctcgcatgcagttctattaacagccgtctagaagcgatgctttattggcctaacccagagtcaaatacagctctttctagcaaaatcaggcagctctgccccatc

SEQ ID NO: 228716 - DNA, 1671 bp, Homo Sapiens
ttgggaaggaaggacctcccaactcgccggcctggccacgggatggcccccaaattcccagactctgtggaggagctccgcgccgccggcaatgagagtttccgcaacggccagtacgccgaggcctccgcgctctacggccgcgcgctgcgggtgctgcaggcgcaaggttcttcagacccagaagaagaaagtgttctctactccaaccgagcagcatgtcacttgaaggatggaaactgcagagactgcatcaaagattgcacttcagcactggccttggttcccttcagcattaagcccctgctgcggcgagcatctgcttatgaggctctggagaagtaccctatggcctatgttgactataagactgtgctgcagattgatgataatgtgacgtcagccgtagaaggcatcaacagaatgaccagagctctcatggactcgcttgggcctgagtggcgcctgaagctgccctcaatccccttggtgcctgtttcagctcagaagaggtggaattccttgccttcggagaaccacaaagagatggctaaaagcaaatccaaagaaaccacagctacaaagaacagagtgccttctgctggggatgtggagaaagccagagttctgaaggaagaaggcaatgagcttgtaaagaagggaaaccataagaaagctattgagaagtacagtgaaagcctcttgtgtagtaacctggaatctgccacgtacagcaacagagcactctgctatttggtcctgaagcagtacacagaagcagtgaaggactgcacagaagccctcaagctggatggaaagaacgtgaaggcattctacagacgggctcaagcccacaaagcactcaaggactataaatccagctttgcagacatcagcaacctcctacagattgagcctaggaatggtcctgcacagaagttgcggcaggaagtgaagcagaacctacactaaaaacccaacagggcaactggaacccctgcctgaccttacccagagaagccatgggccacctgctctgtgcccgctcctgaaacccagcatgccccaagtgagctctgaagccccctcctcaatcccttgatggcctcccaccctgtaagaggctttgcttgttcaaattaaactcagtgtagtcaaacacagacatggttgttgcaccagaaaggtccccactagagctaagcgtgaagctgaagctctgtccctattcccccagcccagctagctgatcacaccaacagatcctcatcagcaaagcatttggctttgtcctgcccaagtgggctgcagactgagtgctgcccttgtagcttccccagaccccaactcactgcagttcatctgaacaacctgagctcctgggccggggtggaaggagggggataaacctaaggccctgatccaaagcagcctgttgagctggttctccagggctgcagtctctccaggtgtacagctgctgtccctgccctgtcctgtccttgcacagtctcctatgtctgagccccagtgccttctgttcgggccctcctttggtgggaagggcagagccctgaccttgaatggttgtccttgactctgtgctgctgccttctgcagagaggcacctaagctgtttaaagagcccagtgattgtggctgctcctccta

SEQ ID NO: 228717 - DNA, 824 bp, Homo Sapiens
ttggatctgtgggaaatcctcagaggattggctggccccacttcaaggagatcttcatgttgtcagccctaagccaggaggatgtgaaaacactaaagcaataccttctgacacaggcccagccagggccctgggagtaccacagtgcagtcctcactagccagacaccagaagagatctgtgccaacattatccgagagaagctcctagaacacctgccccaggaggtgccttacaatgtacagcagaagacagcagtgtgggaggaaggaccaggtggggagctggttatccaacagaagcttctggtgcccaaagaatcttatgtgaaactcctgattggtccgaagggccacgtgatctcccagatagcacaggaggcaggccatgacctcatggacatcttcctctgcgatgttgacatccgcctctctgtgaagctcctcaagtgaccaccctctactgaccctcccagggcattccagctcaagctgctggcaggaactgaccagttctttccttggctggggaccctccaggcactggtgagagacatgaacactgactggccactagctggcctggccctgttgagtctgcacagtccctgcccagctgtgtcttctgttggaagaaggaacctgccttagctcagtttccaggtggttcttctgcctggcaccacagctacaaaggtgtagctaagaagatggcccattggtgggagcaatgtcaccctgcctccagctagctatgggcccagagtttctccctgagtcgctgttgctagcagggagatttctctttctgccctcacttctttc

SEQ ID NO: 228718 - DNA, 844 bp, Homo Sapiens
ttggcgagatcagcaacagaatgaaataattgtgaaaagatacttgacaccaggagacatttatgtacatgctgatcttcatggagctactagctgtgtaattaagaatccaacaggagaacccatccccccacggaccttgactgaagctggcacaatggcactttgctacagtgctgcttgggatgcacgagttatcactagtgcttggtgggtgtaccatcatcaggtatctaaaacagcaccaactggagaatatttgacaacaggaagcttcatgataagaggaaaaaagaattttcttcctccctcatatctaatgatggggtttagcttcctttttaaggtagatgagtcttgtgtttggagacatcagggtgaacgaaaagtcagagtacaggatgaagacatggagacactggcaagttgtacaagtgaactcatatcagaagaaatggaacaattagatggaggtgacacgagcagtgatgaggataaagaagaacatgaaactcctgtggaagtagaactcatgactcaggttgaccaagaggatatcactcttcagagtggcagagatgaactaaatgaggagctcattcaggaagaaagctctgaagacgaaggagaatatgaagaggttagaaaagatcaggattctgttggtgaaatgaaggatgaaggggaagagacattaaattatcctgatactaccattgacttgtctcaccttcaaccccaaaggtccatccagaaattggcttcaaaagaggaatcttctaattctagtgacagtaaatcacagagccggagacatttgtcagccaaggaaagaaaggaaatg

SEQ ID NO: 228719 - DNA, 1171 bp, Homo Sapiens
  misc_feature (923)..(977): n is a, c, g, or t
ttgggtcctccggggctagcgcgagcgccctgcagcgcttggtagagcagctcaagttggaggctggcgtggagaggatcaaggtctctcaggcagctgcagagcttcaacagtactgtatgcagaatgcctgcaaggatgccctgctggtgggtgttccagctggaagtaaccccttccgggagcctagatcctgtgctttactctgaagactcagagagaagtttgctgaggaatgccttcaagcacaaagtgatgaatgactgccttcaagtctcaagaaaacacttttccctaacttttagagatatttcagccctttcctgtggcctggtcctatagccaaaatcacagatattcatgagtttctacttgagtgagaaaactgggtgaaggaatagaattttaaatagtaataactgcttgttttttttgtgcaagtacttttatacataagataaacaaaaaccttaccaccaaacataccaaaatgcacctctttcataagtgagttactaagatttctatacctggaatatcatgtatgtttcatttactggatgtttacattttaggaaggaaaatagttctgtttatttaaacaactgaatacttataaactgttgttcctggaagttatttattccataaaaaatttgttcttttctcatgaatttataattcctaaatgaagaccagaaagtacaaattgctgggaggaagaataggctttattaatcaactgatgtcttgatttttctaaatgggaagattgctttatttttaacactaattatgggagcagattcttagcaaacttctttggaaaagttaatgttatgatgtgcattaggctgccccatcgtgtatataaatgaagcagatttgatttttgtattcttacgtttctctgctttgtagtnnnnnnnnnnnnnnnnnnnnnnnnnnnnnnnnnnnnnnnnnnnnnnnnnnnnnnntgacccacagaacattgtaaatgattaaaaactaacatgcacatattacaacctaaaagaattcttaacttcacaagtgttttacttcgacgatgtgcctttgatttaatttgggacacttttttagaaggatacattattcgtgtttgcaacgggtctttgaaagagcttggaaataaaatttctgcttaatt

SEQ ID NO: 228720 - DNA, 824 bp, Homo Sapiens
ttggtgacctctggcccaagatggtggcgcccagagcttcgctcttgctgctcccctgaggtgaactgaagccagcagccccgcatcatgtcaaagctcggccgggccgcccggggcctcaggaagcccgaggtcggcggtgtgatccgggcgatcgtgcgggcaggcctggccatgcccgggcccccactaggcccagtgctgggtcagagaggcgtttccatcaaccagttttgcaaggagttcaatgagaggacaaaggacatcaaggaaggcattcctctgcctaccaagattttagtgaagcctgacaggacatttgaaattaagattggacagcccactgtttcctacttcctgaaggcagcagctgggattgaaaagggggcccggcaaacagggaaagaggtggcaggcctggtgaccttgaagcatgtgtatgagattgcccgcatcaaagctcaggatgaggcatttgccctgcaggatgtacccctgtcgtctgttgtccgctccatcatcgggtctgcccgttctctgggcattcgcgtggtgaaggacctcagttcagaagagcttgcagctttccagaaggaacgagccatcttcctggctgctcagaaggaggcagatttggctgcccaagaagaagctgccaagaagtgacccttgccccaccaactcccagatttcaaaggaggtagttgcaaaagctgtgcccaaggggaggaaggaggtcacaccaatatgatgatggttttcatgactttgaatgatatatttttgtacatctagctgtatcgaggcatcaggcctgaataaac

SEQ ID NO: 228721 - DNA, 350 bp, Homo Sapiens
ctgagtccagctctttaatgcccgttcatctcagtcccctgcccgcaatcctgccttctggcctcctccgtccctgatcccgcctctgcctgcccaggggctgcccctggccgagtcactgaagcgactgatgtccctgtctccaggacgggctcctctcctactttgggacgcccacgtggcaaaccgtgaccatctttgtggcgggagtgctcaccgcctcactcaccatctggaaaaaaatgggctgaggcccccagctgccttggactgtgtttttcctccataaattatggcatttttctggaaggggtggggattgggggacatgggcatttttcttacttttg

SEQ ID NO: 228722 - DNA, 724 bp, Homo Sapiens
acaaaaaagttgggttcggccggtgagcgcaggggcggcagtgcgcgcctagcagtgtcccagccgggttcgtgtcgccatggggcagatcgagtgggccatgtgggccaacgagcaggcgctggcgtccggcctgatcctcatcaccgggggcatcgtggccacagctgggcgcttcacccagtggtactttggtgcctactccattgtggcgggcgtgtttgtgtgcctgctggagtacccccgggggaagaggaagaagggctccaccatggagcgctggggacagaagcacatgaccgccgtggtgaagctgttcgggccctttaccaggaattactatgttcgggccgtcctgcatctcctgctctcggtgcccgccggcttcctgctggccaccatccttgggaccgcctgcctggccattgcgagcggcatctacctactggcggctgtgcgtggcgagcagtggacgcccatcgagcccaagccccgggagcggccgcagatcggaggcaccatcaagcagccgcccagcaaccccccgccgcggcccccggccgaggcccgcaagaagcccagcgaggaggaggctgcggcggcggcggggggacccccgggaggtccccaggtcaaccccctcccggtgaccgacgaggtcgtgtgacctcgccccggacctgccctcccaccaggtgtatccacctgcaataaacgcagcgaa

SEQ ID NO: 228723 - DNA, 229 bp, Homo Sapiens; identical to SEQ ID NO: 194921

SEQ ID NO: 228724 - DNA, 974 bp, Homo Sapiens
ctttgtacaaaaaagttggatagtgaggcgggccttcgggctggctcgccgtcggctgccggggggttggccggggtgtcattggctctgggaagcggcagcagaggcagggaccactcggggtctggtgtcggcacagccatggcgggcgcgttggtgcggaaagcggcggactatgtccgaagcaaggatttccgggactacctcatgagtacgcacttctggggcccagtagccaactggggtcttcccattgctgccatcaatgatatgaaaaagtctccagagattatcagtgggcggatgacatttgccctctgttgctattctttgacattcatgagatttgcctacaaggtacagcctcggaactggcttctgtttgcatgccacgcaacaaatgaagtagcccagctcatccagggagggcggcttatcaaacacgagatgactaaaacggcatctgcataacaatggaaaaggaagaacaaggtcttgaagggacagcattgccagctgctgctgagtcacagatttcattataaatagcctccctaaggaaaatacactgaatgctatttttactaaccattctatttttatagaaatagctgagagtttctaaaccaactctctgctgccttacaagtattaaatattttacttctttccataaagagtagctcaaaatatgcaattaatttaataatttctgatgatggttttatctgcagtaatatgtatatcatctattagaatttacttaatgaaaaactgaagagaacaaaatttgtaaccactagcacttaagtactcctgattcttaacattgtctttaatgaccacaagacaaccaacagctgggccacgtacttaaaattttgtccccactgtttaaaatgttacctgtgtatttccatgcagtgtatatattgagatgctgtacctaatggcaataaatgatttaaatattt

SEQ ID NO: 228725 - DNA, 460 bp, Homo Sapiens
ttggattgtcagatctcgattaaactggttgtcttatttcttctcatcattaacggaaaaaaaatcagtatttctatctttgatatctaagtgttttgaggattttaaaactgaattttatctgctataccagttatttgagaaagtatgattttaatgtaaatcatttaaaaaggacaaaagtataatttccagtgattttcactgctgtcagtacaaaagtaataaacatctcaattttattttagtaaattttcttcaagtgtttggggttatttgtttatgtattagagaattgtttcaggaaggtctgagtattatgcttcaaagcaaaatttcaggttaagaagaaattgtaaatcttaaagaatgttggtgttactctcaatggaatattgtttcaagcttgtaagctgtgtataaaaaaactggaggtctgaccgttcatgttatctgcttt

SEQ ID NO: 228726 - DNA, 906 bp, Homo Sapiens
ttctggttgctggcattctattacagctactagagtgtccaaattggcaactgtttgtaataatgctgtttctggaactgccacatgtgtcttcaggttagtttctccgtccaaactagcagttgtaacgtgacaggaaccatccagtcgatctgaggacagaagcaccaagtctgcaggaaaaatttcatctttggctattcgaacaatatcacccacccgaatgttttttgatctagtttttacaaggccaccacttcgaacaacataaacaggagctccatttacttcattatctgagttatgccgtaaccaatcttcatatccctgctttatggcagttactgttatcacaaagaataatggaagtccactggtaactggactggtaggtgtatcaatcataagctgaaccaaaaatataataagaaaataaaagtttgccactcttctgaactgttcaaataaattttttggaacaaaattccacacagtgtacttagatgaaatgatcctgttatctataaatttctgaggtgtgtaaaggccattctgaggaaacctgttggctacgtagatggttcttgtgtcactctgatgtggtgggtcaaaacccagctgctgccggatccagcgccacattcccccgtcgtcgccgtccgggtcccgcggggcgcgggggccgcggggctgcaggtggaggccgacaagacagaggcgggagcgggcgagcccctcgggccgaagttccgcttaccgccgccgccgccactgcctcactccccgcgccgcgtccccatcccgcggcgtcggccccgagtcctacaggcgcggccccagcgccgcccccgcccggcgcagctgagcctgccgccgcgccgcagccaccttcattattgaccccaa

SEQ ID NO: 228727 - DNA, 385 bp, Homo Sapiens; identical to SEQ ID NO: 194923

SEQ ID NO: 228728 - DNA, 852 bp, Homo Sapiens
gatgtcaatgaagcccaggatggtgagcaggaaggcggcttggtgtcgggcacgcccaggtccttggcgtagctcaccacgaacacgggcgggacgaagagccccagcaccatgaccgaggcggccacggcgtaaagcacaaagccgcggtcccggaagacgctcaggtctagcaggcgccgggagggtcgcggcggccccgagcccggctgggccgtgaccaccaggggcctcatgagtgcggcacacacgcagcagttgagcagcaggccgcccaggatgaggaagccgccccgccagccgtagcggtcctgcagcagctgccccagcgggctcagggcacacaggaagacagggctacctgctgccgccagcccgttggccatggggcgccgcttgctgaagtagcggttcagcatgatgagcgagggctggaagttgagtgccaaacccaaccccgtgatgaccccagtggtgaggtagacctggatgatgctccggcaaaaggacgcagccaccatgcccagcgacgcaaagagaccccccacaagcatgacgggccggcagccaaagcggttcacgcacacactgcagagcggacctgtcccgtagagcatggccagcaggatggaggagatccaggctgtgtcgctgtagccgatcccaaactcctgtatgagctccttgaagaagacactgacggccttggggaaggcgtaggagaagccagtgatgacgaaacagccgaagagcacggcccagccccagccgccgtcaggggccttgacgcctgtggggccctcgtccaccacggcccctcccatggccaggagggttggttccgcctcacct

SEQ ID NO: 228729 - DNA, 1109 bp, Homo Sapiens
aaaatgatgaaatggtgtttattactatctggatgtaaaacccagcagtgttgtcctatctgacatggtctagggtttcccagccagtgagagaggggccaggaaggaactaggctgcgtgtcaggcacttgtcaggcagtatcaggcactcagcaccctaaggctaccatggtggggtggggctggtaagctctgatcagccatgaaaggccctctctgccctactcaggcccaagccaggaccagacattctgagcatggctcagtcgccttccccaacctcaggtctgacccagagtaaagaaagagacctcaggttaatgggaagccacttagctctgctcccaaccagccactttcacacaagtataccaaaagatagcccctgacttcaacagagaggggctttcctgcctgagatctggtgagcagatgggtgcagggaaagtatgctggcttttgtcacagtgacattttccaaagtggaaaaaagttaaaaatatctcccaccttaagttcagatgaaaagtcaccctttgggtcgggaatagtgaggggatggctaggcccagggactccctcaggggagagcgctgagtgccatctgggctggggctgcagcaaggcagggctggactgcacagggaggcaggcagactggatccagcagcctcagccaaaggaggagtgagaatgagagggccagccagtgtgtgagaaatcagcctccccaaggcagaggtgaaccctcaatcgcccctcctcccttactcgctcactcagcattcacaggcagcaacgtggtccctggtcaccatggcaaccaatggccaatgcctttctcaaggccaggcccatctgcccatcccacagggagatgtctctgtggaagatgggaagcccagccacaactcccagtggcctagaaagctaaggccatgcaccagggcaggacagcacagaggcctcactcgggccaacctagctaaaggtgctgctatggcagcaggcagctcccagcccctaggccctgcccatctctagggcttgagcctgggccagagatctgaaggaggcttagggtcagggtcctccatcctgaagccaa

SEQ ID NO: 228730 - DNA, 892 bp, Homo Sapiens
ttggccccaactcagagttaagcatacatggcaatgctgaaaataaacaaaatccactgaggcttcccaggccatttaaagcctggagtaccagcgcatatcatctcatggggtccagagtggagtccaggcttctctgaaaccagggctgagcatatttccatagccaaggaggtgggactccctggagctatctgtggtcttagggaaggatccagacatacacggctttggggtacaagctgtgatcactgatcaataaattatctctagattggtccttgtgaggggagttttaagaatccagaacatcttgctcttgatcagcacatccaaaaacaccaagacaaacatccagtggagcagaacctctcctgcctcgggagttctgaccgggttccccagcagggtgttaagcctctgtctctggccctaccagcatccaggttccactttcctaggagagagtggagatgggaagacagggaaaggaaggcagcaggaggccacaagcccaccaggtcttcatgtcaagagagggagtaacatgtcttctcattgcccacggacccaacctctgtccaggtgcccctcatcatcacagtttaacacaagctcccctgctccagccaaattgatctcccagtcttgtccttacccattccaagtgctctgccagcccctgttcatccaagttttaagtcctccaccctgttctaagagactgttccaacggctctgggcctcagtggtcacttgaccaccattgtctcagagctgcccactttgtgtgtgtcacatgctgcctgagtcacatgtacatcttatttctgcctctagttttgtaagctcctgcagggcggataacatcttatactactcttgtattctc

SEQ ID NO: 228731 - DNA, 888 bp, Homo Sapiens
actttgtacaaaaaagttggggacaaaacgcgttctcccggggaagtacttggaagagatcgccacacagatgcgcacgcacagcatcaacgcgctgctgatcatcggtggattcgaggcctacctgggactcctggagctgtcagccgcccgggagaagcacgaggagttctgtgtccccatggtcatggttcccgctactgtgtccaacaatgtgccgggttccgatttcagcatcggggcagacaccgccctgaacactatcaccgacacctgcgaccgcatcaagcagtccgccagcggaaccaagcggcgcgtgttcatcatcgagaccatgggcggctactgtggctacctggccaacatgggggggctcgcggccggagctgatgccgcatacattttcgaagagcccttcgacatcagggatctgcagtccaacgtggagcacctgacggagaaaatgaagaccaccatccagagaggccttgtgctcagaaatgagagctgcagtgaaaactacaccaccgacttcatttaccagctgtattcagaagagggcaaaggcgtgtttgactgcaggaagaacgtgctgggtcacatgcagcagggtggggcaccctctccatttgatagaaactttggaaccaaaatctctgccagagctatggagtggatcactgcaaaactcaaggaggcccggggcagaggaaaaaaatttaccaccgatgattccatttgtgtgctgggaataagcaaaagaaacgttatttttcaacctgtggcagagctgaagaagcaaacggattttgagcacaggattcccaaagaacagtggtggctcaagctacggcccctcatgaaaatcctggccaagtacaaggccag

SEQ ID NO: 228732 - DNA, 946 bp, Homo Sapiens; identical to SEQ ID NO: 194924

SEQ ID NO: 228733 - DNA, 299 bp, Homo Sapiens
ttgggtgaatataaaaggacttcatctcctcaacatggaaactaaggctttactcatcagtcttaagtatggttgttttatgtggcaattgggagatactgatacttgttttcagatccatagcatggaaaataaaatgagctttatagtacatacaaaacaggctggtctcgtggtaaaactgttaatgaagctaaatggacagttaatgcccactgaaagaaattcatgaaagagaagtaactgttactcaagccaccacattttgtaatgcagagttttttttccgtgaaagattt

SEQ ID NO: 228734 - DNA, 434 bp, Homo Sapiens; identical to SEQ ID NO: 194925

SEQ ID NO: 228735 - DNA, 936 bp, Homo Sapiens
ttgggcttgactagcgccctgaaacatccatttgggtcgtggagtgcgagcacggccggccaatcgccgagtcagagggccaggaggggcccggccattcaccgcccggcccctgctccgtggctggttttctccgcgggcgcctcgggcggaacctggagataatgggcagcacctgggggagccctggctgggtgcggctcgctctttgcctgacgggcttagtgctctcgctctacgcgctgcacgtgaaggcggcgcgcgcccgggaccgggattaccgcgcgctctgcgacgtgggcaccgccatcagctgttcgcgcgtcttctcctccaggtggggcaggggtttcgggctggtggagcatgtgctgggacaggacagcatcctcaatcaatccaacagcatattcggttgcatcttctacacactacagctattgttaggttgcctgcggacacgctgggcctctgtcctgatgctgctgagctccctggtgtctctcgctggttctgtctacctggcctggatcctgttcttcgtgctctatgatttctgcattgtttgtatcaccacctatgctatcaacgtgagcctgatgtggctcagtttccggaaggtccaagaaccccagggcaaggctaagaggcactgagccctcaacccaagccaggctgacctcatctgctttgctttggcatgtgagccttgcctaagggggcatatctgggtccctagaaggccctagatgtggggcttctagattaccccctcctcctgccatacccacacatgacaatggaccaaatgtgccacacgctcgctcttttttacacccagtgcctctgactctgtccccatgggctggtctccaaagctctttccattgcccagggagggaagggttctgagcaataaagtttcttagatcaatc

SEQ ID NO: 228736 - DNA, 709 bp, Homo Sapiens
tgagcaatgcttttctttaataaggcaactttgtacaaaaaagttggcatgactaccttcacctggaacatcaaccacgcccggctgatggtggtggaggaacgatgtgtttactgtgtgaactctgacaacagtggctggactgaaatccgccgggaagcctgggtctcctctagcttatttggtgtctccagagctgtccaggaatttggtcttgcccggttcaaaagcaacgtgaccaagactatgaagggttttgaatatatcttggctaagctgcaaggcgaggccccttccaaaacacttgttgagacagccaaggaagccaaggagaaggcaaaggagacggcactggcagctacagagaaggccaaggacctcgccagcaaggcggccaccaagaagcagcagcagcagcaacagtttgtgtagccagtctaccaccaccacagcaccccagacagctaggcttagcccctctgccctcccttcattgtactttatcattaaaaatcaacttccagccctgtctgctgtctacgtggtgggttgtggggatgcagtttggcatctgcagtacaccaagcacatgattcatgtctgagccaggtctgcttattctcccattgggcagctgaggaccgaggcacagaggtgcggtgacttgcccggggctccaggtagcctgcaggttaactggcggtaagtg

SEQ ID NO: 228737 - DNA, 713 bp, Homo Sapiens
ttggctaccctagtctttctggggtgtttatgtcctcagctgaagcctggcctagttgctgagaggggctggggagatggggcgggagggccagactcagtgctgctgtggagctaggtgcttcccccttcccctgagactggttgactgaactccagtcaagttgagttcaagtgaaagattcttccagggttttattttttcccctcctaacaaagtctcatagtgttaacactggttctgcaatatctctgaggtgcaaagaatgcacttttccctatggggcccagagtttgccttttctgccaggcagtcaccacgcttccctaccccagcctgtttcttttggcttggtttggaccacagtcctctgctacccagggttttagagcccctgctctaggaaacagtttaagaaatcattggccccttcccagcacattgaatgggtaagcagacaggccatgatttagttggccagcactaactccacctctgttctccttgaacagcttcccctccagcccactgctttaggatgacacaatgaataacacctagtcatagaaatcagtctctctggtttgttttgtattatgttgtacatcattaaagatctaaatacaaaggatatacagtcttgaatctaaaataatttgctaactaactattttgattcttcagagagaactactaataaaaatctaaaaggt

SEQ ID NO: 228738 - DNA, 916 bp, Homo Sapiens
tttgtacaaaaaagttggatttcaagtggttttatgaagaaacagaaagcagtgatgatgttgaagtgctgactctcaagaaattcaaaggagacctggcctacagacgacaagagtatcagaaagcactgcaggagtattccagtatctctgaaaaattgtcatcaaccaattttgccatgaaaagggatgtccaggaaggtcaggctcggtgtctggctcacctgggtaggcatatggaggcgctggagattgctgcaaacttggaaaataaagcaaccaacacagaccatttaaccacggtactctacctccagcttgctatttgttcaagtttgcagaacttggagaaaacaattttctgcctgcagaaactgatttctttgcatccttttaatccttggaactggggcaaattggcagaggcttacctgaatctggggccagctctttcagcagcacttgcgtcatctcagaaacagcacagtttcacctcaagtgacaaaactatcaaatccttctttccacactcaggaaaagactgtcttttgtgttttcctgaaaccttgcctgagagctctttattttctgtggaagcgaatagcagtaatagccagaaaaatgagaaagctctgacaaatatccaaaactgtatggcagaaaagagagaaacagtgttgatagagactcagctgaaagcatgtgcctcttttatacgaaccaggcttctgcttcagtttacccaacctcagcaaacatcgtttgctttggagaggaacttaaggactcagcaggaaattgaagataaaatgaaagggttcagcttcaaagaagacactttgctgttgatagctgaggttatgggagaagatatcccagaaaaaataaaagatgaagttcacccagaggtgaagtg

SEQ ID NO: 228739 - DNA, 1253 bp, Homo Sapiens
ttgggctagaggagcctctgagcagcatcttggaccgtgatgatatcttcgtctatgaggtgtcaggtcgcattgaggccattgagggctcaagagaggacatcgtggttcctgtctacctgcgggagcgcacccctgcccgtgactacaacaactcctactacggcctgatgctttttggacaccccctcctggtatcagtgccccgggaccgcttcacctgggagggcctgtataacgtcctgatgtaccggctctcacgctacgtgaccaaacccaactcagatgatgaggacgatggggatgagaaagaagatgacgaggaggataaagatgacgtccctgggccctcaactgggggcagcctccgagaccctgagccagagcaggctgggcccagctctggagtcacgaacaggtgcccgttcctcctggacaattgccttggcacatctcagtggcccccaaggcgacgacgcaagcagctgttcaccctgcagacggtgaactccaatgggaccagcgaccgcacaacctcccctgaagaagtccatgcccagccgtacattgctatcgactgtgggccagagatgaagaagcgttactatgacgaggtagaggctgagggctacgtgaagcatgactgcgtcgggtacgtgatgaagaaggctcccgtgcggctgcaggagtgcattgagctcttcaccactgtggagaccctggagaaggaaaacccctggtactgcccttcctgcaagcagcaccagctggcaaccaagaagctggacctgtggatgctgccggagattctcatcatccacctgaaacgcttttcctacaccaagttctcccgagagaagctggacaccctcgtggagtttcctatccgggacctggacttttctgagtttgtcatccagccacagaatgagtcgaatccggagctgtacaaatatgacctcatcgcggtttccaaccattatgggggcatgcgtgatggacactacacaacatttgcctgcaacaaggacagcggccagtggcactactttgatgacaacagcgtctcccctgtcaatgagaatcagatcgagtccaaggcagcctatgtcctcttctaccaacgccaggacgtggcgcgacgcctgctgtccccggccggctcatctggcgccccagcctcccctgcctgcagctccccacccagctctgagttcatggatgttaattgagagccctgggtcctgccacag

SEQ ID NO: 228740 - DNA, 829 bp, Homo Sapiens
ttggcaccgcccccaccgtgcacttctcctctctgggccttggcttgggaccaggtacgaaggatccccaagcccttcaggcctgagatcagagccagatcagccttaagtcacctcccatccaagaacttggcctaaaaatactcccctatttctaaccctcaggacggatctgatattaaatgccttccctgggaggaagggtgctttccccctccctagaggtgcccattccataccctgggagactgaggagagcattggctgaagcccagttcctttcccatccatccccaactccaataatcccccactcctcgcaggtctcagtgtcatgctgtcttggggcagggtgaaagggtagtggcagcagggcgcccactctggagatcctcaaaaaaggccctcctctgtggctggcagcctctgacctttccctgggcttcaaaggaaggctatggagtttgctgtgggccctgcaaccttcccagccactcctgctgcactaaggacttaggatccttttatcacaaatcgggattctctcccccaccccgaattctgtctgcttaaactggaatacacaggagcccttcctggcctggatggtgtctcccagcttccccgcccagcttgcccaccccatagttggtgagatgccaagtttggtctgagttgtgaccccttcagagtagatgcccggcaggctggggttggcccctggagggtcaggggaccatcttcttattccctcttttctcattcctccaacttcctcccctccttcaattatttttttgtaaagttgatgccttactttttggataaa

SEQ ID NO: 228741 - DNA, 1294 bp, Homo Sapiens
ttggctaaagcatgctgcatggtatccaagtgaaatcctggatccccacgtagtgctgttaacatcagacacccactaacgtgataatactttcagaagccgaagaggaaagtctagtactcaataaaggaagggcgtataccgcatctctaggagagacagcagttgcatttgactttgggccattggcagcagtcccaaagactctatttggacaaaacggcaaagatgaagtagtggcatacccactgtacatcttatatgaaaatggagagactttcctgacatacatcagtctgttacacagccctggaaatattggaaagctgttgggtccattgcccatgcatcctgcggctgaagataactatggttatgatgcgtgtgctgtactctgcttaccctgtgtccccaatatcttagtgatcgctactgaatcaggaatgctgtatcactgtgtcgtgctagaaggggaagaagaagatgaccacacgtcagaaaagtcctgggattccaggattgacctcattccttctctgtatgtgtttgaatgtgttgagttggagcttgctttgaaactggcatctggagaggatgacccttttgattctgacttttcttgtccagtcaaacttcatagagatcccaagtgtccttcaagatatcactgtactcatgaagctggtgtacatagtgttgggctaacttggattcataaacttcacaaatttcttggatcagatgaagaagataaggatagtttacaggaactctctacagaacagaaatgctttgttgaacacatcctttgtacgaagccattgccctgcaggcagcctgctccaattcgaggattttggattgtacctgacattctgggacccacgatgatctgcatcaccagtacctatgaatgcctcatatggccgttattaagtacagtccatccagcgtctcctcccctgctttgtactcgagaagatgttgaagtggcagagtctcccctccgtgttctggctgaaaccccagattcctttgaaaagcatattagaagcattttgcaacgtagtgttgccaatccagcatttttgaaagcttctgaaaaggacatagcccctcctcctgagaatgccttcagctcctcagcagagccacccaggtgttcagagagcagtacattctcaaacaggacttggcaaaggaggagattcagcggaggggtcaaattattatgtgacaaaaaaagaaacaactagaagatctcagttattgtcgagaaagagaggaaagtctg

SEQ ID NO: 228742 - DNA, 962 bp, Homo Sapiens
ttggcaaggtgtctggctgcgcgtttggctgcaatgagctcggcctcggggctccgcagggggcacccggcaggtggggaagaaaacatgacagaaacagatgccttctataaaagagaaatgtttgatccggcagaaaagtacaaaatggaccacaggaggagaggaattgctttaatcttcaatcatgagaggttcttttggcacttaacactgccagaaaggcggggcacctgcgcagatagagacaatcttacccgcaggttttcagatctaggatttgaagtgaaatgctttaatgatcttaaagcagaagaactactgctcaaaattcatgaggtgtcaactgttagccacgcagatgccgattgctttgtgtgtgtcttcctgagccatggcgaaggcaatcacatttatgcatatgatgctaaaatcgaaattcagacattaactggcttgttcaaaggagacaagtgtcacagcctggttggaaaacccaagatatttatcattcaggcatgtcggggaaaccagcacgatgtgccagtcattcctttggatgtagtagataatcagacagagaagttggacaccaacataactgaggtggatgcagcctccgtttacacgctgcctgctggagctgacttcctcatgtgttactctgttgcagaaggatattattctcaccgggaaactgtgaacggctcatggtacattcaagatttgtgtgagatgttgggaaaatatggctcctccttagagttcacagaactcctcacactggtgaacaggaaagtttctcagcgccgagtggacttttgcaaagacccaagtgcaattggaaagaagcaggttccctgttttgcctcaatgctaactaaaaagctgcatttctttccaaaatctaattaattaatagaggctatctaattttacactctgtattgaaaatggctttc

SEQ ID NO: 228743 - DNA, 348 bp, Homo Sapiens
ataacaataaaaaaccccaaaagtggaaaactgagggggcaggggaagagacccctgggccaggggcacgaggagccttgctcatggcaccaggcctggccgcagggtcccccggtattgatgttgctacgaggttggggggcagcgattgtcctgtgggagccaccgttctcctgggtcggggaccctcagttcttttggggtgtgctcagattctgcatgccccggatgttgtccagcaggccagaaatgaaggcctctgtgggtttgtaacagtcaaccagcagctccttgaccctggcagcccgggcatcgtcactctccatgtccagccaactttttttgtac

SEQ ID NO: 228744 - DNA, 326 bp, Homo Sapiens; identical to SEQ ID NO: 194927

SEQ ID NO: 228745 - DNA, 457 bp, Homo Sapiens
ttggcggccgcacaactttgtacaaaaaagttgggtttttcttgtcaaacctgagcactcctcctgctgaagtttcttatttaattccagagtactgtcctctactctaaggcattacttttaagtgtattatgaaggcagttttcaaaggatatgaccagttggggtaattcaaattaaaaaggaaaagatttgtttggaagtaactggtgtctctaagaggaatttttagatgtcagtttggaggctctttcccccctcaattgagagctcttgttattcagagctccaagactagacctggctaacaaacataggagacaaagttaggaaacattgatacaagctttgtacagagatttgtacatttgtgtaataggccttttcatgctttatgtgtagctttttacctgtaacctttattacattgtaaattaaacgtaacttttgtcaaaac

SEQ ID NO: 228746 - DNA, 480 bp, Homo Sapiens
ctttgtacaaaaaagttggcttttatacttgaacatggagactgcacatggactttagggtttgtgctgtgggataaacggaagctacagtgagaacatagccagtcccaaagacaatttcaaagaaaaatgacagtaaagattagctgggagtagtctttgacagtgcttatttgatactgtctctcagagtttgcaaaccagattgtacaagtcattagcgtcagatagctttaaagttgtgaccttcttgtacatgaatcttctagccagtttcctttcctttgtaacgaaacatgaaatcctagaatgtatgagaagttcagacattaggcataaggaaactcgtttgcaggctctctgtccagggctgcttcctgtcctggaggggccagtgagtcttaggtatgtttattttattctcacatttgtgtttttttagaaaagtgaatggtcaataaatggcttatctttcataat

SEQ ID NO: 228747 - DNA, 343 bp, Homo Sapiens
tttgtacaaaaaagttgggtagggttttggcctaggtaacggggcagagatgtggttcgagattctccccggactctccgtcatgggcgtgtgcttgttgattccaggactggctactgcgtacatccacaggttcactaacgggggcaaggaaaaaagggttgctcattttgggtatcactggagtctgatggaaagagataggcgcatctctggagttgatcgttactatgtgtcaaagggtttggagaacattgattaaggaagcattttcctgattgatgaaaaaaataactcagttatggccatctacccctgctatatggttacagagtattatgta

SEQ ID NO: 228748 - DNA, 824 bp, Homo Sapiens
ttggaataaacagccatatgtggttactaatcacctcttctgtcattccgtccttggccaccgctcagtgggaatggtctctgatctggatgctcccaccttccatgtcaggcccagaactgtgccatggtctgtggactcctggtcagccttgactggctaggagaccttgggcagtacctacagtcttgctgtttctgtttcatctgcaagaattatgacccacacactccagctgcagcccagggcactgtgatattttatacgtgtgtagatgtttttgtccacagttcctggttcatcactcccataaccctttgttataatgttgggacactgcaggcctcagaaaacggaatctctgtctgtgaccttctcctgccccatttcacttgctcaacaccagactttaatctgactgtagctcataagaccctcattccagagagggtgctgccccatacccggaaggaggaacgctgcacagagaggccaagaagcatctggacagacaggccttgctgggtttagaccttatgctttttgtccagtttcatctcaacacagctgccatgcttcagccatgcctatccaatgacgtctccataaaaggcccaggaacacgggagcttctgaagagctgaacatgtggagggaggggaacgagaacttgtccatgtgccaagagggtggcgcacccccactccatggggacagaagctccagcatttgcccaggacccgtccagacctcaccctgtgtgtatcttcatctggctgtttacttatttgtatccttttctaataatgtttgtaataaactgg

SEQ ID NO: 228749 - DNA, 953 bp, Homo Sapiens
ctttgtacaaaaaagttggaaagttgtctccaaaaaatatgccagcctctacttctgctgcgccatcgagggccaagacaatgagctcatcacactggagctgatccaccgatacgtggagctcttagacaaatactttggcagtgtgtgcgagctggacatcatcttcaactttgagaaggcctacttcatcctggatgagtttttgatggggggggatgtccaggacacctccaagaagagtgtgctgaaagccatcgagcaggctgacctactgcaagaggaggatgagtcgccacggagtgtgctggaggagatgggtttggcatagcccctgctgggccggggtgtggcgatggggtcctggcagcgtggcgggaacggctgcttctcctctgcccagggccctgttcttggtgggactcggctgcccctcctctgctgcctcacctttcggagtgagctgtgggctcaggcccttcaaacattccctccctccaccccctacctccactttccccttttcccactgaaggttttagaagctaggaggcaggaaaatgtgacccagatgggggtgctatttggcttttattccctgcctttgcagaactgatgtcaccccagatgtccttccctccctaataactgtaaatatataaatatgtcaggttaaagggaaaaggtgttcagggcacttcttgtcctctctgtcccataacctacctccaccctccccctagccagccaggcagcttctctgcctgggaggggagcctggacccccctctttctccttggctgcagtggggcctttatccagtgccagggaggaacaacatagttaatttttttctaaccttgccactttgagggaaggaaggggttgggggaagggcaagctttatgggaccttggtcctggccctggtctttcactccagttctgggtga

SEQ ID NO: 228750 - DNA, 634 bp, Homo Sapiens
ttggggattttataccgaagaagtcagacagggagggagaagaataggattcgatgtcgtcacgttgtccggcacccgggggcctttatcgagagttgggttagagcctccacctggaaaacgtgaatgccgagttgggcagtatgtggtcgacctgacttcttttgagcagttggcactacccgtcttgaggaatgccgactgcagcagtggcccagggcaaagagtgtgcgtcatcgatgagattgggaagatggagctcttcagtcagcttttcattcaagctgttcgtcagacgctgtctaccccagggactataatccttggcacaatcccagttcctaaaggaaagccactggctcttgtagaagaaatcacaaacagaaaggatgtgaaggtgtttaatgtcaccaaggaaaacagaaaccaccttctgccagatatcgtgacgtgcgtgcagagcagcaggaagtgaagacacgtgcattcctgccttccgtgaaggagtgcccagttcaagaggagcctgatggagccctgcctgtcgaggctgtatgcctatggggttatggaaccttgtgggcttttctagagaaaactcaacagctgtttcccataaaatgtttaaaagatc

SEQ ID NO: 228751 - DNA, 507 bp, Homo Sapiens
tgtacaaaaaagttggatgctatacaatctgaatgttattttaacttatagttttttttaatatatatatttaactataaggacagtttagggaacaagttacctaccacatttcactttagtgtacctatttacagaaagattaaactgccacctgcgggcacattcccataaatgtgtactttactttaaaaagaacatgccacgattttgtctttctgtggactcaacattcacttcgattaaaaatagcaatttgaccaagttggacttccactacaaagcagctgttttccaaagttcaatgctgacatatatgtatattaaaataattgcctatttattaatctacaaatagacaacgttggcatgttcttttctgtttgtctattaatgggcctgcttcttagcaatattagaatgttttataaaagcaattcatgttacttttctggtcttttcatggcatatgagcaaataataaactatttacactactattctgta

SEQ ID NO: 228752 - DNA, 680 bp, Homo Sapiens
ctttgtacaaaaaagttgggtttcggtagcgacggtagctctagccgggcctgagctgtgctagcacctcccccaggagaccgttgcagtcggccagcccccttctccacggtaaccatgtgcgaccgaaaggccgtgatcaaaaatgcggacatgtcggaagagatgcaacaggactcggtggagtgcgctactcaggcgctggagaaatacaacatagagaaggacattgcggctcatatcaagaaggaatttgacaagaagtacaatcccacctggcattgcatcgtggggaggaacttcggtagttatgtgacacatgaaaccaaacacttcatctacttctacctgggccaagtggccattcttctgttcaaatctggttaaaagcatggactgtgccacacacccagtgatccatccaaaaacaaggactgcagcctaaattccaaataccagagactgaaattttcagccttgctaagggaacatctcgatgtttgaacctttgttgtgttttgtacagggcattctctgtactagtttgtcgtggttataaaacaattagcagaatagcctacatttgtatttattttctattccatacttctgcccacgttgttttctctcaaaatcccttcctttaaaaaataaatctgatgcagatgtgaaaaaaggaa

SEQ ID NO: 228753 - DNA, 353 bp, Homo Sapiens
ttggccttttccccggttggcttgctgtgagtgtctctagggtgatacgtgggtgagaaaggtcctggtccgcgccagagcccagcgcgcctcgtcgccatgcctcggaaaattgaggaaatcaaggacttcctgctcacagcccgacgaaaggatgccaaatctgtcaagatcaagaaaaataaggacaacgtgaagtttaaagttcgatgcagcagatacctttacaccctggtcatcactgacaaagagaaggcagagaaactgaagcagtccctgccccccggtttggcagtgaaggaactgaaatgaaccagacacactgattggaactgtattatattaaaatacta

SEQ ID NO: 228754 - DNA, 494 bp, Homo Sapiens
ctttaaaaaaactttgtacaaaaaagttggggtctttacaacccctgccttggctctgctgacaaaaactcccgcaaaagggcccctcgtagcaaggtcccgccgccacgagactttcacatcaatctcttccgcatgcagccctggctgaggcagcacctgggggatgtcctgaattttttacccctctagccatggccactgagccctctgctgccctgccagaatctgccgcccctccatcttctacctctgaatggccacccttagaccctgtgatccatcctctctcctagctgaataaatccgggtctctaggatgccagaggcagcgcacacaagctgggaaatcctcagggctcctaccagcaggactgcctcgctgccccacctcccgctccttggcctgtccccagattccttccctggttgacttgactcatgcttgtttcactttcacatggaatttcccagttatgaaattaataaaaatc

SEQ ID NO: 228755 - DNA, 528 bp, Homo Sapiens
gttggatctgctccccggtggagcagtgtacaagccagaagatacctgaaattcctgcagatgttgtgggtgcccttctgttcctggaggattatgttcggtacacaaagctacccaggagggttgctgaagcacatgtgcctaatttcatttttgatgagttcagaacagtgctgtaactgtttttcctacttcttcaatggaaggattgtccttagatcttcccaccatcacaaatgaatttgaagatgaaaagaaactcagttgctcatacaactgcattttttctgtctattatgggaaacatcatatgttctgagtaagatatatctcatggcattagttaatataactgatattgtttaaatcatggtattacatgcaatttatatcagataaaagcagaacacatttttgtactgcctctcttaaatgctgaatgtaactgttatgtataaatccatttagttttatgttctaaagaactatttgtgcaactccagattttcagtaaaatagtattactag

SEQ ID NO: 228756 - DNA, 906 bp, Homo Sapiens
aaggaaggagacatcagagtgaggacacaaagttcaacagaaggtcctgctaccctcagcaaggggcatctatgtgggctgggacatgtaccgtctgcccttcctcccatccaggccatctgcgaatatacatgggtcctcctattcgacaccagatcactctttcctctacccacaggcttgctatgagcaagagacacaacctcctctcttctgtgttccagcttcttttcctgttcttcccaccccttaagttctattcctggggatagagacaccaatacccataacctctctcctaagcctccttataacccagggtgcacagcacagactcctgacaactggtaaggccaatgacctgggagctcacagctggctgtgcctgagggcagggcagcaggcatgaatgcttctatgtgtaaggcaggactgcccctatggcagggtgtggggagccacagggctctggggtatgtctaaaagtgggggcaaaaaggttcaggaagccaaaaacatgggcttatttgtcatagaagtccacgtgggctccagacttgaactcgtccttttccagtaagctcagcagtttctgggctgacaccttgcaatccaccagcttcccctttgccttcagctcctgcagcccttttcgcatgtctgggtccacggaggtctcccgggccaactgctgcatgtctgtgtccagaggacctggggcatagttcagcaccctcacattaggttcctccagcgccaggacctggaacagcatatcacgagcagcctttcctgcacagtacagcgcccagcctttgaaaggttgcagggcacagagggacgagatgttaaccacggttctgttgaggccaggactgtccgggaagccaacttttttgtacaaag

SEQ ID NO: 228757 - DNA, 616 bp, Homo Sapiens
ttgggttcaatgctaggtctgatagcgatagcttttagtagacagcggtaggtgcctgcagaacttgtgtttttctcatctttaaaatacaactacttatgctcttaaatcaaggctgtctgcttatttatactagcgtaggcaacacttggatttcccttcttagtatgcttcataactgctttacagagagcttttgcttgttctttctcatgtatctcgtgtttatgtgcacagtgccaaaagaagactgactgggtggaggctctgccttgcctcaagaaccatcccctgcagagcatccagggaggtttctcgccccaatagcctcacggcacagtactcttgggcagtaactggacaccttttatttgaagaaacaaactgaagaaaaaatgcttccttaagtgctgacagcctttttaaccaatacatttaaaattgtacagaacaaaaaaataaaatcaaagactgatcttgtacagatattagtgttaccagcattcatgtggaaatcaagagcaaagacaaaataatgttaaacaattctgtaccataacattttctgtaatgatactgaaacctaatgaataaaaaaattccttgatcattattt

SEQ ID NO: 228758 - DNA, 663 bp, Homo Sapiens
gcgcctttatggggtttcccagggggtgggggcggcggccggcacagggagcttcatgttgtgccacaggaagtccaagaaagcggcggcctggagggtcctgctgagccgctgaaagtgccgctcagtgtagggcagcagggcctcaagcgctgcccgcacgccttcgtaggccagcagctcctcgggggcctctcgcctcaagagcacacccagcacggcctgggcctcgtggcagtgccgcgagttggtgttccacgtgacgcagaagcgcagcagggcctctttctggtcgcgccgcagtcggagcatggtggcttccagcttctcgcaggcctcagggtccctccggatggcctggatgacagtcagcacggtgtggggccgatccagggagatggccaggcccagcgcccgcaggtaccgcttctcatgcagcaggttgtccagctcttgctgcctgaccacctgctcctcttgcctggcctgctcctctgcctgctccgcctcggtcacatccttccagaggatgactcgggagtcactggccccgaggagggcgtggtcgtccagccggctgcagtgcagcccccagaccttgtcctcgtgggcatccagcgtcctgcacagcactcgttgttctccaacttttttgtacaaagt

SEQ ID NO: 228759 - DNA, 447 bp, Homo Sapiens
ttgggacacagcccatcccctcgaccgctcgcgtcgcatttggccgcctccctaccgctccaagcccagccctcagccatggcatgccccctggatcaggccattggcctcctcgtggccatcttccacaagtactccggcagggagggtgacaagcacaccctgagcaagaaggagctgaaggagctgatccagaaggagctcaccattggctcgaagctgcaggatgctgaaattgcaaggctgatggaagacttggaccggaacaaggaccaggaggtgaacttccaggagtatgtcaccttcctgggggccttggctttgatctacaatgaagccctcaagggctgaaaataaatagggaagatggagacaccctctgggggtcctctctgagtcaaatccagtggtgggtaattgtacaataaattttttttggtcaaattt

SEQ ID NO: 228760 - DNA, 429 bp, Homo Sapiens; identical to SEQ ID NO: 194930

SEQ ID NO: 228761 - DNA, 532 bp, Homo Sapiens
ttggatacaataacttttttaaaaaaacctcagattgaaaaagcaacctaaattactttcgctctctaatcagcatttcaatgtatttatttttaaatgttctcaaaaagtaactaaaaaattgtgtcggaccctacttttgagaaatctacgtttcccaagttttatgggaactggctattccttgtcccggcacaccttctcattccttcctttcagagcctaaaacctcatttgataagcactcctagtctctggcctgtggatccagtgctattctgtcaccaacctaagaatcccaattgcaccttctgtttctgacagtcacaggtgacagctgtgattctataatacagactggtgtcttagaggtaggaataatacatgattatgaagcatcaccctgctaatacataataatgtctttttatattataagtgattgagtttagttcatttcaatacattgtacatgaaaaaatgaaaagtagaactttgtaatactttaatcaataaaattaattaccatatg

SEQ ID NO: 228762 - DNA, 456 bp, Homo Sapiens
ttgggtatgactactttgccagaacctgtgaaaagtgggtggatggcataagacagtttaaacatctcccagatggtaacatctgccggcacctgctgccccgggtccagtgccccgccttgattgtgcacggtgagaaggatcctctggtcccacggtttcatgccgacttcattcataagcacgtgaaaggctcacggctgcatttgatgccagaaggcaaacacaacctgcatttgcgttttgcagatgaattcaacaagttagcagaagacttcctacaatgagaatgcacactccagtcttggtggttccttcgtgtggggcttgatcgtgttgctgcctgttaacatgatgcctttgaaactctccgcctttgaaactttctacccctcccttcaatcttatcctaaccaaatgagaataatgacatattgaaaacagcctctagcttca

SEQ ID NO: 228763 - DNA, 323 bp, Homo Sapiens
tttgtacaaaaaagttgggatagaagtacagaattttgagaagaaactaaattttcaccaaattttaaggaaaaattgtcattatctaaaaatgttcttatatatctgcttcatcttaccttcatactctgaaattccctatagcagacagagctagggaaatattaaaaatttaccctatttattttctggaactaaatcaagccttaactataacattatgagagtaatgggaactactgctggctttaagtaaataaaagtcattgttttcaacagtgtataaaaatcatagtgtaacctttttatttaataaatatctt

SEQ ID NO: 228764 - DNA, 472 bp, Homo Sapiens
acaaaaaagttgggtcttgttcctgccagcctcagtgtcttgcttctgccagctccttcccctaggagggaagggtggggtggaactgggcacatgccagcaccacttctagcttccttcgctatcccccaccccctgaccctccagctcctcctggccctctcacgtgcccacttctgctgggcctttagccctagaacctgcaggtggtgggggcggctaccaagaaggaacagaggtctctggggaggagtctgggtggtccagccctgatgattggccccacctcctgctgccccataaccctctcttcatttcggctttttcatttaccctcatttagagccatttgcagagatttacaaagatttacagtaacgaatggattcctatataaagattatttttatactttttgcagcaaaaggaaattgtaatatttgtacagtgttcaagtgaataaaaaccatgc

SEQ ID NO: 228765 - DNA, 1044 bp, Homo Sapiens
cataaaaaactttgtacaaaaaagttggtgaaaccctgaagctgatgcttcacagctgggctgtaagtcagacttgaacccagctgatatgcaaggtcatggcgtgcccagggtggtgacagttgaacaaagtgtatagtacgtgcccagtggtagcgatggaaaaaagtataccaaatggactttgaaggaccaaaggttttaaaagtcaattggtatcacctccacactgactagggtagtggggtgcatttggttttcaaattgggtacttttaacactttagtgcctgactgctgttctttactgacttgattcagtcactcgtagctttattggtctgaaccagctccttgttcccaggttacagacctgcctatcgttccaataatcctgtttcacttgaatgaagggagtatgtcttaaatgtaaagtttctggttctcacactgtactctgaggtccaaatactgtctgtcaatgtgtaacctgatgtctcaaccccctgtgagaagagtccattatttggtgttcaccaacgtgggagacttcaccggaacaggcttttttgctttgggctctgctatttgtttgcagaacacccaagagcgagcaaacatgctctcttcacagcagtaccttagggttttgccattgtaaatgggtctgatgtgatatgacaagaccagagaaattggatgtaaatttacatttttgaatatgcttgttgtttcacatgatacatttagggtatgcagctccttttgtagtttttatttttactatttaagtttggaaatgatgccaaatttttgtatttctttaatcaatgtgttctcttcggtgatatatattgcattatatattgatgtgtgtatcaatatatattgatatgtattacacttacacatacaaacacatataagagggggtgaaaaccgtagcctttgcattctctatagcctctgcagagagatactaagcagcaaaatcttggtgttgtgatgtacagaaatggagaagagtattaaaccatatttaaga

SEQ ID NO: 228766 - DNA, 904 bp, Homo Sapiens
ctttgtacaaaaaagttgggatggattcaacccctcgtgaacgaagcggtggggagcaggcacaggactgggatgctctgccacccaagcggccccgactaggggcaggaaacaagatcggaggccgtaggcttattgtggtgctggaaggggccagtctggagacagtcaaggtagggaagacatatgagctactcaactgtgacaagcacaagtctatattgttgaagaatggacgggaccctggggaagcgcggccagatatcacccaccagagtttgctgatgctgatggatagtcccctgaaccgagctggcttgctacaggtttatatccatacacagaagaatgttctgattgaagtgaatccccagacccgaattcccagaacctttgaccgcttttgtggcctcatggttcaacttttacacaagctcagtgttcgagcagctgatggcccccagaagcttttgaaggtaattaagaatccagtatcagatcactttccagttggatgtatgaaagttggcacttctttttccatcccggttgtcagtgatgtgcgtgagctggtgcccagcagtgatcctattgtttttgtggtaggggcctttgcccatggcaaggtcagtgtggagtatacagagaagatggtgtccatcagtaactaccccctttctgctgccctcacctgtgcaaaacttaccacagcctttgaggaagtatggggggtcatttgacagtagtagaacctgttctgaaaccagaaactgttgatgtcacatcctttgaccctggtctgagctgactgctggaaaatgatctttctgcactgagactgtggagtttggggaagctaaggctgtacatttgctatttgtttatcctatgaatactgttcttg

SEQ ID NO: 228767 - DNA, 926 bp, Homo Sapiens
ttggcggaaggagcgcgcggcgacggaggaggaggatggaggcggtggtgttcgtcttctctctcctcgattgttgcgcgctcatcttcctctcggtctacttcataattacattgtctgatttagaatgtgattacattaatgctagatcatgttgctcaaaattaaacaagtgggtaattccagaattgattggccataccattgtcactgtattactgctcatgtcattgcactggttcatcttccttctcaacttacctgttgccacttggaatatatatcgatacattatggtgccgagtggtaacatgggagtgtttgatccaacagaaatacacaatcgagggcagctgaagtcacacatgaaagaagccatgatcaagcttggtttccacttgctctgcttcttcatgtatctttatagtatgatcttagctttgataaatgactgaagctggagaagccgtggttgaagtcagcctacactacagtgcacagttgaggagccagagacttcttaaatcatccttagaaccgtgaccatagcagtatatattttcctcttggaacaaaaaactatttttgctgtatttttaccatataaagtatttaaaaaacatgaattgagtttctgtagatttctagttctcaactttagcctgaacgccaacacttgaaggtgtttttcatcctctgtatgttgaaggtggttatttgtatgtaggaacaggactgccatcccagctttgcatgccaaagaaataaagaacacactttaaagggcaaactgaagagatgagcgagcaaaggtgcccttcaatctactgaaaagttagagtacaaaacaacactgttgatctggacaaagaagaaaaattaccctttttgcttgtgttgtgacacttcatttaatatggtttaaa

SEQ ID NO: 228768 - DNA, 1061 bp, Homo Sapiens
ctttgtacaaaaaagttgggccaggttgttggggaaccgcagcgcgccgcaggaccgggccgctgagcctgcagccgccccgcgccgtgacctgcgaccctagaccccgactccctttggctcagcccgcgcgccccaggcccggcccgggcggcgcgacgggaggatgagcggcgggcggcggaaggaggagccgcctcagccgcagctggccaacggggccctcaaagtctccgtctggagtaaggtgctgcggagcgacgcggcctgggaggataaggatgaatttttagatgtgatctactggttccgacagatcattgctgtggtcctgggtgtcatttggggagttttgccattacgagggttcttgggaatagcaggattctgcctgatcaatgcaggagtcctgtacctctacttcagcaattacctacagattgatgaggaagaatatggtggcacgtgggagctcacgaaggaagggtttatgacctcttttgccttgttcatggtcatttggatcatcttttacactgccatccattatgactgatggtgtacagctcccaagtgctccctatccagtccaaaggaccctcttgattacagcacaggaacttgatcgttggggaaccccagccccttggaacttggaagacccgtgtttcctggaccgcgaatcagtgtgttgggcatcagtgttttctgcaagggttgtgacctgaaactttttaaaaaccacccacctttggggaagcatttctgaatttatccatcaccaaccatttcttcttggataccatcaagtaacagctattatttgccaagtggagctgtcatttaatttgatgcacctctggattcagatgaaacattaaattgtcttcctcgattctccatcgggtgtagagtttttaaactatcaatggcatttcaagtcttctgaaacagcatggctgtatgtgcgtggtccatagcacagtacatgcagcatctaataagagtttccattgtagaatgttttcacatacttgaataaatcaaatctttaattgaga

SEQ ID NO: 228769 - DNA, 732 bp, Homo Sapiens; identical to SEQ ID NO: 194931

SEQ ID NO: 228770 - DNA, 834 bp, Homo Sapiens
ttggatcactgatcaaattggcatgttcagcttcactgggttgaaccccaagcaggttgagtatctggtcaatgaaaagcacatctacctgctgccaagtggtcgaatcaacgtgagtggcttaaccaccaaaaatctagattacgtggccacctccatccatgaagcagtcaccaaaatccagtgaagaaacaccacccgtccagtaccaccaaagtagttctctgtcatgtgtgttccctgcctgcacaaacctacatgtacataccatggattagagacacttgcaggactgaaaggctgctctggtgaggcagcctctgtttaaaccggccccacatgaagagaacatcccttgagacgaatttggagactgggattagagcctttggaggtcaaagcaaattaagatttttatttaagaataaaagagtactttgatcatgagacataggtatcttgtccctctcactaaaaaggagtgttgtgtgtggcggccacgtgcttctatgtggtgtttgactctgtacaaattctagtcccaaagatcaagttgtctgaaggagccaaagtgtgaatgtgggtgtcggctgcggcattaaattcatcatctcaacccagagtgtctggtctccctgctctttctgcatggttgtgtccctagtcctaagctttggttctttagggtgactgtggtaagaaggatatttaatcatgacatgcacggacacgtacatatttaactgaaacaagttttaccaaacagtatttactcgtgatgtgcgtagtgcattctgatatttttgagccattctattgtgttctacttcacct

SEQ ID NO: 228771 - DNA, 1338 bp, Homo Sapiens; identical to SEQ ID NO: 194935
  misc_feature (663)..(673): n is a, c, g, or t
  misc_feature (1124)..(1147): n is a, c, g, or t

SEQ ID NO: 228772 - DNA, 1483 bp, Homo Sapiens
atgaacagaactttcttcatgacacctctcggaatgtaaacagagcttggtgtgaagaagatcaatctgatggctaaagatcagtatgactgcgtaaggcagtttgacatctacccatccctaacagattttcctaaaactctgtggaacaaccaaggagaagggcatattcctccctttccaaaggtggagcaatgtgcctcttcctggaaggttattttacaagcacgggcccctgaaagcagcagcctccccatcagccattttggcgtgagcagttacagctgcacactttgcaacttgtcccgccttgagtctgatgtcagaagagcatgtcagtccacttccacttcagagagggttggtggtgtcaggcagccctgctgtccaaggttctatcctttgatcacagcaattggtctcagtttaatggctttcttgctgattccagcatcatggcaggtatttaccacatctgtcacattcttataggactcaggagcctcttccataaccagtttgggtgaggcaacacggatcgcaattcccatatctgccaatttgtctaagacatcctggaaatctaaattacgtcgagattttgctcgggacaatgcacggcccgctccatgacaggttgttccaaaggtctcagtcatgccctgttcagtgccagtaagaacataactacaggttcccatggtgccaccaatgagcactggctgtccagtgagttggtaatcaacagcaatgaggggatggtgaggagggaaagcgcgggtggatcccttcctgtgtactaacagtgtccgttcctttccgtccaccacatgctgctccactttggcaatgttgtgagaaacatcatagatcacatgtaggtccaagtcatcaggggttgtgttgaagaccttggcgaaagcctgacgggttaagaaggtcatggaagagcggttgacccaggcatagttcccagcagctgccattcccttcagatagtcttgaccctctggggaagcgattcgagcacaagccaactgccgatcattgactataatcttgtctctcttcatggccttctccatagctaccagcgcatctgtggctacttggtggcccaagcctctgcttccactgtggatcatcacacacacctgtcccttatggtcgatgcccatttttttagcagcatactcattgaaaatctcatccacaacctggatttctgcataatggttgcctgctcccagggtccccaactgaggaaggcctcttttcttcgcccttgcagaaactttattggggtcagcctgcagcatccttccgtactcctcgcagtgctccttgtcttcagcccaggcatacccttctcttaaggaccagtccacccccatctccaaggcctcctccaagtctctggataagtataaaaggtgctagtcatctcacagcaaaggcagatcaaaacctaaggatgacccaa

SEQ ID NO: 228773 - DNA, 909 bp, Homo Sapiens
ttgggtgagcatccccggggagtacacttcctttctggctcccatctcttcctccaagctgtacaatgaggtccgagcctgtagggagaaggaccgtgaccctgaggcccagtttgagatgccttatgtggtacggctgcacaacttccaccagctctctgcaccccagccctgtttcaccttcagccatcccaacagagatcctatgattgacaacaaccgctattgcaccttggaatttcctgtggaggtgaacacagtactacatggctttgccggctactttgagactgtgctttatcaggacatcactctgagtatccgtccagagactcactctcctgggatgttctcatggtttcccatcctcttccctattaagcagcccataacggtacgtgaaggccaaaccatctgtgtgcgtttctggcgatgcagcaattccaagaaggtgtggtatgagtgggctgtgacagcaccagtctgttctgctattcataaccccacaggccgctcatataccattggcctctagccctgcgtgccaagtgtccagagccttggaagcagcttcaggttctgctcctgtagtacagaaggtgcagtacatctatgggctgtgattccccttgcccatcagagaggagcatttcaatctgctttcctgccttacatcaaggtgggcaagggattataattaattgcagggctcaagccaccaatctatgaagacctcaggccagggggtgaggaattagtgctggatttgaagctacgcactcagcctcaagaactccctggaatatccctgagaacatggggtttgaacggattttcagcctttttctgttcttgttttgatggttttgtgtaagaggaaatacaaataaagttatagccctttactgc

SEQ ID NO: 228774 - DNA, 521 bp, Homo Sapiens
  misc_feature (266)..(274): n is a, c, g, or t
  misc_feature (316)..(337): n is a, c, g, or t
ttggacagatagtatctagcaatcacaacactggctgagcggatgcatctggggatgaggttgcttactaagctttgccagctgctgctggatcacagctgctttctgttgtcattgctgttgtccctctgctacgttcctattgtcattaaaggtatcacggtcgccacctggcattccttctgaccacagcatcattttgcattcaaattaagggttaagaaaagagatattttaaaatgagagtcacttgatgtgccattttnnnnnnnnnggcatattgctttttctaatgtggttatttctctgatttgcnnnnnnnnnnnnnnnnnnnnnntacttgtcaatatttaaacatggttacaatcattgctgaaaatggtattttcccccttttctgcattttgctattgtaaatatgttttttagatcaaatactttaaaggaaaaaatgttggatttataaatgctattttttattttacttttataataaaaggaaaagcaaattgatgacctcc

SEQ ID NO: 228775 - DNA, 464 bp, Homo Sapiens
cccactttgtacaaaaaagttggcggagcccacggtggtcatggctgccagagcgctctgcatgctggggctggtcctggccttgctgtcctccagctctgctgaggagtacgtgggcctgtctgcaaaccagtgtgccgtgccagccaaggacagggtggactgcggctacccccatgtcacccccaaggagtgcaacaaccggggctgctgctttgactccaggatccctggagtgccttggtgtttcaagcccctgcaggaagcagaatgcaccttctgaggcacctccagctgcccccggccgggggatgcgaggctcggagcacttttgcccggctgtgattgctgccaggcactgttcatctcagcttttctgtccctttgctcccggcaagcgcttctgctgaaagttcatatctggagcctgatgtcttaacgaataaaggtcccatgctccaccc

SEQ ID NO: 228776 - DNA, 939 bp, Homo Sapiens
ccccagcccatgtcatctatgcgatccctgcatataatgatgatagccatatatgccctggaccacataaatcataccagtctccatgttaggtggattaaggtaagtatgtggatttctaatgtaaccatctttgtatggctcatctggaaagtgataagcattagaccttttgaaatagggtctgtcgtgaggcagattgaaaagatcatgtaactccttcctataggcctgcagctggccatctggtattcctgaaggatatgaaattgttacaagattttttttccctggtaataaaaagtgcagtggttcagggaccacaatagatgttcctttcatatatttcaaaatacatttttccatgtcagttagttgattatgaattgcatcaaccaggagtttacgaacttttccccatgtttcttctggagcaacagatataactgcatcgacaggtaaagtcatattaacataatggtgtcctccgctttccctttcaatgatgggcgttacagctgccagggaggttgacatttccagcataagatctatatttactatttgatgcatgtctgataactttttgtccttctttctcatgaattttctttttatatcttcttctggctcaaattgaataaagcgcagtatgttcttacaagcagaagcatcagtcagttctccaggaatggtgtttatgtcactgctaggccatatatacactgaactgtggcaaattctgaacacaagggcgtttgaagacagcttagttgacaggtcactcaacacatgtttcagtgccttcttgagaaaaatttcattaggagtagctagctgaaaagccaaatcaaggcctcctcttattctgaagagtatatccatactttctgaaatcaccatgtccgcgacgtggcggtgacacgggcgctgacccaa

SEQ ID NO: 228777 - DNA, 889 bp, Homo Sapiens
ctttgtacaaaaaagttggggaggaccaaggtctttcctgacagtcggagacacaccttgatgtatgttaataaaagcatttcaggctgtggggccaccatgtatattaatactccttatgtgtccagcatctgtgtattcattcgagtgcccaatccctggatgagatgaactaggccttataaaaagtcaaagcctcaaagaaatggcacaaccatgttcttcggcactcaggctcctaattgcagatcctcacgaagggtggtatgtggagctggaaggtcttgtggccacaggacatgctggtgagccctgagctggccttgtgcagagggctccgttcaaaggctcggggtgtctttgaggttgtttatcaagctggggaactcttccaagtctgacaatgtttcgaaccctttttgcaaggttgcactattagtataccatcatgtccggaaaacttttaatcttctcaaatatctgatgtaactaccagaaagtcccttacttcctatgaccaatcaggaccaagtcttggaggtgatgtgttacattacgtgcagcacaatagtaccgatcagttaactcagcgctgaagggcttgttttatgaaaggtactattccttctttcacattaactggaaacctctttttttacctgttgttcacaactagttttcttattgactgtattggactgtctcttcttgtagagactgattttggccaacatattaatgcatgttttatgcaaaacacaaatatgatattagttgcttttaaggagttctggcattgtatgtgcatttttgtagaaattgttactggacttataattacatacttaactctgatcaggtttctgtaaaatttaaataaaaccaatac

SEQ ID NO: 228778 - DNA, 803 bp, Homo Sapiens
  misc_feature (117)..(135): n is a, c, g, or t
ttggctaggggatgagcccgaactagggatgtgacagagcgcgagacccagcctaaagagagcccggagccagcgtgggaggccgctgccgtcgcgcgccttggtttttctgttccnnnnnnnnnnnnnnnnnnnaacttcctgcctatacacacgcagccatcagcccacaaagacatgactaccaacgctggccccttgcacccatactggcctcagcacctaagactggacaactttgtacctaatgaccgccccacctggcatatactggctggcctcttctctgtcacaggggtcttagtcgtgaccacatggctgttgtcaggtcgtgctgcggttgtcccattggggacttggcggcgactgtccctgtgctggtttgcagtgtgtgggttcattcacctggtgatcgagggctggttcgttctctactacgaagacctgcttggagaccaagccttcttatctcaactctggaaagagtatgccaagggagacagccgatacatcctgggtgacaacttcacagtgtgcatggaaaccatcacagcttgcctgtggggaccactcagcctgtgggtggtgatcgcctttctccgccagcatcccctccgcttcattctacagcttgtggtctctgtgggccagatctatggggatgtgctctacttcctgacagagcaccgcgacggattccagcacggagagctgggccaccctctctacttctggttttactttgtcttcatgaatgccctgtggctggtgctgcctggagtccttgtgcttgatgctgtgaa

SEQ ID NO: 228779 - DNA, 955 bp, Homo Sapiens
ctcctataaaagccaactttgtacaaaaaagttggagtggcgggtgggtccgccaagttacttctaccgccagcaccttcgtgaagcccattttcagtcgggacatgaacgaggccaagcggagggtgcgcgagctctaccgcgcctggtatcgggaggtgccgaacactgtgcaccaattccagctggacatcactgtgaaaatgggacgggataaagtccgagaaatgtttatgaagaatgcccatgtcacagaccccagggtggttgatcttctggtcattaagggaaagatcgaactggaagaaacaattaaagtatggaagcagcggacacatgttatgcggttcttccatgaaacagaagcgccaaggccaaaggatttcctatccaagttctatgttggccacgatccatgaagtcattcagtggaaagatgcacgttgatactattttagagcacaaataaactcactatacaatggtcactttgtgatagaattccattgatgaaccaattttctgcagcctctttttgcctgagcaagtgggaccttggtatacacatcacctgttctttcccttttcttgaaatgtggtgtttgctgtaaattggattgaattatttttctcagagccttgcatgtcagtaaacaggaaggaaggaggccatctgttcaaaaattgtgacattgggcatgaggctggacgacttgttaatgtagttgtttctatagcccctatgattagacactttagtgtcagggcacagattatctaaaattagccagctcttcctgtcagggatcagggcagcactaacaggcgcaaaagtagagctgtcaagatgggctagttttccttgggttctgaagaaaatggatgtgcaaaggcttggctccgctacttgtaacaagctccagcccttaaaatgaaattaacctccctactcagg

SEQ ID NO: 228780 - DNA, 1279 bp, Homo Sapiens
tttcttttgacagtgtcgtctgttcctcctaagtatttctcagtggcttctggaatcagttccttagcaatgcaaacaagagagataggacttccacaggagtgacatggctgtcttctggtccagttgcccttcggagagtggatagctcatcaactgcattggaatcaaccagccaaactcctgcttgttaattccgaccatgtaggggacagtgtggaaattcctttcagcttgaagctcttcaggtgttttcagcagcagcatcccatcaatcacagtgcccagaaggggttgactctctctggggtctccctgtaagtccagagataagaatttcattttcaatgtcgtctccaagagctcctcttccgtcttctgtcgcaggcagtgaaccatgacagcagaggtggtggttttgcacccagcagtgatagcaatttgctcagccaagggcttgacatcacctttcttcaccagaacagaagtgagggccacgccactctcagaaatggcccggtggaagaggttcttggccaatggagacaaaacaagaacagagacactttctcctcccgctgactctccaaagatggtcacagagcctgggttccctccaaagctggcaatgttgtcctggacccagcgcagggcagccacctggtccaggtgaccccagttcccccggctgtgttcatcccctgtgctgaagaatccccagatgcccaggcgatattgaatggtcaccaccaccacgttttcatgggcagcaagggccagcccatcataggttgatgccgcacccaccatcagcccccctccgtggatccacaccatcaccggcagcctgtttttcttggtcaagtcagcaggagtgtaaatattgaggtaaagacagtcttcagaaagcttgagaggaatgttctcctttcggtttgtaaatagctctgagagtaactgccccgccttgggatcttgggtgcacataggagggtacgaggtggcattcttcacaaagctccatggttctgcaggctgcggtggagtaaacctcaggggtccaagaggcggcttggcaaaagggattcccaggaaaatggccacaggctgtgcaaatccttctaagctgacgaacttccccagcactttgccatgcacggtgtccaccacaggtggcgaggacggatgcccccaagccgcggaagcagagagagtggccaggataaaggcacggagccacatcgtggaagggcgacagttctcggggcctgcgagccaa

SEQ ID NO: 228781 - DNA, 924 bp, Homo Sapiens
tacaaaaaagttgggggcgcgcgctcttgcgagctggatgtccaggctggggcgctgctgggcctcgggctgctggttgcgggctcgcgcctgccgcggatcaaaagccagaccatcgcctgtcgctcgggacccacctggtggggaccgcagcggctgaactcgggtggccgctgggactcagaggtcatggcgagcacggtggtgaagtacctgagccaggaggaggcccaggccgtggaccaggagctatttaacgaataccagttcagcgtggaccaacttatggaactggccgggctgagctgtgctacagccatcgccaaggcatatccccccacgtccatgtccaggagcccccctactgtcctggtcatctgtggcccggggaataatggaggagatggtctggtctgtgctcgacacctcaaactctttggctacgagccaaccatctattaccccaaaaggcctaacaagcccctcttcactgcattggtgacccagtgtcagaaaatggacatccctttccttggggaaatgcccgcagagcccatgacgattgatgaactgtatgagctggtggtggatgccatctttggcttcagcttcaagggcgatgttcgggaaccgttccacagcatcctgagtgtcctgaagggactcactgtgcccattgccagcatcgacattccctcaggatgggacgtggagaagggaaatgctggagggatccagccagacttgctcatctccctcacagcccccaaaaaatctgcaacccagtttaccggtcgctaccattacctggggggtcgttttgtgccacctgctctggaaaagaagtaccagctgaacctgccaccctaccctgacactgagtgtgtctatcgtctgcagtgagggaaaggggggtgggtattc

SEQ ID NO: 228782 - DNA, 414 bp, Homo Sapiens
ttggctttcctgcttctcatggccaccccgctggagagggcccagcatctgcaaagctcccggcaccgccgagccctggacaccaactattgcttcagctccacggagaagaactgctgcgtgcggcagctgtacattgacttccgcaaggacctcggctggaagtggatccacgagcccaagggctaccatgccaacttctgcctcgggccctgcccctacatttggagcctggacacgcagtacagcaaggtcctggccctgtacaaccagcataacccgggcgcctcggcggcgccgtgctgcgtgccgcaggcgctggagccgctgcccatcgtgtactacgtgggccgcaagcccaaggtggagcagctgtccaacatgatcgtgcgctcctgcaagtgcagctgaggt

SEQ ID NO: 228783 - DNA, 973 bp, Homo Sapiens
tcaatgagggcttgaataagactcctaggtcatgaaaaggactctgcaggtgaagagaactcaaggaccttgctcttggcagttaagcagaccctggatggaactggtatgggatggggtgaagtgggggatggaggaggaaggtgttcttgcatggaacctatccccacaaacactacagagtgaggaaaggccactggaagcccttctttgcccagaggaagaaaggccacagagagagtgaatgtggcttggtgcaatcccttcacatcctccaccatctgggtaacacttggcaaggagtggatgggtggcattgtgcaaccctttatgttcttccctgggggtggcactcaaggccttttgtggcttctgccttcagccttcagtgtagggtcaagagtgttcttttcactgtcgtcctgttttgggaacagcacaagactctgcctggctggcacatgttagttggtgaggaaaggacagagtgggtgagtaagcagacagggaggtaagagtgactctctggctttctcctcttcctcttcagagagcagctcaatcaactgagtcgcagatctcctccaccacagcattgaagatgtgtggctggtcagcatagacatggtgggaggcacccttaatttccatgtctcggacataggaatccggccgctgcatcttcaccttttttcccgtactggtatctatccaggtgtcggacccgtagatcatagtgataggcacatcttttcgaatcaagtgaattcgctccagcatagggcgccgggcccagccaaaggactccatcatggctttgaatgctgtctcaccactgggattctgtgcgttgcagtggtaaatatactctgatatggtatcatcttcaaagaagtctgcaaacttgcgtttgaagtccggccggaatcgctgcaccagaccaggcctttgggaggggatagaaaaacaccca

SEQ ID NO: 228784 - DNA, 721 bp, Homo Sapiens
ctttgtacaaaaaagttggcttgtattgagtcagcacaaatttgcaagcaatgttgtggagaagtgtgttactcacgcctcacgtacggagcgcgctgtgctcatcgatgaggtgtgcaccatgaacgacggtccccacagtgccttatacaccatgatgaaggaccagtatgccaactacgtggtccagaagatgattgacgtggcggagccaggccagcggaagatcgtcatgcataagatccggccccacatcgcaactcttcgtaagtacacctatggcaagcacattctggccaagctggagaagtactacatgaagaacggtgttgacttagggcccatctgtggcccccctaatggtatcatctgaggcagtgtcacccgctgttccctcattcccgctgacctcactggcccactggcaaatccaaccagcaaccagaaatgttctagtgtagagtctgagacgggcaagtggttgctccaggattactccctcctccaaaaaaggaatcaaatccacgagtggaaaagcctttgtaaatttaattttattacacataacatgtactattttttttaattgactaattgccctgctgttttactggtgtataggatacttgtacataggtaaccaatgtacatgggaggccacatattttgttcactgttgtatctatatttcacatgtggaaactttcagggtggttggttt

SEQ ID NO: 228785 - DNA, 409 bp, Homo Sapiens
  misc_feature (344)..(354): n is a, c, g, or t
tttggctgatcttcctgcggctgaaccgcccggctgagccgacattgccggcgtcttggcgattcggcccgacgagctccgctttcgctacagcatggtggcctactggagacaggctggactcagctacatccgatactcccagatctgtgcaaaagcagtgagagatgcactgaagacagaattcaaagcaaatgctgagaagacttctggcagcaacgtaaaaattgtgaaagtaaagaaggaataatctaccctgactaaagcttgaaatgctacatttccaaggtgaagatgtgtgggcacatgttatgtcttattgaaaaggatctcattccatgggnnnnnnnnnnntcctgtcttgttcataaattgacaatgtcaataaattgaaatatggttcactgtt

SEQ ID NO: 228786 - DNA, 1055 bp, Homo Sapiens
cttctcttgattttattgtttggtagaaaaacaggctctttaacactgaataaacatctcacgaactgtcgctcctagattacaaaaagtcaaaaccaatttcctttgacgccgggcccttgaatctgacattcaagtcaccgtaatagaaaccagagctgctgaaccttacattctggaaggtgcttgaacaaaggcatgttaaggaccgtttaaaacttctagcatgtaagaagatccatctttccttccaacgcctttggataataacagcagaatcccggagatctgctgctgagtttgagaaggccaagtttaaggattccaaactccagccttcaatatttctgcagaaacttagagaagtaacctccccgtcctctccgctggcttccccaagtacagatgcaggatgcaggtctttcttcctgctacccaggcaccgaggactcaaaccatctcaccgtctcatcactgggcttcttcaatgggctcttggaggaagaagcttttcgtttttgccaatcttcagtccttagaaaagtcctttttgttaagaaaaggcagggagggttaactaagttctaagaattcaataagaaaaggaaagaggtaccttttatgaaaaggacttccaagctctctcagccagcaatttaactcaaataactttcctgagcatctccacacggaacattcagcacttctctcctagcagccagaggatgggatctgtgtacactgagtgtcacttaaaacaccctcattagatgcagtaaaaagttacgctttactcccgtaagtcaaatccacatggctctgggctgtgccctgcagaattagctgtaggagtaacagtaaaggtcctgcccgacagccatgagcagccccggcgcgccccgggagccccccagccgcgacgagaaggccacactgggaatgtcggccttggaggcagggtacggggagggtatggttctcagtaggcgggcatcgtggaggctccagattctcgtgtagcagtcctggcccactagaaaagaggagagacccaa

SEQ ID NO: 228787 - DNA, 802 bp, Homo Sapiens
  misc_feature (379)..(387): n is a, c, g, or t
ttggggatttaatggggggaaaagggcggaaaaggacaaggatccaaactggcgaatttgctgatcttcgcgtccctctccgctttccggccggcagcgctgccagggtatatttccttttttccgatcctgcaacagcctctttaaactgtttaaatgagaatgtccttggctcagagagtactactcacctggcttttcacactactcttcttgatcatgttggtgttgaaactggatgagaaagcaccttggaactggttcctcatattcattccagtctggatatttgatactatccttcttgtcctgctgattgtgaaaatggctgggcggtgtaagtctggctttgaccctcgacatggatcacacaatattnnnnnnnnngcctggtacctcattgcaatgttacttaaattagccttctgcctcgcactctgtgctaaactggaacagtttactaccatgaatctatcctatgtcttcattcctttatgggccttgctggctggggctttaacagaactcggatataatgtcttttttgtgagagactgacttctaagtacatcatctcctttctattgctgttcaacaagttaccattaaagtgttctgaatctgtcaagcttcaagaataccagagaactgagggaaaataccaaatgtagttttatactacttccataaaacaggattggtgaatcacggacttctagtcaacctacagcttaattattcagcatttgagttattgagatccttattatctctatgtaaataaagtttgttttggacctcc

SEQ ID NO: 228788 - DNA, 684 bp, Homo Sapiens
ttggcagtcacccgcagcaggcgtgcagtttcccggctctccgcgcggccggggaaggtcagcgccgtaatggcgttcttggcgtcgggaccctacctgacccatcagcaaaaggtgttgcggctttataagcgggcgctacgccacctcgagtcgtggtgcgtccagagagacaaataccgatactttgcttgtttgatgagagcccggtttgaagaacataagaatgaaaaggatatggcgaaggccacccagctgctgaaggaggccgaggaagaattctggtaccgtcagcatccacagccatacatcttccctgactctcctgggggcacctcctatgagagatacgattgctacaaggtcccagaatggtgcttagatgactggcatccttctgagaaggcaatgtatcctgattactttgccaagagagaacagtggaagaaactgcggagggaaagctgggaacgagaggttaagcagctgcaggaggaaacgccacctggtggtcctttaactgaagctttgccccctgcccgaaaggaaggtgatttgcccccactgtggtggtatattgtgaccagaccccgggagcggcccatgtagaaagagagagacctcatctttcatgcttgcaagtgaaatatgttacagaacatgcacttgccctaataaaaaatc

SEQ ID NO: 228789 - DNA, 640 bp, Homo Sapiens; identical to SEQ ID NO: 194938

SEQ ID NO: 228790 - DNA, 883 bp, Homo Sapiens
gtttcacatgtttgtttagctattagacacaaaggggtcaagacttgaagcagtttttgcaagtgaaatcatcttctggcccacccttcatattaccaaggctactggctgttctccaacaggccacagcggttatgtcctcctggtacttgcgtcgcaggtgtcacccttgatggtgcaaggccctgcgtggctattcgggttctcccccttaatggagttgctgtgaggagatgaaccttattgggggacccgcagaggctggctcagaagagactgctcttaagaggttaggaggactaacaggctacggcgtgacaaggtggcctcagcacagtctgtcagcttggggcctaagtgaagttcacaggctgatagggccagggagagcaggccattcaccttccggggccactggctgggctgatcatcagagcccctctggctggtcttggggctgttattcaccttgtcagcagcagagggcagcacagcaaggtgctggagaggaggctgggtgggcacaccaagggctgggtgggagcaggtacagggcgctgtgggcaggaccctttggactcctcaagtctccgactcgtctgtctcttcagtggagccatcactctctccatccacttttcgggaatgatggagaggtctccagggagagccaacccggggaggggtccgggaaggcaggcaactggcctctggactggctgtgaccgagttgaccaggcctgggacctgggccagcagccgttccagctcttcatccattgctgggtcgtgcatcagatcccccttgtcaggcaaagctccgagggcttggttgattccacggtgctttgagagagccatgagccaacttttttgtacaaag

SEQ ID NO: 228791 - DNA, 439 bp, Homo Sapiens
aaaaaagttggcccggagttcctttctatgcagagacagccagcccttccgccacggccgtctctggagagcagcagccatggccctacgctaccctatggccgtgggcctcaacaagggccacaaagtgaccaagaacgtgagcaagcccaggcacagccgacgccgcgggcgtctgaccaaacacaccaagttcgtgcgggacatgattcgggaggtgtgtggctttgccccgtacgagcggcgcgccatggagttactgaaggtctccaaggacaaacgggccctcaaatttatcaagaaaagggtggggacgcacatccgcgccaagaggaagcgggaggagctgagcaacgtactggccgccatgaggaaagctgctgccaagaaagactgaccccctcccctgccctctccctgaaataaagaacagcttgac

SEQ ID NO: 228792 - DNA, 672 bp, Homo Sapiens
ttggtgaaaagagattatgactgtaccttttaactctgtagctggaacacaagaagtgtttgtttaatgaatgacgtacacatttaagatctgtttggacgcggaggataatcctgtgaattgctaatagttcactgggtttggcccttagtgttgacttcagtatgctgagacggaaaccaacacgcctagagctaaagcttgatgacattgaagagtttgagaacattcgaaaggacctggagacccgtaagaaacagaaggaagatgtggaagttgtaggaggcagtgatggagaaggagccattgggcttagcagtgatcccaagagccgggaacaaatgatcaatgatcggattggttataaaccccaacccaagcccaataatcgttcatctcaatttggaagtcttgaattttagagatggattatcttgcatgccagagcgctggaatggaataaaatgatggcagaagtacaaaccagatttagagaattgagtgcttgcagtcaagcagaatgtacctcctgcagagacaaatcttctgcatgagattactgatgcttcacttgcactctaagctggaatccaaactctggtttgtctcttgaaaatttgactctataaaactgatctgattttctgtttttaaaaataaatatatttttgg

SEQ ID NO: 228793 - DNA, 807 bp, Homo Sapiens
ggcatgtccaccttcgcttttattgagtagttagtgttctcaagctggctcacacccatgcggtcagctggggcctagggtggctctttgcaaagctgaggggcaagctaaggaagccaggcaggtcaggggccctttcggccttctcaagcctccacctgagttctcgtcaatgccagtctccctggtatgattggggacattatcagagaaacatctaatagcgcacatctgggcacccacactctgcttcagttgcatccatcctcccaccccaaattcaactcctgacccaatacaaaagacttttttaaccaggatttcttcttgcaggaaagctgacttggaaacacggggaggtggcagggaggggcaaaaaggactctggcaagcagatccacttgtctgggtccctgcagtgaagaacccaagatccaggtacctcagcctggaagaaaccgtgcactgcaggtcttccaatctatcaaaactaaaagcaaggaacagaagtcaattgaaaccccaggtcatcctacccaccttctggcagtctctggataatgatctaaggaaataagcttacatttataattagaggataatttggagaatttatactatttacacggaccaccctgcaaagatcagggaaggtaagagactgctgggcagagaatggaaacaggctggggggttcctaatctcttttcaccattgcctttgttgttcccacccttcagctcctggcagggacagcagaggaatcagatactttaaggggaacacaagccaacttttttgtacaaa

SEQ ID NO: 228794 - DNA, 897 bp, Homo Sapiens
ttggagaaaagctcctacatgcctcatgtgaagtgtccaccctctctgaaaatctttcttgttcaaaacagcaacgacatatcttgttaacttttacggggacttttggaggaggggagtttggaaattgtaaaatgttatagattgttgcctatttcctgctgaaagtaaatgtttttaaaaagtatcatataaagctgaatacaaattggtttggggggagatcctttcctacccaaagtcataaatatattctttactgccttgtggaaattttatagttttgcctttcacatttgtctttagtctgtcctgaactgatttttgtgaaaattatgagttagaaattcaacttaacatttttcatattcgaagtggttgtctctgcactatttactgaaaagttcatcctttccccagtgatttgtaacactgcctctttcataaattaaatttttgtgtatgtgtgtgggtcttttgatggtttctattctgactgacatcaatttgtctaatcttgtagcagtacagtacagtcctgattactgcaactttaggaaaaggtctgataaaaaccaagatgcctccacattttgtcataattgtaaccaatttcacctctgtctccagtatcaccacaaaattgttcttccttggagtgtcttggctattcttagccaactgttcctccatattacttctagaattagaccaacaatttataaatcaaacaaacccaagagcattgaaattttgattggatttgtattgaatttatagattaatctggtaaaccatgtcatctttacatgttgtcttccaatacatgaatatgggacagctcttcatttacttaggcctttgaaatatctttcaataaagtttataattttctcc

SEQ ID NO: 228795 - DNA, 961 bp, Homo Sapiens
ttggattccttttatttctaaggagttaaacatagatgtagctgatgtggagagcttgctggtgcagtgcatattggataacactattcatggccgaattgatcaagtcaaccaactccttgaactggatcatcagaagaggggtggtgcacgatatactgcactagataaatggaccaaccaactaaattctctcaaccaggctgtagtcagtaaactggcttaacagagaacaagcttttacagacgtccttaaggcaacagtgcagagatgtaatccttaaaagaactgggaatggcaaaactactgtcggttgatgtgtcctgaaaattattggagttatggcagaagtgcttttttgatcaactggtttgtgttttgctgctgcatttatcccaagaaaaacagctttaatctccagaagaaaaccaaaataccatgggatttatgctgtattgacatcttgccctaaacgtacaacatcatagtaatttgtcatgggcaacatgaccagagagaagatttttgtcatgattttaaatacactgacacgctactgttggttaaatttaaacatgttttacctgcagaaattctctcacaaataacctgcaataacttgaaatgcatacccttttgaacacttccttttctcatgtataaattaaaatgtttgctgcattttgcaaaatgtcaattctctaaaaatgtgtccgtatatttctgtacctgcagtgtagtaaaggtttagacgaaaccccataattatagtggcatactgtcacttagtttcaagcagcaaaataaacagtgcagctcagaaattgtagtttggttcttgatgtgtttttattacatttggagttgttttgttttttagtaccttcgaaatttcaaattattttatcttcagttaatgattttaaaaagcctgggggcaaataagttggttatttgctt

SEQ ID NO: 228796 - DNA, 448 bp, Homo Sapiens
acagctggaggtgctcatggtggcatcgcacaggacttcctgcgtgctagaaatcatctacccgcgtgttcctttcccctttatggggcaaaagccactgcgggccatgtacccaaataaacctcttaatgcgtttgttaaaattagtttggacatctgagtttccctctgaagaaatggaaaaagtgttgggtgtcccatcccgcctccccctccccgaccggcccattaagtccctacgtaagagggcgtgtctgctgcctccggactctggaaataaatattgaaagaaacggcatcaagtgttatggttgagtgatggcacgcagcgggccccagaaacctctcaggggagcgtcgctgtgtcgggacagtctccaggtgtcgtttgagaattcgatgacgtggtgttgtggggggtgcgagtccccggggcggcaggcgccaa

SEQ ID NO: 228797 - DNA, 673 bp, Homo Sapiens
cataaagaacaactttgtacaaaaaagttggcatttatattccaagatgaaccttttttatatatgctaaaaattttggggaatatgttttgggatgtattatggagctaaaactctaacctcttaatagttttatagaacttaaaaattttttatacaattacccaattggtgatatgatcttaagcttttgtgtcagattatttaatatgatgacttcatgctttattatgccttattatggctgacgtattactgtggtgaaacaaaatatctttaaaagttaaaacatccagatatataagctattttttcctaaggataaagtacctttgagcatgagtgtatcacagctttcattaggaaaacttttcattacatacttgtttaaactctgtcttccagggtaaaaataataaggttgaatcattttattaaaaatactttttaagaaaataactatgaacatctgaatattaaagatataaaaatgcacataattcatatttcaggtggtatttgcattcagtgccttactggtattctcagaacattttaatgatttctaacatttcttaacagtcatagatatatacattttcattttttgtacttgaatattctaaataaaactgacatttactcttgacaaataaaacatatatttactaaa

SEQ ID NO: 228798 - DNA, 931 bp, Homo Sapiens
acaaaaaagttggcgcaagatggcggccgcggcggtgaacggggcggcaggcttctcgagctccgggcccgcggcaacctcgggcgctgttctgcaggccgcgaccggcatgtacgagcaactcaagggcgagtggaaccgtaaaagccccaatcttagcaagtgcggggaagagctgggtcgactcaagctagttcttctggagctcaacttcttgccaaccacagggaccaagctgaccaaacagcagctaattctggcccgtgacatactggagatcggggcccaatggagcatcctacgcaaggacatcccctccttcgagcgctacatggcccagctcaaatgctactactttgattacaaggagcagctccccgagtcagcctatatgcaccagctcttgggcctcaacctcctcttcctgctgtcccagaaccgggtggctgagttccacacggagttggagcggctgcctgccaaggacatacagaccaatgtctacatcaagcacccagtgtccctggagcaatacctgatggagggcagctacaacaaagtgttcctggccaagggtaacatccccgccgagagctacaccttcttcattgacatcctgctcgacactatcagggatgagatcgctgggtgcatcgagaaggcctacgagaaaatccttttcactgaggccacccggatcctcttcttcaacacacccaaaaagatgacagactacgccaagaagcgagggtgggtcctgggccccaacaactactacagttttgccagccagcagcagaagccggaagacaccaccattccctccacagaactggccaaacaggtcatcgagtatgcccggcagctggagatgatcgtctgagccccccgggcactggggggggcagggcacgagttatttaaaacagtt

SEQ ID NO: 228799 - DNA, 832 bp, Homo Sapiens
  misc_feature (605)..(641): n is a, c, g, or t
ctttgtacaaaaaagttggcgctcagcacaccccttaaaagatgagggggctcagcgggggagctggcaccttcctggagcctccagccagtcctgtcctccctcgccctaccaagagggcacctgaggagactttggggacagggcaggggcagggagggaaactgaggaaatcttccattcctcccaacagctcaaaattaggccttgggcaggggcagggagagctgctgagcctaaagactggagaatctgggggactgggagtgggggtcagagaggcagattccttcccctcccgtcccctcacgctcaaacccccacttcctgccccaggctggcgcggggcactttgtacaaatccttgtaaataccccacaccctcccctctgcaaaggtctcttgaggagctgccgctgtcacctacggtttttaagttattacaccccgaccctcctcctgtcagccccctcacctgcagcctgttgcccaataaatttaggagagtccccccctccccaatgctgaccctaggattttccttccctgccctcacctgcaaatgagttaaagaagaggcgtgggaatccaggcagtggtttttnnnnnnnnnnnnnnnnnnnnnnnnnnnnnnnnnnnnnagcggtgggggtgggaaggtaaggatggtcgtggaagaaggcaggatggaactcggcctcatccccgaggccccagttcctatatcgggccccccattcatccactcacactcccagccaccatgttacactggactctaagccacttcttactccagtagtaaatttattcaataaacaatcattgaccc

SEQ ID NO: 228800 - DNA, 1345 bp, Homo Sapiens
  misc_feature (258)..(315): n is a, c, g, or t
cagcggcacacgaaatccaaaccccctgacagacgtctgtttcgggggcatgcaaacagtgcaacatggtcaaagcgcaaacacgggcgaccgaggagacacgggacatgggacacagaatggggaatgaggctggggcgaggggtccctagagaggggcccggtcccccccaccctcacgggcaggacaggaaaaataagattcgtacttcttgtaaaatgcccatttgctgggtactttctttctccttatcttgnnnnnnnnnnnnnnnnnnnnnnnnnnnnnnnnnnnnnnnnnnnnnnnnnnnnnnnnnnctctaagaaggcgagtggcgggaggccagggaagcccgacgtggtggggcgctgcctcccgctccgtggcctccttcctccctggcccctcagtgggctccccaggccccacaggtgggtccaagagagacggggccggaggggtgcaggctgggacgcaggaaaaaggcccgccagcccgctggggctcagttcaggctcgggcccagtgagcaggggcaccaggtccatgatcttccaggttcagtccccacaggcccatgacccaggcggaggccagccgtcacaggtgcagctcgtgggttttgatgtgctcaagctgctctcggagctgtaggaaggagggccgcatggcggcgtccaggtgccagcagttcttcatgacttcatagactgcgggcgggcagccgtcgggggcatccatcttgtagcccttctccacccgagggacgacgtccttcaggggaattcttggataaggcactcgcccaaaggagtagatttcccagagaaggattccgaaactccacacgtcagacttagtggagaatttcttctctctcagggcctcaggggctgtccacttgactggcagcttgcccgtgtcctgggtgctggacgcctccttggtgagaccaaagtcgctgaccttggccacgttgtcctcagacaccagcacattgcgggcagccaggtctcgatgcacgaaattgttgccctccaggtattccatggcctcgcagacatctagcgagaacttgaggagacagtctccgcccagcactgaccgacccctagaccgcaggtagtccacaaggctccccttggccatgtactcagtgacgatgtagagcccgcccttctcctccacgatcacgcccaggagctgcaccaggttgctatgccgcagttgcgtcatgactgaggcttcagccaggaaggcctgggcagtggcgtcgttcttaatgcacttgacggcgactttgttccctcggtaatcgcccagcatcacgtctccgaactcccccaa

SEQ ID NO: 228801 - DNA, 795 bp, Homo Sapiens
ttggcttcctgttcccctggcggcccctcgcttcttccttctggatgggggcccagggggcccaggagagtataaaggcgatgtggagggtgcccggcacaaccagacgcccagtcacaggcgagagccctgggatgcaccggccagaggccatgctgctgctgctcacgcttgccctcctggggggccccacctgggcagggaagatgtatggccctggaggaggcaagtatttcagcaccactgaagactacgaccatgaaatcacagggctgcgggtgtctgtaggtcttctcctggtgaaaagtgtccaggtgaaacttggagactcctgggacgtgaaactgggagccttaggtgggaatacccaggaagtcaccctgcagccaggcgaatacatcacaaaagtctttgtcgccttccaagctttcctccggggtatggtcatgtacaccagcaaggaccgctatttctattttgggaagcttgatggccagatctcctctgcctaccccagccaagaggggcaggtgctggtgggcatctatggccagtatcaactccttggcatcaagagcattggctttgaatggaattatccactagaggagccgaccactgagccaccagttaatctcacatactcagcaaactcacccgtgggtcgctaggggtggggtatggggccatccgagctgaggccatctgtgtggtggtggctgatggtactggagtaactgagtcgggacgctgaatctgaatccaccaataaataaagcttctgcagaatcagtg

SEQ ID NO: 228802 - DNA, 556 bp, Homo Sapiens
tgtacaaaaaagttggggcgacttcgatattaacaaggatggcggcggccgcagcaagtcgaggagtcggggcaaagctgggcctgcgtgagattcgcatccacttatgtcagcgctcgcccggcagccagggcgtcagggacttcattgagaaacgctacgtggagctgaagaaggcgaatcccgacctacccatcctaatccgcgaatgctccgatgtgcagcccaagctctgggcccgctacgcatttggccaagagacgaatgtccctttgaacaacttcagtgctgatcaggtaaccagagccctggagaacgttctaagtggtaaagcctgaagcctccactgaggattaagagcaacagccccagagcctgggctctgctggacttagtataatgtgaaaaaaatgtgttctcctattcctcataaagcttgtgctgtaaaatactttctcagggtgttcttgtcctcatctaccctctaccccttactgtgcaaccactgaggcaaagtagcttaatataaaaataaaactttattctgtctcaaaaa

SEQ ID NO: 228803 - DNA, 624 bp, Homo Sapiens
ctttgtacaaaaaagttgggtattatctatttaactgcagattctcccaatgttatgactactttcaggcatgacaaagtttatgtaattgggtcttttgttgataagagtatgcagccaggcacatccctagccaaggcaaaacggctgaacctggcaactgaatgccttccattagataaatatttacaatgggaaattggtaacaaaaatctcaccttagatcaaatgatacgtattttgttatgtctgaaaaacaatggtaattggcaagaggctctgcaattcgttcccaagagaaaacatactggttttctggagatttctcagcattctcaagagtttatcaacagactaaagaaggcaaagacttaattcattttcaaaaggttctctgaatgtgcacagaacacgtggctcaaatgagaacatttgatggcttaaaaagtaaatgcgttagaaatacagttctgttaatgtatttcttcccaaacaattcatttttctcttctaaaggtagtctttcccaactgactgtagggttgtgtcttttcccaattaaatatctgcagaactttgggattatactttgtttactgtagaaagataataaaaagagttgtc

SEQ ID NO: 228804 - DNA, 774 bp, Homo Sapiens
atgagccatgtgcctggtccaccttggcctgttttgtttttctttccttgggctcagcaattcaaattctagttgttatttggtggaagcagtagcccaaccccagtttaggggaaggtagcacagggcagagccactgggcactttgtttccttggccctccgaagctcactgttgcaaatacccccaagcctttgctctaggccagatcttgtttggtgcaggtgatggagaacacagatgactcgggcatgggtcttggagatcttctgttcaaagtacagtgctggcactggggcacagagtgcccacgttagccccgggctctgatagagaggtaggaggcacgttcttggtcactgttccattgcagaccagacttgctggcctgaccacaagggagtggctgggaactcacagccagcatagggacatccccctgcagccttctgacctgcaatcaaggctggggaggggtttgcaggcaggaatatgctgacctttcaccctgccatcccatcccaaccccagctcactagccttcatatatgccttatacttggagtcacaggggccaaaggcctgagaccccaccctgcccccaactggctaagacagctttcagttcctgactccccaacttggtctctgccctgaagcaggcactgaactctgggctgcttctctgtgtgtaaatggcacatcttccctaatctgttaatggtcagtggtgtccccaacgatagtgctggcttccatggaaaccctcactcc

SEQ ID NO: 228805 - DNA, 1156 bp, Homo Sapiens
actttgtacaaaaaagttggagcaaacaggcagcgcgcgacaatggcggtcgctcgtgcagctttggggccattggtgacgggtctgtacgacgtgcaggctttcaagtttggggacttcgtgctgaagagcgggctttcctcccccatctacatcgatctgcggggcatcgtgtctcgaccgcgtcttctgagtcaggttgcagatattttattccaaactgcccaaaatgcaggcatcagttttgacaccgtgtgtggagtgccttatacagctttgccattggctacagttatctgttcaaccaatcaaattccaatgcttattagaaggaaagaaacaaaggattatggaactaagcgtcttgtagaaggaactattaatccaggagaaacctgtttaatcattgaagatgttgtcaccagtggatctagtgttttggaaactgttgaggttcttcagaaggagggcttgaaggtcactgatgccatagtgctgttggacagagagcagggaggcaaggacaagttgcaggcgcacgggatccgcctccactcagtgtgtacattgtccaaaatgctggagattctcgagcagcagaaaaaagttgatgctgagacagttgggagagtgaagaggtttattcaggagaatgtctttgtggcagcgaatcataatggttctcccctttctataaaggaagcacccaaagaactcagcttcggtgcacgtgcagagctgcccaggatccacccagttgcatcgaagcttctcaggcttatgcaaaagaaggagaccaatctgtgtctatctgctgatgtttcactggccagagagctgttgcagctagcagatgctttaggacctagtatctgcatgctgaagactcatgtagatattttgaatgattttactctggatgtgatgaaggagttgataactctggcaaaatgccatgagttcttgatatttgaagaccggaagtttgcagatataggaaacacagtgaaaaagcagtatgaaggaggtatctttaaaatagcttcctgggcagatctagtaaatgctcacgtggtgccaggctcaggagttgtgaaaggcctgcagaagtgggcctgcctttgcatcgggggtgcctcctttattgcggaaatga

SEQ ID NO: 228806 - DNA, 291 bp, Homo Sapiens
ctttgtacaaaaaagttggctgagagcaagatgggtcaccagcagctgtactggagccacccgcgaaaattcggccagggttctcgctcttgtcgtgtctgttcaaaccggcacggtctgatccggaaatatggcctcaatatgtgccgccagtgtttccgtcagtacgcgaaggatatcggtttcattaagttggactaaatgctcttccttcagaggattatccggggcatctactcaatgaaaaaccatgataattctttgtatataaaataaacatttgaaaaaacc

SEQ ID NO: 228807 - DNA, 1139 bp, Homo Sapiens
gccaactttgtacaaaaaagttgggttctaaagctctgacattatgtggttttagattttctggttctaacatttttgataaagcctcaaggttttaggttctaaagttctaagattctgattttaggagctaaggctctatgagtctagatgtttattcttctagagttcagagtccttaaaatgtaagattatagattctaaagattctatagttctagacatggaggttctaaggcctaggattctaaaatgtgatgttctaaggctctgagagtctagattctctggctgtaaggctctagatcataaggcttcaaaatgttatcttctcaagttctaagattctaatgatgatcaattatagtttctgaggctttatgataatagattctcttgtataagatcctagatcctaagggtcgaaagctctagaatctgcaattcaaaagttccaagagtctaaagatggagtttctaaggtccggtgttctaagatgtgatattctaagacttactctaagatcttagattctctgtgtctaagattctagatcagatgctccaagattctagatgattaaataagattctaacggtctgttctgtttcaaggcactctagattccattggtccaagattccggatcctaagcatctaagttataagactctcacactcagttgtgactaactagacaccaaagttctaataatttctaatgttggacacctttaggttctttgctgcattctgcctctctaggaccatggttaagagtccaagaatccacatttctaaaatcttatagttctaggcactgtagttctaagactcaaatgttctaagtttctaagattctaaaggtccacaggtctagactattaggtgcaatttcaaggttctaaccctatactgtagtattctttggggtgcccctctccttcttagctatcattgcttcctcctccccaactgtgggggtgtgcccccttcaagcctgtgcaatgcattagggatgcctcctttcccgcaggggatggacgatctcccaccttttccgggccatgttgcccccgtgagccaatccctcaccttctgagtacaaagtgtggactctggttgcctcccaaagggc

SEQ ID NO: 228808 - DNA, 938 bp, Homo Sapiens
taaaaacactagtaccatgaaagataaacttaaaacatcaataacttaaataagaattaacattacttaaggcataatgtttcacatcaacaaacaaaattcattataataaaataaaacaaggtgtctggggaaagctaggggaaaataagttagctgcagattcttgggttgtggagtgagtgttcaagtcttcggagtttgggtttgcttgtccaggtggtccatggaatcctgaacccacttctgcttggggtcagcacagatctccttggccacaatggtcttgaagctgtggggagggaggacagagttagatgaagttcctttgcagttttggtctagaagtgcagcccattctgcaccaaagggctgccatgggagctagaggaggaacgcaggtggaaggagggaacccagggcaaactgctcctataggtgtccaggtggagccatcctgacttcaagctaaagaaattggggtgttctgaataggcacccaggtggagagtgatgttggggttcactttttcccttggtgcctcagttttcccattgggaacctttgtacattaagttaaatagtgcactctctgactctaggtttatgaggcttgtcccttgctccacaaggaagaacttcaggccagggaaggttggtgtgctgaactcacatcacagcttctttgggacacttgctgctggtgattcttctatagctcgcgagcctctgcactgagatcttcctattggtgaagttatagcagcaggtgactggggcattgattgcatctggctgagcgagcccttggggaatgaaggtggctgctatgagcagcaggcacagaagggcggcagagactttcatgctggaggcgagagtgcgagcttcagtttgagaatttagatgtttctgggttagccaaacttttttgtac

SEQ ID NO: 228809 - DNA, 723 bp, Homo Sapiens
tttgtactaaaaagttgggtgaggacctgggcggcaggggtttgtggctgtgaggtacgggaggcagcccactccggcaagacccccagtccctatgcctctcttccccagaagtcgacgacttctcctgggagcccccgactgaggcggagacgaaggtgctgcaggcgcgacgggagcggcaagatcgcatctcccggctcatgggcgactatctgctgcgcggttaccgcatgctgggcgagacgtgtgcggactgcgggacgatcctcctccaagacaaacagcggaaaatctactgcgtggcttgtcaggaactcgactcagacgtggataaagataatcccgctctgaatgcccaggctgccctctcccaagctcgggagcaccagctggcctcagcctcagagctccccctgggctctcgacctgcgccccagcccccagtacctcgtccggagcactgtgagggagctgcagcaggactcaaggcagcccaggggccacctgctcctgctgtgcctccaaatacagatgtcatggcctgcacacagacagccctcttgcagaagctgacctgggcctctgctgaactgggctctagcacctccctggagactagcatccagctgtgtggccttatccgcgcatgtgcggaggccctgcgcagcctgcagcagctacagcactaagagaagcccctgagaaaaaccctctagaaaa

SEQ ID NO: 228810 - DNA, 644 bp, Homo Sapiens
gtacaaaaaagttggctgtttcactcttgcgtcacacccagctactacctgtagacaaagccttctatgaagcaggcattgctgccaaggcagttggctgggataacatggcattcatcttcctcaatcgctttttggacctgaccgatgcaatcgaggaagggactctagatggccttgaccactctgattttcaggatacagacattccctttgaggtgccactcccagctaagcagcatgtaccggaggctgagagagaagaggttcgagactgggtgcttacagtctccatggaccagcggctggagcaggttctgcctcgggatgagcgtggcgcctacgaggcctccctagtggcagcgagcactggtgttcgagccctgccctgccttattacaggataccccattctgaggaacaaaattgaatttaagcggccagggaaggctgctaacaaggacaactggaataaattccttatggccatcaagacctcccacagcccagtgtgccaggacgtgctgaaattcatcagtcagtggtgtggagggctccccagcaccagcttttcctttcagtagttggtagagctgaggaagagttagggcctctccctcattaaagttttataaataattgaa

SEQ ID NO: 228811 - DNA, 831 bp, Homo Sapiens
tagtgccccgttcaccacctggttcccggcagacccgagcacccaccgacgaccgtgttgtagccctcggggaagctggtgatgaactcgtgagcattcgcttcccgggcggctgtgtacacctctttcatcggaagcttccagcttcccaaagcggatgttttccatgatggtcgtcccaaacaggacgggctcctggctgatgaagccgacaacctggccccggagccaggaggggtcaagggtgcgcaggtcccgcccatccagcatcaccacgcctgccgtggggtcgtagaagcgctccagcagggaagccacggtggtctttcctccgccagactggcccacgagggccacgatcttgccagggggcagcgtcagggtgaagtctttcagcacctcgaagccggggcggcaggggtagctgaagcagacgttctgaaatgtaacggagccacgcagctgctctttggggacgcagcagcccccagacagtgggatgcaggggttcagggccatgtactcaaagacccgggcacctgcactcagcccccggaccacctgcccaaacaggacagagaggttggccatggacctttgcactgtctgggaggccaccaggaaggacatgaggtctccccctgtcagctgctgtccggccacaagggagcccccaataaatagggtacccaagaccatgcagttgaaggcgatgttggaaagcccttggaacaaggcgatgccgcggcccagctcctctgcccggcagcggcaggcttccagctctgccccatagcgctcctcttcccgttgctccatggcggccgccaa

SEQ ID NO: 228812 - DNA, 1050 bp, Homo Sapiens
ttgggacttgtggtgcgctgccagggctccgcagcgttgccggttgtattcgctggataccagagggcggaagtgcagcagggttcagctccgacctccgcgccggtgctttttgcggctgcgcgggcttcctggagtcctgctaccgcgtccccgcaggacagtgtgtcaggcgggcagcttgccccgccgccccaccggagcgcggaatctgggcgtccccaccagtgcggggagccggaaggaggagccatagcttggagtaggtttggctttggttgaaataagaatttagcctgtatgtactgctttaactcctggaagaatgacagatgacaaagatgtgcttcgagatgtgtggtttggacgaattccaacttgtttcacgctatatcaggatgagataactgaaagggaagcagaaccatactatttgcttttgccaagagtaagttatttgacgttggtaactgacaaagtgaaaaagcactttcagaaggttatgagacaagaagacattagtgagatatggtttgaatatgaaggcacaccactgaaatggcattatccaattggtttgctatttgatcttcttgcatcaagttcagctcttccttggaacatcacagtacattttaagagttttccagaaaaagaccttctgcactgtccatctaaggatgcaattgaagctcattttatgtcatgtatgaaagaagctgatgctttaaaacataaaagtcaagtaatcaatgaaatgcagaaaaaagatcacaagcaactctggatgggattgcaaaatgacagatttgaccagttttgggccatcaatcggaaactcatggaatatcctgcagaagaaaatggatttcgttatatcccctttagaatatatcagacaacgactgaaagacctttcattcagaagctgtttcgtcctgtggctgcagatggacagttgcacacactaggagatctcctcaaagaagtttgtccttctgctattgatcctgaagatggggaaaaaaagaatcaagtgatgattcatgg

SEQ ID NO: 228813 - DNA, 934 bp, Homo Sapiens
ccttgccccctcactcactcttgggggtcgtgatgaactcttggaccctgtggaagataagagttagagacctcggcctcctggtcagtggagccctggcctcatgcctggtgggctaagcgggcccagctggggtttgaggtaggggaggccttggcttggccccagcagctccagggccttgagttcctgccagaggctggagagcaggcagctgctgcttttcctggtccttggtaggggagggtcctcaggcttgcgtgccaaagcctgaaggattctgcttctgccagcgccagagatcctcacacatcctgtccagccctaaggctgctgtccaccccagctcctcttgggccaggctggggttggcgtaacaggctgccacatcaccttcccgccgtgccaccaccttgtacgggatcttcttcccagaggccttctccatagcctggaccatctgcagcactgaatagcctgtgcccgtgcccaggttgtagatccggcagccacactgttctttcagcttccttaaggctgcaatgtggcccttggccagatccacgacatggatgtaatcccggacacctgtgccatcctctgtgtcatagtcattgccaaagacattcagggcctcccgtcgcccgatcgccacctgggagacataaggcatgaggttgttgggtatgccctggggatcctcaccaatgcagccagaggcatgggcacctgtggggttgaaatagcgcagcagcactgcgttccaagtcttgtctgcctggcacaggtcccggatcatttcctcgatgaagaacttggacttgccgtaagggttggtacaaccacccgtggggtgggcctcatcaaggggcaggtactgggggttcccgtacacagtggctgagctgctgaacaccaacttttttgtacaaag

SEQ ID NO: 228814 - DNA, 839 bp, Homo Sapiens; identical to SEQ ID NO: 194945

SEQ ID NO: 228815 - DNA, 899 bp, Homo Sapiens
ggcagtttcccagggccggatgtgcgtgtaagcactgtggttccttctgtcttaccctatgccttttccaagacttagggcagtagttccatctccagaaaaaataaaaataagataatagttgcatagtgctatgccctatacaaaatacgacctttgtaaccatttcccaaagattttttgttggttggttggttgtttaagtgttatttatctttttatcttatcttcaagataaaaaaacaggtgtgggccagttgatgatgttgttccactagtggggccagttgaaacctctcttctctaaatcatgataggacagctgtcaaagcaaaggctggcttaaaatccttttggggagggggttcaggaccattgttggcaaacttttttccttcccccattattcatattttattgtatttttccccagacaacaccaccccatgttattggtcagttggacaaactcatcagagaggtatctaccttagatggagttttagaagtccgaaatgaacatttttggaccctaggttttggctcattggctggatcagtgcatgtaagaattcgacgagatgccaatgaacaaatggttcttgctcatgtgaccaacaggctgtacactctagtgtctactctaactgttcaaattttcaaggatgactggattaggcctgccttattgtctgggcctgttgcagccaatgtcctaaacttttcagatcatcacgtaatcccaatgcctcttttaaagggtactgatgatttgaacccagttacatcaactccagctaaacctagtagtccacctccagaattttcatttaacactcctgggaaaatgtgaacccagttattcttctaaacacacaaacaaggccttatggttttgg

SEQ ID NO: 228816 - DNA, 856 bp, Homo Sapiens
aattgtatctcgaaagtgggccggggggcaggtgggggtcccctaccccggcccccagtcggccgcctccggctttcttcccctcgggttgggggatccctgtcgccaggcccagctcggttgggctcctctctcttctctgactcagtctctgaagctgtagacacatctgagctggggccataggcaggaccgcctgtcctccggccacggccacggcccccatagctgcccccataggttcgagtcgcatggagggaggaggaggagctctcatcagtgctatatccagccttgtcgctgccaccgctgccccgcccactcccaggagggcgaaagcccagcccaatctgccgaagctgctcatcaatttgtagcctctccaagcgaagctgctctacctcctgcaggtaggagaggtgatactccagcaaagcctgggcattgctgatgttctctcgggtgccaacaaaaatgaagggaaccattccctagagaacagagagcagaaacgatggatcagaaaggaaaatgaaatggaaggattaacgccgcccagtctcctaggggagcctgcccagtgggatcattctgggctctaaatctactagtgttaaacaactttccgtactccaccctctcaaagaacaatcccagccctcagaggacaatcccatttacttctggaaaccaatctctatgcccacttgccccgtacccatacctcctccctggggttcttcttgtcattatcaccttccactcgaaccctcaccacaccagatttatccacaatctcctggatcactttcccgttctttccaatcactttgcctggaataggtaaatgagccaa

SEQ ID NO: 228817 - DNA, 523 bp, Homo Sapiens
ttgtacaaaaaagttggcgctgttgctgctcgtgttgaatctagaaccgtagccagacatgggactggaggacgagcaaaagatgcttaccgaatccggagatcctgaggaggaggaagaggaagaggaggaattagtggatcccctaacaacagtgagagagcaatgcgagcagttggagaaatgtgtaaaggcccgggagcggctagagctctgtgatgagcgtgtatcctctcgatcacatacagaagaggattgcacggaggagctctttgacttcttgcatgcgagggaccattgcgtggcccacaaactctttaacaacttgaaataaatgtgtggacttaattcaccccagtcttcatcatctgggcatcagaatatttccttatggttttggatgtaccatttgtttcttatttgtgtaactgtaagttcacatgaacctcatgggtttggcttaggctggtagcttctatgtaattcgcaatgattccatctaaataaaagttctatgatctgc

SEQ ID NO: 228818 - DNA, 410 bp, Homo Sapiens; identical to SEQ ID NO: 194948

SEQ ID NO: 228819 - DNA, 962 bp, Homo Sapiens
ttgggccaagatggcggtgcaggtggtgcaggcggtgcaggcggttcatctcgagtctgacgctttcctcgtttgtctcaaccacgctctgagcacagagaaggaggaagtaatggggctgtgcataggggagttgaacgatgatacaaggagtgactccaaatttgcatatactggaactgaaatgcgcacagttgctgaaaaggttgatgccgtcagaattgttcacattcattctgtcatcatcttacgacgttctgataagaggaaggaccgagtagaaatttctccagagcagctgtctgcagcttcaacagaggcagagaggttggctgaactgacaggccgccccatgagagttgtgggctggtatcattcccatcctcatataactgtttggccttcacatgttgatgttcgcacacaagccatgtaccagatgatggatcaaggctttgtaggacttattttttcctgtttcatagaagataagaacacaaagactggccgggtactctacacttgcttccaatccatacaggcccaaaagagttcagagtatgagagaatcgaaatcccaatccatattgtacctcatgtcactatcgggaaagtgtgccttgaatcagcagtagagctgcccaagatcctgtgccaggaggagcaggatgcgtataggaggatccacagccttacacatctggactcagtgaccaagatccataatggctcagtgtttaccaagaatctgtgcagtcagatgtcggcagtcagcgggcctctcctacagtggttggaggacagactggagcaaaaccaacagcatttgcaggaattacaacaagaaaaggaagagcttatgcaagaactttcttctctagaataaatcagagacaaatggggaaagatgaaaatatccagtgtaaagttacttagctaaatcaatttcaaagaagaaaaac

SEQ ID NO: 228820 - DNA, 416 bp, Homo Sapiens
gcatctgggggacacttctggccaagtggttctttcttacatttgcagagtaaacagaagtggatggcagcagggtgtgttgtggtcagcccgttcccagggagaggccatggtcacatggccccaggcaggctccccaggcgtgggctgctggctcccaggctccctttccatgcaggagcagagtctccgtggccagcaggaaagcccaggggtctgcctccctcccacgggcccccacagcagagctgcagttgggatcagccaggacacggcccccgactgctctgctcttctgcctcttggtcacctcagatgttacagaggacttgaagttttttctggctagcctatctgggaaaattctttttgcataaagtgtgtcaggatggcattgccaacttttttgtacaaag

SEQ ID NO: 228821 - DNA, 689 bp, Homo Sapiens
  misc_feature (638)..(648): n is a, c, g, or t
ctttgtacaaaaaagttggattagattgggacccccttcaaacctaaaaatcaagttatttccttttataatacttttcttccccatggaacaaatgggatcaatttgtgagttttttcctttaatgataactaaaatccctctaatttctcatttatgcttttgtcttttttatgaaatatttcttttaaaagccccagtctcacctacgaaatatgaagagcaaaagctgattttgcttacttgctaaactgttgggaaagctctgtagagcatggttccagtgaggccaagattgaaatttgatactaaaaaggccacctagctttttgcagataacaaacaagaaagctattccaagactcagatgatgccagctgtctcccacgtgtgtattatggttcaccagggggaactggcaaaagtgtgtgtggggaggggaagggtgtgtgagtggttctgagcaaataactacagggtgcccattaccactcaagaagacacttcacgtattcttgtatcaaattcaataatcttaaacaatttgtgtagaagtccacagacatctttcaaccaccttttaggctgcatatggattgccaagtcagcatatgaggaattaaagacattgttttttnnnnnnnnnnntcatttagatgcacttttttgtgtgttctttaaataaatcc

SEQ ID NO: 228822 - DNA, 482 bp, Homo Sapiens
aagacttacatctcatatatatggacaaaggaccaattacctccaaacataaacagctcctagaaattactgcaaagatcaacaacccagtagaaaaatgaatgaagttcccagaacagaaaacacaagtggcccttcaaaaaaatgaagagaggctcagcctcttatggtaagacaaagagacaggattttaaaaacctaggcctcttcctagagttcccttaaatatctaggccagatcatttttacttcctggcttagaccctgccaagggctgcccagctactcaggtgtttgtgtccttgtggactcaagtcatattgtcctgatcttttggctgagtacggttttctcctccagcaaagacaatttggaggatgtactaagcatgaagcgctacttcctggcccccatctctcttcgcacagtgttccatcatccagccatgaaagcacagctgagtggatccaagaggcagccaa

SEQ ID NO: 228823 - DNA, 867 bp, Homo Sapiens
cattgttcacatacgctttttaatgaaattaaattagtcacttaacatacataatgcagtgtttgttttccagtctagtagcttttcagcattcagttttgaggctcatgggaaatgttacttagcatcaagatgtggtttgatgagtgaacaatgtcagtatcaactgtacttaacagaagacagaggggctggggttaatctgcagctaacaacatataaaaataaaaacaaacacagacccacaataacatcaacatgcattattaggcaaagatccaaaattaacccaacccacacagatttcttctaagctgagattacacatggaaacagatactttatcaagatccatagccatagtagtaaggttcatcagggcggaatccatatgctgtggcagggcgtccaagaatgccaactggttggccaaagccatccattccaaggctgccaggaaatgaatgctgcccaacaacatctccattttgaaggtggtaatcattgaagaaatcgggacttatggctccttcagaggcaattaatccatctgagttgtagaaaaggtcaggtctttcgagaatatctccttcatgaatgtatggctcaattcgatcatcaccatacaagtactgctcactctcatccatctgacgactctctaccatctccagccactgagagttatgccagcgaaacttttcactctgaattttcttagcccattcttcatcatattccgctataatatctaatgtattatcacagacctttcggatttcattattcttatcatgcattaggtctatgagatatgctggagcctgtgtttccttgattatgacgtctcttgtggcttggtgccaa

SEQ ID NO: 228824 - DNA, 1350 bp, Homo Sapiens; identical to SEQ ID NO: 194952

SEQ ID NO: 228825 - DNA, 421 bp, Homo Sapiens
tttgtacaaaaaagttggctcacttcaagggtacctgaagcgaattggcaccaaagcagcagctgtattgccgcagttctagcttcaccttcacgatgtttcccttggtcaaaagcgcactaaatcgtctccaagttcgaagcattcagcaaacaatggcaaggcagagccaccagaaacgtacacctgattttcatgacaaatacggtaatgctgtattagctagtggagccactttctgtattgttacatggacatatgtagcaacacaagtcggaatagaatggaacctgtcccctgttggcagagttaccccaaaggaatggaggaatcagtaatcatcccagctggtgtaataatgaattgtttaaaaaacagctcataattgatgccaaattaaagcactgtgtacccattaaga

SEQ ID NO: 228826 - DNA, 916 bp, Homo Sapiens
ctttgtacaaaaaagttggcgcacgcacgcgaccggggcggtggttggcggctacggacgcgcaggactgggggacgggcgggtacggctatgggcgaggcggaggcgccttctttcgaaatgacctggagcagcacgacgagcagtggctactgcagccaagaggactcggactcggagctcgagcagtacttcaccgcgcgaacctcgctagctcgcaggccgcgccgggaccaggacgagcctgtggagtgggagacacctgacctttctcaatctgagattgagcagaagatcaaggagtacaatgcccagatcaacagcaacctcttcatgagcttgaacaaggacggttcttacacaggcttcatcaaggttcagctgaagctggtgcgccctgtctctgtgccctccagcaagaagccaccctccttgcaggatgcccggcggggcccaggacggggcacaagtgtcaggcgccgcacttccttttacctgcccaaggatgctgtcaagcacctgcatgtgctgtcacgcacaagggcacgtgaagtcattgaggccctgctgcgaaagttcttggtggtggatgacccccgcaagtttgcactctttgagcgcgctgagcgtcacggccaagtgtacttgcggaagctgttggatgatgagcagcccctgcggctgcggctcctggcagggcccagtgacaaggccctgagctttgtcctgaaggaaaatgactctggggaggtgaactgggacgccttcagcatgcctgaactacataacttcctacgtatcctgcagcgggaggaggaggagcacctccgccagatcctgcagaagtactcctattgccgccagaagatccaagaggccctgcacgcctgcccccttgggtgacctcttgtacccc

SEQ ID NO: 228827 - DNA, 555 bp, Homo Sapiens
ttggcctgcgatccgcggctggggcaggttatggtagtgcggactgcggtgtgagcagagcggccacggggcccgccatgcgccggcggccctgacatgggcgccagcgggtccaaagctcggggcctgtggcccttcgcctcggcggccggaggcggcggctcagaggcagcaggagctgagcaagctttggtgcggcctcggggccgagctgtgccccccttcgtattcacgcgccgcggctctatgttctatgatgaggatggggatctggctcacgagttctatgaggagacaatcgtcaccaagaacgggcagaagcgggccaagctgaggcgagtgcataagaatctgattcctcagggcatcgtgaagctggatcacccccgcatccacgtggatttccctgtgatcctctatgaggtgtgaccctgggaggtggcagacagaagcaccccctgccccggcaagaaactcccaggctcaatcaaggtgtggcttccattgaggagcccaggctggggccacaaccctgaataaactctgttggcccat

SEQ ID NO: 228828 - DNA, 621 bp, Homo Sapiens
ctagggggttcttggaacccatcacccataggggcaccataggacaactatagtaccgtgtttatttcctattaattcaggttccatttagagtctaaaactaaaacctaatcatttagtcacagtgtaaaaacaaatggaaataacagctcaaatcttcaaaatattactatagcattatgtttaaaataatctacaacaaaaatgtaccattttcaagcagtactacattaggagcccttttatagaaaataatttcttctttacccccgttccagtgtgaatctagtattctgttaacatttgtgtggcatttggagtttgtcatccccattgaagggagagccttctcagacatgaagcaagggaaacatactgaatagttttacacaaatttgatctggcttccatttgtccccctcatttcccaaatgtttaaatgtattggatttggattctcaatgtataagttgccttatctgttaatgtctatcttctgtctctttaattttgtatatctgctgttttgcttttggatacattttctaattagaagtcacatgataaatataatcagtatagtaataataccataatgtacacatactcataaataaatga

SEQ ID NO: 228829 - DNA, 807 bp, Homo Sapiens
  misc_feature (54)..(68): n is a, c, g, or t
ccgagatagcgccattgcactccagcctgggcgactgaataaaactctgtctcnnnnnnnnnnnnnnncggtaagcttttatatttaattaactgatacctttcactgtgcaatctcaagaggaagattttctaaattagacattgtctttaccttaaagaagaaaattgtctatttcagtgtcttttttagcaagattgaccaaaacaggtggtaggtgtgtaatttttaactgtcatgaaatactgtaatgcgcacctttgctaataaggaaatggtctccctttgaattatgggaagtttcttgtctgtgatatggggtgtctgtgtacatatatgtatatttccttttttaatacaggataataatatggggtcttgtccttcaccttttaagttcagggaacagtttgtcctgaccacacatatgttatcagtgtaatgctttatgaagctttagaaatgagctcatgactcattaaaaaataataaactgatgctattttaatattttcaaataaataatctgaggatgtgtttcatactttagcatcaacgctgagttgtgccttgtagaattgcattgtctatacatgcaaaagactattaagttaggatgaactagattccctaattacagtgaaattctatcttgcaaatgctatagaataacttgcattttaaagtgtatttgcacattttacatatgctatgtggttgcctttgggttttctgtacagattgtttttgttattaaatggaaaaggcctgaattatgctcttatgtgaagtaaattgatataacct

SEQ ID NO: 228830 - DNA, 943 bp, Homo Sapiens
aagccaactttgtacaaaaaagttgggctggcagctggttggtgcttacaccttggccgcagcggcaggtccttccacgtgctttcggcggcgacatggagctggaggagttggggatccgagaggaatgtggcgtgttcgggtgcatcgcctcaggagagtggcccacgcagctggatgtaccgcatgtgatcactctgggactcgtggggctgcagcaccggggtcaggagagtgctggtattgtgactagtgatgggagttccgtgccaacattcaaatcacacaagggaatgggtcttgtaaatcacgtctttactgaagacaatttgaaaaaattatatgtttcaaatcttggaattggacacaccaggtatgccaccacaggaaaatgtgaactagaaaattgtcagcccttcgttgttgaaacacttcatgggaagatagctgtggcacataatggcgaattggtaaatgctgctcgattaaggaaaaagcttctgcgtcatggtattggtctgtctacaagttctgatagtgaaatgattacccagttactggcgtatacccctcctcaggaacaagatgacaccccagactgggtagccaggattaaaaacttgatgaaggaagcacccacagcatactccctgcttataatgcacagagatgttatttatgcagtacgagatccttatggaaatcgtcccttatgcattggtcgtcttattccagtgtctgatataaatgacaaagagaaaaaaacatcagaaacagaaggatgggtggtgtcttcagaatcttgtagcttcttatctattggtgcaagatattaccgtgaagtcttgcctggagaaattgtggaaatatccagacacatgtcccaactcttgatattatatcaaggtctgaaggaaacccagtggctttttgtatctttgaa

SEQ ID NO: 228831 - DNA, 533 bp, Homo Sapiens
actttgtacaaaaaagttggctttttttctgtaatagaactcggattcttttgcatgatggggtaaagcttagcagagaatcatgggagctaacctttatcccacctttgacactaccctccaatcttgcaacactatcctgtttctcagaacagtttttaaatgccaatcatagagggtactgtaaagtgtacaagttactttatatatgtaatgttcacttgagtggaactgctttttacattaaagttaaaatcgatcttgtgtttcttcaaccttcaaaactatctcatctgtcagatttttaaaactccaacacaggttttggcatcttttgtgctgtatcttttaagtgcatgtgaaatttgtaaaatagagataagtacagtatgtatattttgtaaatctcccatttttgtaagaaaatatatattgtatttatacatttttactttggatttttgttttgttggctttaaaggtctaccccactttatcacatgtacagatcacaaataaatttttttaaatac

SEQ ID NO: 228832 - DNA, 751 bp, Homo Sapiens
  misc_feature (172)..(194): n is a, c, g, or t
caagagggagcaggcctcattccgccccaaactggagaggacgaaatggctttacccgggaggagataacttcctggcccccacatactgtccatgtcctgagagggtactataagtcctggcatcttctcaggggtccctcacctgcctgtggcagctgtggagggacctnnnnnnnnnnnnnnnnnnnnnnnagccccctcccagccaggctgtccaggccccgactctgggggtggaggcagtggcggggcagcctgggccgtgccagagtccgagctgggtgaggtggggtcagggccccctgcggggctgggagtgggggcaggggcagcagcggtgccagtggggggcggtacagggagaggagcctcagctccagggggctgctccgtgggagtggcagcctgcatgatcttctggcgcacctcacggatcttcaactgcagacaaaccttggagggaaagatgtctgcatagcgggcctggaaggcggctgtggcctgggctgacgggaagaagccatggtcctgaaagagctgcatgaccagggcccggcgctggtccagggtgcgccgcagggaggagtatggcaccttgtcatactctagctccccaagcacgtcctcggcttctgtacctgtacggtcaaaggtgaagatgtccccctcgcacttggcactcttgggggtgttgggctccgagctgcagctggagcgtcttctcatcttgcgcttgggcgaggtgccaa

SEQ ID NO: 228833 - DNA, 638 bp, Homo Sapiens
agcacttggttattttatttcctcaaaaataaaacagaaaggaggcggggccccagctcagcaccaggtgggcagctcggagttgtggcctccctcctccagggctcgcctccgcctttcctcccgcccctactggcagccaacaagtcaacggaattcctggcctttgagatgtcaccccaaatgccacctgagttgagtgaagaaacactctcttggtgaaagcagaagcggagctaccaggccaggcattgctggtggccggcatcacctgagctcgcctgtgtcctgcccagcttcagtgggtcttcccccggccctctgagatgacatcctcgggccgggcgcgcatgtaccactccacccaggagccatcgtagatgggcacgtctggcttgccgcagaggtaggcccctagtgccacgtggcaggctgtgacgccagagccacacgtggccaccagtggcttagacaggtccactttcttctcctggaacagatggcggatctcctcagggctcttctccagcccctcctggctcaggaagtctgtgaaggggatgttcacggtacctgggatgtggccaggttcaatgccgtctcggggctcgggctcggtgccgcggaacctgccccaa

SEQ ID NO: 228834 - DNA, 899 bp, Homo Sapiens
ttggctgtaagattcatgaaattcggggccagggaaacagtttagccttagggaagggaaaacactaagtgaaactgtttacaataacctcatacaaccttctgtcccatctcctggttcagcctaggtgtttcactggtcctctatgaatcccagcacttataatcccagtcttttatcactcaggtgctaggaaaaaaaacatagactcaagacccaagattcaatggaccaggagaaaggggggcggtgatcaggtcaccagtgaccccaacctatggtctcggtctttcctggaggctgccaacccagccctcatcctcccttgctcacaaagttacagggtaggcacctgtcaggacagaacagcagcagcgctacagcccagaggttatacatttcaacagaacagggatccttggctactgtagaagcagtcctgtatggagaccttggaccagcaggggaagatctatgggcatgggaggtgggcgttggaaaggctgagtaggaatggtgcctggcacccctaaaccatgatctgagcctccctggagaaggtattttatatgtctgctgccagctgctggtctccacaccctcaaccgttctcaacccccctgcagggagaaggcctcctgggcactgtccttccacctgtgccagccaccccctgccccactgctgaatgaaggccatttcaagcgctgcttctcactccattcctctcagctgttattgctgcagggccaagccctttttagtgctgtgctcgtccagctcaccaccacagcccctctcagccctcagtaggtgggaggggccagctgcctctttaggccagttgcatcctccatttatccaaaccactcctctcctcccagtggagtggggttctg

SEQ ID NO: 228835 - DNA, 722 bp, Homo Sapiens
ccaccgcaatttattgttcattatttttacatcttcttcgtgaagacaatgcatgtatttaaaacatcctcaaacatttaaaagacattatcgggcattaccactttaaataactgacactgtactagcaaacttattagtataaacatcactgaaattctttcctcttacttttttttaaataacactgatgaactagtgggagcaattttccttctttgtgaagcctatgagtgtcagttgcacctccaataaaagtaccattgacaaatattcttggaacagttctttcaccagtcattttgtaaagagcatcttggaactggtttccatattcaagcaggtccagttccaccactttatagttaacattcatgtcatggaaaagcttttttgccattgtacagtaagaacaggatgtttttgagaaaatcaccacacaattatcagaaattgtttcttggatctggttcacaggcgccgtcgctaaattctccaaagatgatgatgtattgctctccatcccagaggccgcagctgccgcagctcccgcagctcccgccgccctgtcaagccagcctgccgagccgctcctgctccaaaccagccgcgtccccgccagcgccgcgcggcgccaaatcatggtcagattccttgggtctgcagcgagccaacttttttgtacaaagtttttctttatagtaagcattgctcatcaattt

SEQ ID NO: 228836 - DNA, 308 bp, Homo Sapiens
gtacaaaaaagttggtcagaatccattctttacaatatgcagtgagatgggcttaagtttgggctagagtttgactttatgaaggaggtcattgaaaaagagaacagtgacgtaggcaaatgtttcaagcactttagaaacagtacttttcctataattagttgatatactaatgagaaaatatactagcctggccatgccaataagtttcctgctgtgtctgttaggcagcattgctttgatgcaatttctattgtcctatatattcaaaagtaatgtctacattccagtaaaaatatcccgtaatt

SEQ ID NO: 228837 - DNA, 648 bp, Homo Sapiens
gggaaacatttaccagggacaataaaggcttagaagaaccttttggggaaactttgtgaggagcacaattccagagggcccacagcagccacagcctcctggcgtgacaccaggcacactgccggctgcacaggttgctgggcacaggcaggcacagccagtctggaagagcagcccgtcttaaatctttggtttctttcaaccaggagcaaacattggtagaaagagccagggcatatttactctttacacccagaattttcattcattattgaaccatttggcttgcacagtgctctctgataatgtggtccataaaaaccaccattaaagctgccctttcacctgatctgggtggggctaaacgaggaaacgagaagtttcctgtatgcttcaaaatataaatcaatgccaggaaattctgaaaatggatgctgcctgttaaacgtgaaatcactaagggagcttctgcaaaacccacccggcagcatgaggaacggtgtctacagcgtgctccaaacggccacggccccgctccttacagatcaaagtttaagccgcatattctcatatttcaaacaaaactgcgttacagacatcatctacgtgggcacggatacacactaaacaaggacgtagtacacccaa

SEQ ID NO: 228838 - DNA, 936 bp, Homo Sapiens
ctttgtacaaaaaagttggtaataatagcatttaattggaatatactaggcagctggaaaagtatttgaaactaaattgacattaaaattaagatttgttttcaagtggatgtccattaaaagtagaaaaatatttgggataagtgagtgtgtgtttccttacatggctactaaataaaatataatgagtatacaagtatatctcctcttttgctatggaggctccatgttcaaggcaatggctttttaaatcttggctatctaaaattttttccctttgttttgaatatttgcaagtttttaagaagttagtgtcagcaaattaattgaagttatgcttctatactgggacatatttaaatactgagtatagtactgctgctactgcttctacaatgtaaaatgtatgacttggtgttttaaagtaaaaattatgatgttacttgtggagaaactaaaaatgttgtacaactgaccgaaagaaaacccttggggataagtttagtgaggggattggaatccccaaaaagataacatttttcttctgcttttaaaaactgaaattccctgttctagttcctaacaattctcattacatactatgccagattacaaaatacttatttttaaaatgaaatctatatattgactttcttatcaatcatcttactgtgcaatcaaaattagagtactttggtttgaaaacaacacttaaagcctccagataacttttaagacttatttagctttgtgggtggtattttcatgcaaataataatggtgggttttatattttgtagaagttttcggtcctattttaatgctctttgtatggcagtatgtatatattgtgttaagttcctcaagaatctccttaaaaactttgaagttaatacttttgtgcaactgtgttttgaataaagccatgacagtgtt

SEQ ID NO: 228839 - DNA, 859 bp, Homo Sapiens
ttgggcttaagggagcccggccgcgcccggtgcattgtgggagcggcccgcggcccgttttcgggaggaggcggagggcgcaaagcgagccggtggatccataaagaacccagccaacccgcagagggaggggaggggctgagctgtgaggagagcggggcccaagaaccatgtctacgcgggagtcctttaacccggaaagttacgaattggacaaaagcttccggctaaccagattcactgaactgaagggcacaggctgcaaagtgccccaagatgtcctgcaaaaattgctggaatctttacaggagaaccacttccaagaagatgagcagtttctgggagccgttatgccaaggcttggcattggaatggatacttgtgtcattcctttgaggcacggtgggctttccttggttcaaaccacagattacatttacccgatcgtagacgacccttacatgatgggcaggatagcgtgtgccaatgtcctcagtgacctctatgcaatgggggtcacggaatgtgacaatatgctgatgctccttggagtcagtaataaaatgaccgacagggaaagggataaagtgatgcctctgattatccaaggttttaaagacgcagctgaggaagcaggaacgtctgtaacaggcggccaaacagtactaaacccctggattgtcctgggaggagtggctaccactgtctgccaacccaatgaatttatcatgccagacaatgcagtgccaggggacgtgctggtgctgacaaaacccctggggacacaggtggcagtggctgtgcaccagtggctggatatccctgagaaatggaataagattaaaactagtggtcaccc

SEQ ID NO: 228840 - DNA, 541 bp, Homo Sapiens
ctataaaagagcaactttgtacaaaaaagttgggccttaaagactttctttggaagatcattgcctgtactattccttttttgtgtggcataaataatatattaacctgttacaactgacaacattggttttctgcagctagggagtcttgagtcgagactgctcgccttgatgacttgctcttttttggcagatgtgtggagttggctgttacgacatccctgtgtgatcccagaggaggggcagtagctgggcagaaactgcaggcacacatttgggtggatcacctggcttccagccccttcggggtggtgctcagtgtggggtgatggtatcatagaggaccacggcgcttatcagcattgtttctttggagtctgtgtaatggaatgtatttttcaaatactgatatttgcattttctgtaacaattccttataataaaatgaagtaaaattgtgcatttaaagtggaaactttaataagacatttgtagttacttctaatgcagaagtaccaataagcattaaaaacaaatttta

SEQ ID NO: 228841 - DNA, 607 bp, Homo Sapiens
ttggaattgggttgcctgggctggacgtggttttgtctgctgcgcccgctcttcgcgctctcgtttcattttctgcagcgcgccagcaggatggcccacaagcagatctactactcggacaagtacttcgacgaacactacgagtaccggcatgttatgttacccagagaactttccaaacaagtacctaaaactcatctgatgtctgaagaggagtggaggagacttggtgtccaacagagtctaggctgggttcattacatgattcatgagccagaaccacatattcttctctttagacgacctcttccaaaagatcaacaaaaatgaagtttatctggggatcgtcaaatctttttcaaatttaatgtatatgtgtatataaggtagtattcagtgaatacttgagaaatgtacaaatctttcatccatacctgtgcatgagctgtattcttcacagcaacagagctcagttaaatgcaactgcaagtaggttactgtaagatgtttaagataaaagttcttccagtcagtttttctcttaagtgcctgtttgagtttactgaaacagtttacttttgttcaataaagtttgtatgttgcattt

SEQ ID NO: 228842 - DNA, 782 bp, Homo Sapiens
taaaagccaactttgtacaaaaaagttggcaagtttctgtttgatttggatcatctcaggatcggattctgttttagagtgtttctgggccaggatccgggcccctgccctcctctgcacctgaccacactccctactcagggctagtctgttcttcccggacatcttctggtagccgtgcaggagagggctgggtggggcagaggccaggaggggacctggtgtgtcacctgcccaccacctggctcatccctcaggcccaccctgaccctacattacataggttacgtcagcctactgtggctgttgagcaaagcatttctcctttctgggcctcattggcactagatgggcctgtggtcccaaagtaggtcagtaggttggggttgctgacaccccttgggtgcagctttgggacagatgagtggctctgtcctgtcactgccctctccctgcctgggggctatgtgcactccagacccctgcccaggctcaggcccatgaggtatggagacaccctggcccccaggagctggaggcaccgcccactcccctggcattccagctttgcaggtgaccctcctctacccaaagctctgtccccctgctcccactccagaagaactgcggcacgtgcttcgggcagcctagccacaggctttgagcgcctgcattcctgggggctgggagggtggggtgccaaaggccctgagcaaaagccagagctcctctcatcaaagcctttacaagtgctgggcccagaggctttgcctttgacagaa

SEQ ID NO: 228843 - DNA, 297 bp, Homo Sapiens
agcagatgaagaaactgaggccctgtgatgtgaagtgacttgccccccagccacacagctggaccattctggctgctgtctggacaagaagtcgtagggggtgagggtggaagctgggaaacccacaggaggcaaccacactagtttagatcttctggtgaccccacttctcgctgctcatgccgctgggactggggcggcggaaaaaggcgccccctctagtggaaaatgaggaggctgagccaggccgtggagggctgggcgtgggggagccagggcctctgggcggaggtgggt

SEQ ID NO: 228844 - DNA, 1239 bp, Homo Sapiens
actttgtacaaaaaagttggcccatagcagccccctggataccatctattaccatcgggagctcctttgctattctctggatggacttcgtgtagatctgctgacgatcacttcctgccatgggcttcgagaagatcgagagccccgtctagagcagctatttcctgataccagcacccctcgaccattccgtttcgcaggcaagaggatattcttcttaagcagtagagtacacccaggggagactccatctagctttgtcttcaatggctttctggacttcatcctccgacctgatgatccccgggcccaaaccctccgtcgcctcttcgtctttaagctgattcccatgttgaaccccgatggtgtggtccggggacactaccgcacagactcacgtggagtgaatctgaaccgtcagtacctgaagcctgatgccgtcctgcacccggccatctatggggccaaagctgtgcttctctaccaccatgtgcactctcgtctgaactcccagagttcctctgagcaccagcccagttcctgtctccctcctgatgctcctgtttctgacctggagaaagccaacaatctccaaaatgaagctcagtgtgggcactcagctgacaggcataacgctgaagcctggaaacaaacagagccagcagaacagaagctcaacagtgtgtggattatgccacaacagtctgcggggcttgaagagtcagcccctgataccatcccccccaaagagagtggcgttgcttactatgtggacctgcatggacatgcttccaaaaggggctgcttcatgtacggaaacagctttagtgatgagagcacccaggtggaaaacatgctatatccaaagctcatctccttgaattcagcccacttcgacttccagggctgcaatttctcagagaagaatatgtatgcccgagaccgtagagatggccagtctaaagagggaagcggccgtgtttgctatctacaaagcctcacggataatccacaggttgggtggaagctgagatatagtttgatgaaatagcttccctaaagaaacacccaccacgccccggctattttgtatttttcatagagactgggttccaccatgtagaccaaagctgggtctcgaatcctgacactccagtgatccacctacctcgggctcctaaggagtgggggattacggatgtgagccaccacgccccgggtatattttttgtattttta

SEQ ID NO: 228845 - DNA, 944 bp, Homo Sapiens
ttccttgaaaataatgttatacgccaatacttattatagtactgtaaagatgcaccatatcccatatctcatttgtcagttgaaagaacacagatttggagccaggtaaaagtacctcttgctacctgtgacgtctggacaagttcccacctttggggccagtttctccatctataaaatggggataatgcctaacttaagagttattttagatccaatataaaaattcccagcccaatgcctggcatgcagtaagcaggcaattatattatttttcctctctactagtcacaactacccaggaagggaagttttcactcattcctggccatccgccccatgctgggcacttggggcatgctgactgtggtgaatgaaacagacagggtactggtcctactattatagaatgtttgcttcataagaacaggcactgactgtatcatctctgaacacaatggaatgaagctggcaataacaaaagaaaaattggaacatttacaaatgtgtggaaattaacagatttctaaacaatcaaggggtcaaagaagaaatcacaagggaaattagaaaatactttgagatgaatgaaaacaaaaacacaaaataccaaaactgagagtgtgtgatgacaacagtgtgcagagggaaattcatagctgcaaatgtccatattaagaaacaagacagtaactatgtgaggtgatgggtgttaattagctcagctgtagcaatcatttcataatgtatatcaaaacatcccactgtatactttatacttttttataaaaataaatattcttacaaaaggacaggcgctgtgtctgtctggctcaccattgtacccaatacccaacagggtgccaagtacccaatacccaacagggtgccaaggaacacaaaaggcactcaaaatatgttccaacttttttgtacaaagttgg

SEQ ID NO: 228846 - DNA, 423 bp, Homo Sapiens
ttggctgccttcaaggactgtttcagtgtgagtcagaatgtgaaaaaggaataaaaaatactgttgggctcaaactaaattcaaagaagtactttattgcaactcttttaagtgccttggatgagaagtgtcttaaattttcttcctttgaagctttaggcagagccataatggactaaaacattttgactaagtttttataccagcttaatagctgtagttttccctgcactgtgtcatcttttcaaggcatttgtctttgtaatattttccataaatttggactgtctatatcataactatacttgatagtttggctataagtgctcaatagcttgaaccccaaaaagttggaatcgaaatttgttgtttgtttaaacccaagtgctgcacaaaagcagatacttgaggaaaacactattt

SEQ ID NO: 228847 - DNA, 219 bp, Homo Sapiens
ctttgtacaaaaaagttggatgactatcttaaccacgtggctgatgtggggtaggtatgaggggaaggaagtggagtaccctaatgaaaaggggttctagttgagctctgtagataaatgccttgtttcagtgtggttggatacctggtgtcagataaaagaaactccatccgcacatacagatgcaaactgctcctctagttctgcagagctagttga

SEQ ID NO: 228848 - DNA, 819 bp, Homo Sapiens
actggaagaaaagtcagaagaccaggacctccagggcctcaaggacaaacccctcaagtttaaaaaggtgaagaaagataagaaagaagagaaagagggcaagcatgagcccgtgcagccatcagcccaccactctgctgagcccgcagaggcaggcaaagcagagacatcagaagggtcaggctccgccccggctgtgccggaagcttctgcctcccccaaacagcggcgctccatcatccgtgaccggggacccatgtatgatgaccccaccctgcctgaaggctggacacggaagcttaagcaaaggaaatctggccgctctgctgggaagtatgatgtgtatttgatcaatccccagggaaaagcctttcgctctaaagtggagttgattgcgtacttcgaaaaggtaggcgacacatccctggaccctaatgattttgacttcacggtaactgggagagggagcccctcccggcgagagcagaaaccacctaagaagcccaaatctcccaaagctccaggaactggcagaggccggggacgccccaaagggagcggcaccacgagacccaaggcggccacgtcagagggtgtgcaggtgaaaagggtcctggagaaaagtcctgggaagctccttgtcaagatgccttttcaaacttcgccagggggcaaggctgaggggggtggggccaccacatccacccaggtcatggtgatcaaacgccccggcaggaagcgaaaagctgaagccgaccctcatgccattcccaagaacggggccgaaagccggggagtgtggtggcagccgctgccgcc

SEQ ID NO: 228849 - DNA, 807 bp, Homo Sapiens
ttggggcagtaccggaggagaaagatggcggctaccttactagctgctcggggagccgggccagcaccggcttgggggccggaggcgttcactccagactgggaaagccgagaagtttccactgggaccactatcatggccgtgcagtttgacgggggcgtggttctgggggcggactccagaacaaccactgggtcctacatcgccaatcgagtgactgacaagctgacacctattcacgaccgcattttctgctgtcgctcaggctcagctgctgatacccaggcagtagctgatgctgtcacctaccagctcggtttccacagcattgaactgaatgagcctccactggtccacacagcagccagcctctttaaggagatgtgttaccgataccgggaagacctgatggcgggaatcatcatcgcaggctgggaccctcaagaaggagggcaggtgtactcagtgcctatggggggtatgatggtaaggcagtcctttgccattggaggctccgggagctcctacatctatggctatgttgatgctacctaccgggaaggcatgaccaaggaagagtgtctgcaattcactgccaatgctctcgctttggccatggagcgggatggctccagtggaggagtgatccgcctgggcagccattgcagagtcaggggtagagcggcaagtacttttgggagaccagatacccaaattcgccgttgccactttaccacccgcctgaatcctggggattctagtatgccaataagagatgccctgtactgatgccaaattttaataaag

SEQ ID NO: 228850 - DNA, 1022 bp, Homo Sapiens
ttggatgaaacccaataatctctcaataccttcctatttctcaatagtctttaaaccctaaatctgagtcagtaattctcttacatccttcccaaaaatcagtgtctagggactagttgatctggatgagttatacatgatatttgacttttcataagtagtggaaggtttcactaagtaaaactctcagtttcttggtatctggctttcttatacagatggtgtccatttgctccaccagacaggagttaaaaacctttaaagagcatttaacatgccttttagttttcttatttcataatctacttttctatcattaatcatcttaccaggaataatcaaggcccaggtaggtagaagtttttatatagcctgaatactcacttgacttactgctcattttactttttgcatggaatacagccatttagtcctaatatacataccaatgagacaattaaaaattggttggaagatggagcttatcacattgtgctactacgactttattttttcttgaaaataaagccttgaggatgtgaacataaatgttggtatcataaaacaagtagtaataaaagcataaattatcaaatatcaggtgatcttactatggagaagaaaaaccaatatctagttacagatgaaaaaatgtttaatacaaagagctgaaaatgtagaaattgagttatcttccctttgcaaaatttttacactttaaattagtaattctttgtttgcaaggttttcatccctatgctgttgttttctactacctgttttactcttgttcatactgctactttcccatgtttcctatatgcctcccctatattggagaggataactcgcgttttacatatgtgatagttatgcttaatactaattcacagaagttggctcgatcattttgagattctagtttgctttatctcaaagctttcactgaaggggctgtaactgaaaattattaaatgttagtctttagtcaaatctctgcattgtttcatgcagaaaataaa

SEQ ID NO: 228851 - DNA, 1450 bp, Homo Sapiens
acccccattcatagaatgctgctgctacaggaggggaccagcgctctcccagagagagatccacgtggacacgagtcacctccaaagagctgcgactgtttgagaatctgcccaagaggaaaacccactcaatgggaccctggataacccaggcccgggagtcatagcaggatgtggtacttcagggccctgggcaccctgttgatcacgagcctcccgtcatagctcagggaggcaaacagccacgggtcagccgaggaccagtccacggcatagacgctgtcctcgtgctcctcgtaggtggcgatcacgttgtcctgcaggggctccttgctcttctcttcagaacggtggtcctcctggtcactgatgtcatcgtcgtctaccaagtggccgaagggctccgacgagatggacaccatgttggaaaggatgactctgctgtcactgctgcccgtgaggaccagctggtcatgagagtggttgtagcggacgttccacacccagtgggagtgctcctccagggtcttcacgggttcggtgacatttcgggtgtcccagaacttcaccttacagtcgtctccgcagctggccaagtagtactgcttattgggattaaagtcaaggtcccgcaccagctgtccgtgggcattctctatgcagtagatctggctcatgctccgggtgtcccagccacggagggtggtgtcgttcgctgtggccacctgggtgcagttatgatgtgggctccaccgtcctgaggtgaacttcagttgtcccttcccttccagggacgctgagctggccagcacagcctggctcgagctttcctgtaaatcccacagcaggatatggttatcagccaaggaaatgattttcttcccatctcccattggctcccacacgacacaggccatgttgccatgggctgtgttgtcaaggtgacagagcagctccagggtctgtgcagtgctggatgaatcatcaggggactcgtggctgcctgattccaattccttcggcatcctccacacggctgcacatgtcaggactttgctgtctgaagttctgttgtagcaggtcgtcagcacacctctgtctgcagggctagcgctaatatgccagatttcacccgcttgatggaggaggacatttttatttataatgttgttttcatcgtcaaaatctatgatatggatctgattatcatatttaagagactgcgtcccaaccaaaaaccgaatggcatctgtttctgcagtttgaggtgttaaggcacgtgcctggaactccagcccgtagatcactggtgcatcgtcctccatgctgcggggaagcgacccgaccccggccactcacacgctaaggacctcgctacggccggcgcgtccccacctcgcgggcgtgttcccagcgcccattcattccctccccgcagcaaacgacccaa

SEQ ID NO: 228852 - DNA, 893 bp, Homo Sapiens
acaaaaaagttggcccaagatggctgcctccatagtgcggcgcgggatgctcctggcgcggcaagtggttcttcctcagctctctcctgcaggtaaaagatacctgctttcttcagcctatgtagacagccacaaatgggaagcaagagaaaaagaacattactgtcttgctgatcttgcatctttaatggataaaacatttgagagaaagttgcctgttagttctttaacaatatcacggcttatagacaacatttcctctcgggaagagatagatcatgcagagtattacctttacaagtttcgacacagccccaactgctggtacctgagaaactggactatccacacctggattaggcagtgtctaaaatatgatgcacaagacaaagccctatatacccttgtaaataaggttcaatatggaatttttccagataactttacattcaatttactgatggattctttcataaagaaagaaaattacaaagatgctttatctgtggtttttgaggtcatgatgcaagaagcctttgaagtgccttccacccaacttctctccctctatgttttatttcattgcctggcaaagaagacagacttcagttgggaagaggagaggaactttggtgcatcccttttgcttccaggcctaaaacaaaagaactcagtgggtttcagttcccagttgtatggctatgcacttcttgggaaggtggagttgcagcaagggctacgggctgtgtaccacaacatgcctctgatatggaaaccaggctaccttgacagagcccttcaagtgatggagaaagtggctgcctccccagaagacataaagctgtgtagagaagcgctcgatgtgctggatgcagtgctgaagctctgacttc

SEQ ID NO: 228853 - DNA, 1381 bp, Homo Sapiens
ttggcgcggctagagagatgtcgctgctgcggtcgctgcgcgtgtttctggtcgcgcggaccgggagctacccggctgggtctcttctgcgtcagtcgccccagccaaggcacacattttatgctgggccccgtctgtctgcctcggcctccagcaaggagctcctcatgaagctgcggcggaaaacaggctactcctttgtaaattgcaagaaagctctggagacttgtggcggggacctcaaacaggcagagatctggctccacaaggaggcccagaaggagggctggagcaaagctgccaagctccaagggaggaagaccaaagaaggcctgattgggctgttgcaggaaggaaacacaactgtattagtagaggtaaactgtgagacagattttgtttctagaaatttaaaatttcaactgttggtccagcaagtagcccttggaaccatgatgcattgtcagaccctaaaggatcaaccctctgcatacagtaaaggtttcttgaattcctctgagctttctggacttccagctgggcctgacagagaaggctcactcaaggatcagttggctttagcaattggaaaactgggagaaaacatgattcttaaacgagctgcatgggtgaaggtgccatctgggttctacgttggctcttatgtccacggagcaatgcagagtccctcacttcacaagctggtgctggggaagtatggggccctggtcatctgtgagacgtctgaacagaaaacaaaccttgaagacgttggccgccgccttgggcagcatgtggtgggcatggcccccctctctgttggctccctggacgatgagcctgggggagaggcagagactaagatgctgtcccagccgtatttgctggatccctccattaccttggggcagtatgtgcagcctcagggggtgtcggtagtagactttgtgcggtttgaatgtggagaaggtgaagaggcagcagaaactgaataggttccagagacttttggcccaggaggaatatttacttttagctctggacatcattacaaaaaggaatatttcccaaacctcttcagaccgagaatgcatgggtaaaattattaaatagttgtataataaaaataatttttgccttgtttgcgtaatactggatttagcttttctgtgcctttcaaaaacaacaggtgggccttattgacgtgatagtgtcgtggagaacaggcatcaacaatactgctgctcccttcaacatagatttattatggtatttctgaaatttctaacttatatgttctgtcttacaccttttatgacatgaactcttttgttctgtttttgctttgcgacactgtgaaccgtgcttctgcctcggaacc

SEQ ID NO: 228854 - DNA, 938 bp, Homo Sapiens
ttggcttccccagagccccacagtcttcgttataacctcacggtgctgtcctgggatggatctgtgcagtcagggtttcttgctgaggtacatctggatggtcagcccttcctgcgctatgacaggcagaaatgcagggcaaagccccagggacagtgggcagaagatgtcctgggaaataagacatgggacagagagaccagggacttgacagggaacggaaaggacctcaggatgaccctggctcatatcaaggaccagaaagaaggcttgcattccctccaggagattagggtctgtgagatccatgaagacaacagcaccaggagctcccagcatttctactacgatggggagctcttcctctcccaaaacctggagactgaggaatggacagtgccccagtcctccagagctcagaccttggccatgaacgtcaggaatttcttgaaggaagatgccatgaagaccaagacacactatcacgctatgcatgcagactgcctgcaggaactacggcgatatctagaatccggcgtagtcctgaggagaacagtgccccccatggtgaatgtcacccgcagcgaggcctcagagggcaacatcaccgtgacatgcagggcttccagcttctatccccggaatatcatactgacctggcgtcaggatggggtatctttgagccacgacacccagcagtggggggatgtcctgcctgatgggaatggaacctaccagacctgggtggccaccaggatttgccgaggagaggagcagaggttcacctgctacatggaacacagcgggaatcacagcactcaccctgtgccctctgggaaagtgctggtgcttcagagtcattggcagacattccatgtttctgctgttgctgctggctgctgctatttttgttattattattttctatgtccgttgtt

SEQ ID NO: 228855 - DNA, 1328 bp, Homo Sapiens
  misc_feature (1224)..(1233): n is a, c, g, or t
ttgggtagaaggaccgccgctccggcctcccgcgacttctcgaaggtgggcaggtcccaccttgtggaggatggaggtgaccggggacgccggggtaccagaatctggcgagatccggactctaaagccgtgtctgctgcgccgcaactacagccgcgaacagcacggcgtggccgcctcctgcctcgaagacctgaggagcaaggcctgtgacattctggccattgataagtccctgacaccagtcaccctggtcctggcagaggatggcaccatagtggatgatgacgattactttctgtgtctaccttccaatactaagtttgtggcattggctagtaatgagaaatgggcatacaacaattcagatggaggtacagcttggatttcccaagagtcctttgatgtagatgaaacagacagcggggcagggttgaagtggaagaatgtggccaggcagctgaaagaagatctgtccagcatcatcctcctatcagaggaggacctccagatgcttgttgacgctccctgctcagacctggctcaggaactacgtcagagttgtgccaccgtccagcggctgcagcacacactccaacaggtgcttgaccaaagagaggaagtgcgtcagtccaagcagctcctgcagctgtacctccaggctttggagaaagagggcagcctcttgtcaaagcaggaagagtccaaagctgcctttggtgaggaggtggatgcagtagacacgggtatcagcagagagacctcctcggacgttgcgctggcgagccacatccttactgcactgagggagaagcaggctccagagctgagcttatctagtcaggatttggagttggttaccaaggaagaccccaaagcactggctgttgccttgaactgggacataaagaagacggagactgttcaggaggcctgtgagcgggagctcgccctgcgcctgcagcagacgcagagcttgcattctctccggagcatctcagcaagcaaggcctcaccacctggtgacctgcagaatcctaagcgagccagacaggatcccacatagcagcagcgggaagtgtgccaaggaagctctgtggcgttgtgttattggtagacaccctcagcctcatcatttgactacctatgtactactctaccccctgccttagagcaccttccagagaagctattccaggtctcaacatacgccgttccaccaannnnnnnnnnagccccaccagcttcaggacttctgccaattttgaatgatatagctgcaccaacaatatcccgcctcctctaattacatatgatgttctctgttc

SEQ ID NO: 228856 - DNA, 1027 bp, Homo Sapiens
gatgtgttttcgggggagctgatactcttcaagcaatagccagccgaggtggtggacctggtttccctggatctgcacctgaaggctgtccttggccccaggggcaggattgacggtggtgctagcctggcatcgctgtgaaggatggcagccactgagtatgggtccagaccataggcctccaagttccggaccacggtcacctttttattagacgcttttgtgctagggtgatgtcaattggacagattctccctttcttcacaatgggctcttgtccgggaagggtcacttgataggcaggctgtaatttttccaaacacctggtcagaagactgtcccatggaagcttcatgactgtatgctgttcatttttctctaagatgcagtcacataggatgggatccaatctcacaagatttttgttgtctgcatcaaccaggtcatttttcttggcgtagttaatgacgatcgttcggacctcactgccctccagaaagctccccttcttgtggccagactcctggaagagcagggtcatgctggctgggacacagtagaggggttttatatctggagggtgatagggctgttccctgctaccctcctggatagtctgggaggtcggggagggctcgggtatgacgaaagatgtaatcctcgggtgtttccagtccacagccacaatgctctccacccctttgctcagctccttcacctgtataatctgctcctgctgcatttgctgcaggaacttagagagctttttgtagcttgacttctttatgtccagttgtcgtccttcggggcagcaggagaacatgtggctgccaaggaaagtgctggtgagtaaagggaggtcagcctttttgactcggcacttcaaggcatgtaagaagcattgctgtaacagctcatccatttgttcttgaagcgttttgctatctgtggagtcttggttcaggcccctggtgctggtgtcttctgggtttttcggagagagacttgccaacttttttgtacaaag

SEQ ID NO: 228857 - DNA, 1293 bp, Homo Sapiens
ttgggttgaactccttgctccacgggtgagtttctggtcttacaattgtgtatgaaatggatctgctaaaacttactccactgggtaaatggttgactgagtcaagaggagataatatctccgggctaattgtctttgctgtaagtgtggactggtgcatatttctgacaactgctctgcctgtgcaatgaaaaataacctttaggggtatctttgcggactgattttgttggatggataattggtgttgtgaaacgtgatatgattaaaattatgttggtggatttcttgaatagaatttgtcttatcattcttctttgtgtagaggctttattttctctcttatatttgtacctaaccaactcaggtttttttatttgaactgggttgaatctctgaagaaatctgttcaagaccatgctataagacactgtcagctaatggagctgggaagggtctactctgctgacagagcatttccttgggtgatcatagtttcgaggtagagtttatgatcattcatagctttgtctagaaggagtaaaatatcatggccttaacacaaagggtgctgcgtagaatatgaattgattttggaatcagaacacaagcaccatactgaaggactagcagccaaataactgcctaggatactgatggttgtgaagactgtttcaaatgattggatctttgaaagcttcagcgtgccttagtttctaggatcagaattagttttcctctcacttggccttgcagctaaatggagaaatgtttcaatttctttgaatacttgcacatttcaataattcctttcccgagtataaccactcaagggggagcaaatttggatggatttacgacttcacaggcattgtgaggaaagagcattttccaaggctgttttgataaccctggggtgataagcagtgagccctcacacacttactttgacaatttcacatgcacttgtacttcattatttccctcttcaagagtcgtttctattctagtttctgccccatcccggggaatcctaaaggagaattaattcatctaagtaatctcaaaaactgtaggaagggtgctctccctgagaagcttctcccacagtgctttggtgctgttaccttgaggtggtttggacagtcacggaagttttaggctgtgcatagtgatcatctgttaattttaagtctttatcatttaaagaaacattcctcagtgtaacatttgggagggattctttcctcttgctagtttaagtgtgatttgtactccttgtttgtcccattc

SEQ ID NO: 228858 - DNA, 821 bp, Homo Sapiens
gaaggcgttgtctcctcctccagttcccggcgcttttcctccaccttgcgcttctcctcctggtggacccgcttcaggtgctcaaacttctcatggagctccctttccttctccttcagctccagctctgtctccttcactttgttgacaaacatctgcctcatctcttcctccttcctctgcagctcacttaggaactccttcctcttggcctcgtatgtctcttgtaggctgaagggctggctgtcaccatcgctgtcctgaaagcccatctcctccaacttgcagcgccggtagagctcgtagtgccggctgtgggtctgctcgcggaggtcttccatgttcacccggatcaacatctcccgcagcttcacgaagtcgcagtgattctcattctccacctgcaccactccccaggggtactgccgtgctcggaccagcttgttccccaccttcacctcctcggtgctgcccaccacggcaaagggcagatgtgcattcatgactgcgttaatctctgcaacagcctcatcatccgtggggaactggtagatctggaccccgttgctgaccaactcgcccatgatcttgatcttgaacttgtggagctcgctcttggagatggtgtcagccttggcgatgatgggaataatgttcaccttgctgtctagtttcttcatggtcactagatctagagacttcagggagtgccctgtgggcgtgatgaagtagaggcaaacgtggatccttgtgtcatggtagtcgaagagcgagcggcggatcttcagctcctcctgcagataattttcaaactgcgccaa

SEQ ID NO: 228859 - DNA, 366 bp, Homo Sapiens
ctttgtacaaaaaagttggaaaataactggaacgatgttgacgattttaactggctggcccgggatatggcctccccaaactggagtattcttcctgaagaggagcgaaatatccagtgggactaagcagttgtcactctgttcttcactcctaccaaatactttccacgttggactttcccccttattgggtctcgaagtttacttattgtcacactgtgtatgttttcagcattttaaggctagagattgtaatgggctcctacttgtaatttccattaaattcgtaacaggtataacactaaagcatttttgctattttcgtcatgcctttgagactgagtcttactccgtcccccagcgtgg

SEQ ID NO: 228860 - DNA, 250 bp, Homo Sapiens
ccccctgaaaaaaataagtgcgggcagagcactgcgccgtttgggaacgcaactttgaggagacagtgcggtggacttccctgaagttccttatgacttcccctgaaattgcttccttatcatgggggcaaatgaaagtaaaaggctctaatacaacctataaggactgcaaagtatggccagggggcattcggacttgggattggagagaaacaggaactgatcattctcctggtgtgcacactgcaga

SEQ ID NO: 228861 - DNA, 921 bp, Homo Sapiens
agttggagaagcgagaccttaaaaggcagcgcttcccgcgaaggaccggaaaggagcgcctactaaggacgccgtcgaggtccggggcgcctcaactctatagctctaactggctagaagtgcccaacgtggaatgtttcttttttaaaggcggctcttgaagcgacccggaagcggaagtggaagaaagttctagtggcttgaggtatccgcaggagcggccgggtggcgggaggaaccgttacgggaactgaagttgcggattaagcctgatcaagatgacaacctcccaaaagcaccgagacttcgtggcagagcccatgggggagaagccagtggggagcctggctgggattggtgaagtcctgggcaagaagctggaggaaaggggttttgacaaggcctatgttgtccttggccagtttctggtgctaaagaaagatgaagacctcttccgggaatggctgaaagacacttgtggcgccaacgccaagcagtcccgggactgcttcggatgccttcgagagtggtgcgacgccttcttgtgatgctctctgggaagctctcaatccccagccctcatccagagtttgcagccgagtagggactcctcccctgtcctctacgaaggaaaagattgctattgtcgtactcacctccgacgtactccggggtcttttgggagttttctcccctaaccatttcaacttttttttggattctcgctcttgcatgcctcccccgtcctttttcccttgccagttccctggtgacagttaccagctttcctgaatggattcccggccccatccctcacccccaccctcactttcaatccgtttgataccatttggctccttttttggcagaacagtcactgtccttgtaaagttttttagatcaataaagtcagtggctttc

SEQ ID NO: 228862 - DNA, 778 bp, Homo Sapiens
ccactttgtacaaaaaagttggctcgctgcttaggctccgcggcctccaagctgtagctatgacggcgcgcgggactccgagccgcttcttggccagcgttctccacaacggactgggtcgctatgtgcagcagctgcagcgtctgagcttcagcgtcagccgcgacggcgcctcgtctcgcggcgccagggagttcgtggagcgggaggtgatcgacttcgcccgacggaatccaggggtcgtaatatatgtaaactcgcgtccgtgctgcgtgcccagagtagtggccgaataccttaacggggctgtgcgcgaggagagcatccactgcaagtcggtcgaggagatctcgacgctggtgcagaagctggccgaccagtcgggcttggacgtgatccgcatccgcaagcccttccacaccgacaaccctagcatccagggccagtggcaccccttcaccaacaagccgaccacgttccgcgggctacgcccccgagaggttcaggatcctgccccagcccaggtgcaagcacagtgaagagttgccccaccaactgcagccccaggctttggactgttactccggtaaaggtggttcttcccctttgggattccaagcccaggcaaatggaacccatcaatgggcaagttgacagagggttcttgcttgggataatgaagagctgcctgtttctttccagtgcctgcttctggggggcagtgaccttggtgaaccactcattttttatgcaagttggcatccctaaaacctgagat

SEQ ID NO: 228863 - DNA, 926 bp, Homo Sapiens
aagccagagggaacaatgaagaagcagagagagcgcccccaaaccaaaagcccagagagcaatttccccaccaccaaggggagtggggacgcagcaggtgcagggtgcggctaagtgggatgttagccttgtccaggagggcatgtgtgtatgcgtgggtgggcggggggagctgggaactgaggccaggggaaaactgctccccactcagcccatgggagccctgcagcggctggtgtgctgtgtagtgtggtggtgagggcacaggtggaagatgggggtggcggccagaggcggtggtgatggtgggcctggggaaggggcgggggcggtgggagcggagcaaagctgtccagtcccagaaggaagctgctcctccagtgaggagcaggcggcacgcatgggtcactgctcctcctccgaggactcctgcgagatgccctcctcttcctccttctccagttttttgggtctgccccttggtttccttcctggagttgtggtggttttccgggtcttggcagcacccttgtttttgcttccctttggtcggccccgaggtctcttaggtgttggcacttcgctgggctccttcggaggctgcttgcgcggcctgccccggccccgcttctcagtgccgtccttttcctgcttggaggccaagggctggctggacttcgagctcgactcactcatcttcccttctctaaggagcaggtggaagagtgatggctgggatgcgcgagctcggccgccggcctgcggtgcgcgctccgggttgccgggagcggcggtgctgggcgctgaggaccggcctggctccgccgcggccgccgctggtagcaaatgcggatgccttcttggagccgcgccagcgccagaaatagccccggctcggagtcccaattagaggagcgcagcaccaa

SEQ ID NO: 228864 - DNA, 1441 bp, Homo Sapiens
ttggcccgcacgcaccgcgcagcctgctgtgcccgtgggtcccgagtgctccgccgcccgccccgacccgggcccagccgcctccacggcccgcgctcgtactggagcgaagagcggcctcctgaaggaggggaagggacgtgggggcggccacggcaggattaacctccatttcagctaatcatgggagagattaaagtctctcctgattataactggtttagaggtacagttccccttaaaaagattattgtggatgatgatgacagtaagatatggtcgctctatgacgcgggcccccgaagtatcaggtgtcctctcatattcctgccccctgtcagtggaactgcagatgtctttttccggcagattttggctctgactggatggggttaccgggttatcgctttgcagtatccagtttattgggaccatctcgagttctgtgatggattcagaaaacttttagaccatttacaattggataaagttcatctttttggcgcttctttgggaggctttttggcccagaaatttgctgaatacactcacaaatctcctagagtccattccctaatcctctgcaattccttcagtgacacctctatcttcaaccaaacttggactgcaaacagcttttggctgatgtctgcatttatgctcaaaaaaatagttcttggaaatttttcatctggcccggtggaccctatgatggctgatgccattgatttcatggtagacaggctagaaagtttgggtcagagtgaactggcttcaagacttaccttgaattgtcaaaattcttatgtggaacctcataaaattcgggacatacctgtaactattatggatgtgtttgatcagagtgcgctttcaactgaagctaaagaagaaatgtacaagctgtatcctaatgcccgaagagctcatctgaaaacaggaggcaatttcccatacctgtgcagaagtgcagaggtcaatctttatgtacagatacatttgctgcaattccatggaaccaaatacgcggccattgacccatcaatggtcagtgccgaggagcttgaggtgcagaaaggcagccttggcatcagccaggaggagcagtagtgtgtctctcgctgtcaatgatgagttgacccggtgtgttcttgtatagtcagtggcatcagcacccgtcagccggccttttccttcaggttcgtcaggctcaccggttctcactgtgtctgggaagtaggactgatggtcatcttcatgacaggcggcatctccactaagcctgtgtaactgttccctctttggttttcttagcttttgaatttgaagaagtacttttgaagactcccattttaagaaccgtgcaaattttgctaccaaaagtcttcaccactgtgttcttaagtgaatgttaatttctgaggtttgggactttgtggtg

SEQ ID NO: 228865 - DNA, 284 bp, Homo Sapiens
gtcttgggagagcccagggaagttatgcccaggcccagcctggcttgcggatggggctgggctggtcagtgaggatccccacagtacgggctctggaatcatcctgcctggccaaggtcatgggggcagggtcactgcaggtacttccctgtactccccaaggacaaggctgcaggaagagggatccccaggaaggagtgtaattttacgagacagtgggagtgagatcagccatcagtggggccgaggttctttgaaagacaacagggctggccgggcgcagt

SEQ ID NO: 228866 - DNA, 914 bp, Homo Sapiens
ttggggttgcagccggagccgcccagctcaccgagagcctagttccggccagggtcgccccggcaaccacgagcccagccaatcagcgccccggactgcaccagagccatggtcggcagaagagcactgatcgtactggctcactcagagaggacgtccttcaactatgccatgaaggaggctgctgcagcggctttgaagaagaaaggatgggaggtggtggagtcggacctctatgccatgaacttcaatcccatcatttccagaaaggacatcacaggtaaactgaaggaccctgcgaactttcagtatcctgccgagtctgttctggcttataaagaaggccatctgagcccagatattgtggctgaacaaaagaagctggaagccgcagaccttgtgatattccagttccccctgcagtggtttggagtccctgccattctgaaaggctggtttgagcgagtgttcataggagagtttgcttacacttacgctgccatgtatgacaaaggacccttccggagtaagaaggcagtgctttccatcaccactggtggcagtggctccatgtactctctgcaagggatccacggggacatgaatgtcattctctggccaattcagagtggcattctgcatttctgtggcttccaagtcttagaacctcaactgacatatagcattgggcacactccagcagacgcccgaattcaaatcctggaaggatggaagaaacgcctggagaatatttgggatgagacaccactgtattttgctccaagcagcctctttgacctaaacttccaggcaggattcttaatgaaaaaagaggtacaggatgaggagaaaaacaagaaatttggcctttctgtgggccatcacttgggcaagtccatcccaactgacaacca

SEQ ID NO: 228867 - DNA, 1027 bp, Homo Sapiens
caatctgtccgctcattctcttctaggcattgtagcttatacccctcctctcaccgacgctggtttagacctgtcaagttcttgagcgtcactgctgcacccatgagtccttgcaccagtgcctctcctgtggactttacctgcttggcagtgtggcccatgttcattgcatcattaacccggttttccaggaagcgccaagtgtcctcaaagtctggagaggagtcctgcatcatcaccagctctgttgtgttgtagatggcagccagcatggctcggcgggtgtaccagttaaaatcagtggactggtccccagcgtaatgccacatgtcatccaccatgctggtgagcaggctcaggctggacgggatgttgtgagggagcatgaggatgctgagggcccggggccagtgctcaatgtatgggatcagcattctcagtctggtttccactgcatccctcaggaactggtctgtcttcctcttctccgcctggcccaactgtaccagcttctgctcctcttctagcacacgtgtgagccgggtattgcactgggtcacaaaatgcagtattagctcactgccatccttcccgaacatgctggctgctgcactggagagacccagagactgggctccttctgcaatcgcctctgctgtccacccgtgggcgggcacaaactcaagggctgccgtcaggatgcggtgctgcaactgctcctcactttcatagtcctcctcctcctcgccgccctggtctgtatacctggggggtgaatgagaagactctggatcaggtttttctgccccctgtgtctcagaatgctgctgagaaaatgagttgggaggctgctgcttctgctcatctgaagaccttagccccacagctgaagcatggaaggcacgcggcaccagggcttgtcggcaacgggccacgggcaggcatcgcagctgcaggagcctccagcccgcccggccaagcgcaccagataccgccgccgccgccattttggaagcgggcacgccaa

SEQ ID NO: 228868 - DNA, 1252 bp, Homo Sapiens
actttgtacaaaaaagttggcatggtaggaaccccatactggatggcaccagaggttgtgacacgaaaggcctatgggcccaaggttgacatctggtccctgggcatcatggccatcgaaatgattgaaggggagcctccatacctcaatgaaaaccctctgagagccttgtacctcattgccaccaatgggaccccagaacttcagaacccagagaagctgtcagctatcttccgggactttctgaaccgctgtctcgagatggatgtggagaagagaggttcagctaaagagctgctacagcatcaattcctgaagattgccaagcccctctccagcctcactccactgattgctgcagctaaggaggcaacaaagaacaatcactaaaaccacactcaccccagcctcattgtgccaagccttctgtgagataaatgcacatttcagaaattccaactcctgatgccctcttctccttgccttgcttctcccatttcctgatctagcactcctcaagactttgatccttggaaaccgtgtgtccagcattgaagagaactgcaactgaatgactaatcagatgatggccatttctaaataaggaatttcctcccaattcatggatatgagggtggtttatgattaagggtttatataaataaatgtttctagtcttccgtgtgtcaaaatcctcacctccttcataaccatctcccacaattaattcttgactatataaatttatggtttgataatattatcaatttgtaatcaattgagatttctttagtgcttgcttttctgtgactcaactgcccagacacctcattgtacttgaaaactggaacagcttgggaatgccatggggtttgataatctgccagggacatgaagaggctcagcttcctggaccatgactttggctcagctgatcctgacatgggagaacaaccacatttttctttgtgtgtgcttctagcagctgttcgggaggaccttgacccaatagtgttcccatgctgtttcttgtgaaatgctctcggctatgtagcagcttttgattccctgcataccctaggctgctgcccctatcctgtcccttgtttataacattgagaggttttctagggcacatactgagtgagagcagtgttgagaagtcggggaaaatggtgactacttttagagcaaggctgggcatcagcacctgtccagctctacttgtgtgatgtttcaaggaactcagccc

SEQ ID NO: 228869 - DNA, 958 bp, Homo Sapiens
ttggtgcccggcagcaggagcgacactaccagttgctgtcggcgctacagagcctggtgaaggagttgcccagctctttccagcagcgcctgtcctacaccacgctcagcgacctggccctggcgcttctcgacggcactgtgttcgaaatcgtgcaggggctactggagatccagcacctcaccgaaaagagcctgtacaaccagcgcctgcgcctacagaacgagcaccgagtgctcaggcaggcgctgcggcagaagcaccaggaagcccagcaggcctgccggccccacaacctgcctgtggttcaggcggctcagcagcgagaactagaggccgtggaacaccggatccgtgaggagcagcgggcgatggaccagaagatcatcctggagctggaccggaaggtggctgaccagcagagcacactggagaaggcgggggtggctggcttctacgtgaccaccaacccacaggagctgatgctgcagatgaacctgctggaactcatccgaaagctgcagcagaggggctgccgggcagggaatgcagccctgggactgggaggtccctggcagtcgcctgctgcccagtgtgaccagaaaggcagccctgtcccaccatagccacaggcagcagaagtctgggcagagttcatcttcttgacctttggccactgccttcccagctgcccgcagggggttccccctgctgaggagagaccaggtggaccccagctgcctgtcaccccttcatctgggacttgctgtcaaaccctagatagtctcataaaggggaggctgggccagcctgctgctgtctgcttcaggaccaggcagagagtgaggctgggggttctcacaccttactccaacggggcacatcccaacctgccactggggcccacccgagcgcttgttctggtctcagccggctcccttggcagctgcagccccca

SEQ ID NO: 228870 - DNA, 925 bp, Homo Sapiens
ttggcttgttctgtgttcgcttgggtagaggaagccgtgaggccggagcttaggtcgggaagggatggatcgctgagccgatagcgtccgctaggctgtctgcctcggtacctgttactgctgctacttcctcgtttgacaccttcctggaatctctcttgatttttgaggaaatacctagtaacaaacatgactgagttctggcttatatctgctcctggggagaaaacctgtcagcaaacatgggagaaattgcatgcggcaacttcaaagaacaataatcttgctgtcacttccaagttcaatattcctgacttaaaggttggcacgttggatgtcttggttggcttgtcagatgaactggctaaactggatgcatttgtagaaggagtggttaagaaagtagctcaatacatggctgatgtattggaagatagcaaagacaaagttcaagagaatctgttggctaatggagtggacttggttacttatataacaaggttccagtgggacatggccaaatatccaatcaagcagtccctgaaaaatatttctgaaataattgccaagggagtaactcagattgataatgacctgaaatctcgagcatctgcatacaataacctgaaaggaaatcttcagaatttggaacgaaagaatgcaggaagtttgctaactagaagtctagcagaaattgtgaagaaggatgactttgttcttgattcagagtatctcgtcacattactggtagtagttcccaagttaaaccacaacgactggattaagcagtatgaaacactagccgaaatggtagttccaagtctagcaatgttctttcagaggaccaagacagttacctgtgtaatgtcaccttgtttaggaaggcagttgatgacttcagacacaagccagagaaaacaaattc

SEQ ID NO: 228871 - DNA, 1276 bp, Homo Sapiens
  misc_feature (174)..(183): n is a, c, g, or t
  misc_feature (787)..(822): n is a, c, g, or t
  misc_feature (977)..(995): n is a, c, g, or t
ttggctatgtgacttctcccaaaggatctgtactttctttccttacaacagcttgaaaatcattattttaaaatccttaaatcactgtgtctagatcattttttacattgtgtgccatagacttacccatgggacaacagagctccttcatttttggacaactactgtaatcannnnnnnnnnaggaaaaatggaaggtgccgggggtaatcatggccagtcaataattatataaaggagttcaaatactatagctgtcagttgatgaatttgttatgtagtaaaatgtatgactttgtatgggtttcttcagccctttttctgccactagcaaccagaatagcactttaccttttggttggctagataagtggctgactacctgtttttctcactgtggtgtgattggctaaacaatctcgcattaaaaattcaaatgtaaattgaattcacatgaaaaatcatgtttggttgtaaacctccaatgttttgattctctaatcatgttttcgtcacatgctgagtaaaagtgccttacaatgtaaaaattgtacagtacttatgttcccaagtagcatcatcatcttctgggtagtaattacattgtggtattaatatttagaaaaatagacctcagcagtgtatttactgtacatctcttaagtccttaactgtagttttaataagcatgacattatttgataagtatataacatttacatcatttcaaaaaatactgccgttactgtcttttatgcatattttagcctgaaattttgaagcgtcnnnnnnnnnnnnnnnnnnnnnnnnnnnnnnnnnnnngttattgatattaaacagtgtaatctttgcaagcgtatattgaagattattctggagcatttattgccttaccagaaatgttagtaggaaatgttctttagagtagaaagatagacttgagtttctatacttttaagaagagctctttgttcctnnnnnnnnnnnnnnnnnnntgaattttactttcatctcaagttattaaaaacccacaactgaagtaaattttatttcaagaatcagcagttttagaatttcagatagtacttgctcagaagtccctgctactcaagatattaagagataacaagatctgtagatctgctattgaatcagaatctgggtacttgaacaaatgtgtgaatctcaaatatctcaaagcaaaagaaaaagtgttcaacagtgttgatgcttttttaaaaaaagcgctgaaattagaccaaggtataccggtttt

SEQ ID NO: 228872 - DNA, 547 bp, Homo Sapiens
ctttgtacaaaaaagttggctgacatacttgtataagcggtcatcgttgcgtcatggggcaggcgtggggagcttcctgtcgccttgcgtgggtgtggggcctgggaggaggtcctggggcgtgcacccgccctgggcagtggggaggagagtggcctgagttacttcacccccgcgtgctgctggttaatgtcccgcgtctctgcaccttcgggtgggagcggggactgatctactttcacattctcaagtttttctcatctgcattagaggtgcccagtaggttcccaggttccagcgtgcccctccctcagacacacggacacaatcagccgagaagttcctggtctgaatcacgagaatgtggaggggtggggggtgtcagtggaaaggcataaggctgagctgagaccagttgctggtgaaactgggccaatctggggaggggaacatccttgccagggagtttctgagggtctgctttgtttacctttcgtgcggtggattctttttaactccgtctacctggcgttttgttagaaatgtc

SEQ ID NO: 228873 - DNA, 979 bp, Homo Sapiens
gggggtgggggcagctcggggggcacagcctgcggccacttcggccagagagtggccggctcagtccataggatgatgtcagtttaggctggaggaaaaagggcgccagacaacccgatgcagtgcctgtgaagacttcggggggatcaaagtccggccggggtgggcggagaccctcgggcagctgcacagggcatcttgtgctcactccattgttttccgaggcctgtgtaaaggcgctttgcctggcctggcaggtagaccaaggccaaagctcgtggccagggcctgggcactgagtccccactgaatttggcacaggaaggcggcactcccagcctggcccgtcctgcatggggagccaccacaccgggactgcagtgtttcaccttggaggggaggaagcctgggcccaacggctgaacgggacaggccaggctcacccgaggaaggggacgcaggacccacagcccctgtggtcaggcctgtgggccacgtggagagaaggttccagaacagtgcttgttgacgagcctctccctacaagtcccttcagcagcagctccatccctgagtgtctgcacaagcctgcacgcatgtgtgtatgtgtgccagggcgtgtgtgcaggtgtgcaacaggcacatggcagctgggaggctcaggctgtggggctggggggctgtccgctgggagagtccgggagaagcggggtgtaggggctggggggccggtcaggcccagcggccaggcctggctggctcacggtgtcctcaggaccctacagttttgcttcctgcagcacagagcccttgggagctgatgtcatcagggattcagaataggcctgaatggcctccttatcctttgagccctttttactactactccaaaataaatagcatttctccttgggcatcaacaccccaacttttttgtacaaagttgttctattatgaaaaaagcattgctcatcaattt

SEQ ID NO: 228874 - DNA, 1443 bp, Homo Sapiens
ttggcacctttgacctgggcgagatgttgcttatgcttttggctgcaggtggggacgacgaactaacagactctgaagatgagtgggacttgtttcatgatgagctggaagatttttatgacttggatctatagcaaccttgcgtggcgtgtgaactggtctgctgacctcagacagcagctgtcccctgtggtggtgtggcagtgcctgtgttctctcctaggcaggcctctcaactccaggtgctgtcctaagaatttttacccagggcctgtcttctcaacccctcacctttccctgaggagtgtgttgttttccctgttgaaaaaagttacaaaaataaatcttaaagttagttttttgtaacacgaatttaactgtcagacagttagtgtaggtgtgttgcgtcatctgttttcaaccagattgcatttatggacttttcacacactcattttgaggaccccaggttcaaaagtaaaagcagtggccctgctttggggtccaagaataggagtgatgggtgaagggacctaagctggccaatagccctctgccccagacatgggatgtggatccttgaggtttctggtgaaatctgcacatctgtgtttttatatctgttccctaccctgtaatccctaccacgtgcacttgttctgtggttttggtctcttgtttaattgcacacaagtaatactactgggtaaccagaatcaggtgtgaatgtgttgagattttttactgttttgcatgataggaaaattgagaaagaatacgtataaaagatagagaggcataacatcaatgcagagttggaagttggctcccaagggctgacatggtgtgagtgtgtgggtgtgtgataagcttctcatccctgcatagatgcagtattcttagccttagtagaaaaacctggtttagtggtttaagccttgtgtggcagatagatcttaaagggcaaagcagtatattggtagttgtcaatatagcagtgctagctctgtctatataaatagagaaatggggttagccatagaggttaaaactacctggttatcccatataataacacaaactgggtcttggatacacagttgtatttaatgttttacgatctagcctttccagtacaggcactttctgagaaacctttgtcctcacttgaggcattttgttgtcgggtttttgtgtttgtttttgtgggtatttgcctcattccacccctgagctttcaggtagacagacgtgattcaaaactctgttctaaggtgtttattgtagtggagtaatgggtttgcagtgataagtcatacttttccaccgaaagggagggcttgggaaccctgagattcagctaaagttaagttgttggaagatttcttgattggaaattgtacctttgtgtattgttgctctgtttcctgaaaataactcggg

SEQ ID NO: 228875 - DNA, 704 bp, Homo Sapiens
ttggagatgaggagagctcctcggagggcttggaggctgaggactgggcccagggagtagtggaggccggtggcagcttcggggcttatggtgcccaggaggaagcccagtgccctactctgcatttcctggaaggtggggaggactctgattcagacagtgaggaagaggacgatgaggaagaggatgatgaagatgaagacgacgatgatgatgaggaggatggtgatgaggtgcctgtacccagctttggggaggccatggcttactttgccatggtcaagaggtacctgacctccttccccattgatgaccgcgtgcagagccacatcctccacttggaacacgatctggttcatgtgaccaggaagaaccacgccaggcaggcgggagttcgaggtcttggacatcaaagctgagtcactggacctagctgtgcccccaacctagattggcagcaccaccccagggcagaggactctctgggcacccgctgtgcatggagccagagtgcagagccccagatcctttaataatgcttcccctggtcctgcaacaggcccggtcacctcggccgggcccggggctgaggtcagcctcactgcctgcttattgcctctttctcagaatcctctttcctccccatttggccctgggctcaggggaccaggtggggcgggtggggagctgtccggtgctaccac

SEQ ID NO: 228876 - DNA, 825 bp, Homo Sapiens; identical to SEQ ID NO: 194958
  misc_feature (183)..(243): n is a, c, g, or t

SEQ ID NO: 228877 - DNA, 904 bp, Homo Sapiens
ttggcgtttgtccagtggagccccaaaatagaagcaagatgaatattccattccgcattggcaatgccaaaggagatgatgctttagaaaaaagatttcttgataaagctcttgaactcaatatgttgtccttgaaagggcataggtctgtgggaggcatccgggcctctctgtataatgctgtcacaattgaagacgttcagaagctggccgccttcatgaaaaaatttttggagatgcatcagctatgaacacatcctaaccaggatatactctgttcttgaacaacatacaaagtttaaagtaacttggggatggctacaaaaagttaacacagtatttttctcaaatgaacatgtttattgcagattcttcttttttgaaagaacaacagcaaaacatccacaactctgtaaagctggtgggacctaatgtcaccttaattctgacttgaactggaagcattttaagaaatcttgttgcttttctaacaaattcccgcgtattttgcctttgctgctactttttctagttagatttcaaacttgcctgtggacttaataatgcaagttgcgattaattatttctggagtcatgggaacacacagcacagagggtaggggggccctctaggtgctgaatctacacatctgtggggtctcctgggttcagcggctgttgattcaaggtcaacattgaccattggaggagtggtttaagagtgccaggcgaagggcaaactgtagatcgatctttatgctgttattacaggagaagtgacatactttatatatgtttatattagcaaggtctgtttttaataccatatactttatatttctatacatttatatttctaataatacagttatcactgatatatgtagacacttttagaatttat

SEQ ID NO: 228878 - DNA, 937 bp, Homo Sapiens
tttcatttttcatggttttaaattttaataaagattttaattaagcttcagtcttctaagcagttttaaacttaggtttcgtgatccctttgacctcatactttagatggagtcagttatcttcaaaacatgacaaatttcagaatccattaaaaattattttattcaaattatgttttccaaaagagagggttctgtgctagtcgtctttgaaagttttcataccatttcagaaccacatttgccggaatgaacatttcagatgggcttggtgtcatctgggcctgagagacagcaaatgatgaagcaaaattgtagaaattgtccaacatcttttgtgtgaactgagtgaatgagtcaactgaggatacagcagcattacctacaggagtctgctgagccatactgtctaataattccactgaaattccaatctgagcaacagatggagttcggacaatattcatggctccaaaaggatgttggcttccttctccagatttaagacctgaaattttgaagatggcacttggcttcccattcgtgacaaatcctaggagttgccatactggcattccatttgaatcaggataagaaaagtagacagatcctcccattccctcaggaaatgggattgttcccagcataaaaaccacaacatggttgatactttcataatcaggtaagtcaaaaacaaatttatcctctgccacttgctgtgcagctgtttgcaccagcctccccgccaccaagcagccaaacatggcgacggcagctccgttcagccggcagtgacctgaagccggcgactaggagtcctggggctactgccctagtcgagactaagaaccttccagaatttgcgggagggtgtctgcccctccactacatagtgactgggccagcggcaagaatgcctctgcccccgcgaacccaa

SEQ ID NO: 228879 - DNA, 370 bp, Homo Sapiens
gtgataatgctgtggtttcccagcagggaggtgggagcggggagggggctgcagcatgatgagagccagctgaaggaagagctgcctctcccttcctaagccccttcccaaggtctgccccaccgcccaaaccaaagaccactccgaacaaagtgaggatgtggatgctcttgctgggtccgctgttccgcaggagggaaagaaagggtagctgcactgaccccactgtccccatatacaagggttggggggcaagagcatgtggctactcccagcaagggaaaatgggagagcagtagaaaggggaggaagtgggaagagcagaagatcatatatattaaaaattttttaaaggaagacttaaaatcca

SEQ ID NO: 228880 - DNA, 479 bp, Homo Sapiens
tttgtacaaaaaagttggaagaggcctgtgggacagaacaatcatgtctgactccctggtggtgtgcgaggtagacccagagctaacagaaaagctgaggaaattccgcttccgaaaagagacagacaatgcagccatcataatgaaggtggacaaagaccggcagatggtggtgctggaggaagaatttcagaacatttccccagaggagctcaaaatggagttgccggagagacagcccaggttcgtggtttacagctacaagtacgtgcatgacgatggccgagtgtcctaccctttgtgtttcatcttctccagccctgtgggctgcaagccggaacaacaaatgatgtatgcagggagtaaaaacaggctggtgcatacagcatacctcacaaaggtgttccaaatccgcaccactgatgacctcactgaggcctggctccaagaaaaattggctttctatcttagatctctgg

SEQ ID NO: 228881 - DNA, 1251 bp, Homo Sapiens
ttggcgcgcgttgtttccgcggtagtcagggcagtttctaccgcaggcttaaggaggcttcgggctcctgggatttctgtccgcgctcctggccctcgtccttcgcgccagagcaggttcgcaaactcctcagacccttctgctcccggccgccgctttccgccggggcgagacccccaggttcaaaatgagcctgtttggaacaacctcaggttttggaaccagtgggaccagcatgtttggcagtgcaactacagacaatcacaatcccatgaaggatattgaagtaacatcatctcctgatgatagcattggttgtctgtcttttagcccaccaaccttgccggggaactttcttattgcaggatcatgggctaatgatgttcgctgctgggaagttcaagacagtggacagaccattccaaaagcccagcagatgcacactgggcctgtgcttgatgtctgctggagtgacgatgggagcaaagtgtttacggcatcgtgtgataaaactgccaaaatgtgggacctcagcagtaaccaagcgatacagatcgcacagcatgatgctcctgttaaaaccatccattggatcaaagctccaaactacagctgtgtgatgactgggagctgggataagactttaaagttttgggatactcgatcgtcaaatcctatgatggttttgcaactccctgaaaggtgttactgtgctgacgtgatataccccatggctgtggtggcaactgcagagaggggcctgattgtctatcagctagagaatcaaccttctgaattcaggaggatagaatctccactgaaacatcagcatcggtgtgtggctatttttaaagacaaacagaacaagcctactggttttgccctgggaagtatcgaggggagagttgctattcactatatcaaccccccgaaccccgccaaagataacttcacctttaaatgtcatcgatctaatggaaccaacacttcagctcctcaggacatttatgcggtaaatggaatcgcgttccatcctgttcatggcacccttgcaactgtgggatctgatggtagattcagcttctgggacaaagatgccagaacaaaactaaaaacttcggaacagttagatcagcccatctcagcttgctgtttcatcacaatggaaacatatttgcatacgcttccagctacgactggtcaaagggacatgaattttataatccccagaaaaaaattaacattttcctg

SEQ ID NO: 228882 - DNA, 513 bp, Homo Sapiens
ttgtacaaaaaagttggcgcggaggaaacgggagtgaacggagagcgtagtgaccatcatgagcctcctcaacaagcccaagagtgagatgaccccagaggagctgcagaagcgagaggaggaggaatttaacaccggtccactctctgtgctcacacagtcagtcaagaacaatacccaagtgctcatcaactgccgcaacaataagaaactcctgggccgcgtgaaggccttcgataggcactgcaacatggtgctggagaacgtgaaggagatgtggactgaggtacccaagagtggcaagggcaagaatatgtcctagccagtcaacaaagaccgctacatctccaagatgttcctgcgcggggactcagtcatcgtggtcctgcggaacccgctcatcgccggcaagtaggggccgcctgtctgttgacagaactcactcctctgtcctatgaagaccgctgccattggtgttgagaataataaagctctgtgtttttttctagtgga

SEQ ID NO: 228883 - DNA, 926 bp, Homo Sapiens
ttggctcccgccaggcgctttctcggacgccttgcccagcgggccgcccgaccccctgcaccatggaccccgctcgccccctggggctgtcgattctgctgcttttcctgacggaggctgcactgggcgatgctgctcaggagccaacaggaaataacgcggagatctgtctcctgcccctagactacggaccctgccgggccctacttctccgttactactacgacaggtacacgcagagctgccgccagttcctgtacgggggctgcgagggcaacgccaacaatttctacacctgggaggcttgcgacgatgcttgctggaggatagaaaaagttcccaaagtttgccggctgcaagtgagtgtggacgaccagtgtgaggggtccacagaaaagtatttctttaatctaagttccatgacatgtgaaaaattcttttccggtgggtgtcaccggaaccggattgagaacaggtttccagatgaagctacttgtatgggcttctgcgcaccaaagaaaattccatcattttgctacagtccaaaagatgagggactgtgctctgccaatgtgactcgctattattttaatccaagatacagaacctgtgatgctttcacctatactggctgtggagggaatgacaataactttgttagcagggaggattgcaaacgtgcatgtgcaaaagctttgaaaaagaaaaagaagatgccaaagcttcgctttgccagtagaatccggaaaattcggaagaagcaattttaaacattcttaatatgtcatcttgtttgtctttatggcttatttgcctttatggtgtatctgaagaataatatgacagcatgaggaacaaaatcattggtgatttatcaccagtttttattaatacaagtcactttttaaaaaatttgggattttttt

SEQ ID NO: 228884 - DNA, 344 bp, Homo Sapiens
ccaccccccaaccccaccctccagggccccagagcccctgaggctctttggggggccttgacatggcaggaggcagctgtcagctctgagctcttcccagctgggaaggcccctctcgggggcagccaacaaggatttccgtggcattgtgggctcagtggggggctcccaggccccagcaggccccacagagggagcgtggcttcccctgagcaagcaccgtggcatgatgtggtcgttcaacccaggaactgggggtccggggcaggtcccgggtctcacgaggtgcgtgttgtgtgtgttcgcatgtacatgtgtgagagccaacttttttgtacaaagtt

SEQ ID NO: 228885 - DNA, 1019 bp, Homo Sapiens
gagcaatggcttttcctataatggccaactttgtacaaaaaagttggattcaagtcatgcaggctgtgagaaacgcggggtcgcggttcctgcggtcctggacttggccccagacagccggggtcgtggccagaacgccggccgggaccatctgcacaggcgctcgacagctccaagacgctgcggccaagcagaaagttgaacagaacgcggctcccagccacaccaagttcagcatttaccctcccattccaggagaggagagctctctgaggtgggcaggaaagaaatttgaggagatcccaattgcacacattaaagcatcccacaacaacacacagatccaggtagtctctgctagtaatgagccccttgcctttgcttcctgtggcacagagggatttcggaatgccaagaagggcacaggcatcgcagcacagacagcaggcatagccgcagcggcgagagctaaacaaaagggcgtgatccacatccgagttgtggtgaaaggcctggggccaggacgcttgtctgccatgcacggactgatcatgggcggcctggaagtgatctcaatcacagacaacaccccaatcccacacaacggctgccgccccaggaaggctcggaagctgtgatgggaaggaggcctgcacttggacctgacctcaagcctcagctccagtgggaccttgtaaaatgctccctgtcagagctctccagaatatgcttgttggagatccttcaggcagtaagggagagttttgcctccttacacagtggcctttgcttgcacctccagctggagatgggtgtgccccagaagtaagctttgcatctcttacaagaggggagctacaggggcagccgtggcctaggcccaaactctgctctgagaaaataaatatctgtaccacctgtcataattttgagattttttgctttcagagttacgtaattcctaattcctcttgaaaaagacagtgtgaaatgaggtgaggcctcgatgaaagtaaaaa

SEQ ID NO: 228886 - DNA, 1272 bp, Homo Sapiens
ctttgtacaaaaaagttggccgggtccgtgggattcgcgctccactggtcagctggggtcgctctcgggtggttgggtgttgcttgttcccgctgttccagcgtcgaagaaccattgggtctgccggtttgaacttgttctggaagctgtgcgtcaccgtaatgaggcttgtaattcttgataactatgacttggctagtgaatgggcagccaaatacatctgtaatcgcatcattcagttcaaacctggacaggacagatattttacactgggtttaccaacagggagtacacctttaggatgctataaaaaactaatagaatatcataagaatggacacctttcttttaaatatgtgaagacctttaatatggatgaatatgtaggacttccaagaaatcatcctgaaagctaccattcttatatgtggaataatttttttaagcatatcgatatagatcctaataatgcacatatccttgacgggaatgctgcagatttacaagcagaatgtgatgcttttgaaaacaaaataaaagaagctggaggaatagatctttttgttggaggaattggtccagatggtcatatcgctttcaatgagcctggatccagtttagtgtcaaggacaagattaaagactctagcaatggataccatcttggcaaatgccaaatattttgatggagatttatcaaaagtgccaactatggctctaactgttggtgtggggacagtgatggatgctagagaagtaatgatccttataacaggggcacacaaggcatttgccctgtacaaagcaatagaagaaggagtcaatcacatgtggactgtttccgctttccagcagcatccccggactatttttgtatgcgatgaagatgctactttagaattaagagttaaaactgtgaaatactttaaaggtctaatgcatgtgcacaataaacttgtggatccactattcagtatgaaagatggaaactgaaggagactggagcaaaattcagcttgaatgaacagagcactttttactaagtagtagatgaattttcagctatgcaatatgacaaaacatggggaattttgaagattgtcattttttcattcgagtctctatgttaaacattccatattttgaatatttatatcttgtacttgggtttaagagaagtagctggctctcaagattgactggctatttattataagtactgaagtcacatagccacctataaaacagcatagaaatgtctgcctgtttaaaa

SEQ ID NO: 228887 - DNA, 628 bp, Homo Sapiens
ttgggtttgtggcggacaacatggcggccttcatgctgggctcgctgctgcggacgttcaagcagatggttccttcatcagcttcaggccaagttcgaagtcactatgtagactggagaatgtggcgcgatgtgaagagacgaaaaatggcctatgaatacgcagatgagaggctacgtattaattcactcaggaagaataccattttgccaaaaattcttcaggatgtggctgatgaagaaattgctgccctcccccgggatagctgtcctgttagaatcagaaatcggtgtgttatgacgtcccgtccgcgtggtgtgaagcggcgctggaggcttagtcgtatagtcttccgtcacttagctgaccatgggcaactttctgggatccagcgagcgacatggtaaatgagctccagaacctattgagcttgcagggaagccaagcttgcagttccagcaagcaaagattttttttaatagaccaaaccctaatctctacaggggcccagtacagttgtttggcctacctgatgctatctctaaactacttttaaaatgaagacatttgggtgtttcgtgtcagtgaattatcttttctcttggactttaacaaacatactgttccc

SEQ ID NO: 228888 - DNA, 330 bp, Homo Sapiens
gatggtggccggttcccggaacaggtagctcagggtcatgcccaggcctcggaagagctcagtccacagcagggtgcgggctgcccggtcagtcactgacttcatgtccatctcgggatcctgcatgttcacatacttgtaggtggctgccactgcactgctgtggaggctccggccaccaggaggtcctgcacgtgcagcctgggccagggcccgcagcagcataggcgtggtcaggcagcgcatcttgaagcgccgccgttacttgccttgccaagcaggccagtcaatcgtgagggtgaggctacacccaacttttttgtacaaagt

SEQ ID NO: 228889 - DNA, 895 bp, Homo Sapiens
gtggaagcttcaagggggatggaggatagcaagaagaatgggtgccttggccccagaggcattgtagggagaggaagacaatgtatctcatcagggttctcaacattatgagattatcacacatcaactatctttggaggggctgagtgattgagttatggctctgactcctctctgggggtggagagtgaagatgacaaagaaggccatctgtcccctaggagacacagttgcagtataagacaggacagaagagaacagaaaaacaaatccaactggaaaaaggggtgggagaaggaagtgtgctaggtacacacatccagggagtaggggaagttcccacacttgaggcctccatcctcttgaaatgaccagaattgatccaagtagagatattcctttcttctggaaataaaccttggggatggctaggcaggatgaaaggaaactttacatggagaatgaatcctacaccctggcccatcattccagcctccaaaactggccacacacccactgaagggttccagtcccaggagaggtgtgaggttctggtgaagagcagcaatagtcaaacatcttcccccaggcttgaatgcttttggccatctctgggttgctgtgcccagatgtagagatgggtggagatggaattgaggtaagggaagagattactcaatctatgacagagacccaatccaattctctgcataatcatgagtcctcttaggtcccacctctgtgaggtgccaggctgctgacccactctctaccccacctgtgtaggaatggccatattccatcgtgtgtgtgcatgcctgcacccacatctgtagtatcttgagtgtcatccatcctagggcccaccaggagccaacttttttgtacaaagttg

SEQ ID NO: 228890 - DNA, 1118 bp, Homo Sapiens
ctttgtacaaaaaagttggccaaagaggcggtggtcttcgaggccgtcctgaactgggccgaggcggagtgcaagaggcaggggctgccaatcaccccacgaaacaagaggcatgttctggggcgagccctctatctggtccgaattccaaccatgaccctagaggagtttgccaacggcgctgcccagtcagacatcctgactctggaggagacccacagcatcttcctgtggtacacggccaccaacaagccccgcctggactttcccctgaccaagaggaagggcctcgccccgcagaggtgccaccgattccagtcttctgcctaccgcagcaaccagtggcggtaccgcgggcgctgcgacagcatccagtttgcagtggacagaagggtatttattgcagggctgggcctgtatggctccagctctgggaaggctgagtacagcgtgaagattgagctcaagcggctcggggtggttctggctcagaacttgaccaagttcatgtcagacggatccagtaacaccttcccggtctggtttgaacacccggtccaggttgaacaagacaccttctacacggccagtgccgtcctggacggcagcgaactcagctactttgggcaggaggggatgacggaagtgcagtgtggaaaggtggccttccagttccagtgctcctcggacagcaccaacgggactggggtccagggtgggcagatccctgagctcattttctatgcctgaggtgcccggggaggctgcagcaggtcagcgagtgagtggaggggaagtcaagatgctaactgcttcttgacaccatgaaaggctgctcttaactttgtctctctttgacatgtagtcagctgaagcttgactgtgtagagacattttccacacagccagaacccaaggattggagtcttaggcatctctggtacagtggggtgcacgtctcaggtggaggaagatttacggctcaagacaggccccagatcccctcccagtggcacccacgccacctgctttgatgggttggatcttcctgctacctcttggattctaattggttccaagcttacttgagaccttcccttcaaatctaaaatgggcaa

SEQ ID NO: 228891 - DNA, 899 bp, Homo Sapiens
ttggttaagaatgagtttcttagacttttccaatatgtgattttttttcccatttagaatggtgattttaaatgtgtgagtgcatgtactatcttatctcagatatttgcacccccaatctgcccccaactcccaaaagctagaacactgccaactgatctgttataggtcctttagaaacacataattaacacttaaggttgggtgctgctaattctttgcaaaaatccaaatattgttaagggaccagggagatgccactaccccttgattttccatctaaaaatatacatgtttatgtaaacaaatctttccatatccatagtgacttttcaagtatttaagcctaaagattttgatctcacatttttatacctgtttaaattgctcacagttattacatacacatcagccatcaactaaagttgtactttaaaaatttactacaatatgtacatttctaagtcaaacacttgtgacttttgctttaattccatgaatgttcctgcctccttgatatttgtatttattctttttttctctagagtagaggtataattgtgtgatatttcagaaatacagataaatgattcaaaaagtcacagttaaggagaatcatgtttctttgatcatgaataactgattagtaagtcttgcctatattttcctgatagcatatgacaaatgtttctaaggtaacaagatgagaacagataaagattgtgtggtgttttggatttggagagaaatattttaatttttaaatgcagttacaaattataatgtattcatatttgtactttctgttaaaatgcatgattgcggaattgtttagatttgtgttttattcttgatgaaaagctttgtttgttcttggtttttaagtttgcactccaaat

SEQ ID NO: 228892 - DNA, 628 bp, Homo Sapiens
ctttgtacaaaaaagttggcaacgatatggcaggagccagtcttggggcccgcttctaccggcagatcaaaagacatccggggatcatcccgatgatcggcttaatctgcctgggcatgggcagcgctgcgctttacttgctgcgactcgcccttcgcagccccgacgtctgctgggacagaaagaacaacccggagccctggaaccgcctgagccccaatgaccaatacaagttccttgcagtttccactgactataagaagctgaagaaggaccggccagacttctaagccaggctgggctgccagtgccatgcaagccacagccagccagcccatccacttcttccactcctccccgcaggccccaaggcatcactccggccaccctgtcccgctactgcttacacaggccgggttcccacgcagaggggaggctgctccacccctactctcctcccttgctcccagcagcggaagcgcctctgacccttggcttgagtcccacgtgggggaggaggaggcaggcagcaccagcaggggtccaccaagagcccagaccagcccctctgccctcctacccgggcctcgaagggtgtggcacaggctacgtgttgagtgtggcctac

SEQ ID NO: 228893 - DNA, 1033 bp, Homo Sapiens
actttgtacaaaaaagttgggtctaaaacccctttatgggtttggccagcgtcatggaaagatgtggttactgagatttgggaagaagcatgaagctttgtgtgggttggaagagactgaagatatgggttataaaatgttaattctaattgcatacggatgcctggcaaccttgcctttgagaatgagacagcctgcgcttagattttaccggtctgtaaaatggatgttgaggtcacctggaaagctttgttaaggagttgatgtttgctttccttaacaagacagcaaaacgtaaacagaaattgaaaacttgaaggatatttcagtgtcatggacttcctcaaaatgaagtgctattttcttatttttaatcaaataactagacatatatcagaaactttaaaatgtaaaagttgtacactttcaacattttattacgattattattcagcagcacattctgaggggggaacaattcacaccaccaataataacctggtaagatttcaggaggtaaagaaggtggaataattgacggggagatagcgcctgaaataaacaaaatatgggcatgcatgctaaagggaaaatgtgtgcaggtctactgcattaaatcctgtgtgctcctcttttggatttacagaaatgtgtcaaatgtaaatctttcaaagccatttaaaaatattcactttagttctctgtgaagaagaggagaaaagcaatcctcctgattgtattgttttaaacttttagaatttatcaaaatgccggtacttaggacctaaatttatctatgtctgtcatacgctaaaatgatattggcctttgaatttggtatacatttattctgttcactatcacaaaatcatctatatttatagaggaatagaagtttatatatatataataccatatttttaatttcacaaataaaaaattcagagttttgtacaaaattatatggattttgtgcctgaaaatttaacagcttgagctgtctgaactattttacattttatggggtctcata

SEQ ID NO: 228894 - DNA, 529 bp, Homo Sapiens
ttggcaatacagtcaggatggctaaaggtgaccccaagaaaccaaagggcaagatgtccgcttatgccttctttgtgcagacatgcagagaagaacataagaagaaaaacccagaggtccctgtcaattttgcggaattttccaagaagtgctctgagaggtggaagacgatgtccgggaaagagaaatctaaatttgatgaaatggcaaaggcagataaagtgcgctatgatcgggaaatgaaggattatggaccagctaagggaggcaagaagaagaaggatcctaatgctcccaaaaggccaccgtctggattcttcctgttctgttcagaattccgccccaagatcaaatccacaaaccccggcatctctattggagacgtggcaaaaaagctgggtgagatgtggaataatttaaatgacagtgaaaagcagccttacatcactaaggcggcaaagctgaaggagaagtatgagaaggatgttgctgactataagtcaaaaggaaagtttgatggtgcaaaggg

SEQ ID NO: 228895 - DNA, 1573 bp, Homo Sapiens
  misc_feature (1456)..(1464): n is a, c, g, or t
ttgggtcggcgcgagaacaagcagggtggcgcgggtccgggcatgaagctgggccgggccgtgctgggcctgctgctgctggcgccgtccgtggtgcaggcggtggagcccatcagcctgggactggccctggccggcgtcctcaccggctacatctacccgcgtctctactgcctcttcgccgagtgctgcgggcagaagcggagccttagccgggaggcactgcagaaggatctggacgacaacctctttggacagcatcttgcaaagaaaatcatcttaaatgctgtgtttggtttcataaacaacccaaagcccaagaaacctctcacgctctccctgcacgggtggacaggcaccggcaaaaatttcgtcagcaagatcatcgcagagaatatttacgagggtggtctgaacagtgactatgtccacctgtttgtggccacattgcactttccacatgcttcaaacatcaccttgtacaaggatcagttacagttgtggattcgaggcaacgtgagtgcctgtgcgaggtccatcttcatatttgatgaaatggataagatgcatgcaggcctcatagatgccatcaagcctttcctcgactattatgacctggtggatggggtctcctaccagaaagccatgttcatatttctcagcaatgctggagcagaaaggatcacagatgtggctttggatttctggaggagtggaaagcagagggaagacatcaagctcaaagacattgaacacgcgttgtctgtgtcggttttcaataacaagaacagtggcttctggcacagcagcttaattgaccggaacctcattgattattttgttcccttcctccccctggaatacaaacacctaaaaatgtgtatccgagtggaaatgcagtcccgaggctatgaaattgatgaagacattgtaagcagagtggctgaggagatgacatttttccccaaagaggagagagttttctcagataaaggctgcaaaacggtgttcaccaagttagattattactacgatgattgacagtcatgattggcagccggagtcactgcctggagttggaaaagaaacaacactcagtccttccacacttccacccccagctcctttccctggaagaggaatccagtgaatgttcctgtttgatgtgacaggaattctccctggcattgtttccaccccctggtgcctgcaggccacccagggaccacgggcgaggacgtgaagcctcccgaacacgcacagaaggaaggagccagctcccagcccactcatcgcagggctcatgattttttacaaattatgttttaattccaagtgtttctgtttccaggaaggatgaataagttttattgaaaatgtggtaactttatttaaaatgatttttaacattatgagagactgctcagattctaagttgttggccttgtgtgtgtgnnnnnnnnnaagttctcatcattattacatagactgtgatgtatctttactggaaatgagcccaagcacacatgcatggcatttgtttccacacgagggcatccctggggatgtggct

SEQ ID NO: 228896 - DNA, 1091 bp, Homo Sapiens
ttggctgatttagaagtgaacaacttggtaacatccctagactccactcatgaacgcagaattattacctgctgtttgctttctgaaagaatttcagaaatcagagcaaatgtgtctttaggcagattcagctccttttaatatttttctcttggcccactctctttgcctcccctgaatctgtgtggtactatagcagctctactctgtgcaccatgctaggaagcttcctttttggcagaatatgtttggcagcaaagctatagagacaggtgcattcagaacatcctgggcaccagtcatgagtcttactgtgtcaaaaatctgaaaacacttgctgagaaccaaatttattccattggaaaaaccctctgtggagctataagcctcttggactcttcttcctagattaaggcttgcatttccctccctgtttcagtaaaagatgatgaaagccactatcaatcctcactgctgagtggcagggagaagcagcaccactctcagctcttttctaatcttgtaacttagtgctagaagtctctccaggctattaccatgggcatttgttctctgttggagctgtaagcagatgaacccaagtagagaagatagatcttggaaggagagatccattgagtccagaagccagatcagcaaatggaggaacctcggaggtgaccagaaagatctccatcggttgcccaaggctgtaagtagtgatggttttagcgatgaataacgtaattggctatgaagtactgtggcagagctgctgttttctgaaggtgagaagccatttttagctcagagcaacccttaagagaacttttggcagattttgttggcattattgaaatatatatagaaaagttgctgattgcaatggttatgggaatggaatttaatgacatttgtaatttattacactcattggtttttattgattatagtattgtctgactttttattttctactatggttcctttagcagaaaagtaacttttgtgcatatattgaagtggtttttcagctattgattctttaggtagaaatttattaacaaatgtgattctttgagaaagtatga

SEQ ID NO: 228897 - DNA, 913 bp, Homo Sapiens
tttggcagcttgcaaagtgaacactccaggggagatgcagggagggaggggtgtagatctggggagcccttctctccctctctgcccgcaaggaaggcacagggtgggaatgggggtgccttcatgagaccccctgccatgccacacccccttcacagtcatgtgagatggggccagaggggcccaggctctagggccaggggagtggggagggagggaaataaggcctcaggtgggggttgccaccccctctagtggctggtgaagagcagtgggcccagagcagccacccgccaggttgctcccaccctagcctgggtagggatcctcatcccagagacacagctgcctctggggcacgtagaagtcgaagctgtagctcttctggcagctgcggatgccacacttgtagggcgtgggccggtcgcggctgtggcagtacttgagcatgcaggggtaccaggccaggctcaggccatagcggcagacgcagggcttcccgcggtcccccacctgcctgcagcgaggcagctccgcctgctctgaggccttgggcagagcctcgaacacagaactgtccacaccttgctccagccagaaccggacatcctcctggcgggtgtagatggcatccacggcctcggcacacacgttgtggagatgggggctcagcagggccccctggctgaagttgacagcgacatccatgtgcagatgctccagaccccgaacctcctccgcctgccgcactgcccggggatttttctgccggagcttggccatggcctcactggggatgatctcattgtgctgcagctgggtgacaaagcagagggcctggaactgactctgccccttctccagctcccccaggatcagggcccggaagaccttcacatcctgaagaagccaa

SEQ ID NO: 228898 - DNA, 724 bp, Homo Sapiens
gggtcctggggttttgtgctgggcaggggctgcccggggagggggaatacagggggaggcactttaggacaccccttaggctgtggagggtgtcagctgggcctttgaagccactaaccactggttcccatcatggagagccctgtgtggggcacccaagggggtttcctcctggaagggcccccaacccaagtgtcagagaagctggcaagagctgagggactgaggtgccatgacagcagccacagcctccagggacccaaacaggcccagctaccagcctggcactgagcatgccatctgctttaggccctggctggcgggcatgtgggcaacttgctccctcagtgcagggggctgggaggcacagatgcaggctcagcactacaaactcaaaacccccatgagagggctcagtcttatgggaaatgcctccaaccgagcccctttgccccaacacactcttcgtctgcctactgaagaaacttctgtaaatagcagagacttgagggaccccttcctggggtacgtgtatttgtatttttctgtttgggtgtttgtgtgtcccagtgggaccacctccccagggagacgaggcaggtgggcgggaggcccggcaggcgccgttacttcttcacgatctggatgacgtcctcatgctccatggtgtgggtcaggcccacccgctgcggactgtacttggtgaggggtgccccacacccaa

SEQ ID NO: 228899 - DNA, 886 bp, Homo Sapiens
ggcaggtggcagaggctcccaattcagttaagagcaggaggctgaatgcccaggtccaggaagaacaaaaaggggattttggaggtaggcttttttgttgtgttaaaaaacaggcacattatccatctccttgtggcccccgagctgctggcctggccccctgatccttcccctctccccacaaaaccaaaaggagtaggaagggaggcagaagatgagaaattccaagggtggggaatgcttcagtcactggagaccgaccgtaagagtgagccaggagagcaatgggaataacaaggtgaagctactgttccccctggggtggggtggaatgggacagggcagaaccaggagggtgaccgagaacatcctgactccagaaaagaacactctgtagcaggaacacagggccgcagagagccactctggaggaaagaggtgaggctatgcggcacaggggcatgaaaagctccttgtggacgtggcctcagcttgctcgctcccagctccctggcctggcttgcctctagaggacaggaaaactctggagaccagaggggaggcagaacacagagaagtgagctgctctcccactctttctaggaggacactgtttgaaccctgtgatcaccaggggctgggcccaaggcaagcagagtgaatgcacttaatggagagcagagagaaactgggccacacgcacgcctaggggcagtgtgttgctcctttctccctgagggcctggggccagaggtggtcagagctgccacctcagcttgcagctgccaaaggcaggctggcacaaccaccccaaggttctctggatttgtgaaggagaggaggaagaagggaaagatgggtatgaaatatgaagtggaggagccaa

SEQ ID NO: 228900 - DNA, 264 bp, Homo Sapiens
cccataaaagacaactttgtacaaaaaagttggggcagctataaccagctatgagaaatcagatggtgtttacacgggcctgagcaccaggaaccaggagacttacgagactctgaagcatgagaaaccaccacagtagctttagaatagatgcggtcatattcttctttggcttctggttcttccagccctcatggttggcatcacatatgcctgcatgccattaacaccagctggccctacccctataatgatcctgtgtcc

SEQ ID NO: 228901 - DNA, 1158 bp, Homo Sapiens
tacaaaaaagttgggttatccatctcctaagccaccaaccagtatgttcgctagcactttctttatgcaagatgggacccacaattcttctgacctttggagttcatcaaatgggatgagccagcctggttttggtggaattctggggacctccacttcccacatgtctcaatccagtagttatggcaaccttcattcacatgaccgcttgagttatcctccacactcagtttcaccaacagacataaacacgagtcttccaccaatgtccagctttcatcgcggcagtaccagcagttcaccttacgttgctgcctcacacactcctcccatcaatggatcagacagcattctaggaaccagagggaatgctgctggaagctcacagacaggtgatgcacttggaaaggctttggcatctatttattctcctgaccataccagcagtagttttccgtcaaatccatcaacaccagttggatcaccttcacctctcacaggtaccagtcagtggccaagacctggagggcaagcaccttcatccccaagctatgaaaactcactccactccctgcagtctcgaatggaggatcgtttagacagactggatgatgcaatccatgtgctgcggaaccatgctgtgggaccttccaccagtttgcctgctggtcacagtgatatacatagtttattgggaccatcccataatgcaccaattggaagcctcaattcaaactatggaggatcaagccttgttgcaagcagtcgatcagcttcaatggttggaactcatcgggaagactctgtcagtctcaatggcaatcattcagtcctgtctagtacagtcactacttcaagcacagacctgaaccataaaacacaagaaaattatagaggtggcttgcaaagtcagtctggaactgttgttacaacagaaatcaagactgaaaacaaagaaaatgatgaaaaccttcatgaacctccttcatcagatgacatgaagtcagatgatgaatcctcccaaaagatatcaatgtttcatctagaggcagataagcagtactaatgaagatgaggatttgaaccctgaacagaagatagaaagggagaagagaggcggatggctaacaatgccagagaacgcttacgcgtgcggga

SEQ ID NO: 228902 - DNA, 923 bp, Homo Sapiens; identical to SEQ ID NO: 194960
  misc_feature (303)..(318): n is a, c, g, or t

SEQ ID NO: 228903 - DNA, 953 bp, Homo Sapiens
gccaactttgtacaaaaaagttgggttggctctggtgctggtggccgctctgtggggtggcacgcagccgctgctgaagcgggcctccgccggcctgcagcgggttcatgagccgacctgggcccagcagttgctacaggagatgaagaccctcttcttgaatactgagtacctgatgccctttctcctcaaccagtgtggatcccttctctattacctcaccttggcatcgacagatctgaccctggctgtgcccatctgtaactctctggctatcatcttcacactgattgttgggaaggcccttggagaagatattggtggaaaacgagcagttgctggcatggtgctcaccgtgataggaatttcactctgcatcacaagctcagtgagtaagacccaggggcaacagtctaccctttgagtgggccgaacccacttccagctctgctgcctccaggaagcccctgggccatgaagtgctggcagtgagcggatggacctagcacttcccctctctggccttagcttcctcctctcttatggggataacagctacctcatggatcacaataagagaacaagagtgaaagagttttgtaaccttcaagtgctgttcagctgcggggatttagcacaggagactctacgctcaccctcagcaacctttctgccccagcagctctcttcctgctaacatctcaggctcccagcccagccaccattactgtggcctgatctggactatcatggtggcaggttccatggactgcagaactccagctgcatggaaagggccagctgcagactttgagccagaaatgcaaacgggaggcctctgggactcagtcagagcgctttggctgaatgaggggtggaaccgagggaaaaaggtgcgtcgaattggcagatgcaggaaatgagctgtctattagccttgcctggccccaccc

SEQ ID NO: 228904 - DNA, 630 bp, Homo Sapiens
actttgtacaaaaaagttggggagcacatccctgtactgaagtgaaggatttccagccttatttcaaaggagaaatcttcctggatgaaaagaaaaagttctatggtccacaaaggcggaagatgatgtttatgggatttatccgtctgggagtgtggtacaacttcttccgagcctggaacggaggcttctctggaaacctggaaggagaaggcttcatccttgggggagttttcgtggtgggatcaggaaagcagggcattcttcttgagcaccgagaaaaagaatttggagacaaagtaaacctactttctgttctggaagctgctaagatgatcaaaccacagactttggcctcagagaaaaaatgattgtgtgaaactgcccagctcagggataaccagggacattcacctgtgttcatgggatgtattgtttccactcgtgtccctaaggagtgagaaacccatttatactctactctcagtatggattattaatgtattttaatattctgtttaggcccactaaggcaaaatagccccaaaacaagactgacaaaaatctgaaaaactaatgaggattattaagctaaaacctgggaaataggaggcttaaaattgactgcca

SEQ ID NO: 228905 - DNA, 593 bp, Homo Sapiens
agaatcccttatagtccttacaagagaatttccgctgcctgtgcactcatgaaaagggctttggctttaagggaagcagcttccaccgcatcatcccccagttcatgtgccagggcggtgatttcacaaaccacaatggcactgggggcaagtccatctatgggaagaagttcgatgatgaaaactttatcctcaagcatacgggaccaggtctactatccatggccaactctggcccaaacaccaatggctctcagttcttcctgacatgtgacaagacagactggctggatggcaagcatgtggtgtttggagaggtcaccgaaggcctagatgtcttgcggcaaattgaggcccagggcagcaaggacgggaagccaaagcagaaggtgatcatcgccgactgtggggagtacgtgtgaggcggcactctctctgcttccccctccgctcttgaccttgcatatccaggaaggaactgccagcctcagaggaggcagcaccgagggtgcctgtttgaagcagcagcatttgggatatgtgcccttcctcagggtctgcttggagcagctcctctgcaggcacaccctgga

SEQ ID NO: 228906 - DNA, 1231 bp, Homo Sapiens
ttggagaattcttgcgtcctcttctccctgacttactcactatgctgcttaaccaaactctctcaagactactttgtgctgctagtggggcgagcacttggtgggctgtccacagccctgctcttctcagccttcgaggcctggtatatccatgagcacgtggaacggcatgacttccctgctgagtggatcccagctacctttgctcgagctgccttctggaaccatgtgctggctgtagtggcaggtgtggcagctgaggctgtagccagctggatagggctggggcctgtagcgccctttgtggctgccatccctctcctggctctggcaggggccttggcccttcgaaactggggggagaactatgaccggcagcgtgccttctcaaggacctgtgctggaggcctgcgctgcctcctgtcggaccgccgcgtgctgctgctgggcaccatacaagctctatttgagagtgtcatcttcatctttgtcttcctctggacacctgtgctggacccacacggggcccctctgggcattatcttctccagcttcatggcagccagcctgcttggctcttccctgtaccgtatcgccacctccaagaggtaccaccttcagcccatgcacctgctgtcccttgctgtgctcatcgtcgtcttctctctcttcatgttgactttctctaccagcccaggccaggagagtccggtggagtccttcatagcctttctacttattgagttggcttgtggattatactttcccagcatgagcttcctacggagaaaggtgatccctgagacagagcaggctggtgtactcaactggttccgggtacctctgcactcactggcttgcctagggctccttgtcctccacgacagtgatcgaaaaacaggcactcggaatatgttcagcatttgctctgctgtcatggtgatggctctgctggcagtggtgggactcttcaccgtggtaaggcatgatgctgagctgcgggtaccttcacctactgaggagccctatgcccctgagctgtaaccccactccaggacaagatagctgggacagactcttgaattccagctatccgggattgtacagatctctctgtgactgactttgtgactgtcctgtggtttctcctgccattgctttgtgtttgggaggacatgatggggggtgatggactggaaagaaagtgccaaaaagttccctctgtgttact

SEQ ID NO: 228907 - DNA, 665 bp, Homo Sapiens
ttggctgaaggccgacgccaagatggcggtgctgtcagctcctggcctgcgcggcttccggatccttggtctgcgctccagcgtgggcctggctgtgcaggcacgaggtgtccatcagagcgtggccaccgatggcccaagcagcacccagcctgccctgccaaaggccagagccgtggctcccaaacccagcagccggggcgagtatgtggtggccaagctggatgacctcgtcaactgggcccgccggagttctctgtggcccatgaccttcggcctggcctgctgcgccgtggagatgatgcacatggcagcaccccgctacgacatggaccgctttggcgtggtcttccgcgccagcccgcgccagtccgacgtcatgatcgtggccggcacactcaccaacaagatggccccagcgcttcacaaggtctacgaccagatgccggagccgcgctacgtggtctccatggggagctgcgccaacggaggaggctactaccactattcctactcggtggtgaggggctgcgaccgcatcgtgcccgtggacatctacatcccaaggctgcccacctacggccgaggccctgctctacggcatcctgcagctgcagaggaagatcaagcgggagcagaggctgcagatctggtaccgcatgtag

SEQ ID NO: 228908 - DNA, 1251 bp, Homo Sapiens
  misc_feature (973)..(1022): n is a, c, g, or t
atgtgagccaccgcacccagcctgagtttctctttctctctttttaactttattttttgaaaaacccggtagactttgtggggagcatttttgttgataattttactgatctaaagctgagtgattttttaaaagaatttgaatttggcttcctcaccagtaatatgtctccttgcttctttgatgtgatagttttgagatgggtgagaatctaatagatctgtggttgaatttgctgtgttgttatgaagtccaccctgtgggcacaataacataactgttggtaggagttgtttgagctattctggagattatttggtaaagtatactaaaagccttaaaaccatgtatgtgcgctgtttgaaccagtaagccacttctttgacattagaagacattagaagaaataatcagccttgcataaaacttatggatgaaagtattcatcacaatattatttataataaaaaattgcaaatgttataaatgaacaattgggaaatggttaaagaagtgatggtgcattgtgtggtagaatattatgcatatgtttaaagaatcatattttctaagattatttggaagcatgtttggtaatgtcaagtggagtaccccagatacattttagacatttatcgtcatcatctgctctgagtggaaggccgttcagagaggctagaggttcttattctggctataaattatgtgagtaaaattgtgctaaccagttaaaagtactgtacacccatgctcaatatatagtcctggaaatagcaattgaaacatgtcttctcacaagagaaaatgacagttttaatgatgtatttgatgaatttaaactttaagtcaggtgctgccaattggaaagaagacttgtggtgttttaagttgctgtggacacttttaagaaacttacaacccatggaacccttgtttatcgccatgcaaattacaatcttgaatgagtgttttnnnnnnnnnnnnnnnnnnnnnnnnnnnnnnnnnnnnnnnnnnnnnnnnnnatggaattctccattaactgtggattttactaaatagaattactggtgaagcagatttatccatcgagactatctggtatgcgttatgtatgtagtctgttgctgctgaaagatgtctgtgtgcctgtatcaacatgtgacttcatgtaaagtttctttgtgttcacagttcttagcaaatgcatttaccatccatagatagccagcagtggatgttactcctggaaaa

SEQ ID NO: 228909 - DNA, 1315 bp, Homo Sapiens
ttggggttcatttactcttaatctttatgccctggagaagacctacttgaacagggcatattttttagacttctgaacatcagtatgttcgagggtactatgatattttggtttggaattgccctgcccaagtcactgtcttttaacttttaaactgaatattaaaatgtatctgtctttcctagtatgtttttatcttctcatgtattatccatggttttctctgtttgtgacagattagtaaaatttaatgagccctctttcttgtggccgtttctccatagttttaggttttgatatgtgtttactagcttgcctgtgtctggtacatctcatgacctcaattccctcacctgaaataggaaatgagaatgtttcattgtagccccaagcggtcatgtcaacctagtgcctagtcataattaattgacttttcctgtattacttctttttttaagtataaaccaatgatcctttggtagtcaagaactcttaggaacattgccttttggacatgtaaaatatttaggatttgaccacacaatggctatgaaaatgcaagtagtttcctcgcgtgacctcaccatgattcacatacgtgccactgtttgaaatctggtctgtttgcatttctgttatgacagagagatgatgtttgcatttctgttatgacagagagatgatgaaagtaggcagggctgtgttcctttgtgtagcctgtatatattttccatatgtagagccctgattaacttcaaggacaaacactggctggagaaagccagactgatgggaatgagactttggccaaaaatcccaaaacatcattttcaatcagtagagaagtgcttagggttgaaaattgatttcatttgctactgaatttggtaaatcctgggtaacttttatcaagatgaagacattttaccctacctactctagaaatatacaacaatgttatattttacactccttggaaacatttgaggaaaaaaatgcaatttgcacttcactttgttggaatatcccatagcactcaataaactcagctgctagagtgccgatgtcaggagggctgcgtcgggtaatgcgtgtggctgaatgggcataaccactgtggcttcttgtgctgcagaagctcgttgacaagactgagggaggatttcaagagcaaccaagtaaagtcatgcattttctaattttgtgtatatggaatatatttttaaatagagatttttctacctttagatattgtgttaatattgctattacctaagttaagcactattgtctgtgctagtaacaaaaagaaaag

SEQ ID NO: 228910 - DNA, 726 bp, Homo Sapiens
gatgagcaatgcttttttcctaatagccaactttgtacaaaaaagttggctctgctcatcacacggccttcggcactgtagctttgggtggtgggctgcagattaattttgtaaccaccttaagaaaaatacggaactctaactccttgccactcaagaaatgtcctccctttcagaatatgccttccgcatgtctcgtctcagtgcccggctatttggtgaagtcaccaggcctactaattccaagtctatgaaagtggtgaaactgtttagtgaactgcccttggccaagaagaaggagacttatgattggtatccaaatcaccacacttacgctgaactcatgcagacgctccgatttcttggactctacagagatgagcatcaggattttatggatgagcaaaaacgactaaagaagcttcgtggaaaggagaaaccaaagaaaggagaagggaaaagagcagcaaaaaggaaatagtgttggtccctcaagagggagactttcttcctcagtggcggagagaagaaagtgcatttattgtctttccacatattggaggaatgtcatcttcctaaatgaagtttatttggaggaacacagtcatctccttggtgaaatctaatccggttacattgtggctggtttcttgaacacattctaactgtgcaaaattatcttggccttggccgtgtaatgtgaggttttacctgattctctaatga

SEQ ID NO: 228911 - DNA, 633 bp, Homo Sapiens
ctttgtacaaaaaagttgggttctgacgatacatcgttcataaggcacagcacatcgcaagatgaacagttgttaataaaagctgttgctggaaacttgctttaggaacagctcaagaaccttggagttcatatttcacaaatattaataaatataagtccaagagctgtcagcctaatctgtaggagcagaacctctgattgaccaaaaggcatatgggtttaggttggttttttgatgtcatatgtctctgatggggctgcaagtgctacctcgcgcttgtacactgctgctgtggggctccgcgcctgccggtgaagagctgcagatgccgagaagccagcaaacacagggcccactggaaaaaaatagttttttcattagtatttctcgggaggacccaaaagttaaggtcagcttgttcactgtaatttctggaagaagttcactcagaccttcctgaattcagatcatctcagaagtctggagggaaatctggcgaaaccttcgtttgagggactgatgtgagtgtatgtccacctcactggtggcacccagaaacttacttccttgtattaagtgcacttcttgtatttctaataagatgactttccagaaagtgagatttgttat

SEQ ID NO: 228912 - DNA, 407 bp, Homo Sapiens
actttgtacaaaaaagttggcaccgctttcccagcccgcttgcacctcggcgatccccgactcccttctttatggcgtcgctcctgtgctgtgggccgaagctggccgcctgcggcatcgtcctcagcgcctggggagtgatcatgttgataatgctcggaatatttttcaatgtccattccgctgtgttgattgaggacgttcccttcacggagaaagattttgagaatggcccccagaacatatacaacctttacgagcaagtcagctacaactgtttcatcgctgcaggcctttacctcctcctcggaggcttctctttctgccaagttcggctcaataagcgcaaggaatacatggtgcgctagggccccggggcgtttccccgctccagcccctcctctatt

SEQ ID NO: 228913 - DNA, 383 bp, Homo Sapiens
ttggcgcctttcttggccagaggcgccggttggactcacgggcggggcatgatggtggtgggtacgggcacctcgctggcgctctcctccctcctgtccctgctgctctttgctgggatgcagatgtacagccgtcagctggcctccaccgagtggctcaccatccagggcggcctgcttggttcgggtctcttcgtgttctcgctcactgccttcaataatctggagaatcttgtctttggcaaaggattccaagcaaagatcttccctgaaattctcctgtgcctcctgttggctctctttgcatctttatatattatactgagtcagtgtcaccacctgttttatcctctccacggttggtctgtactacttcaactaaa

SEQ ID NO: 228914 - DNA, 904 bp, Homo Sapiens
ttgggtcggtgatcgagaagcactcccacagccgcatcgagtacatgatcaaggccaaaagccagttcaagcggcggtcaacagccaacaacgtggagatccacattcccgtgcccaatgatgccgactcacccaagttcaagacgacggtggggagcgttaagtgggtccccgagaacagcgagatcgtgtggtccatcaagtccttcccgggcggcaaggagtacctgatgcgggcccacttcggcctgcctagtgtggaggccgaagacaaggagggcaagcccccgatcagtgtcaagttcgagatcccttacttcactacctccggcatccaggtgcgctacctgaagatcattgagaagagtgggtaccaggccctgccctgggtgcgttatatcacgcagaatggagattaccagctccggacccagtgaggggctgtcgcagccaacaccccggcctcggggctcctggtggcagcaccaggggacacacctgccaaacccaccagatggaggggccctccctggtctctggccaccctcccagcctctgcccagggacccctgccttccccaggccatctgctctgccgtcgacactcgtctcagaagcccctttcccagaagaggctggtcttcaagaagtctcgtttctttgcccctgaagtcagtttcaggggaaggatgtgaaatttttccgtgtagaggttacagccttttatgctgttgagctcccaggtaccaaaaagcttggctaacgcttgccagccagccagctgcaggtggcatctgccacgaaggaagcgccagcctcgccaggccagcaggggcgtcgttttgttgccattttgttgaacgttatgggtttatggggtgttcctggaacttgtctttgtgca

SEQ ID NO: 228915 - DNA, 1301 bp, Homo Sapiens
ttgggttaaaaggggtgtggcagctcccatcaggtctggaggtggtctataagcacagttgacagttgtgcattgggatgggtggagaaagacgacaagagagcagagaatctgctgatgtggctgcgcttacttttagtgactttatgtacttatattaacagctggaaataggttgttgggttttgagcaggctgttatagtgaggaatgttcatttttaaatgttcctaacagattttgcttttgaaaaatgcttgttacatgaataatttgtggaccagggattgcttttctgaaggcagtatagggaacatgaatattcaagatgaaatacaaaaattatgtttaagggtcatagtgtataagtagcttcctaggaaaccctttgtgtatcttttcagactggggtgggggctgagcatgcttgtgcagaaagaagccatagccagaaaggacagaatctctcccccactcccttgccccataaccaaacataagctagctagtcttgtctaatagatgggatttactataggtgaagatagccctcatattcaaggacagaagctctggcaggagtaaattagcaaagcagaaatagtaccctttcattcttggaggtgctttgaaattttaggtagaatataatcgaaattatggaggttccttagtgctcaataatataagacctggtgttattagaacgagtctttcttataaactaacagagcaggtatatgcctgttagatcttagctgtggggttcctttactattgggtgaatcattaggtataaaaaataatcatcaaccaggcaaattactttgcttcctagctgatgtcatcccacattggtacaggtgttattcagtactgggtggttcagcagggaagccaggtgggaccagtgtgtctgtcatgaaaccactaactgcattcctgactgaagagccatctgtcatttattggggaaggtcttcagttgagctctcagccttagtaaggaagcacgtggaggagggacggaggaagttcccttgctgggcatgcttcgtagagggccaggagcagcaggtcatgtgcacatgccgttgcagcacaagcttatgcttcccgtagccgtggcttttcattctgcacagtcccaggtcccagctcccctcttatggtttctgtcataatgtgctttatctgattgactccaaacatcccgaaatgtcacctgcagatttctcgtgggaaccaatatgtacatgtttgcaattatgctgtgagaatttaaatgtgttagatggaaaa

SEQ ID NO: 228916 - DNA, 739 bp, Homo Sapiens
  misc_feature (145)..(167): n is a, c, g, or t
ttggaaaaaagagaaaacatactatgcaaaggaagtttaaacttaagttttccttaagggtcagcccaacaatgactttcagtcaaatggattaaactggaaaatgtttttgtttctgttgtaaacagatcatcctaggcgaaannnnnnnnnnnnnnnnnnnnnnnaaattagtttatttctaaatcttagtcttccacatttctagaggccacctgacacaagtccctgtatctgaagtctagcatctcaaggctgatctggaagtgtgctagtatgctccctagtggataacttaatcttttaatacagttccgtcattcccatcttgttttcagaagagaaggtggctacagccaggcataacatatccactgtgtgcatagagggtctcttcacgttgatgcttggcattccatcagctttctctaagtcttggctcaagttcaaccttaaaatgatgttagacaacaggtcccagtcagttccctctattttcacccattttgctcacaagccatattggcccgattagtggtactgtctgactcacgtgtgtgatccaaataaaggtagctgctgaccactgcctggtttgttttgtggactaggggatagagaatccagggttctctcatgaggagttaaacatatttcaagagcaacaggaaaaaaggtacatcaagccatttgaaaacaaaaatttattgcttctccttccaaagctttgtgaatttac

SEQ ID NO: 228917 - DNA, 607 bp, Homo Sapiens
acaaaaaagttggctcagaatgtcccttggatctttcctcattgactgactctgtgccacgtcatccatagtttattgttagtatgaacacaactgtaacatttacctggtatctacatccttacctgcattggaaaatgtttgctacctcacaacaaccatttgcctcctttaagaacactgatgggctgcactttttggatagaaatagaatttgatttcagaatgtatgcttggtgagtctcagtgcccaggaacacttttggaataatttatcagacattgaacttctgtgattaatcgcttttatagatttactcagtctttaaaattcgtctctgatttgccagagaaaaacggtggtagccatggaaatcgggagtgaaggagcactgcttcattgtggctcagcccttcctaggggcctctgccctttgatgtccttgagctactcttcagctctggaagttgtggacaaaccgtaggaatgtatgtgtgcgtgtggtggagtgattgtctgtgaatgacaggccctggctattgattgatgttgcatcaatttagcaaattcattttctcattcttgatggcctgaatatatgtctgc

SEQ ID NO: 228918 - DNA, 741 bp, Homo Sapiens
ataccaatatggttaattagcatatacaatatagtttgaaagtattttaaatagcatggtgtgtatacaatgtctcccgcgcccataggcaaccagggtcgtgggaagcttggtgaggagttaaccaggtcctgtagtttaagcagtggagcacccgggattcctgcccccctttctgctcacacaattgcactccattcttccgccttccttgttttctccaaaaccacctgataggggggatgtcctgatttctgaggtgtgcttctcatcatgactgcttcgttttgcccttctgatttccacggcacaagattataggaggaaactcattctcatcatcaagacacactggtcccgtcgcaaactcatgttcaggaataacttctcctcgcagcgccccgccgtcctcagaataacctggcaccgtggaggctgaagatgcacttggtctggctacggtcgctgcataagactgaggtaaggaaggtctgaggtcattttctttattctcttctgttgttcctgagccaagcaagctgtgggttttgattaagacacactctcctccatcctgaggatccaaattgtacatataaaggtgtccactggatgacgcaactagcagccgtggcaacttctggatcgttgagagggtacagatgttcctctgtccggagaagttcaagcgtgcagtggcaaaagccctgtcctgatccaacttttttgtacaaagttggc

SEQ ID NO: 228919 - DNA, 569 bp, Homo Sapiens
aaattgatgagcaatgcttttcttataataaacaactttgtacaaaaaagttggcgtgcactatggctcggggctcgctgcgccggttgctgcggctcctcgtgctggggctctggctggcgttgctgcgctccgtggccggggagcaagcgccaggcaccgccccctgctcccgcggcagctcctggagcgcggacctggacaagtgcatggactgcgcgtcttgcaaggcgcgaccgcacagcgacttctgcctgggctgcgctgcagcacctcctgcccccttccggctgctttggcccatccttgggggcgctctgagcctgaccttcgtgctggggctgctttctggctttttggtctggagacgatgccgcaagaaagagaagttcaccacccccatagaggagaccggcggagagggctgcccagctgtggcgctgatccagtgacaatgtgccccctgccagccggggctcgcccactcatcattcattcatccattctagagccagtctctgcctcccagacgcggcgggagccaagctcctccaaccaaatgggggtgg

SEQ ID NO: 228920 - DNA, 296 bp, Homo Sapiens
taaaatgtccaggtggactctgagtatttcctgtggatcctgggaaagtactgttgcccaaaggctgcaaagctggactcaggaatgtcctccaaccagcagcgctgacctaagagctccctgtgccgtctatccagaccagacttcggtagatgcctttgttagatctatcacatgtaaacgagcttgtatctccttccctgtgccacgagagagattggctttttattccagtctaggcagagacagaagaatgttgaataatagccccactagagtcctgtctggttatctgt

SEQ ID NO: 228921 - DNA, 893 bp, Homo Sapiens
ttgggccagcaagaagagcaccagggaagcagggtcccgggacaggaggtctcgatccctgggcagaaggtcacggtccccaagacccagcaaactgcacaactctaaggtgaacaggagagagacaggccaaactaggagcccatcacctaaaaaagaggtctaccaaaggcgacatgctcccggatacaccagaaaactctctgcagaggaattagagcgaaaacggcaagagatgatggaaaacgccaaatggagggaggaggagagactgaacatcctcaagaggcatgctaaggatgaggaacgggagcagaggctagagaagctggactcccgggatgggaagttcatccaccgcatgaagctggagagtgcatctacttcctccctggaggatcgggtgaagcggaatatctactctttacagagaacttcggtagctctggagaagaactttatgaaaagatgaaaactgtcccctctcttattggttttcctgcattttccagggaagctgctgaccccttaattctctttataagagttcaaatgacttctttcacagatgtcaaaccaccagtgttcaaagtgaccctgcttcattgagtcctgaaacagctcacttcctttgagagctagtgtgacttgctttgtgggacactcagtaactttgggttttgactctttaacgggtgggcactggaccatctcggtgggagtgcttgtgccactctggaaggctgttccccggggttgtgatgtttatcatgccacttccttcttacctgtgccaacagacctatttcactgcctcagcgtacaccagacccttcagaaacctctctggtgtcacccagatagattgtgcttactgacacaaatgaacgttt

SEQ ID NO: 228922 - DNA, 891 bp, Homo Sapiens
  misc_feature (284)..(299): n is a, c, g, or t
ttggccttaaagtatgttggaactgtcgttaaaaacaaccaaaatcccgaaactatttagaagcttataatgatgtggatttcatggacacttttcaatgcgtatttttcaaatgcttctcagagagccttgctttggttgaccaaggagtccggatgtaggaatgtttaaatcctcggatacttcagtgacacagcctctgctgccccttgctttgcctgtgtttgctgatgaaaagcagatgcttgtgtttcattttccttcctggtttgtgtgtgttaatnnnnnnnnnnnnnnnnagacacagaagtctcatgttgcattttccaaattttatgagtgatgatactttttccattactgctgcgtccctgttttacaatgcaaaatttaagtacggtcattgcccatggtgattaaagtgtggttatgggcaggaagacagactgtgtaaaaaaggaatgacatcctggctcctcatcttcttcatcagcaactaccataaccagtttgcgagtcaaatggcatttcctaacggcaggcatggcggcccctgaaagacaacagctccctttctgcttcggacaccactcaaacatttagacgcagctctatcccttttcctagctagagaaggtgatgccttcttccattactcagagatgttgagacgttttcagaatttcttgttgaaatgaaaaacatcaagataaaggacgcctttcaggcattagctaaacttccacttcataactttcggcgagacgtggtgagcctcctggtgtagagttcttttgtctttgtatggaatgactttttgctgtgatggttttgaatgttgggtttctgctgtctgcttaatacccatgcctgaattttttgagattgtaa

SEQ ID NO: 228923 - DNA, 869 bp, Homo Sapiens
  misc_feature (803)..(816): n is a, c, g, or t
ttggcttcggcataaaacaacaagtccagaagcactggaaatccatggatcattcacatggcttggacaaacacagtataaacttcaacttaaaagccaggagattcacagtctgcagctgaaagcatgctttgttcatacaggtgtttataaccttggaactcctagggtatttgccaagttatcggaccaagttacagtgtttgaaacaagtcagcagaattccatgcctgccctgatcatcatcagtaatgtgtgacaacttggaaatttgtactgaaatccacaataatcagtttttgctggatgggttttacagcagtatttgatatacctaacttgttatggaggttgattgatatctgatccctgcaaaatactttgacttgtcattttgttgatgatgcaaagcacgttggactgagaatacttaacattctttttctgtatttctttaaaccctgagaataatttacatgctcataatacaggatatcagcatatttgtgcaccttattaagccccatcttaagaaaacacaaagtctaagtctgctgttacaacttgtcaatggtatacgaatattaggagatgattctgagaaaggaaaggccttgttggcagtactcctgttaagccattagtctctaaattccagctttactgtgaagttctatagagtgttaaatacaaattttcctgtcttgcttcacacagttccttaaaatcagttttgaactttggtcatagagtcttcatatttcagtatttggtggtccctatgacttatacataactttgtnnnnnnnnnnnnnnttttttctgatgctttgaatatagttttgaaaggagttttgacttttttcccc

SEQ ID NO: 228924 - DNA, 301 bp, Homo Sapiens
ttggcacattttgtataaaactttaatttcttttttttaaaaatggtgggggtgggtgggtgcccagggctaggggctattccctgtctctgtgggtttctaagctctgggcaaagtggtggtagggggagggagggggaagttaagggggtcacctccattctggggaatttatatttgaattgaggctttggccttaacacccaggaacttttctattacaatcgcttaggaagtaaagccttgtctccctccctgttctctgcctcttgtacccctctgacccacccgctctgcccca

SEQ ID NO: 228925 - DNA, 645 bp, Homo Sapiens
tttgtacaaaaaagttggctttcgcttccccgctgaacgcaggcgcttcgctggtgcagacgcagtgctgagcacacagctaccggacaaagagtgacgcccggagctggagttatggcggctacggagccgatcttggcggccactgggagtcccgcggcggtgccaccggagaaactggaaggagccggttcgagctcagcccctgagcgtaactgtgtgggctcctcgctgccagaggcctcaccgcctgcccctgagccttccagtcccaacgccgcggtccctgaagccatccctacgccccgagctgcggcctccgcggccctggagctgcctctcgggcccgcacccgtgagcgtagcgcctctggccgaagctgaagcgcgctccacaccaggccccgccggctctagactcggtcccgagacgttccgccagcgtttccggcagttccgctaccaagatgcggcgggtccccgggaggctttccggcagctgcgggagctgtcccgccagtggctgcggcctgacatccgcaccaaggagcacatcgtggagatggtggtgcaagagcagctgcacgccatccagcccgaggcggctcgtgcccggcggatccgccgccgcacggatgtgcgcttc

SEQ ID NO: 228926 - DNA, 774 bp, Homo Sapiens
actttgtacaaaaaagttgggttccgtgcgtgcaagtgctgcgaaccacgtgggtcccgggcgcgtttcgggtgctggcggctgcagccggagttcaaacctaagcagctggaaggaaccatggccaactgtgagcgtaccttcattgcgatcaaaccagatggggtccagcggggtcttgtgggagagattatcaagcgttttgagcagaaaggattccgccttgttggtctgaaattcatgcaagcttccgaagatcttctcaaggaacactacgttgacctgaaggaccgtccattctttgccggcctggtgaaatacatgcactcagggccggtagttgccatggtctgggaggggctgaatgtggtgaagacgggccgagtcatgctcggggagaccaaccctgcagactccaagcctgggaccatccgtggagacttctgcatacaagttggcaggaacattatacatggcagtgattctgtggagagtgcagagaaggagatcggcttgtggtttcaccctgaggaactggtagattacacgagctgtgctcagaactggatctatgaatgacaggagggcagaccacattgcttttcacatccatttcccctccttcccatgggcagaggaccaggctgtaggaaatctagttatttacaggaacttcatcataatttggagggaagctcttggagctgtgagttctccctgtacagtgttaccatccccgaccatctgattaaaatgcttcctcccagcatagga

SEQ ID NO: 228927 - DNA, 864 bp, Homo Sapiens
ttggcgtaggacagtgaagatgctgctggaattgtccgaggagcataaggaacacctggccttcctgcctcaagtggacagcgcggtggtcgccgagtttgggcggattgctgtggaattcctgagacgcggcgcaaacccaaaaatctacgaaggcgccgccagaaaactcaatgtgagtagtgacactgtccagcatggtgtggaaggattaacgtatctcctcactgagagctcaaagctcatgatttctgaactggatttccaagactctgtttttgttctgggattctctgaagaattaaacaaattgttgcttcagctttatctggacaacagaaaagagatcagaacgattctgagtgaattggcaccaagccttcccagttatcataaccttgaatggcgactagatgtacagatgtagaaaagtgcacaggtcaatgtactgctcaatgaattatcacatggtgcatttaactgtgactcacaccccagaagcatcctccttgcctcctaattactgccccttcactcctttctaaagcttgcaagtagaagtctcaggcaacagattaaaccagcagtgactataaagctacaccttaatcaaaatggagatcacaacaccaaagttctgcagacagacccagccaccctgctccatttggttcaacaactggaacaagcattggaagagatgaagacaaaccactgtaagagagttgttcgcaacatcaagtagtaccagttttaaggtttaattcatttgaatcacttatgaattgatgatatacagcaattacttttcaaaattaattttttattaattcatgatgataaatacatagtatttcctcagta

SEQ ID NO: 228928 - DNA, 880 bp, Homo Sapiens
ttgtccccgacgaaaggatgagcaaatgtgtaactcttcattgtgtagaggggtatagagcttagcttgccatgtcctgggtacatttccagtagtcatttagttagtaccagtgattcccactcaagtgtcccgtaaggaggtaccatgggaaataagagcagcctcttggcattctgggtagggagcctgagccaaactctaaagctgtctttataaagggaggtcatgtgatggccagaaattgcctttgcttcatggtgcacttggtggggagtcaggtgtggggtgctgggtttcacatcatcccattttcttttctgccttcagacctgcaatgcttcttttgccacccgagaccgtctgcgctcccacctggcctgtcatgaagacaaggtgccctgccaggtgtgtgggaagtacttgcgggcagcatacatggcagaccacctgaagaagcacagcgaggggcccagcaacttctgcagtatctgtaaccgagaaggccagaaatgctcacatcaggatccgattgagagctctgactcctatggtgacctctcagatgccagcgacctgaagacgccagagaagcagagtgccaatggctctttctcctgcgacatggcagtccccaaaaacaaaatggagtctgatggggagaagaagtacccatgccctgaatgtgggagcttcttccgctctaagtcctacttgaacaaacacatccagaagtgcatgtccgggctctcgggggccccctgggggacctgggccctgcccttggctcacctttctctcctcagcagaacatgtctctcctcgagtcctttgggtttcagattgttcagtcggcatttgcgtcatctttagtagatcc

SEQ ID NO: 228929 - DNA, 1256 bp, Homo Sapiens
gaggaatttgcagggccgcaggatctgctccagcagcaccgaggtgctcagctcggggcccgagcacaggctgggccgggccctgccgacccaccagcacgttcttggtgtgcacgaggcccaccctgccctggtagtagccgatgtaccactcttggtccacagctggccccggagcgtgacccgctcctcgctgagcagggcgatcccgtcgcccttcttgtactccagcaggtagtggttcttgttctgccgcaccacagtcttgagcaacttaccaaacttgaggctggacaccgggcggtcctggaaagtcgggtactttgtagtggtggcaaacggggacaggatgattttcccgacttcgttcttcttgagaaacctcctttgcccggaaggcttgatggcacttttagggggtggctgaggagtctggacacaaaactgggtgaggatggcctcctggtcgtccttcacctgaacccgcagcgtgaagtcagagagctcgttggggttctgggaggtgatggggaagatcaggcggctcaccttgcccagcttcagctggaatcctcgcaccactttggcctgctcgctggctttgacctcgtaattcgtcatattggaaaacatacagaccttgagatcctggggcctggacaaaacgaactggtgcttcccccacagctgcagggccaccggggcagggttgggtgcctggcgtgtgacctcgctgaccaggagcgtctttggggcacagtcatgcccaaaaatggtcactaccgtcttgaaggatgggtggatgtgtttagggccgtagagacccactgtgacttttttattgatgaagtcccacacggtggaagggtagaggatgcttgggccatgggccacgacagccacgtacatacagggctccaggttgtgcagctgtgcctggaccgtgtccccacagctgcagttgagcgggacggagacatatggcccttccttcgagtcgctcctcaggcactggaggcccactgtgcttttgctaaaaaggtcattttttatctcggctgacactttcatctccaagatgatagaggttttcacctccaggttgctcagcttgacctccagcacagggctgatgctgcaggacctgtcactgttgagctccagcggggggtccagcagggctttcatggagatctgctgggtctccccaggggcgacgtggccctcgggcacgtggatgctgatgctggtgccaa

SEQ ID NO: 228930 - DNA, 957 bp, Homo Sapiens
  misc_feature (182)..(244): n is a, c, g, or t
ttggcttcaggtgagagtacaggggaaagccccgaagccccgccccaccggacgtgacggaacggaacgagacggagccttgtccgactccgcctcccaaggggagggggtttgcctctgagcatccgaagcgcggccaggggcgggacggactttcaaagacttggagttcccacgggtgnnnnnnnnnnnnnnnnnnnnnnnnnnnnnnnnnnnnnnnnnnnnnnnnnnnnnnnnnnnnnnncattggattttccgcaatgtggctaaaggtggggggcctacttcgggggaccggtggacagctgggccagactgttggttggccttgtggggccctggggcctgggccccaccgctggggaccatgtggaggttcttgggcccaaaagttttaccaggatgggcctgggagaggcctgggtgaggaggacattcgcagggcacgggaggcccgtcccaggaagacaccccggccccagctgagtgaccgctctcgagaacgcaaggtgcctgcctcccgcatcagccgcttggccaactttgggggactggctgtgggcttggggctaggagtactggccgagatggctaagaagtccatgccaggaggtcgtctgcagtcagagggtggttctgggctggactccagccccttcctgtcggaggccaatgccgagcggattgtgcagaccttatgtacagttcgaggggccgccctcaaggttggccagatgctcagcatccagggtacagcatgaccctcgactcctgacccctgacctcccttctaccccagccctacccaccaacaggccccaacttcagatactcacacggggtccctcctcacctcttcgcttacttcccccctggttccactgtctcccaagacaacagcttcatcagccctcagctgcagcgcatctttgagcgggtccgccagagcgccgactt

SEQ ID NO: 228931 - DNA, 1165 bp, Homo Sapiens
ggagacggacggcgggggcacggtcatgatctcctggatgttgaggtcggtgctccagttcttctcgatgccaggcacgtggcccatgcccacgacgcccacgaccacggaggggacgcacttcctgggctcggctgtggggaaggacaaggggtcagtacctgctcgggcctcagcctcacagggggtcccacgcctgcgggcggccgtcaccgtcagaggcccgaggcagctcgaggcgccgcgcggcctggcgcagcatgtaggttaggtagacgtcgcgctccgagacgatggtgcggtgcaggtctgggaactcgccaatcatctcggccatcatctgctccagtaggtccttctgcttgcagcgttccacgtcatccttgctgatggggtctgacaggaagcacaggccccaagccagcctgaccttctgccagaaggagagcgctgcgatggccctcttgaaggtgacggggatgggtcggtcacccaggtggaacttgcagaaaggcaccttgctggcctccttgaaggcctccctgaactcgccacctggggccatgcccagctgctcggtgatgtgtgcagacaccttcagcagcagcatctgcatcagccccgacatgagcccgttctgcctcacggcctgctgcagcttctccaggctgagctcctgggcctcccgcagcagcgtgctctcgtccatcttcagcatggacacacgatattggcagagctccacgaccaccacgtcaggctgcacctcccggatggtcttcacaacgtccctcttgctgtcgtcgctgaagtgggctgtccccaccacgtacaccctgctcccgtcctcagccaccaactgggtcacagtgcgcggcaggttgggccgctgacgccgccgcttcagcttcatctccaggagcaggttgaaggcgtccacgtcggacaggttctgggggtctccagaaagcaccctgggcaccggctctgaagcctctgacggcacaacaggttccacgttggcctcgtgcggtggctgctgctcctccccgtccatggctgggcggcggcttcctgcacctgtggggagcgcgccgtccgcgccgcgcggcgtaccgaggcgaggcagcggcgctcctcagccggcctccatgcggcgcgccaa

SEQ ID NO: 228932 - DNA, 1253 bp, Homo Sapiens
ggatcccctatttttaagggtcttgagtgacgttgctggttcaaggctgtttcctctagctggcttacaccctgctcgtgtgcatggaaaaagctcctgctgtttttcaggcggcatcctcatgtatggggccctggtgctcttcgagtctgagttcgtccacgtggcagccctggcggacgcaggagcgatggcagcgaccgatatagctcgccaggtgggtgaaggttgccgaactgtccccctggctggacatgtggggtttgacagcttgcctgaccagctggtgaataagtccgtcagccagggcttctgcttcaacatcctgtgcgtgggagagacaggtttgggcaagtccaccctcatggacaccctgttcaacaccaaattcgaaggggagccagccacccacacacagtcgggtgtccagctccagtctaatacctatgacctccaagagagcaacgtgaggctaaagctcacgatcgttagcacagttggctttggggaccagatcaacaaagaggacagctacaagcctatcgtggaattcatcgatgcacaattcgaggcctacctgcaggaagagctaaagatccgaagagtgctacacacctaccatgactcccgaatccatgtctgcttgtatttcattgcccccacgggtcattccctgaagtctctggacctagtgactatgaagaagctggacagtaaggtgaacatcatccccatcattgccaaagcagatgccatttcgaagagtgagctaacaaagttcaaaatcaaaatcaccagcgagcttgtcagcaacggagtccagatctatcagtttcctacagatgatgagtcggtggcagagatcaatggaaccatgaacgcccacctgccgtttgctgtcattggcagcacagaagaactgaagataggcaacaagatgatgagggcgcggcagtatccttggggcactgtgcaggttgaaaacgaggcccactgcgactttgtgaagctgcgggagatgctgattcgggtcaacatggaggatctgcgggagcagacccacacccggcactatgagctgtatcgccgctgtaagctggaggagatgggcttcaaggacaccgaccctgacagcaaacccttcagttttacaggagacatatgaggccaaaaggaacgagttcctaggggaactccgaaaaaagaagaggagatgagacagatgttcgtccagcgagtccaagaagaatgaa

SEQ ID NO: 228933 - DNA, 997 bp, Homo Sapiens
ttgtcatactcaagactcagattcaggaacttcttcatcagggcagcagtaatattgcacaaaacatattgtccatctcatttctaatcatatactgtaatgaaaggaagcctctgttatctgtccgaatagataccttacaagataggactaatgccttttgtagagggtttcagtaaggaaatcttgtatctgttgacttgggtctgattacaatgaaaatgcttccatcaaatcagaatctttggggatagtcaaggtgggaacttcctgcatttccaaaagtagataacctgaaataaggcttgtcaggagacatggtaatttgtaggacttcactcgtcatatccaattcagaaaatgcttcacggagcccctctgactgcagaataattttattaataacattggtgctgcagaaatcaaagtccagggtctcctcaggttcctgtgtattgattttgcagactgtcaccactcctccttcttccaggaacagcatcaaagggtaaccataaccttggtaacacattcgaagtgcagttaaagtccctggcataggacttgatccaaaaatagataaacagtctaaaaggacagttaaattaattcgaaaagtaacagactcttcctgaactttaaactcctgaaatattccagcctgaataaaagcatttgcttgcacacactttgcattttccactgttactttgataccatttttagttgcgaaacacgtggcatgttctcggaaatgaatagctttcaagatagtggagagattcctaacgttgtcaaggctggccacaaggctgtactgatcatcctcgtcttggatctgttgggtcagaaggggcatcgtccactgcgcattcggccccgagggatgctcctggggccaacaacttctcggcggatcgccaaacacctttgcggtggggtctggacgcccgagagcccttctcagcaaagtccctgaagaggagcgaggcgccaa

SEQ ID NO: 228934 - DNA, 989 bp, Homo Sapiens
ttggcagaacatgaagacatatgtgaataccgtccctactcctgcccatgtcctggtgcttcctgcaagtggcaggggtccctggaagctgtgatgtcccatctcatgcacgcccacaagagcattaccacccttcagggagaagacatcgtctttctagctacagacattaacttgccaggggctgtcgactgggtgatgatgcagtcatgttttggccatcacttcatgctggtgctggagaaacaagagaagtacgaaggccaccagcagttttttgccatcgtcctgctcattggcacccgcaagcaagccgagaactttgcctacagactggagttgaatgggaaccggcggagattgacctgggaggccacgccccgttcgattcatgacggtgtggctgcggccatcatgaacagcgactgccttgttttcgacacagccatagcacatctttttgcagataatgggaaccttggaatcaatgttactatttctacatgttgtccatgatgtgactttcgtaaaccttcaaaattatttgggcatagtgctctatgtttaataaaggtttttatagatgttttattccatatgtcttcacaagtcaggacccacaattacccgtgttttgtttgaacagcagtgtcccatctggcttcgacccaacaaagttcattaacctgggatgaatggggttggcctgttggtgatttggatgctgttctgtgatctaaaacaactcttattgaattgtatttactccctaaacaacacttgacaggctgttgcacagggcttctatagatcagtgtgttaggaatgggaggccccttcctgcctgccttcccatattggtcccttgacattgacaaaagcacagtgactgtcagcagattcctttacttttgtttgtggggagggtaggaattgttttaatgcattttaaacagtgtttctgaaattggaatggcttggctaataga

SEQ ID NO: 228935 - DNA, 1317 bp, Homo Sapiens
ttggcgagttacagctgccgcggctccccgagctgttcgaaactggtagacagttactggacgaagtagaagtggcgactgaacccgccggttcccggatagtccaggagaaggtgttcaagggcttggacctccttgagaaggctgccgaaatgttatcgcagctcgacttgttcagccgaaatgaagatttggaagagattgcttccaccgacctgaagtaccttttggtgccagcgtttcaaggagccctcaccatgaaacaagtcaaccccagcaagcgtctagatcatttgcagcgggctcgagaacactttataaactacttaactcagtgccattgctatcatgtggcagagtttgagctgcccaaaaccatgaacaactctgctgaaaatcacactgccaattcctccatggcttatcctagtctcgttgctatggcatctcaaagacaggctaaaatacagagatacaagcagaagaaggagttggagcataggttgtctgcaatgaaatctgctgtggaaagtggtcaagcagatgatgagcgtgttcgtgaatattatcttcttcaccttcagaggtggattgatatcagcttagaagagattgagagcattgaccaggaaataaagatcctgagagaaagagactcttcaagagaggcatcaacttctaactcatctcgccaggagaggcctccagtgaaacccttcattctcactcggaacatggctcaagccaaagtatttggagctggttatccaagtctgccaactatgacggtgagtgactggtatgagcaacatcggaaatatggagcattaccggatcagggaatagccaaggcagcaccagaggaattcagaaaagcagctcagcaacaggaagaacaagaagaaaaggaggaagaggatgatgaacaaacactccacagagcccgggagtgggatgactggaaggacacccatcctaggggctatgggaaccgacagaacatgggctgatcttcccacaacaccacaggactgcagggtgcacaactcccctgccaaggaaaaccatgcagtcctcccctccctggtctcctgcttcagctctgtacaacgagggcaaagatgctaaatcttgctttgcattcagtaaagtgtcaagtgattaagtgtgtatttgtacccctagatgatatgaaccagcagtcttgttttggcatcatcctcatcatgttgtattccagcttcttaagtggaaagaaaagaattctcaaaaaatgggctctgtataatctatggctatcccaaatctctgaaaaaa

SEQ ID NO: 228936 - DNA, 518 bp, Homo Sapiens; identical to SEQ ID NO: 194963

SEQ ID NO: 228937 - DNA, 691 bp, Homo Sapiens
tttgtacaaaaaagttgggtaactagtcccctagttcgagggtgcgccgtgtccttttgcgttggtaccagcggcgacatgacggggtacactccggatgagaaactgcggctgcagcagctgcgagagctgagaaggcgatggctgaaggaccaggagctgagccctcgggagccggtgctgcccccacagaagatggggcctatggagaaattctggaataaatttttggagaataaatccccttggaggaaaatggtccatggggtatacaaaaagagtatctttgttttcactcatgtacttgtacctgtctggattattcattattacatgaagtatcatgtttctgaaaaaccatatggcataattgaaaagaagtccagaatattccctggtgatacaattctggagactggagaagtaattccaccaatgaaagaatttcctgatcaacatcattaaagattatgtaaaaagttaaaaggcttatgagcctaagtttgttcctatattaccatatttactgaattttctggaaaagtaactttaataaagtttaatctcagaaattgtcatatctgttttcaagcattgtacaatttgagactgagtaatttaacaataagtaaagtggacatgctaagcaaatatgagagactacctactttttctggtcattcttgacttg

SEQ ID NO: 228938 - DNA, 598 bp, Homo Sapiens
ttgggaaacggaagtgagcggcggggtcgactgacggtaacggggcagagaggctgttcgcagagctgcggaagatgaatgccagaggacttggatctgagctaaaggacagtattccagttactgaactttcagcaagtggaccttttgaaagtcatgatcttcttcggaaaggtttttcttgtgtgaaaaatgaacttttgcctagtcatccccttgaattatcagaaaaaaatttccagctcaaccaagataaaatgaatttttccacactgagaaacattcagggtctatttgctccgctaaaattacagatggaattcaaggcagtgcagcaggttcagcgtcttccatttctttcaagctcaaatctttcactggatgttttgaggggtaatgatgagactattggatttgaggatattcttaatgatccatcacaaagcgaagtcatgggagagccacacttgatggtggaatataaacttggtttactgtaatagtgtgctgttcatggaaaccgagggctgcatcttgtttatagtcatctttgtactgtaatttgatgtacacaacattaaaagtactgacacctgaa

SEQ ID NO: 228939 - DNA, 742 bp, Homo Sapiens
ttggcaaagacctatcccagatcctgaaaaagatgccgcagtaccagaaggagctgaataagtattctacgcacctgcatctagcagatgattgtatgaagcacttcaagggctcggtggagaagctgtgtagtgtggagcaggacctggccatgggctccgacgcagagggggagaagatcaaggactccatgaagctgatcgttccggtgctgctggacgcggcggtgcccgcctacgacaagatccgggtcctgctgctctacatcctccttcggaatggtgtgagtgaggagaacctggccaagctgatccagcatgccaatgtacaggcgcacagcagcctcatccgtaacctggagcagctgggaggcactgtcaccaaccccgggggctcggggacctccagccggctggagccgagagaacgcatggagcccacctatcagctgtcccgctggaccccggtcatcaaggacgtaatggaggacgccgtggaggaccggctggacaggaacctgtggcccttcgtatccgaccccgcccccacggccagctcccaggccgctgtcagtgcccgcttcggtcactggcacaagaacaaggctggcgtaaaagcccgggcgggcccccggctcatcgtgtatgtcatgggcggtgtggccatgtcaaagatgaaggccgcctaccaggtgaccagggccaccgagggcaagtgggaggtgctcattggctcctcaca

SEQ ID NO: 228940 - DNA, 1176 bp, Homo Sapiens
ttggctcagatgtgatagctctatggaagtccaaactggagactgccatcgcatcccaccagcaggcgatggaagaactgaaggtatctttcagcaaagggcttggaacagagacggcagaatttgctgaactaaaaacacaaatagagaaaatgagactagattaccaacacgaaatagaaaatttgcagaatcaacaagactctgaacgggctgcccatgctaaagagatggaagccttgagggctaaactgatgaaagttattaaagaaaaggaaaacagtctggaagccatcaggtcgaaactggacaaagcagaagaccagcatctcgtagaaatggaagacacgttaaacaaattacaggaagctgaaataaaggtaaaggagctagaggtactgcaagccaaatgcaatgaacaaaccaaggttattgataattttacatcacagctcaaggctactgaagaaaagctcttggatcttgatgcacttcggaaagccagttccgaaggtaaatcggaaatgaagaaacttagacagcagcttgaggcagctgagaaacagattaaacatttagagattgaaaagaatgctgaaagtagcaaggctagtagcattaccagagagctccaggggagagagctaaagcttactaaccttcaggaaaatttgagtgaagtcagtcaagtgaaagagactttggaaaaagaacttcagattttgaaagaaaagtttgctgaagcttcagaggaggcagtctctgttcagagaagtatgcaagaaactgtaaataagttacaccaaaaggaggaacagtttaacatgctgtcttctgacttggagaagctgagagaaaacttagcagatatggaggcaaaatttagagagaaagatgagagagaagagcagctgataaaggcaaaggaaaaactggaaaatgacattgcagaaataatgaagatgtcaggagataactcttctcagctgacaaaaatgaacgatgaattacgtctgaaagaaagagatgtagaagaattacagctaaaacttacaaaggctaatgaaaatgcaagttttctgcaaaaaagtattgaggacatgactgtcaaagctgaacagagccagcaagaagcagctaaaagcatgaggaagaaagaagaattggagaggaaat

SEQ ID NO: 228941 - DNA, 426 bp, Homo Sapiens
aaaaagttgggtcactgggacacaacgggcggtggcttctgtgatttattttcttgatggtaacttctcagagcagggcgattgggacatcaccagccagagcacaggaagccaccctgcctgctggggaggagggacccacacaagccccctcggcagtttgtccccccagcttcggtatgccttcagggaaaggtcacagctggggaggaagcggggggacgcctgtcactcctggcaggtggtgagttcaggtgggggctccctgctgcccccaggcctgggagcttgaagccctcccggcatctggcatccgagcctcttttcctccagggtgcgcttccctctcttgccgcagcatacaccacgccaggcagtggccttgtcactgtatcttgcatcaaagaccaaggaggacccgcttta

SEQ ID NO: 228942 - DNA, 600 bp, Homo Sapiens
  misc_feature (482)..(502): n is a, c, g, or t
ttggcccacagatcctagcaaatgtgcccaaccagctttactaaagggggaggaagggagggcaaagggatgagaagacaagtttcccagaagtgcctggttctgtgtacttgtccctttgttgtcgttgttgtagttaaaggaatttcattttttaaaagaaatcttcgaaggtgtggttttcatttctcagtcaccaacagatgaataattatgcttaataataaagtatttattaagactttcttcagagtatgaaagtacaaaaagtctagttacagtggatttagaatatatttatgttgatgtcaaacagctgagcaccgtagcatgcagatgtcaaggcagttaggaagtaaatggtgtcttgtagatatgtgcaaggtagcatgatgagcaacttgagtttgttgccactgagaagcaggcgggttgggtgggaggaggaagaaagggaagaattaggtttgaattgctttttnnnnnnnnnnnnnnnnnnnnngacagcatctcactatgttgccaaggctcatcttgagaagcaggcgggttgggtgggaggaggaagaaagggaagaattaggtttgaattgctttttt

SEQ ID NO: 228943 - DNA, 648 bp, Homo Sapiens
acaaaaaagttggcgaccggaccccgcactcctccagtagcggctgcacgtcgtgccaatggcccgctatgaggaggtgagcgtgtccggcttcgaggagttccaccgggccgtggaacagcacaatggcaagaccattttcgcctactttacgggttctaaggacgccggggggaaaagctggtgccccgactgcgtgcaggctgaaccagtcgtacgagaggggctgaagcacattagtgaaggatgtgtgttcatctactgccaagtaggagaaaagccttattggaaagatccaaataatgacttcagaaaaaacttgaaagtaacagcagtgcctacactacttaagtatggaacacctcaaaaactggtagaatctgagtgtcttcaggccaacctggtggaaatgttgttctctgaagattaagattttaggatggcaatcatgtcttgatgtcctgatttgttctagtatcaataaactgtatacttgctttgaattcatgttagcaataaatgatgttaaaaaaactggcatgtgtctaaacaatagagtgctattaaaatgcccatgaacctttaatttgcctgtaatacatggatatttttaagatataaagaagtcttcacaaataacagtaaagg

SEQ ID NO: 228944 - DNA, 970 bp, Homo Sapiens
ttgtacaaaaaagttggatctttgtgtgcgctaaagtgccccaactactgagggtctaagtccgggcagccgaagagtgtggtaggtaacggtcctcagcgcaagggtcatttcgtcgctgggaagggacggccctcgcccgcggtgatggtggttagcaagatgaacaaagatgcgcagatgagagcagcgattaaccaaaagttgatagaaactggagaaagagaacgcctcaaagagttgctgagagctaaattaattgaatgtggctggaaggatcagttgaaggcacactgtaaagaggtaattaaagaaaaaggactagaacacgttactgttgatgacttggtggctgaaatcactccaaaaggcagagccctggtacctgacagtgtaaagaaggagctcctacaaagaataagaacattccttgctcagcatgccagcctttaagattgaattagattgtgttgttgtggttttatttctgaaagtaaaacttgccataaattagaaaacaatttcccaaaataaaatccttttttgtatgatggtatacagttttcagtaatgatgtatacattgtattgatttttttccctaaatgtgttattttaataaatatctcatgaatgagtttgaagtttgcttggattttgaaatgaatgggactttgtctttattactaattcaccaaatttgttgagcgcaaaagcaattaatgtagtttaagtatttagtatgtacagttctctgtgttaacagctgagaagtaagcaaccttttctgactgcatatggtgtattcctcttttgagtccccataatattttataaattgtaatgccccatcttgtactacagttgtcttattcgtattgtttataaactttgagggttaggactgggtcttactcatctttatgtgccttcctttatgcttcaagaatttaccatctaatggaagagaa

SEQ ID NO: 228945 - DNA, 944 bp, Homo Sapiens
ttggctccgcgatacagttaggatggctgtagtacctctgctgttgttggggggtttgtggagcgctgtgggagcgtccagcctgggtgtcgttacttgcggctccgtggtgaagctactcaatacgcgccacaacgtccgactgcactcacacgacgtgcgctatgggtcaggtagtgggcagcagtcagtgacaggtgtaacctctgtggatgacagcaacagttactggaggatacgggggaagagtgccacagtgtgtgagaggggaacccccatcaagtgtggccagcccatccggctgacacatgtcaacactggccgaaacctccatagtcaccacttcacttcacctctttctggaaaccaggaagtgagtgcttttggtgaggaaggtgaaggtgattatctggatgactggacagtgctctgtaatggaccctactgggtgagagatggtgaggtgcggttcaaacactcttccactgaggtactgctgtctgtcacaggagaacaatatggtcgacctatcagtgggcaaaaagaggtgcatggcatggcccagccaagtcagaacaactactggaaagccatggaaggcatcttcatgaagcccagtgagttgttgaaggcagaagcccaccatgcagagctgtgaatctagaggctctgagccactgttaacgcacaatgttcacagacatctgttgctgcctcaccttgggatccctgccacaagttccttgggcagtggccatgtcaccattgagatgaagatatacaacagaaaatagtggctgtgtttggaagcttcagccctgcacatttgaactagtcactctcccagacttgcgtgggtcagttctttctgagtagaagacttgctggtaaaggggcagatgctttttattagtactgataaaacaaactgaagggaaacatcc

SEQ ID NO: 228946 - DNA, 533 bp, Homo Sapiens
ctttgtacaaaaaagttggctgccccctgatccttccattatcaagttttgaagggtgttggggaaattatggcagctgctagggagatcagggaaacactgatgtaacctcaaagcctctcaccattcctcttggcttggaaaggctttattttttcatatacatttctagaaatattgctattctaccttagtatttcacatttgtagttcaaacaagcgattgtccatctgttgcctagagctatagtacatgtgtgttatgaatgaaatatgacagcatgttccatacccctgctttagccatctgtgggaaaccagcaaactgaaaaagacacctctgcaaaatgtgcctcaagtccatttcttgggatcgctcgtttggtgcactctcgtgggagacaatcagagaacaacatatacttgtgccttattttcaaagaatctatttacactactatgaatattccactgaagagtcaatgatgtaaatgataaccaccaaatctcaaaaatatactcaccaaaaagta

SEQ ID NO: 228947 - DNA, 1205 bp, Homo Sapiens
  misc_feature (935)..(943): n is a, c, g, or t
aagagcgagcggctctgcggtggcggtttggggtgggcgccgccgaggtgaggtcgtctcgcctcccgcgcgccgattggttgtttcattatggatggaggggatgatggtaaccttattatcaaaaagaggtttgtgtctgaggcagaactagatgaacggcgcaaaaggaggcaagaagaatgggagaaagttcgaaaacctgaagatccagaagaatgtccagaggaggtttatgaccctcgatctctatatgaaaggctacaggaacagaaggacaggaagcagcaggagtacgaggaacagttcaaattcaaaaacatggtaagaggcttagatgaagatgagaccaacttccttgatgaggtttctcgacagcaggaactaatagaaaagcaacgaagagaagaagaactgaaagaactgaaggaatacagaaataacctcaagaaggttggaatttctcaagagaacaagaaggaagtggaaaagaaactgactgtgaagcctatagaaaccaagaacaagttctcccaggcgaagctgttggcaggagctgtgaagcataagagctcagagagtggcaacagtgtgaaaagactgaaaccggaccctgagccagatgacaagaatcaagagccctcatcctgcaagtctctcggaaacacctccctgagtggcccctccatccactgcccctctgctgcagtatgtatcggcatcctcccaggcctgggtgcctactctgggagcagcgactccgagtccagctcagacagcgaaggcaccatcaatgccaccggaaagattgtctcctccatcttccgaaccaacaccttcctcgaggccccctagtttctccgtccctacacagggagctcctccccaagggtagatcggaccgttcatgctgcctataggcattatgtccctcnnnnnnnnnctcctttgcctgcatcctgtgtacaacatgacatttttaaccaatccaatctaaaaatgtgccagaatccacctgtggcccgaatcgtgtttggttcctctttctactccactgcagatgaccaaacctgtcccgctgccactttcctcactgatattgggaggagggcaaggcccagccgaagttccactaaaaatgccccaggagaatagcaccggctggcttgccaaagggtttgggttttattgctttctgttttttc

SEQ ID NO: 228948 - DNA, 988 bp, Homo Sapiens
taaagataataaagagagaaaaaaataaaaggaacaggaaaagaacatctttatttacaccattgattgctacctactaaaagcacttaggagaaaacaatgcacatagtgaatcatccaatcagaaacacacagctttatattattacaaaaaagaaaaacacctcaccttgtctttgtttcgcagcacagacagaaatcattttaagacagaggatcacataggcagttgtacacccagctgacaaacactttgggtctggatttcctcccccaaccacattacatcagctttgacacatctgtaaaacatcttctctgcagaaagtcagaccctaaagatcaaacccagggaggcaccctctccccaggccagctactctaactcataaccctctgaagacacttggtaaaggcaacacagctgacgagagcagtgctgcctcagcagtagtgggctctggccccgccaaggcagggaggactagggccgagcttctgagaagccatccagataggcaagggagaaggggagggggtgcagtggggataaaagaacctgatgaaatggaagaaagcattaccttgggagttaccattttgaattattatataatcagactctagcctggcatcacggagactccaagagccacggacaatgggaaagaagtgtacttcttgaatgcaattcaaagttatctgaacttttttcactgtttctagattccactttgcttgggaaactacaagaacttctttaatcagccatggccttccaaaaagtagagtgatgtggcaggcaagacagggacaagcaggcccacctggtaaaggatggctctgacattagaacctgttggctgccctctccactgccagggaaggaagctggccatgcaggtgaagaaaggcaccagccctgtttcctgcctgaagggcagcatcaaggtcatagtgtcctttttttacggggaagaggtcccaa

SEQ ID NO: 228949 - DNA, 652 bp, Homo Sapiens
  misc_feature (423)..(501): n is a, c, g, or t
ttggctttgtaagttcattgacttttatccagagtaagagcagtcctttgctttgggggaattaaattggcattttcttctttcagtttcattatagatgtcttacagttaatgaataatagcagtatgttgtaatatacaaaatgtatcattatgaatggcactgatactttattactgccgtttgcctatataaccgtctaatctgttttactttgtgtatgtagatactgatgtttatccgggactagctgtgttttttcaaaatgcacttatattttttagcactctgatctacaaatttggaagaaccgaagagctatggacctgagatcacttcttaagtcacattttccttttgttatattctgtttgtagataggttttttatctctcagtacacattgccaaatggagtagatnnnnnnnnnnnnnnnnnnnnnnnnnnnnnnnnnnnnnnnnnnnnnnnnnnnnnnnnnnnnnnnnnnnnnnnnnnnnnnnttgcatagactgttaatatgtatataatacaagactatatgaattggataatgagtatcagttttttattcctgagatttagaacttgatctactccctgagccagggttacatcatcttgtcattttagaagtaaccactcttgtctctc

SEQ ID NO: 228950 - DNA, 896 bp, Homo Sapiens
ttggggcagtggctccggaggcagcggcccaattagtgtcgtgcggcccgtggcgaggcgaggtccggggagcgagcgagcaagcaaggcgggaggggtggccggagctgcggcggctggcacaggaggaggagcccgggcgggcgaggggcggccggagagcgccagggcctgagctgccggagcggcgcctgtgagtgagtgcagaaagcaggcgcccgcgcgctagccgtggcaggagcagcccgcacgccgcgctctctccctgggcgacctgcagtttgcaatatgactttggaggaattctcggctggagagcagaagaccgaaaggatggataaggtgggggatgccctggaggaagtgctcagcaaagccctgagtcagcgcacgatcactgtcggggtgtacgaagcggccaagctgctcaacgtcgaccccgataacgtggtgttgtgcctgctggcggcggacgaggacgacgacagagatgtggctctgcagatccacttcaccctgatccaggcgttttgctgcgagaacgacatcaacatcctgcgcgtcagcaacccgggccggctggcggagctcctgctcttggagaccgacgctggccccgcggcgagcgagggcgccgagcagcccccggacctgcactgcgtgctggtgacgaatccacattcatctcaatggaaggatcctgccttaagtcaacttatttgtttttgccgggaaagtcgctacatgggatcaatgggttccagtgattaatctccctgaacggtgatggcatctgaaatgaaaataactgaaccaaaattgcactgaagtttttggaaatacctttgtagttactcaagcagttactccctacactgatgcaaggattacagaaa

SEQ ID NO: 228951 - DNA, 556 bp, Homo Sapiens
ccaactttgtacaaaaaagttgggggagcgcgtgctgttgggagttgcttggaggttggcggcgcggggctgaaggctagcaaaccgagcgatcatgtcgcacaaacaaatttactattcggacaaatacgacgacgaggagtttgagtatcgacatgtcatgctgcccaaggacatagccaagctggtccctaaaacccatctgatgtctgaatctgaatggaggaatcttggcgttcagcagagtcagggatgggtccattatatgatccatgaaccagaacctcacatcttgctgttccggcgcccactacccaagaaaccaaagaaatgaagctggcaagctacttttcagcctcaagctttacacagctgtccttacttcctaacatctttctgataacattattatgttgccttcttgtttctcactttgatatttaaaagatgttcaatacactgtttgaatgtgctggtaactgctttgcttcttgagtagagccaccaccaccatagcccagccagatgagtgctctgtggacccacagcctaagct

SEQ ID NO: 228952 - DNA, 1053 bp, Homo Sapiens
ttggagatggttcatctcctgttagtattttggtctggaccacacaaccttggacgattccagccaatgaagctgtttgctatatgcctgaatcaaagtatgctgttgtgaaatgttctaagtctggagacctctacgtactggcggcagataaagtagcatctgttgcttctactttggaaacaacatttgagactatttcaacactttcaggtgtagatttggaaaatggtacttgcagtcatccattaattcctgataaagcctctcctcttttacctgcaaatcatgtgaccatggcaaaaggaacgggattggttcacacagccccagctcatggtatggaagactacggtgtagcgtctcagcacaacctgcccatggattgtctagtggacgaagatggagttttcacagatgttgcaggtcctgaacttcaaaacaaggctgtccttgaagagggaactgatgtggttataaagatgcttcagactgcaaagaatttgttgaaagaggagaaattggtgcatagctatccgtatgactggaggaccaagaaacctgtggttattcgtgccagcaagcagtggtttataaacatcacggatattaagactgcagccaaggaattgttaaaaaaggtgaaatttattcctggatcagcactgaatggcatggttgaaatgatggacaggcggccatattggtgtatatcaaggcaaagagtttggggtgttccaattcctgtgtttcatcataagaccaaggatgaatacttgatcaacagccaaaccactgagcatattgttaaactagtggaacaacacggcagtgatatctggtggactcttccccctgaacaacttcttccaaaagaagtcttatctgaggtggtggccctgatgccttggaatatgtgccaggtcagatattttggacatctggtttgatagcggacttcatggtcttatgttcttccaggtcctgaccaaagagcagatttgtacttggaaggaaaagaccagctcgggggttggtttcagtcatccttat

SEQ ID NO: 228953 - DNA, 888 bp, Homo Sapiens
ttggcaagatggcagctgcggagccgtctccgcggcgcgtgggcttcgtgggcgcgggccgcatggcgggggccatcgcgcagggcctcatcagagcaggaaaagtggaagctcagcacatactggccagtgcaccaacagacaggaacctatgtcactttcaagctctgggttgccggaccacgcactccaaccaggaggtgctgcagagctgcctgctcgtcatctttgccaccaagcctcatgtgctgccagctgtcctggcagaggtggctcctgtggtcaccactgaacacatcttggtgtccgtggctgctgggatgtctctgagcaccctggaggagctgctgcccccaaacacacgggtgctgcgggtcttgcccaacctgccctgtgtggtccaggaaggggccatagtgatggcgcggggccgccacgtggggagcagcgagaccaagctcctgcagcatctgctggaggcctgtgggcggtgtgaggaggtgcctgaagcctacgtcgacatccacactggcctcagtggcagtggcgtggccttcgtgtgtgcattctccgaggccctggctgaaggagccgtcaagatgggcatgcccagcagcctggcccaccgcatcgctgcccagaccctgctggggacggccaagatgctgctgcacgagggccaacacccagcccagctgcgctcagacgtgtgcaccccgggtggcaccaccatctatggactccacgccctgggagcagggcgggctgcgagcagcccaccatgagcgccgtggaggctggccacctgccggggccaaggagctcagcagaaagtaactgggctctgggccatcctttcctgcctctgtgcccctgcctctccctgtg

SEQ ID NO: 228954 - DNA, 1264 bp, Homo Sapiens
ttggctctgcttccagcgctgtgtgcccagcttgcaccaccgagctctggacgctgaggaggtggggaactgtgtagggaggttacgctgcaagaagagtttagcggtagactgcttccctcctcaccccacttcccgtacctctggccctggccttcccacgaccctcacccctaggctgggcatggggaagaaaggaggcggacccgacagggcacctttatcctccacttaaaccctatcttccttctaggaggcctgtctgcacagctgtgctgggaagctgatccattccaaccaccgcctcatggccgcttacgtgcagctcatgcctgccctggtacagcgccgcatcgcagactacgaggctgcctcggctgtgccaggcgttgctgctgaacagcctggggtctctccatcaggcagctagccatacccaaccccaggaaggaaggccttggatggaccctcagattgaaggacccggtggaccttggggttggtgaatcctaaacagagagaattcgaggttgcctgaaagctgggtgtccttgctccttttcctggagccaatatacccagtttttactcagtttgatttatattctgggcaaggaagctttgcctactttattggcacaatccgttgttctgtcgtttagtgcatatctgctggcttcagccctggcagctgagaaattgttttctatatgtagaaggaaaacctgagcatttgcaggcatctggttaaagcagggtctgtgtgtacaattttaaaacgggtaatatgtcatgctcttagttcatcttcacaacaaaactatgagtaagcggtattagcctcacttaacagatgaggaagcaagattccagaaagtaccagaaggtcattttatacaacaggagattggttcctgcccagatgacagaaaatgggagctctgtctagttgtccttaagtctgactgacttcagtggctcataaccgtgagccaagtatttgttggttcataactgttgttttgtgaattatgtcttacatgtctagagttctgctggatctagggaaaggaggagctatcgaagtacaacggatcaaaaaaccacagggcttttgggcactgcctccttgggaagttagtggccacagaagagagatgaaacctgtaagaagtctggagtcttttggaacttcagccatttccccaggttgttactttcttagtatgtacagtcttctcaggatgagcagtaaaacctttga

SEQ ID NO: 228955 - DNA, 1174 bp, Homo Sapiens
ttgggtgtctctagcctcaaagatggccagctggaggtgatcttggaccggcggctgatgcaggatgacaaccggggcctaggccaagggctcaaggacaacaagagaacctgcaaccgtttccgcctcctgctagagcggcgaaccgtgggcagtgagccacctgacctccatgtacctgaacgccccggcgctcgctctgcctgtagccaggatgcagctcccaggccctggtctgcgctcatttcatcctctggcttcctcactgccctgtgacttccacctgctcaacctacgtacgctccaggctgaggaggacaccctaccctcggcggagaccgcactcatcttacaccgcaagggttttgactgcggcctggaggccaagaacttgggcttcaactgcaccacaagccaaggcaaggtagccctgggcagccttttccatggcctggatgtggtattccttcagccaacctccttgacgttactgtaccctctggcctccccgtccaacagcactgacgtctatttggagcccatggagattgctacctttcgcctccgcttgggttagggcttcttgtggcctgaagagaaagttcattcacagagactgcctcttaacatgaagatcattggacaagccacacgggtatcccatcccgatctgcctcccagaactgtgacacactgggctctgccctcattttctgtttattgctgctgctgtgttttcggcgcaacccacaaacccagtgatgggtaaatagggcagacgccagtgagatcagggagagaaggcccttggtcagagtgggcagtgccaggctctgctttgggttgtgagtggacacccaactgggcacaggctcaggcacccatcctttttccaaacagggatatagaagtggtggaagcagacagaagaggtaagggaggctaagtgggtaacagcccagcatcagggtcactgtggcaacagcaggctctaggggaatcctgtggttatgtagagactccatgtcctggtgtgatgagcaggatcagagtgactctgggaggacaggggtggggacccagagttagcagtggggatggagcagtagaatgaatcactgtttctcctaggagtctgaaggcctcgctgctttctgtgatggctttgcagtaa

SEQ ID NO: 228956 - DNA, 920 bp, Homo Sapiens
ttgggttatgggctcggaaatctagttcgggaaaagtgtgaggggctcttcacgtggggaaggaacagcaggcgcggaggagggggcaagcgtgtgtgagattcagtggtccatgcgtgcgtttgtcgtgtaagggtcattcctggggtttggagtgggggaacaaatcaatgtggctgtttttccgtggaaagaattcccactgcagtgtcccggagcctgcgtgtggtgggcaagctcctcaaatggtatctcacagggaataggggagtcttgaaaacgcagcttcggcagtaggaacatgaacctcttacctaaaagttccagggagtttggctccgttgactattgggagaagttcttccagcagcgaggaaagaaagctttcgagtggtatggaacctacctggaactgtgcggggtgctacataaatatatcaagcccagggaaaaggtgctggtgattgggtgtggcaactcagaactgagtgagcaactgtatgatgtgggctatcgggatatagtgaacatcgacatcagtgaggttgtcatcaagcaaatgaaggaatgtaatgccacccgacggccccagatgagcttcttgaagatggacgtgacgcagatggagtttcctgatgcctcgttccaggtggtgttggacaagggcaccctggatgctgtcctgacagatgaggaagagaagaccttacaacaggtggacaggatgctggctgaggttggccgtgtcctgcaggtgggcggtcgctatctctgcatctccctggctcaggctcacatcctgaaagaaagcagtgggccacttctcccgggaggggtggatggtgagggtgcaccaagtgggccaacagccaggaccaggtgttggaaagcagagcctcagttctcctttgcctgtcttt

SEQ ID NO: 228957 - DNA, 551 bp, Homo Sapiens
ctataaaagccaactttgtacaaaaaagttggctacagaaaaacacaaaaaggtgatgggttgtgttatgcttgtattgaatgctgtcttgacatctcttgccttgtcctccggtatgttctaaagctgtgtctgagatctggatctgcccatcactttggctagtgacagggctaattaatttgctttatacattttcttttactttccttttttcctttctggaggcatcacatgctggtgctgtgtctttatgaatgttttaaccattttcatggtggaagaattttatatttatgcagttgtacaattttatttttttctgcaagaaaaagtgtaatgtatgaaataaaccaaagtcacttgtttgaaaataaatctttattttgaactttataaaaagcaatgcagtaccccatagactggtgttaaatgttgtctacagtgcaaaatccatgttctaacatatgtaataattgccaggagtacagtgctcttgttgatcttgtattcagtcaggttaaaacaacggacaataaaataatgaacac

SEQ ID NO: 228958 - DNA, 892 bp, Homo Sapiens
ttggcagcttggtcgcgacaggtgcgctaggtagagcgccgggacctgtgacagggctggtagcagcgcagaggaaaggcggcttttagccaggtatttcagtgtctgtagacaagatggaatcatctccatttaatagacggcaatggacctcactatcattgagggtaacagccaaagaactttctcttgtcaacaagaacaagtcatcggctattgtggaaatattctccaagtaccagaaagcagctgaagaaacaaacatggagaagaagagaagtaacaccgaaaatctctcccagcactttagaaaggggaccctgactgtgttaaagaagaagtgggagaacccagggctgggagcagagtctcacacagactctctacggaacagcagcactgagattaggcacagagcagaccatcctcctgctgaagtgacaagccacgctgcttctggagccaaagctgaccaagaagaacaaatccaccccagatctagactcaggtcacctcctgaagccctcgttcagggtcgatatccccacatcaaggacggtgaggatcttaaagaccactcaacagaaagtaaaaaaatggaaaattgtctaggagaatccaggcatgaagtagaaaaatcagaaatcagtgaaaacacagatgcttcgggcaaaatagagaaatataatgttccgctgaacaggcttaagatgatgtttgagaaaggtgaaccaactcaaactaagattctccgggcccaaagccgaagtgcaagtggaaggaagatctctgaaaacagctattctctagatgacctgaaataggcccaggtcagttgtcatcttctacatttgactcggagaaaatgagagtagacgaatctggaacttcc

SEQ ID NO: 228959 - DNA, 1503 bp, Homo Sapiens
ttggcgccggtttcggcgggggctgcacgtgcgcaggggtgtggaaacttaccggctgagccatggatggcaccgttaaggcgcagccgacggctgggaggcctaaggcccgaatcccccgagagcctcacctcagtttcgcggacgagacgggcccttgtggagttcgagtcgaacccagaagaaacgagggagcccgggtctcctccgagtgtgcagcgggctggcctggggtcccccgaaaggccgccgaagacaagcccaggatcaccccgtctgcagcagggtgcaggcttggagtcaccccaagggcagccagagccaggcgcagcgtccccccagcgtcagcaagacctacacctggagtcgcctcaaagacagccagagtacagtcctgaatccccacgatgtcagccgaagccaagtgaggaggcaccaaagtgttctcaggaccagggagtactggcctcggagttggcccagaataaggaggagctgaccccgggggccccccagcatcagctaccgccggtcccaggatcaccagagccttaccccggtcagcaagctcccggtccggagccctctcagccactactggagctgacacccagggcacctggctccccccggggtcagcatgagccgagcaagccacctccagctggggagacggtgacaggcggcttcggggcaaagaagcgaaaaggttcttcatcccaggccccagcgtccaagaagttgaataaagaggagcttcctgtaatcccgaaggggaagcccaaatcggggcgagtgtggaaggaccgctccaagaaaagattctcccagatgcttcaggacaagcccctgcgcacatcgtggcagcggaagatgaaggaacgacaggagaggaagctggccaaggactttgcccgtcacctggaggaggagaaggagaggcgccgccaggagaagaaacagcgccgggctgagaacctgaaacgccgcctggagaatgagcggaaggcagaggtcgtccaagtgatccgaaaccccgccaagctcaagcgggcaaagaagaagcagctgcgctccattgagaagcgggacaccctggccctgctgcagaagcagccgccccagcagccggcagccaagatctgagctcaggacggcccgaggccttccatggccaacaaacatgtcagacacagcacctcaggccgctgctcagatgcctctgctggagctggcactccaaacccatggctccagaacagggacccccaccccgaccggggctcctcagcctttgaaggcttccaggcaggtctgtgtgggacagaagcccagagggggcctggtgacctggcagagatgggggcgggaagagattcagctcccatccctcctttcctctccttctccaagtgccttcaaaccaagaactgtacattcttctggttcctcagtgagctggtgactggcagttgactccctcagcagtgtatgccctttctc

SEQ ID NO: 228960 - DNA, 906 bp, Homo Sapiens
ttggcacccggaagcggcggcggcgcccctcggggaagatggcgccctcggggctgaaggcggtggtgggggaaaaaattctgagcggagttattcggagtgtcaagaaggatggggagtggaaggtgcttatcatggatcacccaagcatgcgcatcttgtcttcctgctgcaaaatgtcagatatcctggctgagggcatcaccattgttgaagacatcaacaaacggcgggaacccattcccagtctggaggccatttatttgctgagccccacggagaagtcggttcaggccctgatcaaagacttccaggggaccccgactttcacctacaaagcggcccatatcttcttcaccgacacctgccccgagcccctgttcagtgagctaggccgctctcgtctggcaaaggtggtgaagacgttgaaggagattcaccttgccttcctcccctacgaggcccaggtgttctccctcgatgctccccacagcacctacaacctctactgccccttccgggcagaggagcgcacgcggcagctcgaggtgctggcccagcagattgccacgctgtgcgccaccctgcaggagtacccggccatccgctaccgcaagggcccagaggacacagcccagttggcccacgccgtcctggccaagctgaacgccttcaaggcagacactcccagtctgggcgagggcccagagaaaacccgctcccagctgctgataatggaccgggcagctgaccccgtgtccccactactgcatgagctcacgtttccaggccatggcgtatgatctgctggacatagagcagacacatacaggtatgagaccaccgggctgagcgaggcgcgggagaaagccgtcttgctggacgaggacgatgacttgtgggtgg

SEQ ID NO: 228961 - DNA, 941 bp, Homo Sapiens
ttggcgccttgacagcggctttcaacccccacctcagcccagcaattcggcagtttggagcatgtgaacaccttgagccttgatgagttccagtatgtggtatattatgcagagcattcagagcaaatactctctctccgagcgcttaatccgaacaattgctgccatccgttccttcccacatgataatgtagaggacctcatcagagggggagcagatgtgaactgcactcatggcacactgaagcccttgcactgtgcctgtatggtgtcagatgctgactgtgtggagttacttctggaaaaaggagccgaggtgaatgccctggatgggtataaccgaacagccctccactatgcagcagagaaagatgaggcttgtgtggaggtcctattggagtatggtgcaaaccccaatgctttggatggcaacagagataccccacttcactgggcagcctttaagaacaatgctgagtgtgtgcgggctctcctagagagcggggcctctgtcaatgccctggattacaacaatgatacaccgctcagctgggctgccatgaagggaaatcttgagagtgtcagcatccttctggattatggcgcagaggtcagagtcatcaacctaataggccagacacccatctcccgcctggtggctctgctagtcaggggacttggaacagagaaagaggactcttgctttgagctcctccacagagctgttggacactttgaattgaggaaaaatggcaccatgccacgagaggtggccagagacccgcagctatgtgaaaaactgactgttctgtgctcagctccaggaactctaaaaacactcgctcgctatgccgtgcgccgtagcctgggactccagtatctccccgatgcagtgaaaggccttccactgccagcttctttgaaggaatacctgttacttt

SEQ ID NO: 228962 - DNA, 1258 bp, Homo Sapiens
  misc_feature (1072)..(1118): n is a, c, g, or t
ttggcactttccaggactcaggggcagccacagcgacagccgcgggcagcagcctcaggagccggagctggaacggccgggggcggcggcagcggcggcgctgagggatctaaaatgtccactgaggcacaaagagttgatgacagtccaagcactagtggaggaagttccgatggagatcaacgtgaaagtgttcagcaagaaccagaaagagaacaagttcagcccaagaaaaaggagggaaaaatatccagcaaaaccgctgctaaattgtcaactagtgctaaaagaattcagaaggaacttgcagaaatcacattggaccctcctcccaactgtagtgctggacccaaaggagacaacatttatgaatggaggtcaactatattgggacccccaggatctgtctatgaaggaggggtgttctttcttgacattaccttttcaccagactatccgtttaaaccccctaaggttaccttccgaacaagaatctatcactgtaatattaacagccaaggtgtgatctgtctggacatcttaaaggacaactggagtccggctttaactatttctaaagttctcctctccatctgctcacttcttacagattgcaaccctgctgaccctctggtgggcagcatcgccacacagtacatgaccaacagagcagagcatgaccggatggccagacagtggaccaagcggtacgccacataggggcctgctgcctgccgccccgcgggacctgtgcaagcacattcaccaagtgcatcggtagccctgcccacccctccagacctcggttcttattttcctatttttattaaatttggaaccattttgtgatggtatgttgtccatcttcccatcccagttcttcctgccccccttcctctctcccacgctctcttttatctctcattttattcccttgttgatttctgttaacttgaaagatttgggattttttcccacctcatcatagatgggaacttttgttttcagtgcaaacaatgttggagctgtaatagtaagagctttcttacaaagctttgtattactgtgtggnnnnnnnnnnnnnnnnnnnnnnnnnnnnnnnnnnnnnnnnnnnnnnnctattaatgtgatctttggggaaaacacattcagattaatatctcgttttctacttaaatagtagtgcattagggtttaattttttgtactgaaagtctttattgggtggggtgcatgcctactggagaacaagtttttt

SEQ ID NO: 228963 - DNA, 922 bp, Homo Sapiens
taaaacataaaatgctctccaattcctctggtccaggacagaaagatcttccaggtagcacgccaaccagaacaagagactccgatgacgccagcttcaatgatggtgccatccagagaggggagagggtcatggcacattcaaccgcggcttccagaggttttgaaaaaggagcctttgggggcccagctgcctggcattttgatgctgtcggtgtgagttttgtattccataatggtgttgggaggtaggttaagcactcgccgaagtgtgtcccggattcgggctgtggttgcttggtcactggcagtcttattccatattgaaataatgtcttcctgaaagcggacagacaccacagccccacagatctcctccccaaccatgaactgttcccccagcatggccaaaatgagattctcccagcaacgggaggccaagcccttccgcagccgaataatccacttgccaccatttttatttgcatcatcctcccacatgggtttaattccttctttgaagagatggaagtcactgtggcctgtcaggtccccaggacgtaccatgtggctataaaacctccagaactgctccacagaggcaaaggtgccaatctgtttgatattctgttcatagctctgtgagctcgtgggacggccgggggttctcctggagtaccaaaaagtgtagttgtactgcaggggatgctctgccggtccagggacaacagcctttctcttgctactgctctgattcttgtctcgttccgttttttccttctcaccatctttctgtgtgctgttttcttcattctgatcatggtccccactgtcatcatctttcaaagcgtcgaacttgttgttcatcctctcgccgccgctgtcgccactgcctcagggagtgacttccgctccaccgccaa

SEQ ID NO: 228964 - DNA, 979 bp, Homo Sapiens
ttggtccttttctctctcatggtagggttatgagtcagttgccaaaaggtggggacatttcctgatgcatttgcaacactgagaagttatcttaagggaggctgggccccattctactcatctggcccagaaagtgaacaccttgggggccactaaggcagccctgctaggggagacgctccaacctgtcttctctctgtctcctggcagctctcttggcctcctagtttctacctaatcatgtccctggtggaggccatcagcctctggaatgaaggggtgctggcagcggacaagaaggactggaagggagccctggatgccttcagtgccgtccaggacccccactcccggatttgcttcaacattggctgcatgtacactatcctgaagaacatgactgaagcagagaaggcctttaccagaagcattaaccgagacaagcacttggcagtggcttacttccaacgagggatgctctactaccagacagagaaatatgatttggctatcaaagaccttaaagaagccttgattcagcttcgagggaaccagctgatagactataagatcctggggctccagttcaagctgtttgcctgtgaggtgttatataacattgctttcatgtatgccaagaaggaggaatggaaaaaagctgaagaacagttagcattggccacgagcatgaagtctgagcccagacattccaaaatcgacaaggcgatggagtgtgtctggaagcagaagctatatgagccagtggtgatccctgtgggcaagctgtttcgaccaaatgagagacaagtggctcagctggccaagaaggattacctaggcaaggcgacggtcgtggcatctgtggtggatcaagacagtttctctgggtttgcccctctgcaaccacaggtaaacagtcctgaccttctccatggacctaggtctcgagagctttctgtgaagcattcaattcgagaga

SEQ ID NO: 228965 - DNA, 1113 bp, Homo Sapiens
ttgggaaccaacagtcccttgatctttcaccacagcagaaagagtggcagaggatgctgcagctgattcagagtaggctacaagaagagcattcacttcaagatgtgatatttaaaagtgcttttaaaagtacatcaacagctcttccaccaagagaagatgattcatcacagtctccaaatgcatgcagaattcatggccatctatatgtcaataaagtagcagggaattttcacataacagtgggcaaggcaattccacatcctcgtggtcatgcacatttggcagcacttgtcaaccatgaatcttacaatttttctcatagaatagatcatttgtcttttggagagcttgttccagcaattattaatcctttagatggaactgaaaaaattgctatagatcacaaccagatgttccaatattttattacagttgtgccaacaaaactacatacatataaaatatcagcagacacccatcagttttctgtgacagaaagggaacgtatcattaaccatgctgcaggcagccatggagtctctgggatatttatgaaatatgatctcagttctcttatggtgacagttactgaggagcacatgccattctggcagttttttgtaagactctgtggtattgttggaggaatcttttcaacaacaggcatgttacatggaattggaaaatttatagttgaaataatttgctgtcgtttcagacttggatcctataaacctgtcaattctgttccttttgaggatggccacacagacaaccacttacctcttttagaaaataatacacattaacacctcccgattgaaggagaaaaactttttgcctgagacataaaacctttttttaataataaaatattgtgcaatatattcaaagaaaagaaaacacaaataagcagaaaacatacttattttaaaaaagaagagaaaggataaaaaaacccaaactgaaattctatatacgttgtgtctgttacaaaagtcgtagaagaaatcatgcagctaaacgatgaagaagcccaactggagtgctgctttgaagatgacgccttctaatattttcatagccaatgtgtggtatcaaaatcagaca

SEQ ID NO: 228966 - DNA, 830 bp, Homo Sapiens
ggttagtgtatggaaagcagtggagagggccggaggggaggggcagccaggccggggatcaggtctgaggctcccggctgccaccctttctcccagcacagctcctgcccaggtctgggaggatgggggatgggggagcaggagctcaaggggagaacctggcaccttctggagtcttggaaaaactgatccctaaagacacccggccctggctgtgctgccctctggaaagcagctctgataccaggagcggctgtcagggcacagggggaaaccccgaggccatcctcgggggtgattcctgaaaggggcccatccccaggctggatgcttggggaaggcagccgttggggagggattcctggggaaagggccgttagcaccaccaggctccacggcaaacagacagaggccaggcctctgcacctccagcgaggctgggagtcccctcagccccacctgcccggccctacaccccagccagcgtggcggccagggcagggccaggtgggcatcatacgaagaccttggccagggcatcagcgccagcactggcaatgagggccttgctggggtggcaggcaacagcgtggatggcctcctcatgcttcttgcggtgggccgtgatctcctgcacgcacgttttgttgtccaggctccagagacgcagggagcagtcatggcttcctgacatcaggaatgcgccgttggggtccacggctaggcaggtgactgcgtccaggtgtgcaaccatggagtgcaccggcttacctgtccgattgtccaggaagcggatgcccctgtcgtcgtgggcggtgatggtgagccaa

SEQ ID NO: 228967 - DNA, 764 bp, Homo Sapiens
ttggctaggtccccactgtccccgccgtcccgccccttcgcgtcccgggaaccggctggcttccgagccgcactcgccgatcctccaggcatgccccgctacgagctggctttaatcctgaaagccatgcagcgggtatttcttggtggatttttatgcacccaccgcagctgttgaaagcatggtggagcacttgtctcgagatatagatgtgattagagggaatattgtcaaacaccctctgacccaggaactaaaagaatgtgaagggattgtcccagtcccactcgcagaaaaattatattccacaaagaagaggaagaagtgagaagattcgccagattttagccttatatgtaattccttcacatttgggcagcatggacgagaaggaagaatttgcaagtttggcctttatataagcatgtgttgcaggtgctgtttgatttttctaaggtatttttagcccttgatcccctttgcttgcgagaggtggggaactgctcactgacagcttctctgtaacctgcagtaccagtggatcattcttgattttgttttcattagtgtcatttctttgtcattgaggacttttccccttacaacagtaacaccattttttgaagagcaaaacttataatacctcctgggattgtgagctagtcattcagcctgtgtacccatgtggaaataaaaattgacgaccaatgtattatatgggacaacttttgctttgagtaataaacttgattgtagggaatgtg

SEQ ID NO: 228968 - DNA, 844 bp, Homo Sapiens; identical to SEQ ID NO: 194969

SEQ ID NO: 228969 - DNA, 1541 bp, Homo Sapiens
gagcaatgctttcctctttaatggccaactttgtacaaaaaagttggcgtctgcgctcggtttgagggctcggcgcggggtttcctgttccttcttctgcgcggctgcagctcgggacttcggcctgacccagcccccatggcttcagaagagctacagaaagatctagaagaggtaaaggtgttgctggaaaaggctactaggaaaagagtacgtgatgcccttacagctgaaaaatccaagattgagacagaaatcaagaacaagatgcaacagaaatcacagaagaaagcagaacttcttgataatgaaaaaccagctgctgtggttgctcccattacaacgggctatacggtgaaaatcagtaattatggatgggatcagtcagataagtttgtgaaaatctacattaccttaactggagttcatcaagttcccactgagaatgtgcaggtgcatttcacagagaggtcatttgatcttttggtaaagaatctaaatgggaagagttactccatgattgtgaacaatctcttgaaacccatctctgtggaaggcagttcaaaaaaagtcaagactgatacagttcttatattgtgtagaaagaaagtggaaaacacaaggtgggattacctgacccaggttgaaaaggagtgcaaagaaaaagagaagccctcctatgacactgaaacagatcctagtgagggattgatgaatgttctaaagaaaatttattattatggagacgatgatatgaagcgaaccattaataaagcctgggtggaatcaagagagaagcaagcccaaggagacacggaattttgagactttaaagtcgttttgggaactgtgatgtgatgtggaaatactgatgtttccagtaagggaatattggtgagctgcatatataaatttgacagatagctatttacatagccttctaagtaaaggcaatgaattctccatttcctactggaggatttatttaaataaaatatgcttattaaacactcctgcaaagatggttttattagtaccctggtcattttgttcaaggaagggttatattgcattctcacgtgaaatataaaaagcatgtcttgcccaataaaaacgctacattgtgtgtattttttgttcagctaagaattggaaaagtatttgcttgccttttaagttactgacatcagcttccaccagtgtaaaaattgagtaaaacctgaagttttgcataaaatgcaaattggtgcctgtgcttgaaggttgctgtagagcatctgaccccttattaccaccttaagcaatgtatatgccatgcattaccatgcactaattcaatcacaggtgtttctatctagatttaaatatatttgtcaatgaatgtggaatagaaaaatctaaacatgacaataataaacatatctttgtatggtaccagttagttttgccgtggatcagatggtttataaaagtaataaccataaagcaaaaaataatttgaaagcccgtctaatccctatgctcaataagttaagtttttc

SEQ ID NO: 228970 - DNA, 934 bp, Homo Sapiens
ccttttcagcgatgcagcgaagcagagtctcgggatcgtgcagcacacccaccagatccaaagatgtcccggtccttggctcgcacttccacgcccaaggccccctggcccacagcatacatgcattcctcagggtgcaggatctgccccacccggttgtgccagcccatgcgctgcaggccagctgttgccaggatgatggcactgaactcctgctgctcgtccagcttccgaagccgggtgttgaggtttccccgaatactcctgaactccagatgcgggaactttctctgcagctgggctgctcttcgcagggagctggttcccaccacactcttctctggcagggtttctagggtcttcccaacaaattttgggtgaaagacaacagcatcatgagggttttcccgcttgcagatggctccgatggtgaagccaggaggaagcacagtgggcaggtccttcaaggagtgaacaaccaggtccacttcattcttctccagggcatgttcaagctccttggtaaacaggcttttctctccaatcttagagagtgcagtatcaagaatcttgtcccctgtggtggacatagcaatgatttcaaactgcaggccagggtacgaggctttcaatgttgccaccacactgtccgtctgtatgcgagcaagctggctcttgcgggtacccacgcgaatcactctcatctttgggctgttttcttccgccgttgcagccgcattgccgttaccagacatggctccgcttggaaagtaggctgtgtgtgggtgccgctaaggtcccccggccccgggaagccgggggctccggccggcgagtaccggggacacgtgggacccgaggtcgtcctacagtctgactcctggtctccaacttttttgtacaaagttggctttttataaagaaagcattgctc

SEQ ID NO: 228971 - DNA, 728 bp, Homo Sapiens
ttagggatcccttctttcccctatacatacacagacatacaaacacacgcacccgagtgaatgacagggaccatcaggcgacagattgaagggcagagggaggcagcaccctccgagagttggcccggacccaagggtgggctgagacctgggccaggggcagccgttccgaggggttatgcctgagcagtttggagatgaggtcctgggctcccgtgggcacggaagcggggaactttaggtccaccttgacgatgcggcgataggtctcgttgtgtgatgcactctcaaagggtgggttccccaccagcagctcatagcaaagcactccaatgcaccacagatccaccttctcattgtgcatgcgcccctcaatcatctctgggggcaggtagtccagggtgccacacattgtcttcctcctcagggagggcgcatgcacagaccagccgaagtcagcaatcttcagctctcccttgagccctaagagcagattttctggctttatgtctctgtgaatcaccttcttcccatggcagtacattagagcatctgccaactcctccatgatcgtggctgttcgctgctcgtcaaatgtgcagctcttctgcagctccttgtagagctccccgcggggggcatactctagaatcaagtagatcctcctccggtcataaaaatagttgtagagacgcaggatgttgccaacttttttgtacaaagttggc

SEQ ID NO: 228972 - DNA, 741 bp, Homo Sapiens
gaccgcatacacacagtcaggaaggcctactaactgggcccaccaagagacaattacccccaccctcaatgcagagtcctttgggcttccagggaacaggccttttcttacatggctctggtccgaggtccagtactcagcatgcgaagagccatatcacggaggggataagtggaggagtgtcttttcaattacttgggtgtgaccctgaagactcggatgtggatggctgagttgttgcggatccgagtcagtggctcccgtgtgtcggtctctggctccagctcatcaacaagctccacggtggaggtattggcagccacctgcaaggacccgaagctgcccgcctgcagctgcagcgcgatgttgatggcgcggttgatggccaggcccaagccgtgaatgtagatctcagagcacgcgttctgaccccgggcccctccgtccagcagcttctggcagcgggccagctgggccttaaagtccgtcttcatgttgacataaatgtcattgggtctccggggcaggcggctgggaagccttttcctaagggtgtattccactggatccagttcagcctccacagcaccgcggggctctcggttttctgccatgctgtgtgcctctcttcgttccacagggccctccaggcgcgcgaggcccgctccccgccaggccactcaagggttcgccggccagcccaagtaaccgcgaccccaggtcccagagaaagaaggccaa

SEQ ID NO: 228973 - DNA, 408 bp, Homo Sapiens
ctttgtacaaaaaagttggctgagggtgcgactccgccgcgatggtgacccggttcctgggcccacgctaccgggagctggtcaagaactgggtcccgacggcctacacatggggcgctgtgggcgccgtggggctggtgtgggccaccgattggcggctgatcctggactgggtaccttacatcaatggcaagtttaagaaggataattaattacacaaacccttcacagactgctctggtgcctggtggcgctagctcctcccacctcagcacctgctgcatctggagcagcccaagcctcaggatggacaagaggaaacccactttttcagcttcaggcttcttatgtttctgaaaacagcttggatattttaatgcacgttgcattaaacctcactgaaacctg

SEQ ID NO: 228974 - DNA, 649 bp, Homo Sapiens
ttggcggaagtgatcccctagacagaaaggctgggctgctcgggttagatcgtcaggaaaagcctaaagattagactgtaagaaaagaaaatagaagccatgtttcgaagacctgtattacaggtacttcgtcagtttgtaagacatgagtccgaaacaactaccagtttggttcttgaaagatccctgaatcgtgtgcacttacttgggcgagtgggtcaggaccctgtcttgagacaggtggaaggaaaaaatccagtcacaatattttctctagcaactaatgagatgtggcgatcaggggatagtgaagtttaccaactgggtgatgtcagtcaaaagacaacatggcacagaatatcagtattccggccaggcctcagagacgtggcatatcaatatgtgaaaaaggggtctcgaatttatttggaagggaaaatagactatggtgaatacatggataaaaataatgtgaggcgacaagcaacaacaatcatagctgataatattatatttctgagtgaccagacgaaagagaaggagtagaaaggatgattcttctttggccatcatttggtacagtctcatttccaagtcatgtataatctttatggcttccaaggacaagaattaaaatactcttttacgt

SEQ ID NO: 228975 - DNA, 927 bp, Homo Sapiens
ttgggtttccagacccccgggtcgctggcacccagaccaccactcatttgcctggaatcccacctaaccatgcccctctggtcaccaccctcggtgcccagctaccccctcaagccccagatgcccttgtcctcagaacccaggccacccagcttcccattatcccaactgcccagccctctctgaccaccacctccaggtcccctgtgtctcctgcccatcaaatctctgtgcctgctgccacccagcccgcagccctccccaccctcctgccctctcagagccccactaaccagacctcacccatcagccctacacatccccattccaaagccccccaaatcccaagggaagatggccccagtcccaagttggccctgtggctgccctcaccagctcccacagcagccccaacagccctgggggaggctggtcttgccgagcacagccagagggatgaccggtggctgctggtggcactcctggtgccaacgtgtgtctttttggtggtcctgcttgcactgggcatcgtgtactgcacccgctgtggcccccatgcacccaacaagcgcatcactgactgctatcgctgggtcatccatgctgggagcaagagcccaacagaacccatgccccccaggggcagcctcacaggggtgcagacctgcagaaccagcgtgtgatggggtgcagacccccctcatggagtatggggcgctggacacatggccggggctgcaccaaggacccatgggggctgcccagctggacagatggcttcctgctccccaggcccagccagggtcctctctcaaccactagacttggctctcaggaactctgcttcctggcccagcgctcgtgaccaaggatacaccaagcccttaagacctcaaggggcgggtgctgggggtcttctccaataaa

SEQ ID NO: 228976 - DNA, 967 bp, Homo Sapiens
ttggctctgaaggcctacaccccggtcgtggtgaccctgtggtaccgcgccccagagctgctgcttggtgccaaggaatactccacggccgtggacatgtggtcagtgggttgcatcttcggggagctgctgactcagaagcctctgttccccgggaagtcagaaatcgatcagatcaacaaggtgttcaaggatctggggacccctagtgagaaaatctggcccggctacagcgagctcccagcagtcaagaagatgaccttcagcgagcacccctacaacaacctccgcaagcgcttcggggctctgctctcagaccagggcttcgacctcatgaacaagttcctgacctacttccccgggaggaggatcagcgctgaggacggcctcaagcatgagtatttccgcgagacccccctccccatcgacccctccatgttccccacgtggcccgccaagagcgagcagcagcgtgtgaagcggggcaccagcccgaggccccctgagggaggcctgggctacagccagctgggtgacgacgacctgaaggagacgggcttccaccttaccaccacgaaccagggggcctctgccgcgggccccggcttcagcctcaagttctgaaggtcagagtggaccccgtcatggggagaactcagccgggaccacaggcgtggctactgcggctggagctgcgatgagactcggaactcctcgtcttactttgtgctccatgttttgtttttgtattttggtttgtaaatttgtagaattaaatcattttccttgttgtggagggaaagagctgtgttttctccgtgacttggcccagggcggaagagggtgggcatcttcggggtgccccacgtggggcagcacaaaaccttccacacaccctcctcccactctcgacacgcacggggctgggcttgggccgtgatttggaaaaggaaattggtgggagccc

SEQ ID NO: 228977 - DNA, 877 bp, Homo Sapiens
  misc_feature (177)..(221): n is a, c, g, or t
gggaaaggaagagggtgtagtgtgagtgggccccaggaaggggaagggcactgggggtggggatcccccatttcacatgcactcacaacactaatctcccagggagccggaatggggcagccggatggagccaggcccccttccgccctggattataggaggaagggattagtgttnnnnnnnnnnnnnnnnnnnnnnnnnnnnnnnnnnnnnnnnnnnnncccgccaaggggagagatgtacgtgggtggcgctccagggacgggaggcacaggactgagacggagctggttcagggtgagcgtcgcgggaggcgcgggctggaaggggttggtgacggaagggccagtggctgggcctccgcctggcaggaaggggttggaggccttggctccaggcggcgtggggcccggccggctcaccagcgagtccaggtcgacgagggctgcattgggccccaggaatgactccggcgtcttccgggtggggggcgtgggagttggtgtggctgcaggtggggggctgcccacagcctcagccagagatcccctgaccccactcatgtcaaacgccccagggcttcgggccggcacctctcctgccagcagctccagctctcctgcgctgctcccggaggtcggcagtgccgtgcggagtcggtcaaagtcagagaactcgtcgggctccgtgtcgaatcccccggctgctgttgtgccattggtgctgggcttggcaggtgaccctccccagggatctgagaaggccggggccggtgtccagggatcggaggctgagggcccactgaccgggaccccaccatcggaacttccccatggatcaggcgtgggcccctccccagctgcaggggctgggccaa

SEQ ID NO: 228978 - DNA, 1021 bp, Homo Sapiens
ccaaaaataagcatcttgtcaatcttgacattcacaggtaaagctgcaaggtgttggcccaacggagtcagtttaggctcatttaattcacaagctccaatttttcggagcaaattcattgcattgctgatcacttggagctgaggaggatctaaggctttggagaggaaatcttcaggagaaccaagattacatttcataatatgaaggcataattcctccaaaggtacacgtaagatttcaggaacagaataatccataaagccttcaaatctttctcttgtgtacattcggaaacagaagccatctctgacccgcccagctcttccctggcgctgcaaagcactggctttactgacaaacgtctccaccaaagaactcatctgactgctttcatggtacttattttcttttgttcttccagtatcaattacaaatacaacatcaggaatagtgatacccgtctctgcaatattggttgctaaaacaatcttcctgactcctggagggggaagtgtgaatgctgcagcttgatcttgggttgaaagaatagaatgcagagctatcactttatatcgttcagaataaaatcttctatcatttgatagaagatcatacaactgctgaatatgagcaagtcctggtaaaaagatcaatactgctccttcaatatttctgaattggggacttttatctaagtatgcaagaagttccaaaatgagatccaggttgattttatgaggattcatgtatagaatagcatgctgagtgcggctgctgtacttttggtaaaatggatttaaatcagcatgtgctccagtctgaactgggatgtattcctgatatttttttattccccctgctttgcttgtaacattaatggttacttcttcttcctcttccagaaatttctgacaatattctgagtctttttccagtacaaagcctgtttcttctattatatcttcaagatgaaaaacctcaacaggataacttcttcctgaaattctgagaatgccaa

SEQ ID NO: 228979 - DNA, 666 bp, Homo Sapiens
actttgtacaaaaaagttggcgcacagggcgagggcggctgcggcgcagtctgcagcatggcgtacccggggcatcctggcgccggcggcgggtactacccaggcgggtatggaggggctcccggagggcctgcgtttcccggacaaactcaggatccgctgtatggttactttgctgctgtagctggacaggatgggcagatagatgctgatgaattgcagagatgtctgacacagtctggcattgctggaggatacaaaccttttaacctggagacttgccggcttatggtttcaatgctggatagagatatgtctggcacaatgggtttcaatgaatttaaagaactctgggctgtactgaatggctggagacaacactttatcagttttgacactgacaggagtggaacagtagacccacaagaattgcagaaggccctgacaacaatgggatttaggttgagtccccaggctgtgaattcaattgcaaaacgatacagcaccaatggaaagatcaccttcgacgactacatcgcctgctgcgtcaaactgagggctcttacagacagctttcgaaagacgggatactgctcagcaaggtgttgtgaatttcccatatgatgatttcattcaatgtgtcatgagtgtttaaatcaagaagaa

SEQ ID NO: 228980 - DNA, 947 bp, Homo Sapiens
ctcagctaggaattagaaacatcatttgtcctcttggcctgttcagctggtgactgtagatttgatgaaaaggaaacttgggactccggaggaccaagatggagcgagacggtcaatactgatggacttgcagctagcaccatggcagccctgcctggtctaaggaagctggcaggaggcgatggtacctggcgggggcagactgcccacctccccactccttcagaggactgtttcctgcccttcacaccatcatcatgttgggccctgcatgtatgttcctgcacttggagcgagcccagggacacagggcagacactgggctcacagatgttgctgcagctgagccagaaaacattccaggcaggaaaagcaggtgcacacattcacacaggcctctggtcactcgaccagccagaatgagacggactccttgacctgggaagtcaagtcccagtgggaagggctggaaatcacacgtggtcaacttcttggctctctctgctccccaaaccctggccctaggcttgctttatcatcacatcccaaggccagagggctgctgctgtccccatcttggccctgctagaagagggataggggtggctggcatgatgggtgaggggaacatgagaatatgcagaggccttggaggaagaggactggcagttatgacaggaaggctctctatacctggctccccagtgttctgcccctggcactgagcatgaggagccaggctttggggagactttgcaatcacccccccaacctggtccattttccacaggtagctttcttgaactcaccttgacccctcctcagccagcagcccccacctccaggggcaaaggagctgaaagacagtcctgaactggggggagctgggatcacatcagccaggccctgtccaatgggacaggaagtgccaacttttttgtacaaag

SEQ ID NO: 228981 - DNA, 157 bp, Homo Sapiens
tgagccaccgtgcctagccaaggatgaaatttttaaagtatgtttcagttctgtgtcatggttggaagacagaatatgaaggatatggaaaaggtcatggggaagcagaggtgattcatggctctgtgaatttgaggtgaatggttccttattgtct

SEQ ID NO: 228982 - DNA, 587 bp, Homo Sapiens
tttgtacaaaaaagttggctcatgatgacctataaataaaccccaatctggaacaatgtccctcctcttagaatgtcccaactaaagaccagttaaaatattagggtacgttcttgtgaatttccactttccaggtagatgaccaaatttaggtggtcaagatataaaggtgtcagctagttttaagtgtgaaacttatttcactttcacactgccttcaggccagaagcaaaccaaatttaccaggtttggctggaggagttttgtgactcatcttttactggtttgaattttttcaaaccagtggctgatacctgccttgtacttattaccttaataccaataacctaatggtacttaggcgagtaccatttgcacaatcactgttttacttatgagcagatacagatatatccaaacccttacctactaggtatcctgctagggttttcaattccaattcttgtattaagttttttcctttcagttttaggtgcgaaagtaatcagtcaatccaatatcccccatctttgtcttgaaacaaaaactgttttaagacgtctacgttgaattattcagagaattaa

SEQ ID NO: 228983 - DNA, 755 bp, Homo Sapiens
tgttccccagggacatcatctttgcagaggaataatgttgcagcccagcagtccttttcctgcccagcgtgtggaacaagtctaagctggtgtttttcccccctgcggatcactgtcacattcaggggcttcccctcactgtgctgcaccacactgccaatgttatgcagtgactggaagttctgggtgttcacagagccgaactccacaatctcatcatccacttgcagacccgcgatgctggctggggagccggggctgatgctgttcactttggcgaaggcccgtggagggccctggctctcactctgacccagtttgcggctcatggcctctttgtgggcctcagccatgtcccgggcctgcttctccttgtcgcgagcgtgcagctggtgcagggcctcctccacctgcttcatcactgccttgtgatcattctgcaggcatatgatgttgtgcctggcggtgcggacttggtacaggtccacgtctgaccgggggtagccctcacagtccaccagcggctcgttcatcccaatgcctttttggctttccagcacgtcatagttggccttgatctgcgcttctatctcctccttgcgccgcatcagctcctggacgtcgctgacagtcacggcgccggcctgcgaggagcctccgctctgcctcgcttcctcgtcggacatcgtgaaccccgggccgcgactccagagacccggctcccgggctagggacgacgccccagtcgaccccaa

SEQ ID NO: 228984 - DNA, 780 bp, Homo Sapiens
  misc_feature (633)..(672): n is a, c, g, or t
ttggacctgctcgagtgcctgcagaagacacccccgcctgtactcatctttgcagagaagaaggcagacgtggacgccatccacgagtacctgctgctcaagggggttgaggccgtagccatccatgggggcaaagaccaggaggaacggactaaggccatcgaggcattccgggagggcaagaaggatgtcctagtagccacagacgttgcctccaagggcctggacttccctgccatccagcacgtcatcaattatgacatgccagaggagattgagaactatgtacaccggattggccgcaccgggcgctcgggaaacacaggcatcgccactaccttcatcaacaaagcgtgtgatgagtcagtgctgatggacctcaaagcgctgctgctagaagccaagcagaaggtgccgcccgtgctgcaggtgctgcattgcggggatgagtccatgctggacattggaggagagcgcggctgtgccttctgcgggggcctgggtcatcggatcactgactgccccaaactcgaggctatgcagaccaagcaggtcagcaacatcggtcgcaaggactacctggcccacagctccaatggacttctgagccgacagtcttcccttctctccaannnnnnnnnnnnnnnnnnnnnnnnnnnnnnnnnnnnnnnntgcagcccctggacgtatcagcttttcagctcagctggcctggaatgggccagggctggccttggctgcccggttccctgtgctctccagaatcctgtttctgtttcc

SEQ ID NO: 228985 - DNA, 809 bp, Homo Sapiens
ctttgtacaaaaaagttggctataattcagtggtgaatcctaacaaggccaccattggtgtggggctgggcctgccatcattcaaaccagggtttgcagagcagtctctgatgaagaatgccataaaaacatcggaggagtcatggattgaacagcagatgctagaagacaagaaacgggccacagactgggaggccacaaatgaagccatcgaggagcaggtggctcgggaatcctacctgcagtggttgcgggatcaggagaaacaggctcgccaggtccgaggccccagccagccccggaaagccagcgccacatgcagttcggccacagcagcagcctccagtggcctggaggagtggactagccggtccccgcggcagcggagttcagcctcgtcacctgagcaccctgagctgcatgctgaattgggcatgaagcccccttccccaggcactgttttagctcttgccaaacctccttcgccctgtgcgccaggtacaagcagtcagttctcggcaggggccgaccgggcaacttccccccttgtgtccctctaccctgctttggagtgccgggccctcattcagcagatgtccccctctgcctttgcgtctgaatgactgggatgatgatgagatcctagcttcggtgctggcagtgtcccaacaggaatacctagacagtatgaagaaaaacaaagtgcacagagacccgcccccagacaagagttgatggagacccagggattggacaccatctcccaaccccaatactcctgctctccggtgccacctcaccttctttgg

SEQ ID NO: 228986 - DNA, 1025 bp, Homo Sapiens
gtggtagagataagatactcaaacctgaaatcagaagagggccatgcattggtatacacgccgcaatacagagactcagtccaaccacagcgaggatataggctatcacctgaataaccaatatggcaatgacgaaggaggttaatccaatcgctgtactaaacacatagtagtgaagtaatattaatatccctgtagaagtcacaattaaaccaaggccagtagcattctttaatgaatattcacctgggacgaaaagaatggctccaacaatgacaatgacagtgatcactagtccagcaacaagtaaagcaattgttttctcatccataccaccggatgtatatttaagtgttttaataccaaactgtccccagaacaggagtatagcaaaaattgggaaaataacaataagaatattttcatttggagaaaaccatgaaacaacacgatattttagctcgatgatcgtttcaccttctctggttaattctgttacttcacaagtgtagtttcctgtgtgtgagacagcatcactcttatccatcttcaaagaggcatctccttttagtaattgtgagacttcaatttttgcactactaaagtcagtggggacagtggacttgtttagagctccatcaaaggtgtaaatatctcttcctttaaatttccactttacgtatacttcagtagtgttttgtgcctccatattagtaacaaagcatggaatgacgacagtgtcattacaaaacgtgaattctacagattttgttttattaaatagtagctgagctgatcaatttagaatgtatgcaagtggctgatggggcgtgagggtcacgagaaaggaagagtttccagcaagcttatttttaggattaaaaacgacagcaaaaattacacggccggaagattcttctgattgaatgctgagttgaaaatgaaacttaattgtgtcctttacgtcctcttcgctccgcagcacgccgagcccagcaacagcgccgctaccaggggccacatct

SEQ ID NO: 228987 - DNA, 416 bp, Homo Sapiens
tggccctgggggccctcttcaagtccctctgccttctcacctctttgttcctttcttttcatgtatccattcagttgatgtttattgagcaactacagatgtcagcactgtgttaggtgctgggggccctgcgtgggaagataaagttcctccctcaaggactccccatccagctgggagacagacaactaactacactgcaccctgcggtttgcagggggctcctgcctggctccctgctccacacctcctctgtggctcaaggcttcctggatacctcacccccatcccacccataattcttacccagatcatggggttggggcggaaacctggagagagggacataccccctccccacggctagagaatctggtggtgtccaaaatgtctgtccaggtgtgggcaggtgggca

SEQ ID NO: 228988 - DNA, 786 bp, Homo Sapiens
  misc_feature (527)..(597): n is a, c, g, or t
ttggcttgagggaagcatggaggtccatggcaagcccaaggctagcccgagttgttcgtcgcccacccgggattcctcaggagtcccagtgtccaaggagctgctgacggcgggaagcgacggccgcggaggtatatgggacaggttgctcatcaactcccaacctaagtccagaaagacctccactcttcaaacagttcggatagagaggagtcccttattggaccaggtacagacatttctcccacagatggcacgggcaaatgaaaagctaagaaaagaaatggcagctgcaccacctggtcgtttcaatattgaaaacattgatgggcctcatagtaaagttatacaaatggatgtggctttgtttgagatgaatcagtcggattcaaaagaagtggacagttcagaagagagttcacaagacagttcagagaacagttcagaatcagaagacgaagatgacagcatcccatctgaagtcaccatagataacattaagcttcccaattctgaaggtggaaaannnnnnnnnnnnnnnnnnnnnnnnnnnnnnnnnnnnnnnnnnnnnnnnnnnnnnnnnnnnnnnnnnnnnnngccaaagtgttgggattacaggcatgagccaccgtgcccggctggaaactagcttatctttatttttcttcatctattccaagatctgaacaacaaaattcattgacttaggatgagatgatgcctccaccatgaaacctaaatctgaagccctgaggaagtcctgaaggaccccacccctcacgatta

SEQ ID NO: 228989 - DNA, 668 bp, Homo Sapiens
acaaaaaagttggcccaaaagccacccatttgtggaccacgtgtttactttcaccattttggataataggatatggtttcggaactttcagatcatagaagaagatgctgctcttgtagaaataggacctcgttttgtcttaaatctcataaagattttccagggaagttttggaggaccaactttatatgaaaatcctcactaccagtcaccaaacatgcatcggcgtgtcataagatccatcacagctgcaaaatacagagagaaacagcaagtgaaagatgtgcaaaaactgagaaagaaagagccgaagactcttcttccacatgatcccactgcagatgtttttgtaacaccagctgaggagaaaccaatagaaatacagtgggtaaaaccagagccaaaagttgatttgaaagcaagaaagaaacggatttacaaaaggcaaagaaaaatgaaacagaggatggacagtgggaaaacaaaataagtcaatggaaacctgatttgtttttcagttactttatatttattttgtattcaatgtgtaaatacttttattatctaatactatcttacgtctaattagtgtagcatttacaagaaagaaaaattaagatcttaaaatcagtgattatctttttctaaataaaatatcaccagaattc

SEQ ID NO: 228990 - DNA, 562 bp, Homo Sapiens
ctttgtacaaaaaagttggggcgtcttcgccctgttgctggtctccgtccggtcgccggccgtctaggtctccggccctccccagccgctcctgcgcccttgccggccccgccgcccgcagccctggcgctccctgcgggccccgccgaggccgcctgcgccctgtgccagcgcgcgccccgggaaccggtgcgcgccgactgcggccaccgcttctgtcgggcgtgcgtggtgcgcttctgggccgaggaggacgggcccttcccgtgccccgagtgcgccgacgactgctggcagcgcgccgtggagcccggcaggcccccgctcagccgccgccttctggcgctcgaggaggcggccgcggcgcccgcgcgcgacggcccggccagcgaggccgcgctgcagctgctgtgccgcgccgacgccggcccgctctgcgccgcctgccgtatggctgcgggccccgagccgcccgagtgggaaccgcgctggaggaaggcgctgcgcggcaaggagaacaaggggtctgtggaaatcatgagaaaggacttgaatgacgccc

SEQ ID NO: 228991 - DNA, 811 bp, Homo Sapiens
ttggctaaaattatcagacttcctttttccaatataaagaaaaaaagtaagttttcagaattctctcaatttttaagtttttctcccccatattttgtgaaaagcagtggtatgtgtacgtgttgtctaccagtacacaggctgcagaagacagagacagaagaaagagatcaagggcagataactgttgataggaatatttgagaaagattgatcctgtttgacttgaggacttattttgttcacaggcatgcacgcttgtggttgtggttttatattacagatgtagaacaatggttatgtttcccgacatgaacattgtcctggaatgaagtgtgatcagccacttgtggaattctttgaagagctcagaggcttccaagtgatctgctcctgaacaagtttgaagacctattgtttcatagacccaagaccaaacgcatctaaaggatccccagcccccaagacctagcctttgtctgcgattttggcttcatctcccacaaaacccctttatgagttcacgctctttcctggactgacatacctattcctttccatttgttggactcctattcatgcttcaaagtccagctttcttaagcccttctttaggaagccttcccacacagccaaccctgctgctctctgcctcctttaaattcttgatacagctgctgcttgttctgatgttttatggtattgattctgttttcctgtgtatatgccagtttttctagctagactgtaaactccttaaggacagagactacaccttgtactttttgtgcatgacctggacctgctaagg

SEQ ID NO: 228992 - DNA, 1066 bp, Homo Sapiens
  misc_feature (221)..(261): n is a, c, g, or t
ttggggttcgagccatataaacccgggaaccgggagcccttgacgacattgttccccgagtgcccggagtctgcggctttttttggggtggtggcagctggcggaagtgacgggagaggggtggggccgcgagagcggcggaagtaggaagccgaggtctgaattgcgcgtggtggccatggcggccagcggggctgtggaaccagggcccccgggggctnnnnnnnnnnnnnnnnnnnnnnnnnnnnnnnnnnnnnnnnntgatcacctgttccggcccatcagcgccgaggacgaggagcagcagcccaccgagatcgagtcgctatgcatgaactgttactgcaatggcatgacgcgcctcctgctcaccaagattcccttcttcagagaaataatagtgagctccttttcctgcgagcactgtggctggaacaacacggagatccagtcggcaggcaggatccaggaccagggagtgcgctacactttgtctgtcagggctctggaggacatgaacagagaagtggtgaagactgactctgctgccacaaggattcctgagctagattttgaaattcctgcctttagccagaaaggagctctgaccactgttgaaggattgatcacccgtgctatctctggcctggagcaggaccagcctgcacgaagggcaaacaaagatgctacagctgaaagaattgatgagttcattgtcaaactgaaggagctaaagcaagtagcctcccctttcactctgatcattgatgatccctcagggaacagttttgtggaaaacccacatgctcctcagaaagatgatgccctggtgatcacacactacaaccggacccgacagcaggaagagatgctggggcttcaagaagaagcaccagcagagaagccagaagaggaagatctcagaaatgaagtgctccagttcagcacaaactgcccagaatgcaatgcccccgctcagaccaacatgaagctagtacaaatccctcactttaagagttatcatcatggctaccaactgcgagaactgtgggcatcggaccaatga

SEQ ID NO: 228993 - DNA, 354 bp, Homo Sapiens
ttgggcttctatcccggccatttaaagaaagcccagcgcagatcgcttgcagcttgctagctgtgtgggctgggaggtctggtagggctgagcttgcaagaggatcaacatgcctttggctagagatttactacatccgtccttggaagaggaaaagaaaaaacataaaaagaaacgcctagtacaaagtccaaattcttactttatggatgtaaaatgtccaggttgctacaagatcaccacggttttcagccatgctcagacagtggttctttgtgtaagttgttcaacagtgttgtgccagcctacaggaggaaaggccttactctttttaagggtgttaatttataaaaa

SEQ ID NO: 228994 - DNA, 579 bp, Homo Sapiens
ttggggaataactatcccacttccagatatccacataaatgctccttgtggccttttttataactaagggggtagaagtagttttaattcaacatcaaaacttaagatgggcctgtatgagacaggaaaaaccaacaggtttatctgaaggaccccaggtaagatgttaatctcccagcccacctcaacccagaggctactcttgacttagacctatactgaaagatctctgtcacatccaactggaaattccaggaaccaaaaagagcatccctatgggcttggaccacttacagtgtgataaggcctactatacattaggaagtggcagttctttactcgtcccctttcatcggtgcctggtactctggcaaatgatgatggggtgggagactttccattaaatcaatcaggaatgagtcaatcagcctttaggtctttagtccgggggacttggggctgagagagtataaataaccctgggctgtccagccttaatagacttctcttacattttcgtcctgtagcacgctgcctgccaaagtagtcctggcagctggaccatctctgtaggatcgt

SEQ ID NO: 228995 - DNA, 1001 bp, Homo Sapiens
ttggcctaatttaaaggaagaagacattttgaataagagccttgatgcaaaagaaccaccgtctgacttgacaagatgaagacgtacccatttaatataactatgatgcacttaaattgaagctatgccacaggatagaaaatgaattacaacttaaatacatgttggaagtgtaacactgtttttcaaggtttaaaaaaattcctaatgccttttagccttctttaatatttttaggtaaggaaagtatgtttggattttttcctctttgttaggtatatgagattgaaatgtgaagtatttggacaacaaacgtcaagcaatgggaagccattttgatttcttgagtaatcttgtaagcattaagtgaatgacaaagtagtagtgtaacttatttcttatgttataacttcagtcaattaatataaggatagtttttgttgtatgttcactaagtggttaatataatagccattgaatatactaatctttcatcttagagaactatacaacttttattgtttcttaatggaacattctggctaaccagaaaaagtgagaaaagtagtaccttgggatgtgtagtcaagatgacaaattttaagactggaaaagctctaaacaggcttaatgattcttcaggtagaatgatcctgagaagtgatgtttgatggaataaagtgcatgtgatgattaagtgaagactggggcagaatgatttaaaaaaaggaaaaagatggaagatgagtagacacttgcaaggaacactgtcaaactataaatccattcagtgggttgtataacatttatatttagtctaatttagactttgataatttaatgctacttttatattttaacaaaaatataaattaaaattttcattagtctgttttgttgttgggtttttttgtgaggtactccctgttgggggaaaggaacaaggaacaaccatcagaatcccccagtccctacaaatagcctcacagtaacttgagaaa

SEQ ID NO: 228996 - DNA, 1207 bp, Homo Sapiens
catttagacaactttgtacaaaaaagttggattatcttatgttttgaaatacctgtgaattgttggcattgagcagctgaagctaactcatgactctgttttgaatgtaaatatttgtaattaagcctgcatatatttttttattgccctagagtactcaagtgtttttcaccaagagcttttcaggttgcccctaagctttgtgcaattttttctggttccccaaagtgtatttttctctaagtcgagggctatgccataatacaaatggaaatgttacctttgattttcttataaaggagtttaaataggatttttaaataatgtagtaacactcctgatacaactctggttataagtgaattgagcattaatgtttcttttgtataaattcctgtcctgaaatattttattcatgaaaataaggtaagcaaaaaccaactccattttgccaggattttgttgtgctgagattgccaatcacggttaaacacaaagtgtttttatagaatgaagaaacagtctttaacagaaaaaaggtattgaaatattaaatggccaccaagtttactttgaagcccatttttggctgtttagtcagcatgaagtgggcatgataattttttaatatttctttttgtgaaatttcctgtacagccttttgtaggattactacaggttaatgtgagttgaggaagacagtctttctcaaacaatactacataccttttattatattacaaacctaagtgttttatatcctagagtcaaggaacaaatttccttaggattatagtattacatgccataaaatactatgctttattggtcccatgttttgtgcaattttaaagagatggctttctattaagtataaactatgtatatataagaaccatattttccacaactaaaatgtgcattattttttccaaagttttatcattgctatttatttttacctttgtttttgaacattcaatccgttcattttgtatgtatgcttaatacgtgtcggtcatatacagtattgaatttttactgtatagtaattctggaaagagcaaataaaatgaagattgtttttatttgcctgataaagtaattggaaagtgtatttttggtatgaagctgggttttctcgtcacaattgtaatttcccaaattttaaaatatcttattacaaaataaaaatatattgatagct

SEQ ID NO: 228997 - DNA, 1258 bp, Homo Sapiens
ttggatggcgttctggtgtcagcgtgacagttatgcccgagagttcaccaccaccgtggtctcttgctgtcccgcggagctgcagactgaagggagcaacggcaagaaagaagtgctgagcggtttccaagtggtgctggaagacacagtgcttttccctgagggcgggggacagcctgatgaccgtggtacaatcaatgacatctctgtgctgagagtgactcgccgtggggaacaggctgatcatttcacccagacacccctggatccaggaagccaggttctggtccgggtagattgggagcggaggtttgaccacatgcagcagcattcagggcagcatctcatcacggcagttgctgaccatctatttaagctgaagacaacatcatgggagttagggagatttcggagtgcgattgagctggacaccccctctatgactgcagagcaagtagctgccattgagcagagcgtcaatgaaaaaatcagagatcggctgcctgtgaatgtccgagaactgagcctggatgatcctgaggtggagcaggtgagtggccggggtttgcctgatgatcatgctgggcccattcgggttgttaacatcgagggcgttgattccaacatgtgctgtgggacccatgtgagcaatctcagtgaccttcaggtcattaagattctgggcactgagaaggggaaaaagaacagaaccaacctgatatttctgtctgggaaccgggtgctgaagtggatggagagaagtcatggaactgaaaaagcactgactgctctgcttaagtgtggagcagaggatcatgtggaagcagtgaaaaagctccagaactccaccaagatcctgcagaagaataacctgaatctgctcagagacctggctgtgcacattgcccatagcctcaggaacagtccagactggggaggtgtggtcatattacacaggaaggagggtgattcagagttcatgaatatcattgccaatgagattgggtcagaggagaccctcctgttcttaactgtgggcgatgagaaaggtggtggactcttcttactggcagggccacctgcgtctgtggagaccctggggcccacggtggctgaagtcctgcaatgcaaaggagcatggaagaaaggccgttttcatggcaaggccaccagatgagccggcggatggaggcgcatgcgcttctccaggactacatcatcacgcagagtagctatgagtgaagggcttatggcactc

SEQ ID NO: 228998 - DNA, 634 bp, Homo Sapiens
  misc_feature (114)..(134): n is a, c, g, or t
ctttgtacaaaaaagttggcacaaagataagttcctgattcggtacacttactgagcacctgctgtgtgcagggagctgagctatgggatgggaatgggagtaaacaaggtacnnnnnnnnnnnnnnnnnnnnncctcactgctagacggtgtgggaacttctcactcattggcttctttcccacacacctgaagagcactgactgtgtgccgggcactagtgatacaaaagagtgtgacagttgttcagtctgcattttcgatcatgggctacatgccgagtgctggggcacagagatgaacaagatcggttccttcacttcttcatgccacaagtgtttattgagcacctgtgtgccaggcctcacagactcccagttgggttgaagaatggttgactgagtttgattcttcctgtaccctcggtcgtctgagctgtgtgcagacaacatccccccaccacccaagagggagggtagctcttccgccaccaggggcaagcacaggtcctggtggccccacgccacatgttagcccccctggagggggcgccagttggagacgggggctgggtgtccctggcccactcccggtcccctgtgctttacctccttgcccttgtgtctcaagtgtg

SEQ ID NO: 228999 - DNA, 591 bp, Homo Sapiens
ttggttaagaaagacccataaagaaaaaacatatttaattactgtaaacaggtactgctttatgtttattttctctctacttcaaccaaaatcagatctttgaggttttgctgacattgttggtggttttgcacatgttctttctaattggatttatgaatagttctatgggttttcaaagatgaatcatgctaagaacacttctgctttttgatccactgtttgcagcagaattatatatatgtataggaaaaatccactttgaataatccatgttttgtatttggaaattgtttttaaaaataaaaaggaaaggaaatatataaagctgttatttattctgcatttcttacatatctatcgcttgtcagtatacccgttttggtatatattgcctctgcacatctacatttgtatatgcaacagtgagctttatatctacataaactgtaaataatcctttctgtgaaaggatcatcatatcaagatgataccaaaagtatgtaaaaagaaacctgcattattttgtaattatttcttataaatatttcatggtaagattagcagtcaataaaagttacttttttgcct

SEQ ID NO: 229000 - DNA, 1343 bp, Homo Sapiens; identical to SEQ ID NO: 194973

SEQ ID NO: 229001 - DNA, 796 bp, Homo Sapiens
ccggaggtttcggaggcgggcgctgaggctgctgatctcttccacataggcctggggcacccaccccttctcaccatctgccaggcggaccccttccagccagccgtcactggtccaggtcctcactgacaggatgtcagtcttctccaaggtcagctcatctgggtgcagtgccttgtatgtcctaacacactgaacctgggggcaatcttccccctcactgatgacctccttgtcctcctgggggctggaggggcacaaggctgagatccatcgctgcttctcactttccgtccgggcccgcagcaggaactggtgcttcatgtgctgcccgtggaggagctggaggaggaacacgtggccggggatgccctgcagcttcaggctcaggtcccgcacctgcagctcagccatcttggcatggacgaaaacggcaaacttccctagctccttccgccgagagagcagcaagcagtcattgaagaggtggaggtagactgccttgctggacagcttcagcttggcagggggtgctgcaggcagtggtgccagctctaccaactctccatgccgaaccagccagcgggcctgagagatcagcgggaaaatcttgccctcaaagtggatcttcttgctcaggtggatgagttcctctgtcctcttcatggactgtacactagcattgcactcctgcaccagctccttgagcgcattgaaggccttggtggccatgtcttcgtcttcagagccctgtgctgtccgcttcaggatgttctccaccaacatcttgagccaa

SEQ ID NO: 229002 - DNA, 920 bp, Homo Sapiens
ttggcattcttccggtggagatggctgcggccgtggcggggatgctgcgagggggtctcctgccccaggcgggccggctgcctaccctccagactgtccgctatggctccaaggctgttacccgccaccgtcgtgtgatgcactttcagcggcagaagctgatggctgtgactgaatatatccccccgaaaccagccatccacccatcatgcctgccatctcctcccagccccccacaggaggagataggcctcatcaggcttctccgccgggagatagcagcagttttccaggacaaccgaatgatagccgtctgccagaatgtggctctgagtgcagaggacaagcttcttatgcgacaccagctgcggaaacacaagatcctgatgaagatcttccccaaccaggtcctgaagcccttcctggaggattccaagtaccaaaatctgctgcccctttttgtggggcacaacatgctgctggtcagtgaagagcccaaggtcaaggagatggtacggatcttaaggactgtgccattcctgccgctgctaggtggctgcattgatgacaccatcctcagcaggcagggctttatcaactactccaagctccccagcctgcccctggtgcagggggagcttgtaggaggcctcacctgcctcacagcccagacccactccctgctccagcaccagcccctccagctgaccaccctgttggaccagtacatcagagagcaacgcgagaaggattctgtcatgtcggccaatggggaagccagatcctgacactgttccggactcgtagccagcctgtttagccagccctgcgcataaatacactctgcgttattggctgtgctctccttcaatgggacatgtggaagacttgggggtcgggggagtgtgtttgtcacttgg

SEQ ID NO: 229003 - DNA, 1092 bp, Homo Sapiens
aaaatcaatttcctggcaccacacaaacaagaacactggtaaatgtatcacctgaactgcaggccacacatgctcacgagtgtgtccctgccgtaggtggctttgaaagccatatacatggctctccagctctcgtgagagaccaggggcttctgtgtgctcttcaaagccttcacccattgggcctctgtccatctttccagcctggggacccaatatttgccccacaaggcccaggcaggagggcctccagcacgcgcagccctgaccacactgtgagcagctcacttggcaagggtgaagggccggagtggcgtcctcctgatgtggcttccttccagcctctaccacccctgggggcctcctccaaggagcaggtggttagatgtcctcttgtgcccacacacacggcagggtggaggaggatgaaccggaacccagcccatgcttctgcccccaccctggcaccccaaggtttcttctcaggcaacaaggagcacacaaagtgagcccctgtacacaggtggctgggatatgttcatcttccacagggaggccagtgctggggatgaggacaaaggcctacgcccagtcccagctctgacactgccttgctgagtcacccatcagccctaacgcttcctggacgagacaagcagatagggtgccccagagaggagctgtgtcactaagggccaggacaccccatctctgggtcacgcttggccacggcttcatttttggcttcagtttgtttactgaacagaagggagaggggccctgtgagacagaggacactgactcaggtcggtgagtggccctcactgtatagagtccatggctggggaccaagtggcactgagactcgcccaaagtcacatcacagagctggggtgccttgctgactccctgccaccaatctgcttttccatttgtcgaacgcacactggcacactggctgcagcagctgcgggggtcggggggttccagggctggctgtcactcggcctcctgcagaggtaagctgagggctatgttggacccgccagaagtcaggtgacagctgctttccctttcaggatcgggagccaa

SEQ ID NO: 229004 - DNA, 738 bp, Homo Sapiens
cacacagaggcgataagagcacttggaatcagggcagccatgcagcactgccctaggcggggatcccccaaagtctgacagtttgggcatcagtggggtggcaggtgccccctcagctgcctttatgagcgcgctcttccacgtaaagctgcatctttaaaatgtccgacgtcatggtttttagtggtatcagccgggggtcatgcatgtggacatcctgctcatccgccaggatccaggggaaatccttgatgacctggatcttctccatgttgcgagtggcggcttctctcgtgtgcaccaggactgtgaaggtacagcctggggggttgtggtccaggacggcatcgcacacgctgatcttcaggatgaaggcccggagcagctgctccacatgagacaacagcgagtctgagctgatggacagcagtggaggctgggtgatctcaaagacgaatttctccactgggcggtgctctttatccaaaatcaccaccaccactttctccacatcattcttctccaggagtggcttgacgcagtgcagcgtgtcctggatatactgattcagctccgggtggcaggacatctggaccggcacgttgtacttcttgcgtttctggaagatgcccacggggtagacctcgcgcacgtagaggatgagatgcacagccacctccaggaactcgcagagcacatcggccaccacttggccaaagttgagccaacttttttgta

SEQ ID NO: 229005 - DNA, 826 bp, Homo Sapiens
ttggaaatgattttatgtttttcctgctttgtggatgaaaaatatttctgagtggtagttttttgacaggtagaccatgtcttatcttgtttcaaaataagtatttctgattttgtaaaatgaaatataaaatatgtctcagatcttccaattaattagtaaggattcatccttaatccttgctagtttaagcctgcctaagtcactttactaaaagatctttgttaactcagtattttaaacatctgtcagcttatgtaggtaaaagtagaagcatgtttgtacactgcttgtagttatagtgacagctttccatgttgagattctcatatcatcttgtatcttaaagtttcatgtgagtttttaccgttaggatgattaagatgtatataggacaaaatgttaagtctttcctctacctacatttgttttcttggctagtaatagtagtagatacttctgaaataaatgttctctcaagatccttaaaacctcttggaaattataaaaatattggcaagaaaagaagaatagttgtttaaatattttttaaaaaacacttgaataagaatcagtagggtataaactagaagtttaaaaatgcttcatagaacgtccagggtttacattacaagattctcacaacaaacctattgtagaggtgagtaaggcatgttactacagaggaaagtttgagagtaaaactgtaaaaaattatatttttgttgtactttctaagagaaagagtattgttatgttctcctaacttctgttgattactactttaagtgatattcatttaaaacattgcaaatttattttattt

SEQ ID NO: 229006 - DNA, 406 bp, Homo Sapiens
ctttgtacaaaaaagttggcactgcattgacgactttcacaggaagtttgccccaagatgctcagtgtgcggtggggccataatgcctgagccaggtcaggaggagactgtgagaattgttgctctggatcgaagttttcacattggctgttacaagtgcgaggagtgtgggctgctgctctcctctgagggcgagtgtcagggctgctacccgctggatgggcacatcttgtgcaaggcctgcagcgcctggcgcatccaggagctctcagccaccgtcaccactgactgctgagtcttcctagaagtacctgctgggttctcagttccagttcccatcctttgattgatcactctccctgacatccacctgtatgactttgtcaccatatgctgtcttctcttt

SEQ ID NO: 229007 - DNA, 1499 bp, Homo Sapiens
tgtacaaaaaagttggctgactgcgcccccgaaagctgctgcagtgttgtgagttggaagctggggagctcggcatggcggtccccgctgcagccatggggccctcggcgttgggccagagcggccccggctcgatggccccgtggtgctcagtgagcagcggcccgtcgcgctacgtgcttgggatgcaggagctgttccggggccacagcaagacgcgcgagttcctggcgcacagcgccaaggtgcactcggtggcctggagttgcgacgggcgtcgcctagcctcggggtccttcgacaagacggccagcgtcttcttgctggattaggaccggttggtcaaagaaaacaattatcggggacatggggatagtgtggaccagctttgttggcatccaagtaatcctgacctatttgttacggcgtctgggataaaaccattcgcatctgggatgtgaggactacaaaatgcattgccactgtgaacactaaaggggagaacattaatatctgctggagtcctgatgggcagaccattgctgtaggcaacaaggatgatgtggtgacctttattgatgccaagacacaccgttccaaagcagaagagcagttcaagttcgaggtcaacgaaatctcctggaacaatgacaataatatgttcttcctgacaaatggcaatggttgtatcaacatcctcagctacccagaactgaagcctgtgcagtccatcaacgcccatccttccaactgcatctgtatcaagtttgaccccatggggaagtactttgccacaggaagtgcagatgctttggtcagcctctgggatgtggatgagttagtgtgtgttcggtgcttttccaggctggattggcctgtaagaaccctcagtttcagccatgatgggaaaatgctggcgtcagcatcggaagatcattttattgacattgctgaagtggagacaggggacaaactatgggaggtacagtgtgagtctccgaccttcacagtggcgtggcaccccaaaaggcctctgctggcatttgcctgtgatgacaaagacggcaaatatgacagcagccgggaagccggaactgtgaagctgtttgggcttcctaatgattcttgagaggaggttgtagggagaggaggccccggcagaggtcttccttcatgtggttagtttggtctgttctctcggagttggtgggcaccctaaatatttgtaaattggtataaattgtaaacgtctctggtcaggctgcgcatttcgttcttttgctttgtctgtgtattagctctttccattctttgcccccagcatgagttaactcgcgtggactctgcagtgcgagtagtgaccccagcataccttgtcctctggaactcctgtcttctctgctttctgggtgcatgggagaaatttgtggcatttgatacaacttggacaataactaattttggaggacaggggaataggaaggcctgggaagtttttt

SEQ ID NO: 229008 - DNA, 1246 bp, Homo Sapiens
ttggggtggaggcagccagcagaggcacctgggctccctacagcctctcctttgtttcctcttagatgtgaatgagtgtgatgacttgaacgggcctgctgtgctctgtgtccatggttactgcgagaacacagagggctcctaccgctgccactgctccccgggatatgtggctgaggcagggcccccccactgcactgccaaggagtagcagtcaggggtcagtgtggcaactacctggaaatggcctccagtcacaggcaggggccttgaggatgatttcctagctgggaagacaccgtgacatcaggccagaggtttccaatcagccttgcctgctttcatctctcccagcttagcctctggctgtaagcttcggtcattgcctccatgcccttgcttggctcaagcaccaccaatcgctttaatgcttcagccaccgcatgaggccctgtccaccacctttcctggccttgctatgggatgcttaccaaaggatggccctcatccaccctcccaagctgtgcgagcatgcaaggccccatggcctcacactgcagacacccctttccagccacaatccaccatcatcctgacgatcccacaactgggacagaggctacatctgccctagggaggtccttcagaatctgtggagcaagaaaggatttggggaagcttggggactgactccagagccccctcctaagaaccatcaccaccactcagccaatctgttctgggccctgattttgccacacctccatcctgtagcccattctctgaccccaaggagtggcagaagatcccttcactcagagaagcaaggctgatattagcttgttgaatgtaagagacacaaatgaagaagaacaaagagcctgagaaagcagcaagaggacatgatgaaaaatacgtggagttgatgagaaagggggagccaaggctttatacgtctaaagaaaatattcagtagctgaatccgcccagtgatagcctgtgggcaccagcagcaagggctgccatgggatacagtacccatctacaaagacctctattacataaacactgcttcttacaggaaacaaacctcttctgggatctccttttgtgaaaaccagtttgatgtgctaaaagtaaaaagtctattttccagtgtctctctgttcaaaagcaaccagattcccaatgttgtttctcccccccactcacaaacccctgccctttcacttcagaaaaccatggc

SEQ ID NO: 229009 - DNA, 929 bp, Homo Sapiens
ttgggtcccttctgacacagaaggttgtgttggggaactgaaggagtttctgtgggcggacagggaaccctgcgtttctactgtgtgattctgccaccttcctggcccgacgccatgggagtgacttgtgtgtcccagatgcctgtggccgagggcaagagtgttcagcaaaccgtagagctccttacccggaaattggagatgcttggggcagagaagcaaggaacattttgtgtggactgtgagacttaccatacggccgcctctacccttggcagccaaggtcagaccgggaagctgatgtatgtgatgcacaactcagagtacccattgagctgtttcgccctctttgagaatggcccttgccttattgctgacaccaactttgatgtgcttatggtgaagctcaagggctttttccagagtgctaaggccagcaagattgagacccggggcaccaggtaccagtactgtgacttcctggtgaaggtgggcacggtcacaatggggcccagtgcccggggcatctctgtggaggtggagtatggcccctgtgtggtagctagtgactgctggagtctgctgctcgagttcctacagagttttctaggcagccacacaccaggggctcccgcagtgtttgggaacagacatgatgcggtctacggcccagcagataccatggtccagtacatggaactcttcaacaagatccgcaagcagcagcaggtgccggtggctgggattcgttagtgatgagcagctgccagctgagctctgtcaccaggggtactccacaggaggagcaggtgctgactttcaggtccctggaccccagaaacccagggtagacatggactctactctccttctctggttctcagctgtggcttttgttctggggctgagtcccctccccaaccccctga

SEQ ID NO: 229010 - DNA, 909 bp, Homo Sapiens
ttggccctgcggcgctaagaaggggagactgaggctgaggctggggaacatcgggcagcatgagcggctgcgggctcttcctgcgcaccacggctgcggctcgtgcctgccggggtctggtggtctctaccgcgaaccggcggctactgcgcaccagcccgcctgtacgagctttcgccaaagagcttttcctaggcaaaatcaagaagaaagaagttttcccatttccagaagttagccaagatgaacttaatgaaatcaatcagttcttgggacccgtggaaaaattcttcactgaagaggtggactcccgaaaaattgaccaggaagggaaaatcccagatgaaactttggagaaattgaagagcctagggctttttgggctgcaagtcccagaagaatatggtggcctgggcttctccaacaccatgtactcaagactaggggagatcatcagcatggatgggtccatcactgtgaccctggcagcgcaccaggctattggcctcaaggggatcatcttggctggcactgaggagcagaaagccaaatacttgcctaaactggcgtccggggagcacattgcagccttctgcctcacggagccagccagtgggagcgatgcagcctcaatccggagcagagccacactaagtgaagacaagaagcactacatcctcaatggctccaaggtctggattactaatggaggactggccaatatttttactgtgtttgcaaagactgaggtcgttgattctgatggatcagtgaaagacaaaatcacagcattcatagtagaaagagactttggtggagtcactaatgggaaacccgaagataaattagcattcggggctccaacacttgtgaagtccattttgaaacaccaagatacctgtggaaaac

SEQ ID NO: 229011 - DNA, 1647 bp, Homo Sapiens
ttggctggacaagttccttcgggagaaggatggcgagttcagcgtgctgcagctggtgggcatgctgcggggcatcgcagctggcatgaagtacctggccaacatgaactatgtgcaccgtgacctggctgcccgcaacatcctcgtcaacagcaacctggtctgcaaggtgtctgactttggcctgtcccgcgtgctggaggacgaccccgaggccacctacaccaccagtggcggcaagatccccatccgctggaccgccccggaggccatttcctaccggaagttcacctctgccagcgacgtgtggagctttggcattgtcatgtgggaggtgatgacctatggcgagcggccctactgggagttgtccaaccacgaggtgatgaaagccatcaatgatggcttccggctccccacacccatggactgcccctccgccatctaccagctcatgatgcagtgctggcagcaggagcgtgcccgccgccccaagttcgctgacatcgtcagcatcctggacaagctcattcgtgcccctgactccctcaagaccctggctgactttgacccccgcgtgtctatccggctccccagcacgagcggctcggagggggtgcccttccgcacggtgtccgagtggctggagtccatcaagatgcagcagtatacggagcacttcatggcggccggctacactgccatcgagaaggtggtgcagatgaccaacgacgacatcaagaggattggggtgcggctgcccggccaccagaagcgcattgcctacagcctgctgggactcaaggaccaggtgaacactgtggggatccccatctgagcctcgacagggcctggagccccatcggccaagaatacttgaagaaacagagtggcctccctgctgtgccatgctgggccactggggactttatttatttctagttctttcctccccctgcaacttccgctgaggggtctcggatgacaccctggcctgaactgaggagatgaccagggatgctgggctgggccctctttccctgcgagacgcacacagctgagcacttagcaggcaccgccacgtcccagcatccctggagcaggagccccgccacagccttcggacagacatataggatattcccaagccgaccttccctccgccttctcccacatgaggccatctcaggagatggagggcttggcccagcgccaagtaaacagggtacctcaagccccatttcctcacactaagagggcagactgtgaacttgactgggtgagacccaaagcggtccctgtccctctagtgccttctttagaccctcgggccccatcctcatccctgactggccaaacccttgctttcctgggcctttgcaagatgcttggttgtgttgaggtttttaaatatatattttgtactttgtggagagaatgtgtgtgtgtggcagggggccccgccagggctggggacagagggtgttaacattcgtgagctgggagactcaggaccggtgctgcaggagtgtcctgcccatgccccagtcggccccatctctcatccttttggataagtttctattctggtcaatgtttaaagattttgtttttgtgggacatatttttcgaatcttaatttaataa

SEQ ID NO: 229012 - DNA, 274 bp, Homo Sapiens
ttgtacaaaaaagttggcaagatggcgcccagaaaggtaccggcgttttcttaagctctgtgaggaatggccagtggacgagaccaaacggggccgggacttgggcgcttacctgcgacagcgggtagcacaggcctttcgggagggagagaatacccaggttgcagagcctgaggcctgtgatcagatgtacgatagcttagcgcgactccattcaaactactacaaacacaagtaccctctccccatagacaccatcttcagtggcctgtcg

SEQ ID NO: 229013 - DNA, 631 bp, Homo Sapiens; identical to SEQ ID NO: 194974

SEQ ID NO: 229014 - DNA, 1007 bp, Homo Sapiens
acgagagaaggcgcaggccgagcaggaggagcaggagcggctgcagaagcagaaagaggaggccgaagctcggtcgcgggaagaggcggagcggcagcgtctggagcgggaaaagcacttccagcagcaggagcaagagcggcaagagcgcagaaagcgtctggaggagatcatgaagaggactcggaagtcagaagtttctgaaaccaagaagcaggacagcaaggaggccaacgccaacggttccagcccagagcctgtgaaagctgtggaggctcggtccccagggctgcagaaggaggctgtgcagaaagaggagcccatcccacaggagcctcagtggagtctcccaagcaaggagttgccagcgtccctggtgaatggcctgcagcctctcccagcacaccaggagaatggcttctccaccaacggaccctctggggacaagagtctgagccgaacaccagagacactcctgccctttgcagaggcagaagccttcctcaagaaagctgtggtgcagtccccgcattgtcacagaagtcctttaagagggtttgccttggatccgggcacagttgtgagggctcctctgcatcacctaccaggatgtctggaggagaaaaagacagaacaaagatggaagtggcctgggcccctgggggtgggtcctctctgttgtttttaatctgcaccttatagactgatgtctctttggccggagccagatctgcccctcagtgcattcgtgtgctcgcacgcgcagacatcccttctcccccatacacacatatacactcacagcctctctggcctcttcccttggggagtgttctcctgtagtatttgccttgatttggtggggtacagtggatgtgaatactgtaaatagcttgtgctcagactcctctgcgtggagagggtgggtgcaggaggcagaccctccccccaaagccacctggggagatcttcctctctctatttaactgtaactgagggggatccca

SEQ ID NO: 229015 - DNA, 954 bp, Homo Sapiens
cccagggacccccaccttggatggcgtaggcgaacatcacagccagcgggcccaaaagtgatgaggatgatgaggtctcccagagccacgtacttgaatccaattcctcctgtgtagagaaaggagccagacaggcctccaaagtagataagagccaagtgctccagtttcagaggggacaggtagtagaggcaagcggcacagacgcagcccaacgtgtagaggaagactccgaaccggacgacatcctgcggctccaagattcggtccacaagtgtcctgtcatcactctttttgtggtcaatgcccttggaaaagtcatagtaagtgttgaccaaattaccggccccgtgcacagccaggacagccacggcacaacccaccaagagcctgggatccaggacaccgtgggatctgtaggcaagggcactgcccagggccaccggtgtgagtgaggcactgaagctccagggcctcagggccaacacgtaggaggcacacttctgcctccaggagcgctgggggagcctatcttgctcgggacagtcgttccccagcgggtccctgtccccagctttgacagtctctcccgacaggatgttaatcttctcccccaggacctgagaggccgccatggaagctccacgtggttgaagtaaactctaaaagtgagccacgcacagtgaccgcccgggaaggaggaaggacggggcggggcagcagggcccgaccttccttcggttccgccccaggacagggctggtgtggcggcaaggtccgggggcaacagcaagtgggtcttacaccccacgaggccaagcggcgccgcccctactacccgtcacctgggcgaagtctgtctccggcccccagccccgcgttagagcccacggctgagccgcggccgccttctttaggccgccagagccgccatcttgtgccaacttttttgta

SEQ ID NO: 229016 - DNA, 1108 bp, Homo Sapiens
gccagcttccagtttggggttttttattagtacttctacagactccagggcctctttctctcttgccatttttttgcctcaattttgtcataaaagtctttgggaagtttggaaaggatttctacagcttctaaaagctcataagcatctatttgtggcacctcatcaccatcatcaccacctccttcagcatctccaccagcagactgttgttgttccaatttagcttctagttcttgttgggaacgaagaaatcgagtaggtctaggagcacttgttggcagtttgacccattcttcttctagttctttcaactgaacagagtttatattttgtaatgggggtctcagagcatcccgaatccatctgtaaatctccacagcaattagtttggcttcatctcgaacagccttctctcgagactcaaagagttttggcaacactttgataattggcttaagcaagatgattttggaaccaaattcacttaaggctttcctcagtgtctctatacaggccactatgatcttgggattcttattgtccaagcctttcaggagctcttcttgaacagcctctcctttctcaatctctatgtacataagacagatctctatgcccagctccttggctttagctttaggttgattgaacaccttacttacaacacctgacacaacttctcctgtggtttttcctgctacatgggcattttcaacataaacaagtgcagcttctaatcctttcaattgaaccactgcattggaatcagtgacaaattttttgatcaatcctaaaaatttggaccactctgggctcttttcatcctttattttctggaagatcttcagggcctcttcatacccacttaaccttgctttccacagcttgtgttcacatttctgatcaactggcagtttcaaccactcactgtcatctcccattgtgcttccaggttttccttagaattaagagtatttcctgccgggttcgtggggcaagtggggcgcgcgtctggagacctccagccgcccaggattcaggggctcctctgcgcgcgcgatgcctgcactcgagggcctcgcgggtggggcaggcccaccgccaa

SEQ ID NO: 229017 - DNA, 147 bp, Homo Sapiens
ccccttatcataaaatatatatgtgtggcttatgaccctccgtgaacagatgacagagggcatctctcccaggtgacccttcttttctgtcccaggagggtgggtaattccctttgggatggggctcccacacctccctcaggtccc

SEQ ID NO: 229018 - DNA, 727 bp, Homo Sapiens
actttgtacaaaaaagttgggttagtcagtacttttcactaacaaacatttgttttctgtcccaccaagagagggactgtatagcagaaccctggctggtagcatcacaacacctcctctgcttatcgtattttatcaacagcactctaccatcgatcctatgtggaatgtccgccaccttggttccagtgctggaaaacgatattcacctcagtttgtaaaggctgccaagttactccattggaatggacatttgaagccatggggaaggactgcttcatatactgatgtttgggaaaaatggtatattccagacccaacaggcaaattctacctaatccgaagatataccgagatctcaaacataaagtgaaacagaatttgaactgtaagcaagcatttctcaggaagtcctggaagatagcatgcgtgggaagtaacagttgctaggcttcaatgcctatcggtagcaagccatggaaaaagatgtgtcagctaggtaaagatgacaaactgccctgtctggcagtcagcttcccagacagactataaactataaatatgtctccatctgccttaccaagtgttttcttactacaatgctgaatgactggaaagaagaactgatatggctagttcagctagctggtacagataattcaaaactgctgttggttttaattttgtaacctgtggcctgatctgtaaataaaacttacattttttc

SEQ ID NO: 229019 - DNA, 681 bp, Homo Sapiens
ctttgtacaaaaaagttggcttgaatctgcccaccagtcacaaggcgggtcacagattcctcttcctctcttctcctcgttcctctgaaccctccaccaatgtgcctcagcctgtgtgctgtgtggcaacagcattctggttcccactgccaagatctcccaccactctgctgggatctgcagtggcagggagtgggggttgtgtaaaggggaagtcatcttttgagatccagatagacatggtttgtgcacttacgtccagatgggaagcatccttcctgcaaccctaaaataatcatgcagcctctcagacggacgccatcggtcccaaggccttaggtggaggaagcaaagcaggccaggcctgtcctgtccgtggacctctaccttctggactccctacgggtgcagagcacttgggtttctctacagccatcgtggcccacttgacactgtgctcctccatcagctggtcacatgccaacacgttcccagcccctgaggcagctccagggtgccccacctgctcctgatgtgggtccctaccctgctgctcctcttcatcctttcccttttgtcctgaaagggaggagcaatggtccaggcattaattccacccagggaattttagctatgccctcatgtcccagggagagagccacacgcctgttttctatttat

SEQ ID NO: 229020 - DNA, 776 bp, Homo Sapiens; identical to SEQ ID NO: 194978

SEQ ID NO: 229021 - DNA, 759 bp, Homo Sapiens
tgagccaccatgcccagcctcaaatatgtttttaaaaaatatcattgtcctcctcctcttaagatttttttaagttattttgctcaagtacttaagtagtctggctcaagtactttgtttacaattaaaatggatattatagcatttaatagaagaaatggttatggcttatccaaaaagaatgtcagcatgacctggtgtagacttaaaaaactacatgtttgtgaatattttataatgtggaatgatcattgaaatatcaaggattctagtaattgtatttcctgaataaatgtatgtttatgaattttctaacttacattttgttgtgtcctctgccaacaatctggttttataattgttgtctaaagtttgctagtagtgtttcttcaaaggttattccaggtatggttaagtagtgagaaaaatcacttattaattttcaagaactttgagactaatttgtattgactcggttttttaaaataactggcaaatgctatgcttctacttttaaaatttgtggtaatacccagaatggatgtaaaataacatttttcaatagattacttcatttatcaatttaattctgattttaaggcttatttaaaataaatttgtatgagttatgtcctcgttctttggatttgaaaaaagttgatataactacacaatagataacgtttatgaaagtatgtataaaaaacataattcctggtggctgctgaaatgaaactttgaatttctatattttgcttt

SEQ ID NO: 229022 - DNA, 326 bp, Homo Sapiens
ctttgtacaaaaaagttgggaaaggtctgaaacttcctccctcccacaaaaaggcctgaagattcctggcttagagcatgcgagcattgaaggaccaatagcaaacttatcagtacttggaacagaagaacttcggcaacgagaacactatctcaagcagaagagagataagttgatgtccatgagaaaggatatgaggactaaacagatacaaaatatggagcagaaaggaaaacccactggggaggtagaggaaatgacacagaaaccagaaatgaccgcagaggagaagcaaacattactaaagaggagattgcttgcagaga

SEQ ID NO: 229023 - DNA, 537 bp, Homo Sapiens
ctttgtacaaaaaagttggcaagatgctgctggtcctgctctcagtggtccttctggctctgagctcagctcagagcacagataatgatgtgaactatgaagactttactttcaccataccagatgtagaggactcaagtcagagaccagatcagggaccccagagacctcctcctgaaggactcctacctagaccccctggtgatagtggtaaccaagatgatggtcctcagcagagaccaccaaaaccaggaggccatcaccgccatcctcccccacctccttttcaaaatcagcaacgaccaccccaacgaggacaccgtcaactctctctaccccgatttccttctgtcagcctgcaggaagcatcatcattcttccggagggacagaccagcaagacatccccaggagcaaccactctggtaatctagaattcagtggcagaaaataaataagaagataacttccttcacaaagccatgacattgaaataatgtggtcataactctttcttcagtataccaataaaatatta

SEQ ID NO: 229024 - DNA, 696 bp, Homo Sapiens
aaattgatgagcaatgctttttccattaaaacgggactttgtacaaaaaagttggctccctagcagccggccttcgggtcgggcgtctccgccggctactgccgcttcagttctcccggtgtggccacgagtcgggttgcactgctgtgatccatcctcatctcctaaagatgcatcctgacttatctccacacttgcacactgaagaatgcaacgtcttgattaacttgcttaaggaatgtcacaaaaatcacaacattctgaaattttttggttattgtaatgatgttgatcgggagttgagaaaatgcctgaagaatgagtacgtagaaaacaggaccaagagcagggagcatggcattgcaatgcgaaagaaactttttaatcctccagaggaatccgaaaaataaattgtattttcactcgatgccttggctgagagaagacctaaagactctgggttgatacctgaaagaatcctgtcttatttggtctccataatcctttgaatggaaagtgacctgtgagagattgaaccatggagaaatatgaaaaccctggattctgagtatttgttgggcagggcgtttagtactgtctcccctttaccagcaaacctgacttcaccatgtttattccctttgcctacaaccagttaatatctgagtaacttatctccttcaatataataatttt

SEQ ID NO: 229025 - DNA, 491 bp, Homo Sapiens
tgtacaaaaaagttggcagtgtatcaggtcagggacttggacaggagtcagtgtctggctttttcctctgagcccagctgcctggagagggtctcgctgtcactggctggctcctaggggaacagaccagtgaccccagaaaagcataacaccaatcccagggctggctctgcactaagagaaaattgcactaaatgaatctcgttcccaaagaactacccccttttcagctgagccctggggactgttccaaagccagtgaaatgtgaaggaaagtggggtccttcggggcgatgctccctcagcctcagaggagctctaccctgctccctgctttggctgaggggcttgggaaaaaaacttggcactttttcgtgtggatcttgccacatttctgatcagaggtgtacactaacatttcccccgagctcttggcctttgcatttatttatacagtgccttgctcggcgcccaccaccccctcaagcccc

SEQ ID NO: 229026 - DNA, 976 bp, Homo Sapiens
aaagttgggcaagtccttccaggtcacatttcctccctacgtcccagccgtttggactcactggccaaaagtccaagaggacggaatgtggagacagtgttgtatttttgcggggagttctaggccgaccgggagcgagagaacgctcgggggcgaagcgcgccattgcggccctccccgccgcctgcggtagtccagtcccaagatggcggccaccatgaagaaggcggctgcagaagatgtcaatgttactttcgaagatcaacaaaagataaacaaatttgcacggaatacaagtagaatcacagagctgaaggaagaaatagaagtaaaaaagaaacaactccaaaacctagaagatgcttgtgatgacatcatgcttgcagatgatgattgcttaatgataccttatcaaattggtgatgtcttcattagccattctcaagaagaaacgcaagaaatgttagaagaagcaaagaaaaatttgcaagaagaaattgacgccttagaatccagagtggaatcaattcagcgagtgttagcagatttgaaagttcagttgtatgcaaaattcgggagcaacataaaccttgaagctgatgaaagttaaacattttataatactttttttatttgtttaataaacttgaatattgtttaaaatgataattttccttcttcaaatgacatggaaagcaaaactttcttttttaaaaattttcatttatttaatggaaacttgcccattttcacatgtctgcttatttattttatatttttaaaagaagacagtattcacctatgtattttgcataacgattatatcaaagtctaggggcttcatgtcatgttattaaaatcagttaagcaatcttttatgtttctatattattttaaatattttgttgttgcaattttcacaataagaaattttaacagttgtgtcatgttgtttctgtctgattttattgctgtc

SEQ ID NO: 229027 - DNA, 945 bp, Homo Sapiens
aatattacatattcctccagtaatactgaagagcaaaagagaggcaggattggggtcacagccgcttcttcagcatggaccaagtgggccttggggattgcagcgttctcgaagtggctgtaggactcgaatttacagaaagccacagaggtgcaacttgaggctctgctagcaagccaccagtgaggctattgggtaaccacctttctatacaggagattggaatctactttgtcatttatccaccacagtgacaaaggaaaagtggtgccgttatgcaatccatttaactcataaacatattactctgagtaactggccagccattcatcggatccttcattgggtactcctgaaatcagacatgttcctgtagaaagaattttaagttaggctttctatgcacctatcaagaatcaagagaatagattgtatcaaacaacggcagggaaatccttcagcaattctaatccactttgggttttcagctgtttttacatctaaagcaatagactagaactgaattatcttctacatagtaaaatcacaattgtggaattacaggaattctggtgatattaaggtgaaataacaaaacacaaaaggccctattttaacagttgatgtgacagtaagttttaatagaacctgtaacttcattttggaaatgcttctccaccaaataagggctttttcccctatttaaggagccagatggattgaaagatgtggaaataggcagctgtaaatcttgatcttccaggtaccccatgtacctttattgagcttaattataatactgtcaaattgccacgatctcactaaaggatttctatttgctgtcagttaaaaataaagccctaaatacatttttattctttctactgagggcattgtctgttttctttgtaaatgccgtacaataaacaaattatttaataacct

SEQ ID NO: 229028 - DNA, 1115 bp, Homo Sapiens
gccactttgtacaaaaaagttggcgccgacgccgcttgtgggcccgactccgctctgtctgcttcgccaccttctccccgagcactgcccggccggccgccatggctaacgtggctgacacgaagctgtacgacatcctgggcgtcccgcccggcgccagcgagaacgagctgaagaaggcatacagaaagttagccaaggaatatcatcctgataagaatccaaatgcaggagacaaatttaaagaaataagttttgcatatgaagtactatcaaatcctgagaagcgtgagttatatgacagatacggagagcaaggtcttcgggaaggcagcggcggaggtggtggcatggatgatattttctctcacatttttggtgggggattgttcggcttcatgggcaatcagagtagaagtcgaaatggcagaagaagaggagaggacatgatgcatccactcaaagtatctttagaagatctgtataatggcaagacaaccaaactacaacttagcaagaatgtgctctgtagtgcatgcagtggccaaggcggaaagtctggagctgtccaaaagtgtagtgcttgtcgaggtcgaggtgtgcgcatcatgatcagacagctggctccagggatggtacaacagatgcagtctgtgtgctctgattgtaatggagaaggagaggtaattaatgaaaaagaccgctgtaaaaaatgtgaagggaagaaggtgattaaagaagtcaagattcttgaagtccacgtagacaaaggcatgaaacatggacagagaattacattcactggggaagcagaccaggccccaggagtggaacccggagacattgttcttttgctacaggagaaagaacatgaggtatttcagagagatgggaatgatttgcacatgacatataaaataggacttgttgaagctctatgtggatttcagttcacatttaagcaccttgatggacgtcagattgtggtgaaatacccccctggcaaagtaattgaaccagggtgtgttcgtgtagttcgaggtgaagggatgccgcattatcgtaatccctttgaaaaaggtgatctttacataaagttttgatgtgcagtttcc

SEQ ID NO: 229029 - DNA, 892 bp, Homo Sapiens
actttgtacaaaaaagttggcagcagcgcccgcgtgccgctcgcccagtcccgggggagcccctgcaagtttcccgggccgcgcgccgcgctcgctcgcctcccagcccgcggcccgagccgccgcctcgtcctcggcgtcctgctcgcgcaggctcggcagggcgctcaactttctcttctacctcgccctggtggcggcggccgctttctcgggctggtgcgtccaccacgtcctggaggaggtccagcaggtccggcgcagccaccaggacttctcccggcagagggaggagctgggccagggcttgcagggcgtcgagcagaaggtgcagtctttgcaagccacatttggaacttttgagtccatcttgagaagctcccaacataaacaagacctcacagagaaagctgtgaagcaaggggagagtgaggtcagccggatcagcgaagtgctgcagaaactccagaatgagattctcaaagacctctcggatgggatccatgtggtgaaggacgcccgggagcgggacttcacgtccctggagaacacggtggaggagcggctgacggagctcaccaaatccatcaacgacaacatcgccatcttcacagaagtccagaagaggagccagaaggagatcaatgacatgaaggcaaaggttgcctccctggaagaatctgaggggaacaagcaggatttgaaagccttaaaggaagctgtgaaggagatacagacctcagccaagtccagagagtgggacatggaggccctgagaagtacccttcagactatggagtctgacatctacaccgaggtccgcgagctggtgagcctcaagcaggagcagcaggctttcaaggaggcggccgacacggagcggctcgccctg

SEQ ID NO: 229030 - DNA, 967 bp, Homo Sapiens
ctttgtacaaaaaagttggcccgtggctggcagcccgggcagtcctttgcaaaggcaccccttgtcttaaaatcacttcgctatgtgggaaaggtggagatacttttatatatttgtatgggactctgaggaggtgcaacctgtatatatattgcattcgtgctgactttgttatcccgagagatccatgcaatgatctcttgctgtcttctctgtcaagattgcacagttgtacttgaatctggcatgtgttgacgaaactggtgccccagcagatcaaaggtgggaaatacgtcagcagtggggctaaaaccaagcggctagaagccctacagctgccttcggccaggaagtgaggatggtgtgggccctccccgccggccccctgggtccccagtgttcgctgtgtgtgcgtttgtcctctgctgccatctgccccggctgtgtgaattcaagacagggcagtgcagcactaggcaggtgtgaggagccctgctgaggtcactgtggggcacggttgccacacggctgtcatttttcacctggtcattctgtgaccaccaccccctcccctcaccgcctcccaggtggcccgggagctgcaggtggggatggctttgtcctttgctcctgctccccgtgggacctgggaccttaaagcgttgcaggttcctgatttggacagaggtgtggggccttccaggccgttacatacctcctgccaattctctaactctctgagactgcgaggatctccaggcagggttctcccctctggagtctgaccaattacttcattttgcttcaaatggccaatttgtgcagagggacaaagccacagccacactcttcaacgggttaccaaactgttttttggaaattcacaccaaaagtcgggcccactgcaagcagctggcacagcgtggcccgaggggctgtggaaacgggttccggaactgtctgacat

SEQ ID NO: 229031 - DNA, 574 bp, Homo Sapiens
gtacaaaaaagttgggcccttttcatgtacaaacccaagaaagttgttgggatagaagaacacacagtcggctatggagagctactcttgctattatcgctgaccctggatggactgactggtgtttcccaggaccacatgcgggctcattaccaaacaggctccaaccacatgatgctgaacatcaacctttggtcgacattgctgctgggaatgggaatcctgttcactggggagctctgggagttcttgagctttgctgaaaggtaccctgccatcatctataacatcctgctctttgggctgaccagtgccctgggtcagagcttcatctttatgacggttgtgtattttggtcccctgacctgctccatcatcactacaactcgaaagttcttcacaattttggcctctgtgatcctcttcgccaatcccatcagccccatgcagtgggtgggcactgtgcttgtgttcctgggtcttggtcttgatgccaagtttgggaaaggagctaagaagacatcccactaggaagagagagactacctccacatcaagaatatttaagttatta

SEQ ID NO: 229032 - DNA, 671 bp, Homo Sapiens
actttgtacaaaaaagttggcttccctgacaaagtgttgcaaccaacacgacaggtgctatgaaacctgtggcaaaagcaagaatgactgtgatgaagaattccagtattgcctctccaagatctgccgagatgtacagaaaacactaggactaactcagcatgttcaggcatgtgaaacaacagtggagctcttgtttgacagtgttatacatttaggttgtaaaccatatctggacagccaacgagccgcatgcaggtgtcattatgaagaaaaaactgatctttaaaggagatgccgacagctagtgacagatgaagatggaagaacataacctttgacaaataactaatgtttttacaacataaaactgtcttatttttgtgaaaggattattttgagaccttaaaataatttatatcttgatgttaaaacctcaaagcaaaaaaagtgagggagatagtgaggggagggcacgcttgtcttctcaggtatcttccccagcattgctcccttacttagtatgccaaatgtcttgaccaatatcaaaaacaagtgcttgtttagcggagaattttgaaaagaggaatatataactcaattttcacaaccacatttaccaaaaaaagagatcaaatataaaattcatcataatgtctgttcaacattat

SEQ ID NO: 229033 - DNA, 381 bp, Homo Sapiens
ttgggtcccgcgcccctttacaatggcccaagatggcggcctccgtgtgcagcgggttgctggggccacgggtgctgtcctggagccgagagctgccttgcgcttggcgcgccctgcacacctccccggtctgcgccaagaaccgggcggcccgagtacgcgtaagcaagggggacaagccggtgacctacgaggaggcacacgcgccgcactacatctcccaccgtaaaggctggctgtcactgcacacaggtaacctggatggagaggaccatgccgcaaagcgaacggtggaggatgttttccttcgcttgttttttgtggggtaccttcccaggctgcctggctgaccggctcgcccctaaagcgccggggtaacca

SEQ ID NO: 229034 - DNA, 950 bp, Homo Sapiens
ttgggctggaagcttagcggtcaccatggagctgctgggagagtacgtcgggcaggaagggaagccgcagaagctgcgggtgtcctgtgaggcgccgggtgacggcgaccctttccagggcctgttgtctggcgtggcccagatgaaggacatggtaacggaattattcgaccctctggtacagggggaagtgcagcaccgggtggcggcggctccagacgaggacttggacggtgatgatgaagatgatgcagaagatgaaaataacattgataacagaactaacttcgatggaccatctgcaaaacggccaaaaacaccgtcttaacaatagccttcatgacatttaaaagatggctgttgtatccttattgtcacactaggacatttaaggaagacttatgctctaatttggaaaaagcatttgtgttgttctcctgggacaattttgtcaaagagaaaactggtttttctgtttctagcaaagatagtaaaggcttagaaataaaatctgttttcttgagaaataaatttcagaccctggaaggaaaatagaacacttcataatgtataaaatcctctaagttggcaactgaatttttatcattgttttctatttttaaaataatcattgatttgtgtgatgtctacatcttttaacttctggttctgttataaagagtacatgtcacggttcataggcagtaacatttcagagaactgacatgaacaagtagtgaaaattgggcattaaatataaaaataacagttcttcataaacagaaggaaaataagggaaatagaaataccgacgagaaagggagagtccttgaaagagaccccaggaaaccctgaatttcataccccgtcaaatatgcacatatcctgagatgatgccactttgatgaatgtggcattagtctgatttatcatgtaccttaaaagaaccc

SEQ ID NO: 229035 - DNA, 935 bp, Homo Sapiens
ccaagagcctccaactgcttgcacaaagccagggatcagtcagagccaagagtggagaaactcaagcaaatgccgaggctacaccccgtcccttgacttgagccccaaacccacaatgtccccactgtccgtccagaggctccctccccagggcctggagatccgggcccagcacacgccgtggaaagcagaagtcagttagaagaaaaaaccgccagaccactcaggatcacccctggcagaaggaaggggcaggaggcagacagggagggaggcaggcagtccttctgtccatcctttgtcacacaattgcccggaacaggaaggagaaaacagcccccagtgccagacccagacacaggaagaaggccatgatggctcctgcggtctctgcctcagctggcttcactttcttgggcccgaagcacatgcagaggctggcgaggtagccgttggagaaggcaaaggcagccatgaagaagatgaaccaggcatcgtgctcgaagaccacagtcaggtagcggcggggcttaatgttgcacagcagcagcagtggcacaaacaccagccgggccagcaccaggcttggcagccagcggctgtccttcccaggccacatgaatacagctgtgaggctccggcccaaccagtcaaagatattgaaagtcaagaaacaggacacaggaatgaagtaacgttcccaggtgctgctgcctgcgatgctggacttgacctcaacagtcacggctggaaacccaatggtgatagtgaagatgaagcagacagagaaagccaggactgagatatttttcaggatggctttgatagagtggctttcattggtgggctgagagttggagactgaaactccagattcctctttgcctgctcttggctcctctgcctttgctaatgccaacttttttgtacaaagt

SEQ ID NO: 229036 - DNA, 1144 bp, Homo Sapiens
  misc_feature (134)..(154): n is a, c, g, or t
gatgttgcccagaagctccaaattaatgaagagtcttaaaagtttttcattttcatatagtttgcatgaatagagcctgttcctattctaatctcaatggcaaataatataaaacagaaagctgaacacaacannnnnnnnnnnnnnnnnnnnnctacttttctgtctaagagaaaacattaaatacaggtatatttaatatacagtgaacataccatgtgttttcttaaagccaacaaaatcctgatttcctatagcttggaggtgatacagaaggcagaagacaaatatcaaatttagctaataaaatataccctgcctattggctccagcaatacactatagagtttgagcaatgacggatacccaagtgtatatgttttgttaaaatttatcttcaggctaatacctgaagaggttggctaatactttaaatcaaatattcttacttaatgatttatccatcaaatggaaatatgtacaacatatttcaaatcagaaaaggggtgaattttccccctgcccttcaaaaaaatatttttaaaaatccacttgaaataatttcttatttgatgctttttaatcactttccactttatgacaaccatttttctagaaaggcagacaagaatataaaatgactaaggggtcactatgaaaacaatcaaatggatttgaaatttacttctgtgtattttctgtactccctaagtcttgtgctaattaattacattttacttcatcccctgtaatgttacaaatatgcaccttaaaatagaaaaacttgcttttatattttaaaaccccctcctccttacctatcttcccaaatattttaagcagaaaattaatcttgttgctttaaggattgatgtaatatttgcgaaaaacaacccctaataaaccctttagactttttcgaaccagccaaatttaaggggtttattcactctgaggttgcatggaagatggaaattaaaaatatcagtataagtagaaccacatttaagaaaaagcacctaaagatggaggacagataattctaacatcctacacacacacagtggtaaaccatattcatgtttctatgtatgtaataagttctccaaaaatctaggtatttttggttctggtactaagccaa

SEQ ID NO: 229037 - DNA, 486 bp, Homo Sapiens
tacaaaaaagttggtgcacgcagcccgactagcagtctagaggcctgaggcttctgggtcctggtgacggggctggcatgaccccgggggtcgtccatgccagtccgcctcagtcgcagagggtccctcggcaagcgccctgtgagtgggccattcggaacattggacagaagcccaaagagccaaattgtcacaattgtggaacccacattggcctgagatccaaaacgcttcgaggcaccccaaattacctgcccattcgtcaggacacccacccacccagtgttatattctgcctcgccggagtgggtgttcccgggggcacttgccgaccggccccttgcgtccccaggtttgcacctctcccctgggccactaaccatcctggcccgggctgcctgtctgacctccgtgcctagtcgtggctctccatcttgtctcctcaccgtgtccccaatgtcttcaagtggggggccccctcttggg

SEQ ID NO: 229038 - DNA, 467 bp, Homo Sapiens
  misc_feature (322)..(330): n is a, c, g, or t
gaattaacgcagcagcaaggcgaggtgagaatgcgatctctaggccatcttgttgggactgatgaccagcatctctgatctcctgatttaacatgtgggtgtccagcagggttgggattgccctaaaaacacagaacaaattctggattgtttttgcttcttaacccttcaaaggacaagaagcaaaaatatttgtagaaattaagcaagacaagagttggagcagttaacaccactatctgcagcagaaattcagaccttcttagtgaacttaagggctgaagtgtgaaagctgaggctgcaagtgcagatacacaacacnnnnnnnnngattagacagaaccctcctctaccccagatccccctctgccctgcctttgagaatgccagcaatttcagtgggattgagaatggtatgtggatctctttttttgggggtgatcctcagccaacttttttgtacaaag

SEQ ID NO: 229039 - DNA, 1126 bp, Homo Sapiens
  misc_feature (935)..(943): n is a, c, g, or t
ttgggagcaccatgtacgacatgcaggcgctgcatgagtctgagattcttccattcccgaatccagagaggaacttcgtccttccagaagagatcattcaggaggtccgagaaggaaaagtgatgatagaagaggagatgaaagaggagatgaaggaagacgtggacccccacaatggggctgacgatgttttttcatcttcagggagtttggggaaagcatcagaaaaatccagcaaagacaaagagaagaactcctcagacttggggtgcaaagaaggcgcagacaagcggaagcgcagccgggtcaccgacaaagtcctgaccgcaaacagcaacccttccagtcccagtgctgccaagcggcgccgcacgtagaccctcagccctggtggcggcagagaagcgggcgaggcactgtggtcgctgagggggttggctgggtctgagtgccaccccccaggccacagtgataccatcccagtgccatgagcccacactgcccgccctcaggctctcaggtgaacgtggccgtcagcggggaaacgtgtgtgtcagttggaccatgtgggaccctgatggacctgaaagaccaggatcggtccagctcagatattgagggctctgaagcctagttctgtcttctctggagcagctgtggcttccccgtggctgcttggtgacatggattagcgctacgtggggctgcagcatttgggatccaggctacctagaggggcatcgggccagggaaaacctcggattagcaagcaataaaaacatgacctcactcttcctcaaaggagcccctggtcttccctgtgtgactcagttctttccatctgtttgtcccgctgcaagcctctttctgcgctgactgtgacatcggaacgtggccttcctgtcaccccctccgtgccacgcactgaaggccannnnnnnnnacctgggaaactaaaaactggatattttgcctcattcacttgtactgtaacaatgtatataatttggttggtatttcactatttaatttttaagaagcctattttactatttgttttatatgaacaaagtactgcagaatttaaacctgctgctcccactttttctgagatgttttgctttaa

SEQ ID NO: 229040 - DNA, 862 bp, Homo Sapiens
ttggcacagacattccataaggagctgaaccgtttgcgaaaggccgctctagcctttggtttcctggacctgctgaaaggggtggctgacatgctggaaagggaatgcacactgctgcctgagacagcccaccctgatgctgcattccagctgacccatgctgcccagcagctcaagctggccagtaccggcacctctgagtatgccgcttatgaccagaacatcacacctttgcacacggacttctctgggagcagcactgaaagaatttgaaactgacttttggagctttccttcttttttcatttcaactgaaaatgctttaggtaaaaacctttccagtatgttcacctctagaatagccacccaaagaccttcctgaggctgcctcagaagcaccacttgctgttttgaatgactctactagtatgagaaggatgtgaaggtggttggctggttgggctttaacttcctgggattcataatttttaagcttggaagatagctgctgttcccatgatgggcacatttcctgagaagcttgaatgactgatgagcatagagcacccctgccttcctcaggaaacctgaccggcaggggctctctggcttcctgaaagcttcacctcttccctcgtttatatctcaactgtaagggcattttcaagcttctgttcatggaatgagcaactcagactgtctggagcttgctgagtacaaacacaccaccactaagtttcagaactttccttagaacttgggcaaaatgtggtggtaactcttaagtgcttttggtatctcttgagattctaacttttaaagagcaaccattaatgtgtaaaatgattcctattattcaagg

SEQ ID NO: 229041 - DNA, 1043 bp, Homo Sapiens
tttgatgttatggaatgagggagacaaaaaatgctctacaactattaactgatgcttttctggttttgttctccagacaccattcgcttttcacccaagatgatttgatgtcttataaaactctgatgaaccatgatggctacacagacattaagtatagacagctatcaagatgggcaacagatgcaagtagtaacagagttaaagacagaacaagatccaaactgctctgaacccgatgcagaaggagtgagccctccccctgtggagtctcagaccccgatggatgtggacaagcaggccatttataggcatccactatttccattattagctttgttgtttgaaaaatgtgaacaatctacacagggctctgaaggcacaacttctgccagttttgatgtagacatcgaaaattttgtaagaaagcaagagaaggaagggaaacctttcttttgtgaagatccagaaaccgataatttaatggtaaaagcaatccaggttttgcgcattcatcttcttgagctggaaaaggttaacgaactctgcaaagatttctgcagtcgatacattgcttgtctgaaaacaaaaatgaacagtgaaactctgttgagtggagagcctggaagcccgtactcaccagtgcagtcccagcagattcaaagtgccatcacaggcaccatcagccctcagggaattgtggtgccggcgtccgcgctgcagcagggaaacgtagccatggcgacggtggcaggtggcacagtgtatcagcctgtcacggtcgtcactccccaaggccaagtggtcacacagacattgtcgcctgggacaattaggatccagaactcccagcttcagttacagttagaccaagatctcagcatcttgcatcaagatgatggttcatctaagaacaagaggggcgtcctgccaaagcatgccacgaacgtgatgcggtcctggctctcccagcacatcgggcatccctacccacagaggatgagaaaaaacagattgctgctcagacaatttgacactactcc

SEQ ID NO: 229042 - DNA, 174 bp, Homo Sapiens
atgagccatcacacctggtcaactttcttttgattagtgtttttgtggtatatctttttccatcatgttactttaaatatatctatattattgcatttaaaatgtgtttcttacagactgcatgtagttgggtataatttttatccaatctaaaaaatatccgtcttttaattg

SEQ ID NO: 229043 - DNA, 866 bp, Homo Sapiens
ggagggagtgattggccgatgagagctgttcccttaaggtctccgcctctctctgagccacctctgccctctggtttgccctttcaaggtccgtcatgatcatttcaatctcgtcggcctttgcagtagtttcttcatcgtatttggttttcaggtcaaataattctgttcgagttttttccagggctgtttgtaggctctgaaccttatgctcagcttcctccagctttgaggtggtggacatctgtgtctactgcagctttctctccttttctgcaaagtcattctgtaacttctgttccttctcaagagctatggtttcggcttggttcttcagtgtctgttcatattctcggattttctctttaagtgcttttatcgtaacctcttgatttttcacttcagcaaattccttgttgtattcttccagagtttccctaagtttctggttctctgtttcaatatcgtgcaggcgctgcactttgagctggagttgctgtccgagatccaaagctggtacgggatctgggacgtcaatcaatcttttgtagacattcaagaaagctgcttcagcttccttgcttcttttactcagtgcatcaatctctccttggaaactcttcagcagcggcgctacctgcttgcgcaaatcctctggagtgttcttcttgaactcccggctctgttcgataagccgctttctggactgctcactttcatcctgccggttcgccaataccgttgcggtggcatcgagttctctctgcagctgctgtaaatcaaagcgcttccaatattgaaacatcgatcccacattggccgccatcttgagacatattgagacggagtgagcggctgatagccaa

SEQ ID NO: 229044 - DNA, 958 bp, Homo Sapiens
cacgatagcccaggccccaggtttcctgagatgagcctccacctctggcccagccagggcctgcaggctggggaagccatggtaggtgacatcatcaagctggatgagccgaggtccaaaagcctggcacagccgctccaccatgccagtgatgcgggcgatgttgttgttggaggaacagataaaagagaaaaggcattcgatggggtcttgtcgcagcagtcgcacaccttggaatttctgagccacctcttggaagtgggagtccacggaaccccagtggtgatacagttgagccagggtaacatctagctggaagtacttgcgcacggcctccagctcgtctggtgtgggcctgctagcctggctcttgtctcctcggtacacagtgcagtggagctgctcctcagtctgagtcagtgtccatacttgatccgctagtacaccactccagtgtgcaggactttgctccctccaccggaaagattgtccagaaggcagaaccaggtccaggcgcagctcagagcgagggcacgggatggaggcccacagggcaggagtggaggctagagtacgatgccccatgcgcctgggcagaagcgcgcgggcaggcatttccacagcaggcaccgccccgtagtagccccgcctacccagaaccaggcctcgtcgacgcccaaagaccccgcccagacaaggaccacgacccttaaggcctcgcccacacggtgctgtttaacaaccttccctgtttcacttaattcctccacctcctgcatgcctcgccctttgcgggtcatcaaagccccgcttcgtgccccaattctccggctttcctgaggtgtaggtcccgccccctccttgcgacttatcttctcccgcccccagagcctgtgggcgcgcacagctgtgttcttctgggttctccaggggcagacccaacttttttgtacaaagt

SEQ ID NO: 229045 - DNA, 1498 bp, Homo Sapiens
  misc_feature (1065)..(1113): n is a, c, g, or t
tttgtacaaaaaagttggctttgacaagacctcaaagtcctgggtggagagaggccgggggctgctcagactcaatgacatggcgtccaccgatgacggcacactacagtcccgactagtgatgcggacccaggggagcctgcgactgatcctcaacaccaagctgtgggcccagatgcagatcgacaaggccagcgagaagagcattcgcatcacagccatggacaccgaggaccagggcgtgaaggtcttcctgatctcggccagctccaaggacacaggtcagttgtatgcagccctgcaccaccgcatcctggccctgcgcagccgcgtggagcaggagcaggaggccaagatgcccgcgcctgagcctggggcagccccatccaacgaggaggacgacagcgacgatgacgatgtcctggctccttcaggggccaccgcagctggtgctggtgacgaaggggacgggcagacgaccgggagcacatagcggccgggagcccggctgcacaccaggctgctgctttgtccgtctatccacccgcccacccgcccccaccccaccggcagcgtccaggtgcggggccgggaaccacacaccccactgggccggccacagtctggacccgcacgtcctgttcaaaagcagactcgggaactgcctgaatgtggtttggcacgagacctcatcatattgatgagcgaacaaacaagaacatttcctccctcccctcctttgaattgaaatggcacattaagacttgtcacggcttctcactgggactggagacctcgttccttcaccccgcgtgtcgccagcctctgggtccagccagagcccctggcttctccgccacccacacccttcccaccctgctgtggggccctgcctttgtggggagcagccagccctctgcccctgcccagggctccccaactataggcctgggacccccgcccagcttggggggctgctcgtacgattgtagacactgggcccattggacgtgctgttaactactatcttcatttcccacttcccctctctgattgggggtgtannnnnnnnnnnnnnnnnnnnnnnnnnnnnnnnnnnnnnnnnnnnnnnnncttaggttaagatgctctcgagcgttgagcaggcacagctctgtcgaggtccctgtcccccacctgtggttctggcctctgaggttgggggactacttgtttcccaccccaggttcctccaggccaagtcatggggtgatgaggagttggggccctgtctgtcctaagcctggagagtgcctgtctgggaaaaggtcactggacctggaagggtccccagggtcccctgactcccgtctccatctgtcacgtggttcaccatcatcaggcaccaggcgcaaactgcttcccgctgttggccatcccttccccagccacaggtgtccctgcccccacgacagtccagggcccaggagcattctgtgaaaggcaaaaggggaccctc

SEQ ID NO: 229046 - DNA, 937 bp, Homo Sapiens
ttggcttttctccccctcttttttgttctaaagaaaagtcattttgatgcaaggtcctgcctgccatcagatccgaggtgcctcctgcagtgaccccttttcctggcatttctcttccacgcgacgaggtctgcctagtgagatctgcatgacctcacgttgctttccagagcccgggcctattttgccatctcagttttcctgggccctgcttcctgtgtaccactgaggggcagctgggccaggagctgtgcccagtgcctgcagccttcataagcacacacgtccattccctactaaggcccagacctcctggtatctgccccgggctccctcatcccacctccatccggagttgcccaagatgcatgtccagcataggcaggattgctcggtggtgagaaggttaggtccggctcagactgaataagaagagataaaatttgccttaaaacttacctggcagtggctttgctgcacggtctgaaaccacctgttcccaccctcttgaccgaaatttccttgtgacacagagaagggcaaaggtctgagcccagagttgacggagggagtatttcagggttcacttcaggggctcccaaagcgacaagatcgttagggagagaggcccagggtggggactgggaatttaaggagagctgggaacggatcccttaggttcaggaagcttctgtgcaagctgcgaggatggcttgggccgaagggttgctctgcccgccgcgctagctgtgagctgagcaaagccctgggctcacagcaccccaaaagcctgtggcttcagtcctgcgtctgcacacacattccaaaaggatcgttttgttttgtttttaaagaaaggtgagattggcttggttcttcatgagcacatttgatatagctcttttttctgtttttccttgctcatttcgttttgggg

SEQ ID NO: 229047 - DNA, 1119 bp, Homo Sapiens
ataaaagccaactttgtacaaaaaagttggccgatagaatgtttcctataaatggtttgtactagtacattagtgttaaaccagaactgaaatttaaacatatatatatatgaggatgtatatatggcattatcagcttatttagaactgatggccataccttacaatcttgttttacccaaaattaagctattggggttgaaagctaaaaggagcacttttgtagaatagcaacttttcttttcctctttcttgattgtatggtggggtggtgacctatttttacaaattatacctaatgagtaaaattagtgtaaagtgataacatgcttctacctgtatttctagtgaccctttagcggcaggtatttatacctggtatttatgatgcagtatataagtggtgaacaataactgacagtattgtgcttgctgtacatgtctggtcttttgaaacagattttagtaagcattttccagaggtaaaactgtgtccttattctaattttattcctagggcaaagtagacagggattatttccttgaatctatttccaaattaatatttttttctttggtatttctacactttaaggccatttggtgcaatttagaaagtgttggcctcccttccgctagccacattcaaaattaacttccaaaacctcaggaacagtacaaagaattgaaaccctcaatatggcagcacagccggctgtagtgtatatttagggtacaccaaatcaggtattcctggtggtcttgtgcactttaatttctgttacaatgagttaagaggatgaggaagaaatctacttattaacacttactgcagaaatgtctgcattattccgtttgttttcttattattttacctctccaaacatcttcctgtgcagatcactacttcatagttgccaaattttaaaacacttaactgctgaaattcagtgtcagcaaagtgatattacgttgttctgtttctaattaaccttagcaaatgtacataatgtcaaaacccaatagtatttgacagtacttatgtatacaatgtttgataagcatttttaataagatttgtatttttaaatttagtatataataaaaagatgtgtttca

SEQ ID NO: 229048 - DNA, 1249 bp, Homo Sapiens
gaccccgctgtcctgggggtgccactcgaggaaggtcacgggggccacgtgctgcattgaaggtggccactggggaaccagacttgaactgccgaaggtcccagatcttgagggcccccatcatccccgccactgagcaggaagggctcccggcggctccagctgatgacattgacgtccccatcatgggcggtggctgtggtgagcatgcaggccttgctgggggctgcccggatgtcccagatgcggatggaggcgtcagctgagcaggaggcaaacaccgtgttctcagtcggtgaccactgcaggtcctccacagagcgtgtgtggcccacgaatggccgctggtccacgtgccaggagccgccgtccgtaggtgtccagaggtggatgttcttttgacagtcaccggtcagcaggcgaccggtcacccggggggaccagtcaagggcaaagccctcgcccatgtgtccagcgaaggagaagatgggcttcatttgggcctgctcatcccggaggaaggctgccagggcctggggctcctccaccacctgcagaagccgccgcagcgcaaacacctccacctggcccttctctgaccacaccccagccacaggctcttcacccagccatgacacccgaactcggttgatgccaccatagtggggcaccatggccagctccagctgaggtttccgctcttcttcatcctcttcatcttcctcctcttcttcttcatcactgccctctgagggtgggggctttgtcccatgcagattgtgcatccgaagcatcatcagtctgttgctctgggcgctctcagcctgggccacagcacacaagtaaagtgtaagaggaagctctgtccggttgtctcccaggtgatcccggactatgtcaaagctgagacagggggcgccagtctgcgctcggtggtagagcacataggcctcctcgtccatgaccagctcctccccttcgcgtagcggcggcccccggccgggcaggtagacctgggccgggccctcggaacttgtgtcgccggactcggcttccatgggttccccggtttcacacgtgcgacgccgacccttgcgcgccgccatcttcgaaccctctcgctgctgacacccggtaaaagcgtcacttccgggtttcgctttccgcctaatgagatccgccctactgcgcggttaccttggaaactcctgggaccgctaatcggagagggtgcggaaacgctggccaa

SEQ ID NO: 229049 - DNA, 1293 bp, Homo Sapiens
ttggcctgtattttatagtcttggaagtgtcttcttttgccaggacagagagaggagcttcagcagtgagagcaactgaaggggttaatagtggaacttggctgggtgtctgttaaacttttttccctggctctgccctgggtttccccttgaagggatttccctccgcctctgcaacaagaccctttataaagcacagactttctatttcactccgcggtatctgcatcgggcctcactggcttcaggagctgaataccctcccaggcacacacaggtgggacacaaataagggttttggaaccactattttctcatcacgacagcaacttaaaatgcctgggaagatggtcgtgatccttggagcctcaaatatactttggataatgtttgcagcttctcaagcttttaaaatcgagaccaccccagaatctagatatcttgctcagattggtgactccgtctcattgacttgcagcaccacaggctgtgagtccccatttttctcttggagaacccagatagatagtccactgaatgggaaggtgacgaatgaggggaccacatctacgctgacaatgaatcctgttagttttgggaacgaacactcttacctgtgcacagcaacttgtgaatctaggaaattggaaaaaggaatccaggtggagatctactcttttcctaaggatccagagattcatttgagtggccctctggaggctgggaagccgatcacagtcaagtgttcagttgctgatgtatacccatttgacaggctggagatagacttactgaaaggagatcatctcatgaagagtcaggaatttctggaggatgcagacaggaagtccctggaaaccaagagtttggaagtaacctttactcctgtcattgaggatattggaaaagttcttgtttgccgagctaaattacacattgatgaaatggattctgtgcccacagtaaggcaggctgtaaaagaattgcaagtctacatatcacccaagaatacagttatttctgtgaatccatccacaaagctgcaagaaggtggctctgtgaccatgacctgttccagcgagggtctaccagctccagagattttctggagtaagaaattagataatgggaatctacagcacctttctggaaatgcaactctcaccttaattgctatgaggatggaagattctggaatttatgtgtgtgaagggagttatttgattgggaaaaacagaaaagaggtggaataaattgttcagagaaaccatttactgtgagatctcccctgga

SEQ ID NO: 229050 - DNA, 870 bp, Homo Sapiens
gacggccgcgtgcatttgcgcgtgatccgcgccaaaggcactatcgggctcttgcagcgcctgcgtcatggcgtccagctcctcctgtcgctgctggatctctgcgctgatgtcgcacttgagctcactgtggctgctgtcaaggagcgcgcacgagcagcacagcggcttggaacatcctcggcagtagatgctggtcagcgtaggggtgcggtggttggggttggagcagaagatgttgttggtcttgcgggtgccgtccaggaactcacgcaccgactggttgcgcagctctgctaggggccgggcctcgtgcttgaggaaccactggtgtgcctcgaagcacttggcgcagaggagctgctcgcactcaaagcaccagaagtcggccgactctttgcagcgggtgcacacagcctgcgcatccacaatctgccggtacaccgacaggcgccgctgcagactctcgaaaaagacgttatccagggcgggtgtgtctgcacctaggggccagggcgcctggcagatggggcactgcatgcccgacgcctccaggcatcctgagcacagcgtgtgcagacaaggcagcagcttcgggcacttggcttccgcctggcattgctggcagcgcagaaactggaactcctcctccgaagcgggggctcgctctgtagggctggggctggggctgggctggcggccttcagagggggtctcggggggaggcatggtgggctcctggggccgggcggggtcctgctggggcctcggagatcgggcgggtgcaggctccatggaccccagcttagtttcgattctcggtttagatcttggagtgcgtgaagagaagctgaaggggaggcgtgccaa

SEQ ID NO: 229051 - DNA, 826 bp, Homo Sapiens
ttggcatcagggtgcggggtgcagttgcggctccagggccatggcggaggagcagggccgggaacgggactcggttcccaagccgtcggtgctgttcctccacccagacctgggcgtgggcggcgctgagcggctggtgttggacgcggcgctggcgctgcaggcgcgcgggtgtagcgtgaagatctggacagcgcactacgacccgggccactgtttcgccgagagccgcgagctaccggtgcgctgtgccggggactggctgccgcgaggcctgggctggggcggccgcggcgccgccgtctgcgcctacgtgcgcatggttttcctggcgctctacgtgctgttcctcgccgacgaggagttcgacgtggtagtgtgcgaccaggtgtctgcctgtatcccagtgttcaggctggctagacggcggaagaagatcctattttactgtcacttcccagatctgcttctcaccaagagagattcttttcttaaacgactatacagggccccaattgactggatagaggaatacaccacaggcatggcagactgcatcttagtcaacagccagttcacagctgctgtttttaaggaaacattcaagtccctgtctcacatagaccctgatgtcctctatccatctctaaatgtcaccagctttgactcagttgttcctgaaaagctggatgacctagtccccaaggggaaaaaattcctgctgctctccatcaacagatacgaaaggaagaaaaatctgactttggcactggaagccctagtacagctgcgtggaagattgacatcccagattgggagagggttc

SEQ ID NO: 229052 - DNA, 1019 bp, Homo Sapiens
ttgggcaaacagatccccccttttcatcctctcactcagatgatgtatagccctcagaattctgattatcttttagctctcagcactgaaaatggcctgtgggtgtccaagaattttgggggaaaatgggaagaaatccacaaagcagtatgtttggccaaatggggatcagacaacaccatcttctttacaacctatgcaaatggctcctgcaaagctgaccttggggctctggaattatggagaacttcagacttgggaaaaagcttcaaaactattggtgtgaaaatctactcatttggtcttgggggacgtttcctttttgcctctgtgatggctgataaggatacaacaagaaggatccacgtttcaacagatcaaggggacacatggagcatggcccagctcccctccgtgggacaggaacagttctattctattctggcagcaaatgatgacatggtattcatgcatgtagatgaacctggagacactgggtttggcacaatctttacctcagatgatcgaggcattgtctattccaagtctttggaccgacatctctacactaccacaggcggagagacggactttaccaacgtgacctccctccgcggcgtctacataacaagcgtgctctccgaagataattctatccagaccatgatcacttttgaccaaggaggaaggtggacgcacctgaggaagcctgaaaacagtgaatgtgatgctacagcaaaaaacaagaatgagtgcagccttcatattcatgcttcctacagcatctcccagaaactgaatgttccaatggccccactctcagagccgaatgccgtaggcattgtcattgctcatggtagcgtgggggatgccatctcagtgatggttccagatgtgtacatctcagatgatgggggttactcctggacaaagatgctggaagaccccactattacaccatcctggattctggagcatcattgtggccattgagcacagcagccgtcctatcaatgtga

SEQ ID NO: 229053 - DNA, 1485 bp, Homo Sapiens
ttggccttcccggagccccgaggggccggagctcctggcggtgccggatcctgacggcggccttcccccgggtctgccaaaatgtctgaaagatcagatctccttcacttcaagtttgaaaattatggagattcaatgttacaaaaaatgaacaaattaagagaagagaataaattttgtgatgttacagttctcatagatgatattgaggtacagggacataaaattgtgtttgctgcaggttcccccttcttaagagaccaatttttactgaatgattccagagaggtgaaaatctccatattacagagttccgaagtggggagacaattgctcttatcctgttatagtggtgtgctggaattccctgagatggaactggtaaattacttgactgctgcaagttttcttcagatgagccacattgtagaacggtgcacacaggccctgtggaagtttataaagccaaaacaaccaatggatagtaaagagggatgtgaaccacagagtgcttctccccagtcaaaagaacagcagggagatgccagaggctccccaaagcaggactcaccttgtattcatccatctgaagacagtatggatatggaggacagtgatattcagattgttaaggtagaatctattggggatgtatcagaggttagaagtaaaaaagatcagaaccagtttatttcttctgaacccactgctttacattcatcagagccccagcactccctgataaattcaactgtggaaaacagagtaagtgaaatagaacaaaaccatctccacaattatgccctttcttatacaggcagtgataacatcatcatggcctcaaaagatgtctttggccctaatattcgaggtgtagacaaaggcctacagtggcatcaccagtgcccaaagtgtaccagggtgtttcgtcacctggagaactacgccaaccatttaaaaatgcacaaactctttatgtgtctactctgcggcaagactttcactcagaaaggcaaccttcatcgacacatgcgtgtgcatgccggaattaaacctttccagtgtaaaatctgtgggaaaaccttttctcagaagtgttccttacaggatcatcttaaccttcacagtggagataagccccataaatgtaactattgtgatatggtttttgcacataaaccagttttgaggaaacaccttaaacagctgcatggcaaaaacagctttgataatgccaatgagagaaatgtacaagacctcacagtggattttgattcttttgcatgtacaacagtcacagactctaaagggtgtcagccacaacccgatgcaacacaagtcctggatgcaggtaaactggcccaagctgtcctgaacttaagaaatgatagtacttgtgtgaattgagtaggggctttcatgctcacaactcgaactgactgacaatgtggcaatagtcttagtcttttaggagtgattttgcta

SEQ ID NO: 229054 - DNA, 764 bp, Homo Sapiens
ttggggccccaggtccccgccagcacgcgcctgcttcccgtctgcgcgagtccacgcagctccccaggcccttcaccagcacagcagcagcaggcatggcagcaagcgtggagcagcgcgagggcaccatccaggtgcagggccaggccctcttcttccgagaggccctgcccggcagtgggcaggctcgcttctctgtactgctgctgcatggtattcgcttctcctccgagacctggcagaacctgggtacactgcacaggctggcccaggctggctaccgggctgtggccattgacctgccaggtctggggcactccaaggaagcagcagcccctgcccctattggggagctggcccctggcagcttcctggcggctgtggtggatgccttggagctgggccccccggttgtgatcagtccatcactgagtggcatgtactccctgcccttcctcacggcccctggctcccagctcccgggctttgtgccagtggcccccatctgcactgacaaaatcaatgctgccaactatgccagtgtgaagactccagctctgattgtatatggagaccaggaccccatgggtcagaccagctttgagcacctgaagcagctgcccaaccaccgggtgctgatcatgaagggggcggggcacccctgttacctggacaaaccagaggagtggcatacagggctgctggacttcctgcaggggctccagtgaagcccagcactgctgcagggggtgggctgcctgcct

SEQ ID NO: 229055 - DNA, 504 bp, Homo Sapiens
atgctatatctttccagggacagtaaggatcccactaaaaagacaagaattcgatttttatcagtttactaaatcaacatcttatatttctatactaaacactagccactacttgaggtttattactgttgtgattatgtttataaaacagggacatcttgcatacccctaatggtgtgaataaaatcaactgtgtcagtacctttgagcacttcataacttaaaattctaaaaaattgagatttggacctacagtttgctatttaacagaccaggtctggtcttgacagtaaagccaccatcaaaagctgcattaagaacctcatccaggcagcttgctgtgacaaaacttaaatcctgtcgtacgttgcctgggattccctcaaggtctttttcatttctccgaggaataatgacttgcttcagtcccgctctgtgtgccgccagcactttgtctttaattccacccactggaagaacgaagacctctcagtgtaatttgta

SEQ ID NO: 229056 - DNA, 922 bp, Homo Sapiens
cagggagtgatggcggcatccatgttccctcgctgggcttccagcacggagcggatcactcctggtccatgttggggaacatgtcctggatggctttcaggtcctcctcgctacagcggggctgggcgttcacggcggccgggggcagggccacgggcaccatgccggggctacagacagcgggcatccctgtgatgggcacatagccaacgccctgctggtacactgttggcatcaggaccacgggctggggtggcatcaccatggcagctggaagcagcgcgtaggacatgacgaggttgatcatgccctccttgtcgtccccctgcctcccgctcaggctgtaccacttgtcctccaccttgccctgcctcagggactccgggatggtgatgtgggtccaggcaatgcggtcgtccatggagaaggctctctcatcgaagatctcgagatagaaagagtccacgcctgggggcaccgtgcagtggatgaccttattccagcggggattcttggcgccattgtgtgccgtgggcgtctcgtacaccgcgtagcccaggcgcagtcggcagtaggggtccatgcgggtcatgccgtaattcttggccaactttgcctgtaccaccgtgatgttcagtcggcccacggtgcccactgcgcctccgtactgcagctgctgggccgcctgggcgtccagctggacctgccgctgctgctgtgtgggcgtgatgcggaggaagtcctgcgggagctcaccgatgtacaccggcccgcgctgagtgctgacggtggtcgccatggtgctgcggcggcccccgtggctcgccgacccgacagtgacgcgccgggcgacctcctgcgcccccgccggagcctgcgacggagacagttgtcacctcgagcccgccgccgccccaacttt

SEQ ID NO: 229057 - DNA, 1103 bp, Homo Sapiens
taaaaacgaagtcatacaggtcttcagactctgcaccaggcccttgacggagtgcgagcaccctttcttccctgcagctcgctgaaacgctttaggggcttaggctgtggagctgagctagctggtgcccgtttgtatgaggatgtagaagaagaggcagaggaggtggctgctggagcagaaggtgaccgcttggtgccaggagcctcatgggaggtggctggggggtgcagctccctcttaaggtctgttccgcctgctgtcaggctctcctgtgtgctccggcgtgttacccgagtggcaggtgcagctctgggcatctgcttggcttcactcttacgccggctggccatcagggctgcagcacatcgctcagcagcatcccggcggggccgacgtgagcccaataagagggacccttcatctcgggatggggcccggcctcgggaggcctctccacagaggcggcagggtgggccaccaggccctggttgccagaagccagcactcatggtgagaataaggatgaaaagggctgactcaggcacaggccaggagtatagcgacacttgactgacagccccatggtgaatgagctgatgcaacagctgccgaagtgactgctgagcagccacatcagagaacagcaggtggcggaacttgagagtgtgcagggagctggccagggtctccagaaccctgcggttgggctcagccaccagctcggttgcaccctgcagcatgttacagatggtgagctgtcggacatggcgggagctgtgcagaagaggtgagaaccgctgatcacaaagacgcctgtcagaagacacatcaatggtcccacgtagaacatgggaaaaaaaggcctccataaacttggctcgccaacatgtcacactttccaaactggaaggccttgtcttcatcagttcatcccagagtcggcgccagatggcctgagttgagaggcctttcttgagggcagtttcctcaatcctctccaagtaatatatattgagcagaggtaggatgctttgaagtattgggcctgggagggcccacaccccgctctccagaacccccatatgggcgctcaccgccaa

SEQ ID NO: 229058 - DNA, 942 bp, Homo Sapiens
ttggcgggacgaggaggaggaggaggaagaggggatggagcaggggctggaggaggaagaagaggtggatccccggatccagggagaactggagaagttaaatcagtccacggatgatatcaacagacgggagactgaacttgaggatgctcgtcagaagttccgctctgttctggttgaagcaacggtgaaactggatgaactggtgaagaaaattggcaaagctgtggaagactccaagccctactgggaggcacggagggtggcgaggcaggctcagctggaagctcagaaagccacgcaggacttccagagggccacagaggtgctccgtgccgccaaggagaccatctccctggccgagcagcggctgctggaggatgacaagcggcagttcgactccgcctggcaggagatgctgaatcacgccactcagagggtcatggaggcggagcagaccaagaccaggagcgagctggtgcataaggagacggcagccaggtacaatgccgccatgggccgcatgcgacagctggagaagaaactcaagagagccatcaacaagtccaagccttattttgaactcaaggcaaagtactatgtgcagctcgagcaactgaaaaagactgtggatgacctgcaggccaaactgaccctggcaaaaggcgagtacaagatggccctgaagaacctggagatgatctcagatgagatccacgagcggcggcgctccagtgccatggggcctcggggatgcggtgttggtgctgagggcagcagcacatctgtggaggatctgccagggagcaaacctgagcctgatgccatttctgtggcctcggaggcctttgaagatgacagctgtagcaactttgtgtctgaagatgactcggaaacccagtccgtgtccagctttagttcagacctaacaagcccgtctga

SEQ ID NO: 229059 - DNA, 1206 bp, Homo Sapiens
gccctggtcctgtcaccccctagacgtccgtaagggtaggaaatgccaaacaggatctgtgtgatgtgtcaactctgagtaaatacaagaggctgctaggagccccccagctgaggattgagaggcaggctgtgtctggttccatttcaaagaatgctgtgatgcattagcagcgtctgctatggcaacacccattagaagcacctggaaggggggttttggaaacgggctcagaaaggagcaaggtgtgtccgttccattcttgctttaggtggctgttccgttacccaggctatgctgtctcagtggccaggtggctgaggaggaagtctgaaggccgcatagttgcaagtggcttccctagggcctgcaggggacagcataggcccaaagctagaggaagcttggaagggcgcccacgctgggtcctgcggggctctgcatactgcaggccaccatggcgctagctccttaccctctggagtctgtctcatccaggagaagacagctggctggcctcagagcgttacatgcaactcgggtgaaaacatttttacatgacacagacacacaatgggctttacctctggataaacttagaaactttccatccaaacgaaaagggtgtatcttctgtatgttgccaagaagcctaaactgagtacaaggacgatcttactttaatcaagttccagaatgagggtacacagcttcgaaaagcagtctgtagcagaagatgcaagggtgtgtgtagccatgtttccagaatataccaaaggaaacacacacaaccccagtgtggccttttgcgaaccctcgatgctgctccatactgggggcaggcggctacttcgtccagctgactttgggaatgtcgtaatgctccgtgagtgtgtccaggtgtctgttgaagtcctccactctctgcttgtgggttttggatgccttctttaggatcctttccatttgccgcttctcctgcattttctcgaaggccgcctgggccggggtccgcttgtccaggccgcgccgcttctcctcctcgttctttttgctcgttcccattgcttccaggagtttcgctttgtctttgtccttctttttcttcttccgcttggtcactcccagctctgcgacgcctttcagcttcaggggtcccttttggacctgctggtaggcctccatgccaacttttttgtacaaagt

SEQ ID NO: 229060 - DNA, 755 bp, Homo Sapiens
ttcaggtgagagcaggtgttcccgggcccttcacctgggctcaggtgagagcaggtgttcccgggccccttcacgtggggctcaggtgagagcaggtgttccgggccccttcacctggggctcaggtgagagcaggtgttccgggccccttcacctggggttcaggtgagagcaggtgttcccgggccccttcacctggggctcaggtgagagcaggtgttccgggccccttcacctggggttcaggtgagagcaggtgttcccgggccccttcacctggggctcaggtgagagcaggtgttcccgggccccttcacctggggctcaggtgagagcaggtgttctgggcccctgcatctgaggcctgggagttgaccctgacttcctggccccagaaagaaaagggaaaacacagagatcacaggagaagggacacaagcggggagggtcgcaggctgccccaaagcccagctccaggctcaggaaagcccctccccactcaccccttccggagggcctgggtctgcggaggaacggggcttagggggtctccgagggttagagtgctccaggctcgggtggggaggaggaagatgtgttcgggtgctgagggcctcctgcgttgggcccagagggccaggctgcggccactgccaggtgggcagctcatctctctggcagcagcacgaagaaggcagccttcaggaagcggccgaagctgcagagtgcagccaccagccagtgggagcggccaa

SEQ ID NO: 229061 - DNA, 943 bp, Homo Sapiens
ttggatttgcattccgtaatcctacagcacaggcagagtgcacggctgaagaagcatatacacttacagagggcaggtgtttgtttgccagtggcagtccatttgagccagtgaaacttacagatgggcgagtctttacaccaggtcaaggaaacaatgtttatatttttccaggtgtggctttagctgttattctctgtaacacccggcatattagtgacagtgttttcctagaagctgcaaaggccctgacaagccaattgacagatgaagagctagcccaagggagactttacccaccgcttgctaatattcaggaagtttctattaacattgctattaaagttacagaatacctatatgctaataaaatggctttccgatacccagaacctgaagacaaggccaaatatgttaaagaaagaacatggcggagtgaatatgattccctgctgccagatgtgtatgaatggccagaatctgcatcaagccctcctgtgataacagaatagaagcactcccctgataaatactttctgtgctccagggaaccccttttttcagacaagaagagataatgtcttcagttttatggtgttttctgtgttttgttctccctgaccactttggttgatgtattttttccatgcgtctccacatctgttggggtagacgtgttgattgattgcattgcccaccagcaccctacaatcagatagttgtgatgctttaattctaacatacagcccgtaccacatccaggagatgtaaaaagtgtgtttgtgaatgtcttcacttgtactctaattcagacttgccaaagtatttgctatttactattatgggtaatactcttctctggcctagttcttacggagctactaaaataaaaatttacttttatggatagaagttacgaaatttgagaagaaactaaattttc

SEQ ID NO: 229062 - DNA, 984 bp, Homo Sapiens
gagacgctttctgttctgagaaggggtgctctggcggctggccatttcaaacagtctgttagcaactgcctcgtagtcaaactggagaacggggccgccactgtccctgtcgtcactgcctgctcctcaccagcctcaggttcagccctgcagatggagttgcgggcggcttctcagacctcttctgggacagcgcgtctccacgctcaccaccctcagaggactcatcactgtccgacgccacctcctcatcctgtgtgtccagttcattcaggaggtcttcaatggcaagcggggcctgctccacaatcgtctcaaagatgcctcgagtgatgttgttcaaaaccaaggaatccttggtccgggcagcgattctgcagaaggggtcgatgaacttcaggttctggtctgccgtaagctcctcggcgcccactttggtcagctcctccaggaagatctcgatgaagtggctcttcacaccgttgggggcctggctgctggggtgcaggatctcagtcatcagcagctctagcagctcctcgatctgtctttcttcccagccttgcatcttcagaaccttcaaggactcgttcaggaccatccgcatgagcatgtagaatttatccaggcgcagcctgtcaatgcccgtccactcgcgattcatggtctgccagaaggcctgaaggaacaggtgctgcgcctccgtggtctgaaaagcatgaacgagctgggaaatagtccttcctaattcttcctggaggagtggcttgtcctgcatccacatgcaataaaacagtcctttccacaccttcagcagctcgtcgtgcgtaaaaccacctgcggcccgctgagccctggcgacgatgtatttccggagcttcctcaccgcccggtcccgggtcacctgctcattccccgccaggcgctgagccagctggatctcaggcgggagctgcacgcgcgaaaccatgacgccgacgccaa

SEQ ID NO: 229063 - DNA, 1184 bp, Homo Sapiens
ttgggtccggatcctgttaaacaccggcgggcgcgagccgttgcagttctctttgggtgatcgctccttccctcttcaacggatccctccccgcctccatcctcgttctgtgggagagaccagccttctggtgctgcagtcaggaatggagcttgacagcgctctggaagccccatcgcaggaagactctaatttgtccgaggagttgtctcactccgcctttggacaggccttctccaagattttacactgtcttgcccgcccggaggcacgacgaggcaacgtaaaagatgcagttcttaaagacctcggtgatctaatagaagccacaggatttgataggttatttgaggggactggtgcacggctccgcggaatgccggagacactggggcaggtagcaaaagccctggagaagtatgcagccccctccaaggaggaggaaggtggaggtgatgggcactccgaagcggccgagaaagcagcccaagttgggttactgtttcttaaactgttagggaaagttgagactgctaagaattccctggtcggccctgcatggcagacgggcctgcatcacttggcaggacccgtttatatttttgccatcacacacagcttggagcaaccatggaccactccgagatctcgggaagttgctagggaggtgctcacctcactgcttcaagttactgaatgcggttctgtggcaggattcctacatggagaaaatgaagatgagaaagggagactttcggtgatactagggcttctcaaacccgacttgtataaggaatcctggaagaataaccctgccatcaacatgttttctcatggactctgcaacaggtcactcggccctggctgaaccagcatctggaaagggtacttcccgcatcattggtcatttcagatgactatcagactgagaacaaaatcctgggtgtacactgtctccatcacattgtgcttaatgtggctgtgctcctgtgtctgctggatttattccccatcctggagaaaaccctgcactggaaaggagatggagctcgacccaccacccattgtgatgaggtcctgcggctgatcctgacccacatggagccagagcaccgccttcttttacgcagacctacgcaagaaactgccggctttcgtgaacaggttggggatcctaactgtcc

SEQ ID NO: 229064 - DNA, 1147 bp, Homo Sapiens
ggggcccgacatccccgcggggcccgggaccgcgaggaggacggcgggggcctggagcccgcggccgtggcccgcgacctattgaggggcacatctaacatgtcatttgaggagctgttggaattgcagagccaagtggggactaagacgtacaaacaattggtagctggaaatagtcctaagaaacaagcttctagaccacctatccaaaatgcatgtgttgcagataagcacaggcctctggaaatgtcagccaagatccgagtaccatttttacgtcaggttgttcccattagtaaaaaggtagcccgggaccctcgctttgatgatctgtcaggggaatataatcctgaggtgtttgacaaaacataccaattcttgaatgacatccgagcgaaagagaaagagcttgtgaaaaaacagttgaagaagcacctttcaggagaggagcatgagaaactgcagcaactgcttcagcgaatggagcagcaagaaatggcacagcaggaacgaaagcaacagcaggagctgcacctggccctgaagcaagaacgtcgggctcaggcccagcagggccatcggccatacttcctgaaaaaatctgagcagcgccagttggcactagctgagaagttcaaggagctgaaacgcagcaagaaattggagaacttcttgagtcgaaagaggcgacgaaatgcaggcaaggacaggagacatctccctttgagcaaagagtaataaggaactatcctctgctctgccactgccccagggagacatggatctgtgaggacagatttggccacggctggtttccgttcaagggcaaggatcacagctgcccttgaatctcattgcctcagagaagactagagggctcttggactatccctagggctacacaagaatagttcagccttctgccatgccacacagcctcagcttgaatctggttcattgcgtcctcgtgttcttctctcatccttgccttaaaccagggattctgataccgaagaagaggggccaatgaaaaccatggagtctgttcgtgactcccagggctgggacattatgtaggagccacttcataaacattctctttactcatctttttattctgttttttgtggccttctttttgtgtttc

SEQ ID NO: 229065 - DNA, 676 bp, Homo Sapiens
ctttgtacaaaaaagttgggtcctttcccgggagacaagtcgggaaagcctggctggactgcctcagccccgcgcgcctcctggactcagggttccccgtcctgagctcgggagatgttcagagtcacactgccgcccggtctgccacgcagaggtccaacttgccacccgcgtccctggtacctgagaccaccgacatcctcaggttcctgaccgtggcgcccttctacccagcccagtgtgcggccgccgcgctgtctgcacagctgggggcctctgagcctggtgggcttcctggactcttggcctcactccttgccccctccccatgacacccatgagccgaaaggatgtcactaaggatggctgattccccaagggcacccgctctccctccctccctgctggaggaacacgtcatatcagatgagaggaagatggcctctgatggacagaatttttctcttaactcagcttttgctactttggcaaaaactagcgaggggtagcagaaacctgcaccaaggattgtccctatgtcttggcccctcctagagcgtgtgcagactgatgattttatatgtaaatcaagactcacatccctttcctagtcccccacatccaaagcccctcagcctgccttgcagaccaatgggctccatgttctgtagccccc

SEQ ID NO: 229066 - DNA, 1179 bp, Homo Sapiens
ttggtttagagctgcatgaatttgcagatcaatctcctggaaacctcagttcttcatccctcagaagaaagctgtttttaggtgggaacggaagcatctccgactccttaccttcggcttctcccggaagtcctcacagtggtgttcaaacatcactagagatgttttattcaatagatttgtctcctgtaaagtgtaggagccccttgcagacaccaagttcggggcagttttcttctagccctattcaggctagtgcaaaaaaatacagcttgggaagcataactagtccttcgcctatttcttcacccactttctcaccaattgaatttcagataggagagactccactctcagaacaaaggaagtttactgttcattctcctgatgcttcatctggaacaaattctaatgggataactaatccgtgtatcagaagtccttatatagatggctgctcgccaattaaaaattggtctcctatgagacttcagatgtatagtggtggtactcagtatcggacctcagtgattcagataccttttactcttgagactcaaggtgaagatgaggaagataaagagaatattccttccacagatgtctcatcacccgccatggatgctgctggaatacacctacggcagtttagtaatgaggcttctacccatggtacacatttggttgtgactgccatgtctgttacacaaaatcagtccagtgcttctgagaaagaattagcactgttgcaggatgttgaaagggagaaagacaataacactgtggatatggttgatcctatagagatagcagatgagaccacttggattaaggagccggttgataatggcagtttacccatgactgattttgtaagtggcattgccttcagtattgaaaactctcatatgtgcatgtcacctcttgctgaaagcagtgtcattccttgtgaaagcagtaacattcagatggatagtggctataatacgcagaattgtggaagcaatattatggatacagttggggcagaaagttactgcaaagaaagtgatgcacaaacatgtgaagttgagagtaaatctcaagcatttaatatgaagcaagaccacacaacacaagaggtgttggatgaaaacagcaagcccttttcaatgcagcagtccatagaatacctctgtc

SEQ ID NO: 229067 - DNA, 678 bp, Homo Sapiens
gctcaccccgccctctaagaatcagacagaaaagctggctgcagaagatggctggaggtcttcctccctgttggaggagaagatgccaaggtgggcagcagaacacaggctggaggagaagaaaacctggctgacaaatggctttgacgttttcgaatgccccccaccaaagacagagaatgagttgctgcagatgttctaccggcaacaggaggagatccgaaggctccgggagctgttgacccagcgagaggtccaggccaaacagttggaactggagatcaaaaacttgcggatgggctcagagtatctctgagcagagacctctgccctcctcaccctcagggacaccactcggctccatggggaggtttagaaccaaaccacaagtcccctcaaggacaaccactatttctatattttttaccagaaaacaaaactctccatcgctgaaagagattccagtgggacatggtgccgtttttctgtttgccttcttgcaacaacagtttctgaattgactttgttttcagatgatgccttctgatgaattctgttattaagggcccatgatgagctgtaacttctcaagaggaaagaacacagtagaaaactagagctggaaggatctaggttgacctgtctgtgattttcaaactgtggtccagagaatagggg

SEQ ID NO: 229068 - DNA, 548 bp, Homo Sapiens
ctgaccatctagtccttgtcatctgggcaccctcacacatctccttaaccacacttaatctccaaataagtacgataacatagtcatagtcccacccaacatgatgcagttatcttgcatacaactgaagacaactaaccctttccccaacagagcccaccagcagtggtggagatgtcggtccatgagcgcacacacaagactgagggactgtcggccctcccaggtggtgtcaacacaacatcacacacaggtgggggggcctgatagcccagcacccatgatacagggcctaccaatgcttaaaaccacacccagggagcccacagaggcactcagtgggtggtggggtgatggatacacatctatcaggcacagggcggaggtgggcaccactgagttgcactcagcaaacacattgggtatcttgtgcccaaggcctgtatttgtggagctgatgttctagtgagagacagtaaatgtgacaaaagtaaaatatatcagatggtgagaaaacagaaaaatgagatcagaagtggagatgttgg

SEQ ID NO: 229069 - DNA, 947 bp, Homo Sapiens
  misc_feature (790)..(838): n is a, c, g, or t
ttggcgctgttttgaaatcgggccgcggggggtctctcaagctggttccaacgctgaggccccacagcctcccaattccgggcagacccctgacacctgctgtctggccccttccggcctgaagctgcagccgcgccatgtccacccctccgttggccgcgtcggggatggcgcccgggcccttcgccgggccccaggctcagcaggccgcccgggaagtcaacacggcgtcgctgtgccgcatcgggcaggagacagtgcaggacatcgtgtaccgcaccatggagatcttccagctcctgaggaacatgcagctgccaaatggtgtcacttaccacactggaacatatcaagaccggttaacaaagctacaggataatcttcgccaactttcagttctcttcaggaagctgagattggtatatgacaaatgcaatgaaaactgtggtgggatggatcccattccagtcgagcaacttattccatatgtggaagaagatggctcaaagaatgatgatcgggctggcccacctcgttttgctagtgaagagaggcgagaaattgctgaagtaaataaaaaactcaaacagaagaatcaacagctgaaacaaattatggatcaattacgaaatctcatctgggatataaatgccatgttggcaatgaggaactaagctgatatttaaatttcctgctttacacatgttataccattgttttttccctcaagtattttttccctgtgaagaagattatttatctgcttttattttagtcactaaaactaaannnnnnnnnnnnnnnnnnnnnnnnnnnnnnnnnnnnnnnnnnnnnnnnntaatgctattttatgaaagattattgtaataaacttttgatggggtttgtattttggttaatcttcatgaattgaataatttgtttttttaaagcaaataagtttttta

SEQ ID NO: 229070 - DNA, 1000 bp, Homo Sapiens
cccagctggtttgacgagagcagagtcgttgggctgggtacacagcccacgtggtccccagattcatactgattttggagtccgagatgtccaattccaggtgcatgaggtggcgctcggttccctggttcagcttccggttggtggtgactgcagccaggaacggattcttggcatcaaaggggggcttctggttctcgtagctcttcagccggcccatctcccccatgtacaccttggccgcatctatgtcggtgtggaccacaagctcgtactggcgaatgctggactcctcgccagtggcttccaccccaaagtgttcacacacggccggccagaactgctctcgccaggtgatgaagtcctcctccaagttcccatcgtcgtcgcccaaccccagctcaaagatgcgctgggcgccgagctgctccagccgcttgtccacgtacttgcccatggcattgaagtgctcgtaggtcttgttcccaagaccaaacaccgcgaacttgaccccagagagatccacgtctgtctcctgcagccagtcgtagaagtcctgggcattgtcggtggggtctccctcaccgtaggtggccatgcagaaaaccaccagggcgttgtcgatctccggcaggctgctcaggtcggccaggtcatactcctcagggtccgctgacatgcctcgcatcccgtagcggtgggcgtccttggacaggcggttggcaaactcctctgcagtccccgtctgggagccgtagaacacgatgatgttcctccccgttttcttcatcttttccacaaagctgctctctctgacagaggaggtcaatgtctgaattttggtgaactcggggacttcttcttttttctttctgaagaggaaccagtaggttaggagacccacgatgagcgaaaacagaatcatgtccgtcatgctgaaaagagatacttcttcggccaccgcctcggacacggtggagctggggtccacgtgggccaa

SEQ ID NO: 229071 - DNA, 1580 bp, Homo Sapiens
catttcaaatcactcgagactcgacagtgaacacccgatgttgttttgccgcccggagggagctagggctggggctggtgctggtgcggtgcccggcggtattgctcagaggaagatgctacagtctagacgctgggcgggttccggctgcacccactccggcttggggcgcgttccaggggagggtgggggcctcagccacagccactcggcctcctcccctgaggggctctcaggtacctcaggtacctatgtcccaaggcagcactggagattgtaggtcagaggtcagtgaccttgttctccagtgcagcggcaatctgctgcaggcggaaggccagctgcatcttctgggcggcaggatcctcctccaaggcattgatgatctcgtcatagtacttctgcgtgtattggtagagctggtggagtgccacgagggtgttcaaggagtccgtgtgcgcccgggaaatctctgccaggtgtgtgttcatgtcctggtcgctgacctgcaccatctgccggatccccttgtagtaatcctccaccatcttcttgtaggtggagatctccttggcgtacagcagcttgttgctgggagaatcgcggctcagcttatgctccgtgcgcgtgcaggcatccatgaaggtctgcgcgatgactgacagcgaggcgtccaccacctcgtggacatgcacgtcaaagatgaagtgggggttcttgaggatgttcacccagaaccggagcggtaagctgttcgtcttccagatgtggatggtgtcttcatcctggatgttgtgcttctctgcctgctcgtccaggaagtcgaagaagtacttgactgcaggtggcaccgcgtgcccaggcgccagcacgctctggaagaagttgtccacaaactgctgcagtgtgcccttgactgagagcagccgcgtcaggtagatctcggtgatggccttcgtccgctccttctctttcacgctgcctctcttggacttgccctcgtccacctcgtcggtcggccgcaccaggtgccacacccggttctcctcctccaggagggcatggcgctccccaggcaggtcctgctggctgtcctccggctgctgggagacccccaccttggacaggatgagggtggctccatcccggacattgtagtgcataagggtgttgacgcgcttccaccggccctcccgctgtgacgtcaggtccaggtccgacaggatctgcgctgtggagcccggacgccactccaggaccacgctgtctggcctgggccagcaggagcagggctgcccacggtacacctggtcaatgatcttctccttgacctgggagatggtgtcacagttgaggaccttcaccgggatggcgtccactccctcgtcctgcacgatcacgctcaccgtcaggggtgcgtactccacatcatcccccagcagccccgtgtcgttgagagtgtacttggccttcttctgtaccgcatccaccgggcccttttccacctgatgtttgatggccttgaagagcttgtacaggggctccccggcactgtccttgaggtactggtacaggcccaa

SEQ ID NO: 229072 - DNA, 709 bp, Homo Sapiens
gtaggtcaattcataacagtttattttggacacaccctgaagcttttgttttgaattaagaaatgagtttcaggaattgacaaaccatttgttaaccagctgtcctgggctattgaagaagatttcattttccgcgcatccacttgttgcagtccaagtcctctagtgcaacgccatagcaaatataaagatttactatgcacgtgatacattttatggagtgcctcaagccaagatagtgaatttatatgaagggtgtgaaatgtatttctttactactatagtagtttagttataactttgcatctataattgagctttctcatctgtcaaatgctatggttttcttaaaatgttacaattctagatctatccaccttgtttttttattgtctacaaaccattaaatgtaaatattgtttttagagtcagtcattggctttgtcatttaccctttgagagttccacaagtggtagtagagtggtttaacgtctttcctctagtactaccagtattcataaatgtataccccttactgtaatttgttcctcttagaagtcagatcatctgatttatagaggattatgaaaaccagagtttttgaaaaggcttattttatacatacgtattatatagagaaacaaatgtttttattaaatgtttcattgaccccagtaatttaaaagtaatatgttacctatgtctttc

SEQ ID NO: 229073 - DNA, 933 bp, Homo Sapiens
  misc_feature (177)..(189): n is a, c, g, or t
gatggccccttctgatcccccagggctgacccagtcccagaccaggcatgaagagagaggtcagagccggtaagaaggacccccagagtccttccgtcagtgcagaggcaccagtcaccaagtgaacgtccagcttccgaacaagggggagcaagctccagctgcactcgtgatttnnnnnnnnnnnnnccccggatctctgggtatgctgccagctccggcttcttggctgccccctcccagcctgcagctcctgggccagagctgcagagcagggaacttcccaggagagtccaggagacaggaattacagacctcccaggccagaaggaagtggggacagagaccccaggacggggcccggggatggccattctgacctcgggcctgtcatttatccggcgggacccggtgggcaagtgggcgagtgtggtggcaagggtggggggcggaggcgaacacatgggcaccatcagtctgaggtacacaccggagactccactctgttcccagcgctcacttctggctcatttcttcgtgcatgtggttccgggacaggtacttgagggcctcatccagcaggatgacaggcagagatatctggagcaccaccacccactggcgcccgctcagtggggtcacctggaaaatgagaggcaggggcggcacgagcaggatgaggaagtgcagggccatggacatggccacagccaccagcagccaggggttcatccagggcggcatccgcagcagcgactggttctccgagacgctgttgagggcattgcacatttcaatggtcacgagcacggacaaggccatggtggtggggaagcgtgactcgaacacctcacagtcgatgccggcaaagagcgggttgtcttcggagcacttcaggaagttcctcagctggtagaagttgatgtgagccaa

SEQ ID NO: 229074 - DNA, 1241 bp, Homo Sapiens
ttggcgctttgactactggggcaactcccaccagatcatgcacctgctgagcgtgggctccatcctgcagctgcacgccggcgtcgtgcccgacctgctctgggctgcccaccacgcctgtccccgggactgagctgccatgccagcctgcccacagcagcctcctagagttagcaacaccaggtgttcctcccaactcgtctgcaaggggctggctccttggatgcttccagctcatgagatgtctcagcaggagccctgttcacccgttcttccctgtggactgacctcttccacccacgccgtggcgctccaacttccttccctgccttttccctccaagctcctattttactgtgtcagctggaaggaaacctttccctcttgggacctctttaccctctgtgacctgtggggttagaccagagagggactctggggtcacgtcttgctctgagagttcaagtcctgccaggccgccagcccagagcctcctcaccctatcctgttcctcccaccaggcctgtggccagtcttcctgatctccatctttctgccctgcataccagccctcccagcagccacaagcttgcccgccctggctccctctgcccagagactatggagtaaggcattcaggacaaaaggaccaagggggcgtggacccgtcttgtaccagctggccacaggcacaagggctgcagctgcttcttccaggaaactgacacagggagctcagcggcctcagatcctgggacccctgggccgtgcctgccctccaccttgagtgccatactcccaacagctccaggtacccaccgggggatgtgcctgctcaggaaacctctttgctccacacagcatggggcttcagctgctggcccaaggccaggagcgctgggttctgcagcagggctcagcctcaggggcgttaagaccctggatgacatcaataaagggacaggaagggccatgttgccacatgagcaagcttgggtgctcccaaggttcaaatactttttattagacacggccaggcaaagaaaaccatgggagttcccgaggggccccagctttcaagggcgacgggacagacccaggataaaaggttaacagtgcagaggcagagtctggggctcagggtgggtctagggtgtcctcaaacaggctgaggaggttccgaggctcaaaggaggggaaggagccccgaggaggctctgagttgatgtcacttaggtcca

SEQ ID NO: 229075 - DNA, 872 bp, Homo Sapiens
  misc_feature (460)..(505): n is a, c, g, or t
ttggtgaagaaaaaaatgacactccaatgggctgcagtggcaacctttctttatgccgaaataggactcattttaatcttctgcctaccttttattcctcctcagagatggcagaagattttttcatttaatgtctggggtaaaattgcaactttttggaacaaggctttccttaccattatcatcctattgattgttctatttctagatgctgtgagagaagtaaggaaatattcctcagttcataccattgagaagagctccaccagcagacctgatgcctatgaacacacacagatgaaactttttaggtctcaaagaaatctttacatttctggattttccctatttttttggctagttttgagacgtctggttacgcttattactcaactggcaaaagaactgtcaaacaaaggtgtacttaaaactcaagcagaaaatactaacaaggctgccnnnnnnnnnnnnnnnnnnnnnnnnnnnnnnnnnnnnnnnnnnnnnngccatggtaaagatgaagaatgtgttttggaagcagaaaataaaaaactagtagaagaccaggagaaactgaaaactgaattaaggaagacttcagatgccctttctaaggcacaaaatgatgtgatggaaatgaagatgcagtcagagagactttcgaaagaatatgatcaactcctgaaagaacactctgaacttcagcattccagttttggtgaatttttaagcaaaagaagccacaaaaatggcagcattggaaaacagactggttctagaaaagatcgtttagaaagacgcaacaagaaaagactgtgaactttataaaagacacttgcaatatactgtgtcaaaatgataattttgttatg

SEQ ID NO: 229076 - DNA, 1036 bp, Homo Sapiens
ttggaatatggcgaagacctacgattacctgttcaagctgctgctgatcggggactcgggggtggggaagacctgtgtcctgttccgcttctccgaggacgccttcaactccacttttatctccaccataggaattgactttaaaattaggaccatagagctcgatggcaagagaattaaactgcagatatgggacacagccggtcaggaacggtttcggacgatcacaacggcctactacaggggtgcaatgggcatcatgctggtctacgacatcaccaacgagaagtccttcgacaacatccggaactggattcgcaacattgaggagcacgcctctgcagacgtcgaaaagatgatactcgggaacaagtgtgatgtgaatgacaagagacaagtttccaaggaacggggagaaaagctggccctcgactatggaatcaagttcatggagaccagcgcgaaggccaacatcaatgtggaaaatgcatttttcactctcgccagagatatcaaagcaaaaatggacaaaaaattggaaggcaacagcccccaggggagcaaccagggagtcaaaatcacaccggaccagcagaagaggagcagctttttccgatgtgttcttctgtgaggaacaccgccttactctgagcctcgctcagcccagctgactgtgcctgttctgagtgagcccctcactcagccggggccctcccacctccaacgccccgcccacgccgcggccaccgggcccacggccaccagaatgcaattgagaaatcgtttattttagtaactgtctgatctttttcaactttggagatggaataagttaaaaatttgctatttttcctgtaacatctgctgaacgggcccacccacacgttgtatattcagagagagagagggagtcaaggtgtgaccgtcgaccacagccagtgtcaggcctctgcctctgggcctttgctttgtgggcctcactgcaacacaaagctccacccagggaggctggttcacgttcccctacccacgggaa

SEQ ID NO: 229077 - DNA, 1343 bp, Homo Sapiens
  misc_feature (200)..(210): n is a, c, g, or t
  misc_feature (893)..(906): n is a, c, g, or t
ccaactttgtacaaaaaagttggggatcatcttgcctgggctatgccactgtcttgttaccaattagacatctggaatttcataattagttttcattgtcactgtcaagatatattgcagattacttaaatatggccatcaaaacaaaagttacaacacgtatctcttttcatctgaaaactaatacctggaaaaggatnnnnnnnnnnnggaatccgtgacccacagagctagacagataagatgcatagttgaccagtcataaaaggcggtgtttaggtgatcaggatgccgttggtggcatttacgtgctttatatgatttttacctccgtaacaaacacaagaaataaacagaatggtccttaacagagtttgggggagagagcaagatgggttccttggagaagctgatttgccaagatgcacatcgctattaacagccagagtcataaatgaaatgaaattgaagaattcattcaaatgctcttttccctataacctcttttctcaccaaaaaggagataaatttgaaaacagataaatgtaacaaccagtcaaagaagcaggggaaaagtaagctcctccaaagttgcttgcagtgctggaaatagatctcatttttaggttttctcttcgttccagataccaaataaatgggacagagaataaaatttttgttaaaatatgtgctcatctcctaagtagctcttcagagtctgaccgtaagtaaaaacacacagaattgtgttgactgggggaggtgaatcacaaaaaagttacgaggagtttaagagttaaatattatttgatcgtggctgtcaaatttagtgaacaacatagattggatttggagttggtagtaggtatggttctcataccagaattctcttnnnnnnnnnnnnnnggacaattggaattgccttatttatttttaaaatcaatgcttactagttggtaggattcccaggtcaccagcagggttgattaaataatcttgacaatgagcagctgccatcttgggggatttcattctgtggttttttaaatgtttcgtctttgatgctaccatccagggcttcttattgtgaccttgtagcctattttgttcctgctgttctctaacatggtgcagttcacgcagactggtttaggtacttcacaaactcaccattgtctctctgaccccaagcctaatcccttttacatcaccatcttctcagacttcttgcctattcttaaaatatgttttggataatgattgaattaggacatcagcttaagcaattcctgtaacggtttaacgttgttgaagttcaggcacataataaaaattctccctga

SEQ ID NO: 229078 - DNA, 740 bp, Homo Sapiens
ttgggtcatggcggatggtcaggtggcggaactgctgctccggcggctggaggcgtctgatggcggcctggacagcgccgagttggcggctgagctgggcatggagcaccaggcggtggtgggcgccgtgaagagccttcaggcgctgggcgaggtcatcgaggctgaacttcggtccaccaagcactgggagcttactgcggagggcgaggagattgcccgggagggcagccatgaggcccgtgtgtttcgaagcattcccccagagggcctggcccagagcgagcttatgcgactgcccagtggcaaagtgggcttcagcaaggccatgtccaacaagtggattcgggtggacaagagtgcggctgacgggccccgggtgttccgagtggtggacagcatggaggatgaggtgcagcggcggctccagctggtccgggggggacaggctgagaagctgggggagaaggagaggagcgagctgaggaagaggaagctgttggctgaagtgactctgaagacctactgggtgagcaaaggcagtgcctttagtaccagcatctccaagcaagagacagagctgagcccagagatgatctccagtggctcttggcgggaccggcccttcaagccctacaacttcttggcccacggtgtcctccccgacagcggccacctttcacccgctgctcaaggtccgctcccagtttccgacagatcttcctggagatggggttcac

SEQ ID NO: 229079 - DNA, 931 bp, Homo Sapiens
gggtgccgtcgtcgctgacggtcacggacactttcttcagggtcttgttcccacagtgtgagcagaacactcggctcatgtcagacgttgtctgaaacagccatggcagcgcaagatgtagctccgggcctcacgaatcagcatgccgttcaccgccagcacgtgcagccccatctgcagcagaacattctgcatggcgaagtctgtggtcaggcagccaacccgcacgtcctcggggacgtcacactgctccagctcctgctggatctgcttgatgttactgggggttatccagccacccccgtcgtcatcgctgtcatcttttctgtcttcaaacccgttttcttcctcctcctcctcctcacttggaacgtcctcacctctgtcaatcagcagctcctgcagttcatgatcgatgttgggcaaagggtttctccagaacatgaaggaactaaattccaggctctcaggctcacaagctgagtgtcctttttctgtttcttgtgggggtttaggcttgtagggcagatggaaaccagaaatgtgcagaggtgtttctgggtgctgaatcgatgagctcaccttaaccttctgtggttcttgttttaggtgagacaccccaacaaactctgcttccaactggtatgtgagtgcaagcacttggatgtccgtggcagagaggctggggtagtctcctgttttctttgaaaactcagtcaccagccgcacgtattccggtaagggctccttgaaccgcagctcgtagggcaggacagcgagccgcctgcgtgtggccttgtcccgaatctcagtgaccacctcccggatggtgtaaatgttcttcccgatgtcctgcagagccgcatgccgcaggaaagccccagcatccgccacaacgtgctccactggagccatgttggctgcgtgccaa

SEQ ID NO: 229080 - DNA, 1122 bp, Homo Sapiens
ttttccagctcgtagagacgaacaggtcccggctcttggtcagccgaaccatgagccggcccacatagaagccactgatttggcccacaccgtcatttctccccatggacaggaggaacgtcagtgcacccggcttgtaggcctggagaggccgctgcttcacagagttgacgatgttggccacggcgatgttggcgtggaggccggcaagataggccatcttgggcgtcctcacgtcggcacagtcaccaatggcgtagacgttgctgtggccctccacctggaggtgctcgttcactctcagagcaccactgctggctagtctgctctcaaacgctttgcggtaggcggagctgttgatcttgatgccggtgcagagaatcaccaggttggtggccacctctgtgcctttgtccgtctgcactttgatgtactctcgatactcattgagaggcagctcctccagattgctcacccgctcactcagcagcagctgcacgcccttccggaggaggatctccttcacttcctgccggacggagggcaggagctccttgtcagccagggccacttgggagtgaatgagagtgacctctttctcaggatattctgttttaatctctgctgccatctccactccagccgagcctcctcccaccaccacgatgaaccgtgagcgctggacctgcctcaccatgtcctcataggcctggatagcggcctgctggctggaaacctcattaaacttgcccgggaagggcccagtgctgcccgtggccaggataagatgagagaagggcagggcctcgccaccctgcagcagcaccatctggttcttcaggtctatccccactactagcccctgccggaagttgtccttgaaagtcaccgagtaagaaatgaatgtctttttggcgaaccctgtctccacggaggctcggagagcagccacattgtggtggaaggagtccttcatgtccaccagcatgaaggggacgttcagggcctgcagctggctggctgctgcgatcccgccaaagcccccacccacaatcaccacgtgcagagctcccgattccaccgagacctgggaccccatctcaaatcaggcactgctgtcgg

SEQ ID NO: 229081 - DNA, 398 bp, Homo Sapiens
tgtacaaaaaagttgggtttgtaaatgcccttaaaaatatttcttttgactaaatgtggaaaagtaatgtgtgttatacattgagaagtttttactggctttgactggaggtggtttttgcagagatggtattttatatgattccagtatttggaaaagaattagtcaaaaggaattcacatagtttaaatactgagaaattaatatccaaatatgtacttgtctgatttctaaataagctgggggaggagggaggggtgggaattgaaatgtgcaaatgagtagtgaatgctacactcattttcaactctttaacatgaaactgttcaatcttaacacattgttactttaatatatgtataaagaagtattactgtttgtaaagctgctgtttgctt

SEQ ID NO: 229082 - DNA, 864 bp, Homo Sapiens
aggactgtgaggttgtacacacgtaacctccaaagccattgtgcagctgcttcagcctacctgaggggccatagcatgatgttacaattcttttcaagacagaaagtgtggtcctgactctctcagttgtcagtggttcactcttacacaatgatggcttcttagcttccaaacgagacatcttacttcaggtggtaactagtgaagaccgtttttattttgtaaaccacatttttctatttattgcattatcacgttttaacattaaaaattattctttaggaattaaagtatgaatatgcagcattgtggctataaaatcaaaaagttcaatgtttatgaagctaatcagcatagaatgatttaatgacaaattagtaattccaaatatttattttacttcactcttcaatactcttttgtttgctttgagactgaaattttacagactgctttgcagacctctgcaaaaagtatgttccaagatggacacctatgaaagatatcccagctacaagaagccagttctttctaatccaactggtatttttcatctcttctttcgatatgaagctcagattcaaagctgcttctttacctgaagattgcaagcctgctacttcccctggatttggctcttctgaagatttgaaagtcccagactatcttgctcaggaatgtcgtcgtttttaggtatttggaaaacagggctgcttttgattctgtaccaccccaaatgtatgagcccaactaaagggaccataacaaccaaaactttgtagtctctccacaagttccgaaggctcatagtacttcagcatcagtgtacctgggaggctgaaacaggagaatcgcttgaatcca

SEQ ID NO: 229083 - DNA, 1073 bp, Homo Sapiens
  misc_feature (910)..(929): n is a, c, g, or t
actttgtacaaaaaagttggagttttcattgtccatttactagattcaatcgtctctgagtatatagggctgatgttagcaagaccctaaaaatgtccattgaaccctgcttcaaaaaatgaaaacacacctctataaaatgtgtactgggaataagctttgtatttacatacattaggggaattttttaaaatctgtaatgtttggacaaacagatgatattactttgctaaaattataaatgtaacttttaataaagatagccagaatattctaaattagaaattacgtttttgtttccctcaagacataaaacaaatataaacattctaaactgctggatgaatctgaaaagacattaagttcaaattttaatttattctcatattaaatataactccattaaaagtttaaaatttcatgggagaaaatataataaggtaaagaggtagaatcactttcagacttaagaataatgttgatttcccaagtgctttaccttatctgttaaagcgtaagatgaattggtatttgcttcataggcagtttgactgcatgtattagagaatgaaaagaagatatttgtagtaatgcctggaaacttggtgctttaaattaaggtactcctctgctgctgtagaatggattccacacagtggatagctatgggtgattcagaatattatgtttagattcccatttgttaagtttataagttttgtggggaattatgaacttactgtgtactacctgcatttgtgctgtgtgaaaaataaatacaaggattcgtttagctaattcaacttactacaaagacaaatgtctgtttttatttgcctgctaggattgtcttttttaaaagtcatttttatttataggaatatgggtgtttctataggaagaaacaggnnnnnnnnnnnnnnnnnnnnaagataaatttgacaaagttaactgaaatttatctggtccattttattcatgctactaagatggggaatctttaaacacaagggtcagcaagctttggcccatggattggccacctgttacgtaaataaagttttctttgaaac

SEQ ID NO: 229084 - DNA, 789 bp, Homo Sapiens
ttggctagaagatagaggtgaggaaactgttttaggtggtggaaccagggaagcagagagcagagcatgcagtgatggaagaagcaggaaaagcaagaagaaaagacagcagcatcaagaggaggaggacatcttggatgtaagggatgagaaggatagcggggctagggaagcagagagcagagcacacactggctcaagcagcagaggtaagaggaagaggcagcagcatcccaagaaggaaagagctggagtcagcactgtccagaaagccaaaaagaaacagaagaagagagactaaaggtctggtaaaggtagggctcaattgattgattttcaggagttgaagcctcaaagaccagggttgatgcaggtctgcaggtcttctgcacccccctcaatgaggagtccctcccagaaaggaaactgatctctgggatgtcagctgctgagaggagcaagcggtagtaccaccccttagttgagggagtcagcacagtcctttctgcagcttctaacccaggaccatgaactcaggtgcctagagaagccaggcagctaaaggacaaggaatgctgggggctgtgggaacaggaatgcagataccctttgaaggagcattcctgctaaaagaagctgaaaatgtagacctatgtgaagtgctctgatttctaaatattgtgaaggttaagaaaaacataaatttaggtctatgggctagatttagcccacagttgccagtttctagcgctaccaaatgaatgaataaacatgagctttgcgctccta

SEQ ID NO: 229085 - DNA, 955 bp, Homo Sapiens
tttgtacaaaaaagttgggaaatggacgagaccggtcaggagtaggtttttgaagatggcggccctcaaggctctggtgtccggctgtgggcggcttctccgtgggctactagcgggcccggcagcgaccagctggtctcggcttccagctcgcgggttcagggaagtggtggagacccaagaagggaagacaactataattgaaggccgtatcacagcgactcccaaggagagtccaaatcctcctaacccctctggccagtgccccatctgccgttggaacctgaagcacaagtataactatgacgatgttctgctgcttagccagttcatccggcctcatggaggcatgctgccccgaaagatcacaggcctatgccaggaagaacaccgcaagatcgaggagtgtgtgaagatggcccaccgagcaggtctattaccaaatcacaggcctcggcttcctgaaggagttgttccgaagagcaaaccccaactcaaccggtacctgacgcgctgggctcctggctccgtcaagcccatctacaaaaaaggcccccgctggaacagggtgcgcatgcccgtggggtcaccccttctgagggacaatgtctgctactcaagaacaccttggaagctgtatcactgacagagagcagtgcttccagagttcctcctgcacctgtgctggggagtaggaggcccactcacaagcccttggccacaactatactcctgtcccaccccaccacgatggcctggtccctccaacatgcatggacagggggacagtgggactaactttcagtacccttggcctgcacagtagcaatgctgggagctagaggcaggcaagggcagttgggtcccttgccagctgctatggggcttaggccatgctcagtggctggggacaggagttttgccctacgcgttgtcataaaactgggttcatggg

SEQ ID NO: 229086 - DNA, 1392 bp, Homo Sapiens
gaggagtgacgggtcaaagaaggcaagctcagaggatgtcacagcttccgggctggcgacaaaggcagatgccaggtgcccagacgccaactcatctgccgacttctggacggcagctacagcctgtacacctcagatgccacgtcgtccttaatgacaatgttgctgatcttgcccagaagctgcgccagggaggtaagggtggtggtggctgtggccaggttctccactgaccgagcccagagcagccggtctagctcccaggtcattagcccttcactcgtaggccctgaaagcaggcattttggaggcagctggggctgagcaatcccaaagagcaaccgcaactgtgccaggaacacctccatcactcgcaccatgtccacctcgactctcactggcagcactgaggcattataggttttggagtcaacattatataccataatgccaccccagcggggactatggaaggcattggtggccactggagcgccatccttgtcctgaatgtacagcggtgagtgtgcaagctcaggcacgtagagtagaaagttgagcacagggtacaaggaggcagcactggatcccagccgggactccactgggttgatgacatgggggaggctgtgcatgtccaaatagtagctggaggaagctgagtcaaagcggggattcacccccaacattgcatagtaaagaatctgagagtccacagagaagttgccagcggcaccgagggcattcaggaaaggttgcacatagcgccggacagccccctcaatgtcccagtagacatcatgggacttggggtctgggttgagtaaactgaaggtgatctcatagcccaagctggacttgagaggccgcctcttctcagcgctccacttgtcctctggaaggtggtcagccagagcagcagcaagcacatcctcagtcaaagacatggcctgggccacctggactatgcggcggccaatgatgttaaaggcctcccggtgcattatcccccgcaccactgctgtcctcttgggcccaatgtagctcatcatgtcctggggaagaagtgaggagtgttcagatatcacgtacacagtcagggagccctccgcttgttcctgaggctcatctaacatggcttctgccttgcacactgcccgatgacagggcctcctcctcatggtccaaagccctccgataggccttctggaaacggcatttgattttcattttgtatttcagaggaatctctctttcatgcacaacggtgaagggcagcttctcctggtcgtccaggggcactgactcccgcgtaaacacgacagtgacaggcaccatgaggcggagctgaagggcattcaggccactgatctgggagtaaggcaacgccaa

SEQ ID NO: 229087 - DNA, 881 bp, Homo Sapiens
ttggcaactgcgtgactgtgcccaactcagggcaggaggatgtggaccgcgatggcatcggagacgcctgcgatccggatgccgacggggacggggtccccaatgaaaaggacaactgcccgctggtgcggaacccagaccagcgcaacacggacgaggacaagtggggcgatgcgtgcgacaactgccggtcccagaagaacgacgaccaaaaggacacagaccaggacggccggggcgatgcgtgcgacgacgacatcgacggcgaccggatccgcaaccaggccgacaactgccctagggtacccaactcagaccagaaggacagtgatggcgatggtataggggatgcctgtgacaactgtccccagaagagcaacccggatcaggcggatgtggaccacgactttgtgggagatgcttgtgacagcgatcaagaccaggatggagacggacatcaggactctcgggacaactgtcccacggtgcctaacagtgcccaggaggactcagaccacgatggccagggtgatgcctgcgacgacgacgacgacaatgacggagtccctgacagtcgggacaactgccgcctggtgcctaaccccggccaggaggacgcggacagggacggcgtgggcgacgtgtgccaggacgactttgatgcagacaaggtggtagacaagatcgacgtgtgtccggagaacgctgaagtcacgctcaccgacttcaaggccttccagacagtcgtgctggacccggagggtgacgcgcagattgaccccaactgggtggtgctcaaccagggaagggagatcgtgcagatatgaacagcgaacccaggcctggctgtgggttacactgccttcaatggcgtggacttc

SEQ ID NO: 229088 - DNA, 817 bp, Homo Sapiens
ttggatctgttgcttcccattttgctcttgtcactgcatatgaagacatcaaaaaacgacttaaggattcagagaaagagaactctttgttaaagaagagaataagatttttggaagaaaagctaatagctcgatttgaagaagaaacaagttccgtgggacgagaacaagtaaataaggcctatcatgcatatcgagaggtttgcattgatagagataatttgaagagcaaactggacaaaatgaataaagacaactctgaatctttgaaagtattgaatgagcagctacaatctaaagaagtagaactcctccagctgaggacagaggtggaaactcagcaggtgatgaggaatttaaatccaccttcatcaaactgggaggtggaaaagttgagctgtgacctgaagatccatggtttggaacaagagctggaactgatgaggaaagaatgtagcgatctcaaaatagaactacagaaagccaaacaaacggatccatatcaggaagacaatctgaagagcagagatctccaaaaactaagcatttcaagacagagtatctgtagcacagcctggagtgcagtggcgcaatcatgggatagcatgaattttgaggactgttccctcttcgcataagaatagaagtagccatcagagttcatatactttttcaaccctttttcctcaaatacgtatcatttttacttaagtaacttcaattctgtgttttaagctatctaataattgttgtttctactatgttaagatagcctctctacattgttaccctccatccaataaaaaatactgatctg

SEQ ID NO: 229089 - DNA, 1303 bp, Homo Sapiens
catagaaagcattttattatcagaaacagtatggttttcttatgtttaagatctattttattatgttatttttacaagtagcaaagtccctccgtttttttccccaggtgaatgtacatgaatataaaaagtggctgatgtccacactgctcggcccacccgcatcagggtcggcaggaagttgcggctgatgagcagctcccggagcggtggggcggggcctcctcttctccagttccagtacgctcatcagtcgtcctcctgctgatttctcttcagcttaaggaagtctattagcttgtgagcgtcctccccagtagagaggtctacaaagtccttgggtagccggtaactcaaataggggctgggctggactgtcacttcactgtttgtgcaacggaaagctggggaatcctgctcttgagcgtcaacttcactaaaatcgccgtttaagttgttctcagatatcagttcttcccaggtgaacagcagtgaatctgtgacttcaccaaatggattaaagtcaatgagccacaccttccccctactgtctctgtatatatcgaacacaaagtcttcatctaagaatttgtactgtatgtgtttcttgaaaaagtcttgtatgcatctgcgaatttcttccttttgtttagaaatatgatcatagtattgtgtgtagtctctttgagaaataccaataagcttgttttccttgacaaaacatcgaaactcagccccaggaatcaattcacaccattttcggagaacgagctcatattctatacatggatctggagaatcatcagtacaatgaataaacggctgagtgaagtcacgagtgatgaaatcggaactcttgaaaagcagaaagatgtcgctgagggttttacatttcagagaactattcattgctatccaatacgcatcccttggggcactccaattaagcttaggaaagacactgcccccgagggaattgatagcttcctggactttagtggcaaactcaggaaattctggtgccgtaagcgtggctgtgttctcatcatcagaccactgtatttcttctgcttcatcatcactgtctggctgagaatgtgttggtggatcatcccttcctgaaaccaccagagttccatcatcgagtaaataatccttcacattctgaggaagtggaagaatgacactcttgatggtaacgcctcggaagaacgggtaccacgcggagaactggcagtgaagcacatgctccttcttcatcctccagctgccgccgctgctgcctttccctctcctgccccaa

SEQ ID NO: 229090 - DNA, 558 bp, Homo Sapiens
tacaaaaaagttggcttagtgattgcctgttaacaagtcgctctcccgtgtttcccgggctgggtatttgcctcgcaccatggcgcccaagggcaaagtgggcacgagagggaagaagcagatatttgaagagaacagagagactctgaagttctacctgcggatcatactgggggccaatgccatttactgccttgtgacgttggtcttcttttactcatctgcctcattttgggcctggttggccctgggctttagtctggcagtgtatggggccagctaccactctatgagctcgatggcacgagcagcgttctctgaggatggggccctgatggatggtggcatggacctcaacatggagcagggcatggcagagcaccttaaggatgtgatcctactgacagccatcgtgcaggtgctcagctgcttctctctctatgtctggtccttctggcttctggctccaggccgggccctttacctcctgtgggtgaatgtgctgggcccctggttcactgcagacagtggcaccccagcaccagagcacaatgagaa

SEQ ID NO: 229091 - DNA, 1239 bp, Homo Sapiens
ttggctggtgtgctgcagggaactgtttcagtctgcaacgggaacatgatattgcaattaaattcttccagagagctatccaagttgatccaaattacgcttatgcctatactctattagggcatgagtttgtcttaactgaagaattggacaaagcattagcttgttttcgaaatgctatcagagtcaatcctagacattataatgcatggtatggtttaggaatgatttattacaagcaagaaaaattcagccttgcagaaatgcatttccaaaaagcgcttgatatcaaccctcaaagttcagttttactttgccacattggagtagttcaacatgcactgaaaaaatcagagaaggctttggataccctaaacaaagccattgtcattgatcccaagaaccctctatgcaaatttcacagagcctcagttttatttgcaaatgaaaaatataagtctgctttacaagaacttgaagaattgaaacaaattgttcccaaagaatccctcgtttacttcttaataggaaaggtttacaagaagttaggtcaaacgcacctcgccctgatgaatttctcttgggctatggatttagatcctaaaggagccaataaccagattaaagaggcaattgataagcgttatcttccagatgatgaggagccaataacccaagaagaacagatcatgggaacagatgaatcccaggagagcagcatgacagatgcggatgacacacaacttcatgcagctgaaagtgatgaattttaacttctggaaatcagacttttacaactggatgtgtgactagtgctgacgtgtttcttgtccctctgtatactgagtctttactcttgagctggcggtgtcatcgtccgtcacttataccatgagtgtgccactttcattggaccctgactgtatacagaatgaaaggcagtgcaatatttagctgctaacaagactggctcttttaccagtatgaatgacaatttatggggggtagggtggggaactttcttttctgtttttctttaatctccctttgttggaaagtatcatgaaaggaagagttatgctttatcttgaaggaaccattagatatggaaaatagtgatgaaccagagtttcttggttgctttttcaaaaatttgtttttatttggttctgttcctgataaacagagtaactgaccttcatttctaggttcttcaagaatggttgtttgcaagtgcca

SEQ ID NO: 229092 - DNA, 976 bp, Homo Sapiens
ttggcgcgctgctgccccctccggcagcacctgctgggcacctcacccgagcgcgtcgtgcagcacctgtgccagcgcagggtggagccccctgagctgcccgctgatctgcagcactggatctcctacaacgaggccagcagccagctgctccgcatggagagtgggctcagtgatgtcaccaaggaccagtgaccgccaccttcacaccgtctgccctggccaccatcctgggcctgggggctgcccacagatgggcagtctcagccatactctgttccagctggagtagcctcctgaccagcctggcccaccctgctccacccactgggcccccccagttattgatacccctctgtgctgggctccacgctaggcagaaggaggagtggcattggcatcctgacccagctctgccctcaaggtggggatggatgggcaaaggagagtcctgcctggccctacgatgaggccactcatgtgggcctaggtaggggaggatggtgcctggagcagagggacccacaagtgcctcccgagcctagatcctggctcggaccactgcaagggccgaggcagggccagaccagagcatcctgggtacaggcctgggctctccagggcctgggcctgattcaggtgcagtgggcactcctgaagggtcagagcggcatctgccaagcagcccctctggcttccgctgaggtggttgcaggcctggggcagagcctgggtggtcagaggccggggctagaggcagatggaagggaggcatttgctgacagaggacggggcacccgggctccccactgcagtcggccttgcctcctcctcctcctctacctccagtcaggctggacgggagggtagccttgtggctgagaggggtcagactaggtggcacaggggctcctggaaagacagcaagcttcctgctgggcgttcccttgttggagggaatagagtgggggtggga

SEQ ID NO: 229093 - DNA, 336 bp, Homo Sapiens
gagcatacaatagacattacctgctgtggtgtcttgatttcaagcccagtgcagatgcatctgacttacgaaacttcagtgacacctgctctgtgccagacactgaagatggagcagtgaacaacactgacccagcctgtcctcctgttgcctgcaagccagaagcaaggtctcgctgtgttaccctggctggagtgcagtggctacttacaggcatgatcatagcatactgcagcctcgaactcctggactaaaagcagttctcctgcctcaccctccagagcagctgggactgcagacacgcaccacagagcccagcctgagtcattttgattc

SEQ ID NO: 229094 - DNA, 1085 bp, Homo Sapiens
atgagcaatgctttttccctaatcgccaactttgtacaaaaaagttggcttctcaagagcctgattgggaagaaggagatgcgcatcctgatggtgggcctggatgccgcaggaaagaccaccatcctatacaagctgaaactgggggagatcgtcaccaccatccctaccattgggttcaatgtggagacagtggagtataagaacatcagctttacagtgtgggatgtgggtggccaggacaagattcgacccctctggagacactacttccagaacacccaagggttgatatttgggtcgacagcaatgatcgggagcgagtaaatgaggcccgggaagagctgatgagaatgctggcggaggacgagctccgggatgctgtactccttgtctttgcaaacaaacaggatctgcctaatgctatgaacgctgctgagatcacagacaagctgggcctgcattcccttcgtcaccgtaactggtacattcaggccacctgtgccaccagcggggacgggctgtacgaaggcctggactggctggccaatcagctcaaaaacaagaagtgaaagccagacagccctaacaaagcaccccacccacccctgacatacctactgtcaccctgccccagtcctaccccttcctctccatgcaagtgtggccagggccctgggtatcatgtccacatgcccagcaagagccttgcctcccctgcctcccctcctttttcctgtccacctatatgaccaatccctaattgctgtcctgatgatgagtcattccaatttactggatttaaaacaaaaagttgttacggtttcatggggtggcccctctctctctcaccctctgggtttcgggaggtcgagtggggtattctctttgtttggcagtggttgctgtcctcttggcatctgagtcctttccctatccccacaagcccttctactccctgtttgcctttcctttgccaccctctccctgttttacatggaaattgcacgggcctctctgtgtttgcgtgcatgtgtgcgcctgtatatacatgtatagagagatatatttgtgggggccggggg

SEQ ID NO: 229095 - DNA, 222 bp, Homo Sapiens
aaaaagttgggaaatgtgacacctttcaagacaggaagaatgattttctttgtacttaagttttctaaggacattgttttaatctgtatcgtgccaaagttgtatcactgttaaacttctgaagacataaccagttgagtcttatttcaagatatgttctcaagccaattgtgtgcttctcttgtttctgtgattgctttctagccaaagcgaagcttgtac

SEQ ID NO: 229096 - DNA, 619 bp, Homo Sapiens
ttggcccaagcttaactgggcaggagctgaggtgttttcaggcctgagctccctgcaggagctggacctttcgggcaccaacctggtgcccctgcctgaggcgctgctcctccacctcccggcactgcagagcgtcagcgtgggccaggatgtgcggtgccggcgcctggtgcgggagggcacctacccccggaggcctggctccagccccaaggtggccctgcactgcgtagacacccgggaatctgctgccaggggccccaccatcttgtgacaaatggtgtggcccagggccacataacagactgctgtcctgggctgcctcaggtcccgagtaacttatgttcaatgtgccaacaccagtggggagcccgcaggcctatgtggcagcgtcaccacaggagttgtgggcctaggagaggctttggacctgggagccacacctaggagcaaagtctcacccctttgtctacgttgcttccccaaaccatgagcagagggacttcgatgccaaaccagactcgggtcccctcctgcttcccttccccacttatcccccaagtgccttccctcatgcctgggccggcctgactcgcaaatgggcagagggtgggtggga

SEQ ID NO: 229097 - DNA, 945 bp, Homo Sapiens
ctttgtacaaaaaagttggattgtatcattcaatctttagctaatccagaaaaggaaagaatgaaacatgatgacacaaccatctcaagctggcttcagagtctggctagtttctgtggtgcagtttttcgtaaatatccaattgatcttgctggtcttcttcagtatgttgccaatcagctaaaggcgggcaaaagttttgacctgcttatattgaaagaagtggtacaaaaaatggcaggaatagaaattacagaggaaatgacaatggagcaactagaggctatgactggtggagagcagctaaaagctgagggtggttattttggtcagatcagaaacactaaaaaatcctctcagagattaaaggatgctctattggaccatgatcttgcccttcctctctgtctgcttatggctcagcagagaaatggggtaatctttcaggaaggtggagagaaacatttgaaacttgtgggaaagctctatgaccagtgtcatgataccctggtgcagtttggtgggtttttagcatctaatctgagcacagaagattatataaagcgagtgccttcaattgatgtactctgtaatgaatttcatacaccccatgatgcagcatttttcctgtctaggccaatgtatgcccatcatatttcgtcaaagtatgatgaacttaaaaaatcagaaaagggaagtaaacagcaacataaagttcataagtacattacatcatgtgagatggtgatggcgcctgtccatgaagcagtggtctccttacatgtttccaaagtctgggatgacatcagccctcaattctatgctacattttggtttttgacaatgtatgaccttgcagttccacaccccagctatgaacgagaagtcaataaacttaaagtccagatgaaagcaattgatgacaatcaggaaatgcccccaaat

SEQ ID NO: 229098 - DNA, 842 bp, Homo Sapiens
ttggaatttaattaaaatcagtcttacatgaagtatgttccaatccatgtgggaacttgactctctcatctgtctaaagagtactggacgatataaaaatatatattttttaaacaatgtgatctcaaatttaaagactgctccagatagcctgcatttgcaatggaataactgacaaatcacaagtggtttagttgggcagggctttgatcattcaaaagtaactaaagtagctccagaatgccaagtattcgtgtaaattacggttacatgttatcatttgctgttcttacataagcactcatgaaaatatggtattctgtaacttgaattccatccattttccagacgtctactcatgtctgaggtaaatctagaaattgtcttagttttaggattgaaacagtctataaactgtatttttggtccatccaggaagctagtcccttgtttctcctttctacatgacattgcagtggtggtttctgtaattaaaatttgtttgcctcatgtccctttgtctgataaaccttcactctaccgattcagttgtgagcattctttttttccttctcaaaacctactatgatttgttttactgaacaaaggttatcaaccacacatccagtcctgacatggagcttttcagtgtttggagacatttctcaatcccctgctgtggtaggaactccagtggtgaacggcttgcgcgcctgcagccagagttgcagggaaagctcgtacttactgcgagcagcatgtaatcttttttcttcctggacataaagatagcttgagtaaactgttctatttcattctcttcactctttttactgtcttgc

SEQ ID NO: 229099 - DNA, 1041 bp, Homo Sapiens
ttggcgcaagggcgctttagccaagaagccctacaaccccatcataggcgagacatttcactgctcctgggaagttcccaaggacagggtcaagcctaagaggactgcttcccgctctcctgccagctgtcatgaacacccaatggccgatgacccttccaaaagctacaaactaaggtttgtggctgagcaagtgtcccatcacccacccatctcctgcttctactgtgagtgcgaggagaagagactgtgcgtcaacactcatgtatggaccaaaagcaagttcatgggcatgtccgtgggggtctctatgataggggaaggtgtgttgaggctcctggaacacggggaggagtacgtattcaccctgcctagtgcctacgcccggtccattctcaccatcccgtgggtggagctcggaggaaaagtcagcatcaactgtgccaagactgggtactcagcgacagtgatattccacacgaagcctttctatggagggaaagtccacagggttaccgcagaagtgaagcacaacccaaccaacaccattgtttgtaaagcccatggggaatggaatggtactttagagttcacctacaacaatggagaaaccaaagtcatcgacacaaccacactgccagtgtatcccaagaagatcagacctcttgagaagcagggacccatggagtccaggaacctctggcgggaggtgacccgatacctgcggctgggggacattgacgcagccaccgagcagaagcggcacctggaggagaagcaacgggtggaggaacggaagcgcgagaacctccgcacaccatggaagcccaaatattttatccaggagggcgatggctgggtatacttcaatcccctctggaaagcacactgatggggtggaggtgcagagctttccagtatagccctgtttttgtaggaatattaaagtagtagagtatcacggttttgttggcattcactgagaccttgtattagcatccgagaaatgatgagagagagagaaattatatactatgaaaa

SEQ ID NO: 229100 - DNA, 1101 bp, Homo Sapiens
ttggctcaacatcttccttatggtaggcaggaaataatattggaaataacattttaaagtaaaaattttaaagtttaaagaagagttttgccacttaaacaggggagctttgtctggaaaatacactgagttgaaacacttcatccttggaaggattatataagatgaacagttgtgataaatgtgtagattagagggatgtgaatgggcagttagtccagtgccctcatttaagaggccaagatcctgattcagaggaggcatcctttgcccagagctgcttagctaatctgaccaaatgttgggaaaaatgtctcacctaacccactattccttaattatggattttgtgaaaaacaatagaacatgttaatgagtaatttatattagttcgatgtattacaattttttagctttaaattacagttttcttataatgttgaaatgttttagaatcctttgaatctaagtatttgtttcctaaatgaaacatttgtacaacatttgatgtttttacttatgaaatattctcctcccccaagaaaatttaaactttttctctctatttaaaagctaagaaatgttttaaaggaaaaatgaaattatcttcctttagcttatttttaaggtaaaacagctttttactctgttattgtggtaatggacagaatattacatacaaaaatattctgggagagctttttcctagttggttttaaatcattgtgccacctgaaaggtttttagattttataggagctaatttgtccaccagcattaatgtaacacagtgtattatgaaaatatattgaaggacaggaagtggacaccaaagtgatttttgtaacctgagcagttaatgaatgtgccaacattttctaggaagggacagcaagaatattctgctctgtagttaaaatactggctggcttttgatgtcttcatgcttaattgtgatcactttcttgcactgtgatgtttttacgtgaatatgttgaagtagaagtctaccatattaatttataaaatgttttctgtatggcaataaactgaaaacatggatcaacccttcttttgaaaataaactgaatcaatttagcc

SEQ ID NO: 229101 - DNA, 728 bp, Homo Sapiens
ttgggagactgaggccccctggtgcctatcaaggaccagagtgaaggggactacatctcccagcccttcaccttttaaatatgagtggttttaaaaggaaaaaaatgaaaccaggcaacagcaacaatattctgtttttaaaatagggacaagactgttgtcactttttagacatgtatcccattccttttggctctgcaatatttggggctgtagctccttccaagcccatggtagtccctccccgagtctctcccagtagaatgcagcctcccttccctggccccttccctctcagtgacggtgactccctggggccttctcgtggaacccagaggggctgaggactgtggcctggctggcgggccagcgtggtgctcctcaggactgcagcactgagatggaacctggcctcagtttaggaacaggggccacaacagggcaggaacccaccaccctccacataggaatacaaccagtggggccacatcatgtgaggcatcagacccacactgtcagcccagcaggccgggctgtgtccttcagacccagtgctgccctagactctgactcgggactccagcttgccacgtgccctctcccctcttgaatgtactctggtcttgcagtgtgctgctgggactttcttgctcagccatcactctggtcaccatgtttgctctgggtctggctgaattttctgccctgagatctgggcataaagtgga

SEQ ID NO: 229102 - DNA, 969 bp, Homo Sapiens
atcttgcttctattttggggctccactggacaaacgtaggaatccgtgagaattatcaataatctcataaattgtttgagatttgatggagttaagcttctccatggccgcggcacctccattgtttttaatccactccagaaccaagcccatgacgtagatgctgaaacatggaggcgtgttgtacaaggagctgtttccagcgtgcaccttgtattccaggaccgaggggcactctcggagggcaaaccccagcaggtcatcacggacaatcaccacggtgaccccagcagagccaacattcttctgggcaccagcaaaaatcacaccaaacttggaaacatccactggcttggacaggaagtttgaggacatgtcacaaaccagtactgctcccttgacatcgggtataaagtcaaactccacaccatgcaccgtctcatttgcgcaataatacacgtaggaggcatctgggttgaggttccaggtgcttggatctggaatttttgtataactcccaagtttagggtgaacgatatttatagtcccaaacttcttggcttcttctgcggccttagctgaccaagctcctgtcaccacatagtcagcacaccttcctgctttcaagccaatgaggtttaaggggacagcactgaactggccgcacccacctccttgcagaaaaatcaccttatagttgtctggaacagctagcaattcccgcacaagattctctgtattgttaataatcttggcaaaatctgatgacctgtgactcatttcaagaacactaatgccaactcctttgtagtctaataattccttttgtatctctaacaacactgagtgcggcagcttggcgggaccaggcccaaagttgccacctgcctgggggcgtccatggtgcggcggccagggcggtgagtcagccaaggaggaccgaacgcgtgaacggctggcgttccccaa

SEQ ID NO: 229103 - DNA, 361 bp, Homo Sapiens
actttgtacaaaaaagttgggctgcggccgcggctgaggctccagtgccgagcgcaagaaccctgcgcagcccagagcagctgctggaggggaatcgaggcgcggctccggggattcggctcgggccgctggctctgctctgcggggagggagcgggcccgcccgcggggcccgagccctccggatccgccccctccccggtcccgccccctcggagactcctctggctgctctgggggttcgccggggccggggacccgcggtccgggcgccatgcgggcatcgctgctgctgtcggagctgcggcccgcagggcccgtggccgtgggcatctccctgggcttcaccctgagcctgctca

SEQ ID NO: 229104 - DNA, 1090 bp, Homo Sapiens
tttttgatggctttctctttggtaaactttcttttccaaggccatcacaatcaggtgtgcaatccgtagggcagcctctccagctccttggaatagtattgtttgatcagacagtttgttcttgttattcgaagagctgcaaggagacctgcaactgcaacagatgctgttccttgaatatcatcattgaatgtgcaatactggtttcgatacttgttcaggagacgaaatgcattcacattggcaaaatcttcaaactgaataaggcaattcatgccatacttggaagaaactgcctccatgaattcgtccaaaaaatcatcatattcagaacctcttactctttctctgccgtagtccaatgtagagtggatctttaagtaactcctcattttcggttcccacatccagaatgacaggcagacattcttgaggattcatccctccgcaagctgtatatagagccaatttacccacagggatgcccattccattacagccaaggtctcccaagccaagaatacgctctccatcagtcaccacaatggccttgatgacatcttctggccatgcattgagaactgaagcaatatgccctcgatcgtggatagtaataaagagacctcttggcttccgaaacaccaaactatattgttggcaagccagacccacagtgggagtataaacaataggcatgaatttctcaatgtcagatgtcagcactctataaaagagtttttcatttctatcttggagatccattaagagaagatacctgtcaaagtcagagttcagatgctcgaaattttttactactctaagaacctggatctcccgcgttgaaggaaggtggcaacaatccatgaatgttcaattgctgtctctcttccagggtaaaggccaagtccttgttgaggtgagggttccgtgtcagcaggtagccgcgctgatgggtgtggcggcgacggggggcttcgggctccatggctggcgccgggttcggcggcggggtcaggccggggcgggccgcacgcgcggtgcaggcggcggatgctgctggggtgacggtgccaacttttttgtacaaagt

SEQ ID NO: 229105 - DNA, 904 bp, Homo Sapiens
  misc_feature (620)..(645): n is a, c, g, or t
ctttgtacaaaaaagttgggacctcgtcttctttgtagcaaaaatgggacaagatggccatgacagaggagcaaaagttattgctacaggatttgctgatcttggttttgatgtggacatatcgccctcttttccagactcctcgtgaagtggcccagcaggctgtggatgcggatgtgcatgctgtgggcgtaagcaccctcgctgctggtcataaaaccctagttcctgaactcatcaaagaacttaactcccttggacggccagatattcttgtcatgtgtggaggggtgataccacctcaggattatgaatttctgtttgaagttggtgtttccaatgtatttggtcctgggactcgaattccaaaggctgccgttcaggtgcttgatgatattgagaagtgtttggaaaagaagcagcaatctgtataatatcctctttttgttttagcttttgtctaaaatattattttagttatgatcaaagaagagagtaaagctatgtcttcaatttaatttcaatacctgatttgtactttccttgaaagctttactttaaaataccttacttataggcctggtgtcatgctataagtatgtacatacagtttcacttcnnnnnnnnnnnnnnnnnnnnnnnnnnctctctatactctctataacaatactttatcaagaactctggacaatggtattatttttaaaaatcatggtgatgtatttattagaatgtttcttataaatctgtttactttttatattaagaattaaactgtacctaaaaaaactctgactattcccatttgtcagtttagcattacattgtcttgagcaccagaaaataaaatccatatattaataaaaacctatcttgaaaactagtgggagtgtaatttacgtgg

SEQ ID NO: 229106 - DNA, 960 bp, Homo Sapiens
tttgtacaaaaaagttggatgatgatccctccgtaactgagggcattaatgtgatgaatgaactgatcatcccctgcattcaccttatcattaataatgacatttccaaggatgatctggatgccattgaggtcatgagaaaccattggtgctcttaccttgggcaagatattgcagaaaatctgcagctgtgcctaggggagtttctacccagacttctagatccttctgcagaaatcatcgtcttgaaagagcctccaactattcgacccaattctccctatgacctatgtagccgatttgcagctgtcatggagtcaattcagggagtttcaactgtgacagtgaaataagctcccacatgttcaaggcccattctggttcctggctgcctgcctcttgcacagaagttcgttgtcatagtgctcaccttgggaaaaggattaggtgggcacataagattccgatcagaccccaaccatgctgcatgtgtaaagaaggattgaaaataaaattgcactttttaggtacaaaatcataaaagctgtttcactagaaaaggcagaaagcagtgtattaaggtgttgaattacgccagaagacctgaaatgccttgtacctacaacaatgcttaggcttttctaagcctcttgccacttttaaaattatccttcaggcataaatatttttgacagcagaatagaagaatgattcatgagaacctgaaccagatgaacagctactagttattttatcaaatacagatgacatttaaaaattcttaactacaagagattagaaatataaaccttgcctggctcttgccaggagataaacaaaatgggttgctgatgaactgcacccttttacatgtgggtagaatataagctcacatggcagtgagatgttgaaaaagtcaaaagagacctgtctctctcttttcttttctatctttaaacc

SEQ ID NO: 229107 - DNA, 636 bp, Homo Sapiens
gaggttggtgtccatcggggcactgggggtatagctgggggcgtagcggccctgctgccgagagctgctgtacacggagaaagtcctcttgctggagtcgatgctctgggccttgcgaacaccctcttcgtacaggagccccacctgcacgtcgatggcggtggtatcctccaccaccagcttcatgacggcccgcacattccggggctccagagtgctgagccagtcgcgagtctccacgctcttgcgcagcatctgtgatatgaccaggccctgcaccttcacgtagtgggtcagcagccgccgcgccgtttccctggcctctgcacacagcgtgctcacgggcgtcactgggaactgatcctgcaccagaaactgttcatcagtgagagtgaggatgtaggagatggtggccgtctcgtagtccaggcagaggcgggagagcagcaggagcagggcaggtggtgtggcaccccccttctccccagggctgtcgcagaagctatgagccgtctggcacatagagtggacgaagcccacgatgaggccctcacggacaccctgactgcagaactcaccccggaagtagggcttgttggagaaggacacctctttggcggtgccaacttttttgta

SEQ ID NO: 229108 - DNA, 918 bp, Homo Sapiens
tttggacacagagctatgccactctccctcttcccttctggtgagggagaggaggattttgggtggcccaaacagctaccctgtcctgccccatcctgtcctcggcccaatcagaacggcttcgatgtctgcttgaagatgaagcctcgataggcgagtgtcttcatgatgttggcaatgttcttgcagtcgtcaatgccgctgtggggccggcctatgtgttgcaggctgaggcccttgttcatgtctagaagtccattcttgggccagcagcccatggcgaagctgtaagcctttttcagattaatccactgcttgaagtaatccgccactggcaagcccaagtactggcactggcctgggagcatgacttttaagtcccagtctccacaggtgacaaaaattgacttgacgtttggatctaagaggccttccttcgccatccattcatcgaccctctccagcacttgctgcaggcttggctgaccatccaccatggcttgaataatcccggtgagctctgtacagaatggggtaagctgtggatggactacaggctggacatacatgtgaaaggtagactcaatctccatggtccggccatttagctttaggatggggaactcgatgatttcctgaggatgaatctgtggcttgtcgcacgtggcctcaaagtccagcactaaaaagtagtgatacctctggggagggaaggacaccattgccgccatggatgcgccaaagccgtgggccgccagctttctggtggatatggagcagaactccggaacaccacagggagaaaataagtgggagcccagcacttttcttgctcttgaaagtaaatacgaagaaaatcgagctgctccagtctgtaaaggtgctagcattgaacatccagaagcatctaaaacccaa

SEQ ID NO: 229109 - DNA, 793 bp, Homo Sapiens
ttggcagtcgggtggcgagaagcagagaatcggcatggcccgcatgttctaccacaggcccaagtacgccctcctggatgaatgcaccagcgccgtgagcatcgacgtggaaggcaagatcttccaggcggccaaggacgcgggcattgccctgctctccatcacccaccggccctccctgtggaaataccacacacacttgctacagttcgatggggagggcggctggaagttcgagaagctggactcagctgcccgcctgagcctgacggaggagaagcagcggctggagcagcagctggcgggcattcccaagatgcagcggcgcctccaggagctctgccagatcctgggcgaggccgtggccccagcgcatgtgccggcacctagcccgcaaggccctggtggcctccagggtgcctccacctgacacaaccgtccccggcccctgccccgcccccaagctcggatcacatgaaggagacagcagcacccacccatgcacgcaccccgcccctgcatgcctggcccctcctcctagaaaacccttcccgccctcgggaaagtagatgtggagggtggcgccctgcgtaaccctcgccctgtccctcccactccctgggggcgctgttccacagtgactgggccctgtccagggcagtgagtcctctactttgctccgtggaggaagctgggggtacaaggggcccagtgctggccacacagcaagcgcagccgagcctcaggagcccgtcaggccacatcccctgggcactgcaagtggcctccctcc

SEQ ID NO: 229110 - DNA, 556 bp, Homo Sapiens
ttggcgcgggacgcatagagctgcggctcgggcggcgcctccctgcggcggcccggcccggctccggcccccgctggggcaatgctccccggggccgcgggatgagccagtgactcggccggtccgggcatggcagacccagtggcgggcatcgcgggctcggcggccaagagcgtgcggccatttcgctccagtgaggcctacgtggaggccatgaaggaggacctggccgagtggctcaatgccttgtacggcctgggtctcccgggtggtggcgatggcttcctgacagggctggccacgggcacgaccctgtgccaacatgccaacgccgtgaccgaggctgcccgtgcattggcagccgcccgcccggcccgaggtgtggccttccaggcgcacagtgtagtgcctggctccttcatggcgcgcgacaacgtggccaccttcatcggctggtgccgcgtggagctgggtgtgccggaggtgctcatgtttgagactgaggacctggtgctgcgcaagaacgagaagagcgtggtgctgtgcctgctggagg

SEQ ID NO: 229111 - DNA, 1318 bp, Homo Sapiens
ttgggaaagtttatgccgacggactgtgtccggcgatgggcacgggcatttcttcgtttatagctgtctgtttgcattctgattgggaacactgggatcattttcatcatgccgacagtggtggtaatggatgtatccctttccatgacccgacctgtgtctattgaggggtccgaggaataccagcgtaagcacctagcagcccatggtttaacgatgctgtttgagcacatggccacaaattacaagcttgaatttacagcacttgtggttttttcatcactttgggagttgatggtccccttcacgagagattataataccctacaggaagcactaagtaatatggatgattatgacaaaacctgcttggagtctgcattagttggtgtttgcaatatcgttcagcaagaatggggtggtgcaattccttgccaggttgtcctggtgacagacggctgtcttggcattggtagagggtcactgcgacattccctagccactcaaaatcaacgaagtgagagcaacaggtttccactaccttttcctttcccatctaagttatatatcatgtgcatggcgaatttggaggagctccagagcaccgattccttggaatgccttgaacgtctcatagatttaaacaatggtgaagggcagatttttactattgatggccccctgtgcttgaagaatgtacagtctatgtttggaaaactgatagatttggcatatacgcctttccatgctgttctcaagtgtggccacctaactgctgatgtacaagtcttccccaggccagaaccttttgttgtagatgaagaaattgatcctatccctaaagtcattaacacagatttggaaatagtgggatttattgatatagctgatatttcaagtcccccagttctgtccagacatctggtcttacctatagcacttaacaaagaaggtgatgaggtgggtactggcatcactgatgacaatgaagatgaaaattcagccaatcagattgcaggcaaaatacccaacttttgtgtcctgctccatggtagcctaaaagtggaaggaatggtagcgattgttcaattaggtcctgaatggcatggaatgctctactcccaagctgacagcaagaagaaatcaaacctcatgatgtctctctttgagcctggcccagaacctctcccatggctagggaaaatggcacagttgggtcctatttcagatgctaaagaaaacccttatggcgaggatgacaataagagtccattccccctgcagcccaaaaacaaacgcagttatgcccagaatgtga

SEQ ID NO: 229112 - DNA, 519 bp, Homo Sapiens
tgagccaccacacccagccctttcactaatttttggcagagttcacaatcccatcctatgtcagaaacttgaacctaacttaagaaattttgagtcatttttttggaggactgaggctttgttctacctactcttgaagaatcctgatgaaatattcaaacacataaagggatggccctggaggtctatcctgcatacctggagagcttctctggtcctgcccaccttgaaagttgcagactttgttgtaacatctatgtgatgagcttccctgtgaagccccatttgacaggtgggccagcagtgttttatcagcactctgatggcccacatttcccaggaaaacttcttgaaacttaccgttgtgggcagtggtcagagcgtgtagttcttatgactgtcttgtttcatctgtggagcacgtgtggagcacgttggtacagcagtttctgtggggtttggcatgggtgattttggttagtaaccatcctccaattgttgcttgtgaaagtcattcat

SEQ ID NO: 229113 - DNA, 910 bp, Homo Sapiens
ttggctccttgcttctgggggtcgtggccttgctcccgctgtgcgggaaaagaatccaggcccttccacgcgcgtgtgggtgcgggggccccgaagtgctcgtggttccccgctaggtctccgctggggcaggaaccggaatcatgggtgggaccaccagcacccgccgggtcaccttcgaggcggacgagaatgagaacatcaccgtggtgaagggcatccggctttcggaaaatgtgattgatcgaatgaaggaatcctctccatctggttcgaagtctcagcggtattctggtgcttatggtgcctcagtttctgatgaagaattgaaaagaagagtagctgaggagctggcattggagcaagccaagaaagaatccgaagatcagaaacgactaaagcaagccaaagagctggaccgagagagggctgctgccaatgagcagttaaccagagccatccttcgggagaggatatgtagcgaggaggaacgcgctaaggcaaagcacctggctaggcagctggaagagaaagaccgagtgctaaagaagcaggatgcattctacaaagaacagctggctagactggaggagaggagctcagagttctacagagtcaccactgaacaatatcagaaagctgctgaagaggtggaagcaaagttcaagcgatatgagtctcatccagtctgtgctgatctgcaggccaaaattcttcagtgttaccgtgagaacacccaccagaccctcaaatgctccgctctggccacccagtatatgcactgtgtcaatcatgccaaacagagcatgcttgagaagggaggataaaaactttcagaatgagcaaacaccatcaacgttaattccagagatggaacattttttttcctagtgagaaaacaacccatttg

SEQ ID NO: 229114 - DNA, 631 bp, Homo Sapiens
ttggctctgttgcactgagacttgtaaggcgtccttgctgcttcgtggcagtgtgccttagctttccaagcaggggtctgaatagctttttccatgaaaattcaggggtctttctttgatacccttgtgacttgtcattcaggggatggcttccactgtttaaggctgaagcctaggtgatctcatagaacagggttcaccaaataaggcccatgggccaatttggccaccacctgttattgtaaataagtttttattggaacatagccgcagccattcaatgacatgcctgtggctgtgtctgcgctactgtagccacagggacctctggtctgcaaagctgaaaacgtttaccgtctgacccttgatagagaaaggctgccagtcgcgccgttgtctaaaaaagtctgaactccaccttagtgttaactagtccataggatggctcgtcgacctgcacgagcgtcataaacacgctggaggaccagagcaggggcggctgtgtctgcaacccggctttccttctgacatcacctggtctctgcccttcagcccctgcccccgtctctgttttggaagtggtccatcacagttccttctcaatttgttgggcctcgaagggagaatccaa

SEQ ID NO: 229115 - DNA, 875 bp, Homo Sapiens
tagcgggatactaaccggctcctcgttggacagaccccagctcgtatgcccactggcccagcacagttgacaaaatactggcattcaatctgtcctttatcggtctccactccagtaacttgaccttttttgcccattacttgaagaacagatgtccggtcatagatctgaacaccattttgggaggcagcactgccagggcaagagccacgtcagcggaagacaccactgcatcctcaggaacatgcatggcccccaccaggtcgtgcacgttgaggagatggtgaagctcggccactttcttgggggagatgatctcagaagggatacctataacattcagccctgcgttgatgcgcttcagggagatcagtcggtcctgagtttgggccagaaagattgagcctgtccttgtgtaacctgttcggatccctgtttcttgctctaactgatggtagagtttgtttgagtagtctgccatcttctgctcaatggtcaagtgcctggcagtgctcaggatgccagcacagaacctggtagagccagcagccagcctgccctgctccaaaaggacaatatccttccaccccattttggattggtgatgggccacagaagtgcccgtgattccacctccacagacgaccacctgtgcctgggtgggcagggccatggaacgcgcctcggcagctgatgcgctgtttcttgcagaggaccagttctgccatcctgggctggctctttgtcttccaacaatcgacagcaaccggtagaacatcatgtctctcaccaactagatctcaggaactcaaactcaccggcccccacgggctccgcgctcagctacagcccggcgggagcaatgcggcagccaa

SEQ ID NO: 229116 - DNA, 926 bp, Homo Sapiens
ttggcgcagagtccttctgtcggttggtcctggagcggcgcagccggagtggggccgtgaggagaataaaggcagccccgttgatgactgaaaatgacaaagcatccacctaacagacgaggaatcagctttgaagtgggagcccagttggaagcccgggaccgtttaaaaaactggtatccagctcacatagaagacattgactacgaggaaggaaaagtactcatccatttcaagcgttggaaccatcgttatgatgagtggttctgctgggacagtccttatttacgccctttagagaaaatacagctgaggaaagagggcttgcatgaagaggatggatcttctgaatttcaaataaatgagcaggtccttgcttgctggtctgattgtcgtttttacccggccaaagtcactgctgttaacaaggatggtacttacactgtgaaattttatgatggagtagttcagactgtcaaacatattcatgtcaaagctttttccaaagatcagaatattgtgggtaatgctaggcctaaagaaacagatcacaaaagtctttcatcatctcctgataaacgagagaagtttaaagaacagagaaaagcaacagtgaatgtgaagaaagacaaagaagataaacccttaaagacagaaaagcgacccaagcagcctgataaagaaggaaagttaatctgttctgaaaaggggaaagtgtcagagaaaagtcttcccaagaacgagaaggaagacaaggaaaacatttccgaaaatgacagagagtattctggagatgcccaagtggataagaaacctgaaaatgacattgtgaagagtccacaagaaaacttgagggaacccaaaagaaaaagaggcagaccccctttcatagctcctactgctgtggattcaactctcaaactttg

SEQ ID NO: 229117 - DNA, 1160 bp, Homo Sapiens
cccccacaacttctgcggaggagctcccactcccagttcagacgccccagaagagacctgcgccagtgtgtaagacggaccccagcggcccccagccatttcattagcagctattttccacaacagacgctggcagcccccatgctcgcccacagccgcagcagccaacaggcaagtgcgtgccgttcgagaggccgccggctccctgtatccttgaggcatgtccacctcccagagcaggaggttggaacagaacggcatcccgaggacccctagccgaggcgggaaggtaagaggctgacgtcgtgcgtgggccccgccggccccagtgggaagcagtggtgcgtgcctccagggagcacttctcctggacccggggccgtggctgcctacgatgtccactgcctcctggattcacacagcaatgcaccaggcaggtggggcaccagctgctgtccttatttgcagccaagagaacaggcccagagggaagaggtcttgcccaacacagtcagtccacctgcctgctggtggtcctcggcctccagaccgtgggctgtcccttggacgagtggaattcgtccccaggaaggatgcaggtcctatgagcagacgctgtgaagtctgtccatgtgcagcgggaagcaacggggcaggggtgaataaaggtcttcattcctcaagcaagagagacggacatctggtcctgagtccccaaactgttcatcaggtttctccgggcccactggatggtgagggggtcccggtgcccaggtgggggcggcaggctccactgggcacttgctgagagcttgcggcttgagcagccgctggtcagtgaagccgtgtctggcttcgttggctcccggcttgggacactcagggctgttccacaggccagctcctccagccacagttgagcactggagtgacgctggaccacttggctccacctctggctggggagaagggaagcccggggcctgagaaggcagagccccccgagctcaggagggatcctgcgggggggtcttcttgttctgggggtccttggctgctgccatggaggcagcgacagctcaggaaagtgggccgcattggccaggcctcggctgcctcccatagcgaaaaaaattcaagggaacaacagaaacaagcca

SEQ ID NO: 229118 - DNA, 937 bp, Homo Sapiens
ttgggggacttggggcgcaaccggctctaccacgatggcaagaaccagccaagcaaaacatacccagcctttctggaaccagatgagacattcattgtccctgactccttcctggtagccctggacatggacgacgggactctgagcttcattgtggatggacagtacatgggagtggcttttcggggactcaagggcaaaaaactgtatcctgtagtgagtgccgtctggggccactgtgagatccgaatgcgctacttgaacggactcgatcccgagccgctgccgctcatggatttgtgccgtcgctcggtgcgcctggccctggggagggagcgcctgggggagatccacacgctgccgctgccggcttccctcaaggcctacctcctctaccagtgacgttcgccatcataccgccagcgcgacagccacctggtgccaactcactgagccgcctgccgctggggccgccgcaccctgcaccttggaccggcatccgtagccatggacagaggtccctggtcttccctcatcctccgtggctgcctccatgggacaaggaccgattccaacacaggctcctctttcccccttcccgacatcagcggaaggcagcatccctgcatgccgtccatatacaacccctctttgaaaaaagacacagagaataaactcctacgaaagccctacattgagctccaatctgctcggggtgggacgggtgcttcccacacctctgggagaaagctgcagccacctgggggtcccaaggtggtgggggtggcaggtggtaccacagctctgagagcagataccacgggtactaagaggtgcttagactcgggctggtgcccggcccagggtgcccagcggggccatgccatggcagataagctcagacgtcaaaaactcaccatggaccccaaggcagaaa

SEQ ID NO: 229119 - DNA, 465 bp, Homo Sapiens
gtacaaaaaagttggcgggaggggcggggaggtaggacgcgggtaccggcggtcgtcgggtcggcagcctttggtcagttggcagcggcaagcgcgctgcggttccggtggcgccatgtcgttctgcagcttcttcgggggcgaggttttccagaatcactttgaacctggcgtttacgtgtgtgccaagtgtggctatgagctgttctccagccgctcgaagtatgcacactcgtctccatggccggcgttcaccgagaccattcacgccgacagcgtggccaagcgtccggagcacaatagatctgaagccttgaaggtgtcctgtggcaagtgtggcaatgggttgggccacgagttcctgaacgacggccccaagccggggcagtcccgattctgaatattcagcagctcgctgaagtttgtccctaaaggcaaagaaacttctgcctcccagggtcacta

SEQ ID NO: 229120 - DNA, 531 bp, Homo Sapiens
ttggcatttccaagaagccaaagactccttcgcttactgtcttcctgttgggccagtccgctcgagatgctgagagagccaaggatattctgtgccgtctggagcatacaacgttgaggaaggtgactgccaacacagccatctactatgaccccaacccccaaagcacggtggtggcagaggatcaggaatgggtgaatgtctactatgaaatgcctgactttgatgtggcccgaatctccccctggctgttgcgggtggagctggatcggaagcacatgactgaccggaagctcaccatggagcatattgctgaagagatcaatgctggttttggtgacgacttgaactgcatctttaatgatgacaatgcagagaagctggtgctccgtattcccatcatgaacagcgatgacaacaagatgcaagaggaggaacaggtggtggacaagatggatgatgatgtcttcctgcgctgcatccagtccagcatgctgacagatatgaccctgcggggcatcgatcagatca

SEQ ID NO: 229121 - DNA, 279 bp, Homo Sapiens
gaaaatgaaaggaattgaaattaagagaagggagagattgaagtgtggcgctaagattgtgcaaaaaaagcagcatctggatattagaactgaatcaggtcatgcagtagcgctctgaggacaatgcccggcacaagcagcccctggaggtagtgctgcctgaaccattcaggacaaaaataaggagtatcgagagactcaatcgcctgagttccaggcggaggccaagcgccgttggcattattaaaatcagctgagtaaggtaagaaacaattatga

SEQ ID NO: 229122 - DNA, 889 bp, Homo Sapiens
  misc_feature (52)..(65): n is a, c, g, or t
  misc_feature (159)..(274): n is a, c, g, or t
  misc_feature (742)..(743): n is a, c, g, or t
  misc_feature (746)..(747): n is a, c, g, or t
  misc_feature (752)..(752): n is a, c, g, or t
  misc_feature (766)..(766): n is a, c, g, or t
  misc_feature (841)..(841): n is a, c, g, or t
ggggggctgatgtgggctagtaagactccagttcttagaggcgctgtagtannnnnnnnnnnnnngtctcatcctttggatacttcttttaagtgggagtctcaggcaactcaagtttagacccttactctttttgtttgttttttgaaacaggatctnnnnnnnnnnnnnnnnnnnnnnnnnnnnnnnnnnnnnnnnnnnnnnnnnnnnnnnnnnnnnnnnnnnnnnnnnnnnnnnnnnnnnnnnnnnnnnnnnnnnnnnnnnnnnnnnnnnntgagccacagctcccagcctaggcccttaatcttgctgttattttccatggactaaaggtctggtcatctgagctcacgctggctcacacagctctaggggcctgctcctctaactcacagtgggttttgtgaaggtctgtgggccccaaccaaacctgctttgttgtctgaaaataatagaagaacctctctcagcccactggcctgaatctacactggaagcccaccttgcgtgggggcgccgcgtccccacaccttctttgttttggtgggggagggagaaaaaacacccccaacttttacccctcccccctgtgggggcgcctcaatgggggcccagacagctccccccccaccaattctcgggggtccccttctcttcttggactggccccagaaatggtgtgaattcccaggatcttatcctcccctcacctcgtccgggattctttcagaaactcctaacnncannccggntgctccttggcggngaaattgtaaactcatcccccttcataccgggagtaaaccttcttcttttcgaccccgcgactgagagagattgngcgatagccgtgcctcttacaggggaaggcctccggggggcttgttgg

SEQ ID NO: 229123 - DNA, 448 bp, Homo Sapiens
  misc_feature (154)..(166): n is a, c, g, or t
  misc_feature (212)..(212): n is a, c, g, or t
  misc_feature (277)..(277): n is a, c, g, or t
  misc_feature (325)..(325): n is a, c, g, or t
  misc_feature (332)..(332): n is a, c, g, or t
  misc_feature (351)..(351): n is a, c, g, or t
  misc_feature (393)..(393): n is a, c, g, or t
  misc_feature (399)..(399): n is a, c, g, or t
  misc_feature (406)..(406): n is a, c, g, or t
  misc_feature (411)..(411): n is a, c, g, or t
  misc_feature (432)..(432): n is a, c, g, or t
ggaaacttagctatttatattaggtacagctattaaaacaaggtaggaatgaggctagacctttaacttccctaaggcatacttttctagctaccttctgccctgtgtctggcacctacatccttgatgattgttctcttacccattctggaannnnnnnnnnnnnaaataaatacagaaagcatcttgatctcttgtttgtgaggggtgangccctgaggtttagcttcaaggaatatgccatggctcatgcttcccatatttcccaaagaggggnaatacagggtttgctaacactggggtaaaaatggcaaatttcaagggntttgggnaggggctgtttttaatggnaattatgggggccggtttccggccaggtggccaaaaccttgntttggnagggggnttttnatttttctcccccccttgggngccccttggggggccc

SEQ ID NO: 229124 - DNA, 198 bp, Homo Sapiens
agataacatgcgattgggccgagacaatacgatgaccctgcgctagatccggcagggcaacatgaacgcagcgcatagacgaatttgagtctatgtaatgggcacccaactctcattcattacatgttccctcattctaagcctttcttcttccatttctaccatatcatcctcttcatttttagggtcatatacttt

SEQ ID NO: 229125 - DNA, 410 bp, Homo Sapiens
  misc_feature (12)..(12): n is a, c, g, or t
  misc_feature (394)..(394): n is a, c, g, or t
agcacctgtggntcttcctcctgctggtggcggctcccagatgggtcctgtcccagcgtgcagctacaggagtcgggccccggactggtgaagccttcggagaccctgtccctcacctgcagtgtctctaatggttccatcagcactcccacttactactgggcctggatccgccagtcccccgggaagggcctggagtggattgggactctctattatactgggagctcgtactacaacccgtccctcgagagtcgagtcaccttctctcttgacacgtccaagaaccacttctcccttatgctgacctctgtaaccgccgcagacacggctgtatattattgtgtggggctgccgccggtcgattatgccggcacctggtccggggtccatntgttacaactggttcg

SEQ ID NO: 229126 - DNA, 543 bp, Homo Sapiens
  misc_feature (122)..(168): n is a, c, g, or t
  misc_feature (194)..(229): n is a, c, g, or t
  misc_feature (233)..(464): n is a, c, g, or t
tggcgttctagaggatcccgcgtgatccgtacatttctatgctccctggatctccccctcccccatcaagaactggccagggtctgaaaaaggatgggccaggagtgtccttttctgttttnnnnnnnnnnnnnnnnnnnnnnnnnnnnnnnnnnnnnnnnnnnnnnnagccctgttggcacaactgcactccnnnnnnnnnnnnnnnnnnnnnnnnnnnnnnnnnnnncctnnnnnnnnnnnnnnnnnnnnnnnnnnnnnnnnnnnnnnnnnnnnnnnnnnnnnnnnnnnnnnnnnnnnnnnnnnnnnnnnnnnnnnnnnnnnnnnnnnnnnnnnnnnnnnnnnnnnnnnnnnnnnnnnnnnnnnnnnnnnnnnnnnnnnnnnnnnnnnnnnnnnnnnnnnnnnnnnnnnnnnnnnnnnnnnnnnnnnnnnnnnnnnnnnnnnnnnnnnnnnnnnnnnnnnnnttttccacactcagctttcccctagcatggacaagattttcagccattttggccacatatacatttttaaggaaaaaag

SEQ ID NO: 229127 - DNA, 424 bp, Homo Sapiens
tccactagtgtaggccaatcaaagtagacaactgtaaagtccttgagaatattttttacaatatttgtggcaaattcagtgggttcaaaattgagtttgtcctttctgcttcattagtttaagctgtataattcctttcccttcctacattcttgttttcattttttcggaggaagaggagttgctagtactggcatcggttttcctttctctttttacctgttttttcacccgggaagggccctttcttttgttaccccacgctgatttgcagggcgcacattttggcccccttgcttttaggttcaaaccaatcttccgcgggagacttccaaggaccctggattcacggggcccacccaccacccccgctttattttgtgtttttcaccagaaagggggtttcccctggtggccaaggttg

SEQ ID NO: 229128 - DNA, 780 bp, Homo Sapiens
  misc_feature (417)..(449): n is a, c, g, or t
gggaaaggacctagaccttcccatagctaattccagtggaccatgttatggcagagacaggcttgtacctccccaagtcatggaccatccaggtgggtctagtttccctgttggacaatccagccccatcccacttggtggagaagattgtctaccacagcaagtacaagccaaagaggctgggcaatgacatcgcccttatgaagctggccgggccactcacgttcaatggtacatctgggtctctatgtggttctgcagctcttcctttgtttcaagaggatttgcaattgctcattgaagcattcttatgatggctgctttatcactccttgccacatattaataattccaactcctgcattctgtgggtggtccactcccactgcttacctttcatcatttcaactgtgacgnnnnnnnnnnnnnnnnnnnnnnnnnnnnnnnnntcctagtatcacccacccagcccggcgacatccttccccttccatctccacatgtacctcccgccatctgccagtgagatgccctaatcaggaacaacgcccccctcgctgcacaacccgtatcccgcgcagacgagccatcacccaaagcgccctatcggctcaccgcaccctatctccccttctacacttcttagcgacacaccaccctcaatcctgaccgccagccctacccttctcagctacaataaactattaggtcttgctctaactcgctaaccccgaaaaccacagcactattcacacaccccactccgccacaaaaccaccc

SEQ ID NO: 229129 - DNA, 471 bp, Homo Sapiens
gacctaacctacctgatttttataatgactggatgttcattgctaaacatctgcctgatctcatagagtctggccagcttcgagaaagagttgagaagttaaacatgctcagcattgatcatctcacagaccacaagtcacagcgccttgcacgtctagttctgggatgcatcaccatggcatatgtgtggggcaaaggtcatggagatgtccgttaggtctacctggccaggtagacctaacccaaaattgcttaacaataccctaaatccattttgagttcagagcagaaatccgtgttccttccaatctgctcagataaccaggaaatgctgtacctgctgggtctgcacgtatagctcccgacacaactgctactccagccggcatgagtcacccaagcaggcatagcaacggagtactagtcaaaccacggatacagcggctcagcagattgcactcacgcacacc

SEQ ID NO: 229130 - DNA, 902 bp, Homo Sapiens
  misc_feature (365)..(415): n is a, c, g, or t
  misc_feature (545)..(607): n is a, c, g, or t
cagtgatatcaacccagagtggccattacgccggggaagctgctctggaaacaattcagaacatgagcaaagtagtggattccctctacaacaaagccaagaaactgacatagagttggatctgtagcggtcctttggagagtgtgtgtggcgggagagtgaaaccttgggggaaaatgctaggagattcttttttctttttgttctacttttcgctcggaaagtttttacatcctcatttggtgcatctgtattccagccaataggtgtgcccagttttcatgtaatctttactggcccaacttgggagtggggaaattgcttaccaaacaagaacaagaacaaaaaaaagattattctaaatnnnnnnnnnnnnnnnnnnnnnnnnnnnnnnnnnnnnnnnnnnnnnnnnnnntcgcccctccagaagctttccccgcaccattcctttggggcggggggcccggccgggaaaggggaccacgcgccatatgctgccttcctccggaaattctgggtctatggactaccggtttgggattccnnnnnnnnnnnnnnnnnnnnnnnnnnnnnnnnnnnnnnnnnnnnnnnnnnnnnnnnnnnnnnnacgaggggagtctcccggagggccccctcccgcggaatttacccacccgggaggtccccagcggggcggtcccattatcccaatttaaggccccccggaccggggcagaattaacgtgcaaagaaatgggttggtgaagttttctttacaggccctttccggggcggcccgctggaagaccccttccgccaacacgggctcttcaacggaagcccgggaaatcgcccgcgggcgcattaccacacgcccgccgccgcgcgcatccgcatatataaatactctggcccccagaggg

SEQ ID NO: 229131 - DNA, 346 bp, Homo Sapiens
cctgcgggtctggagtatagagtgctgtccttggttgtaagtacttggccctggggtaattagggtgggtatatagtggcctggagcatgagagcctgatacagcaggtggttggggtatggccttaattgactgtcctagaagggaactgtctggcttttggacagggcctcaaaactgtgatggtgtgcctgcccttgtgcgattgcttcgaaaggctcgtgatatggaccttactgaagttattaccggaaccctgtggaatctttcatcccatgactcaatcaaaatggagattgtggaccatgcactgcatgccttgacagatgaagtgatcattcctcat

SEQ ID NO: 229132 - DNA, 481 bp, Homo Sapiens
  misc_feature (190)..(234): n is a, c, g, or t
gtagtatatcaagatagcatcaaaatgataggctaggtaatacaggcaataagtagcaaaggcagaagcaggaagccaaggtcttggtgagggggcaccctctcccagggcaggcggcttcccgctcccaccagggcccggtgggtcctgggttttctgcaaacatggaggaccactttctgataggacnnnnnnnnnnnnnnnnnnnnnnnnnnnnnnnnnnnnnnnnnnnnngtattttactgaagatatttcatttattgtatattttatatacatgtgcaagactttctataggatatagtcttaaaaagtgaaattgtttggccatagttggcagcaggtgagcctcacctgacaagcatacaggagccagatgaacagcacatgcttacccttttaactgtgcacttctgtatccctggtatcccgtgagcttgaaactctggaccagatttctttggagatgtctgtgctacca

SEQ ID NO: 229133 - DNA, 138 bp, Homo Sapiens
tctagaggactcccgggcgtgggggactgattgccaaaggcccgtctcaaagtactcccaggcggtgccagccgtgtaccgaggggcccattcccaaagtagccacacgacgagccgcacgaagagcctcacaatgcg

SEQ ID NO: 229134 - DNA, 1112 bp, Homo Sapiens
tttaatggtggaagacgagatgagctgccaattgtggtgtctgaagaccaagactacacagctcatttgctgatcctgatacacttagttaactgggacttgtggaacaagtgcgcatttgtagccatgaagtgccatcttgcccaatatgcctctatccacctactgcagccaagataacccgttgctggcacacatcttctgctggcgcatgcatcctgcactatctttcactgcagtgagaacgacgtggacgctaaatgtcccatctgttacagctcctgtgccactacagaacggactctcacacgacgctgtcgtctgccacagagctcaccactcacgtatgcttgtcgcgtgataccatctacgactgcagcctgactgaacgacgggacacaacgcgggctgttgcgtggcttctgcccaacatccaaatgcgatgaatgtacgaccatcccattcatctaggagatgaacacgcacagccagtactccaagctcgcctgctggccctcataacggagcacgcgcgcacgccaccgcagctagctcctgcgcaggacaaagcaagcacccagacgcacgcacgctggcacaccgacgacgacacactccccgaagtcctcgcttcactccgacggcacgccttacccacggaccctcaacgcactccggcaagcagcgcctccgtcgcgcgcctcgcgccggaagcccccaccgcgccgccccccggccgtccggccgaggctcgcctaccgacaacacaaagctgcgtgagccgactagcgaccacccactggcgccgaacggaagctcctggcacctcacaaaccccacacgaaagaaccttaggcctgacaaacacgcggcacagcacaggccacactcgaggacatagacacctccaaccacaacgaaaaacccacgacaaacataccgcaccccctaggacccaacctccctatgtaaaacacgccttgccaactcacactccgggctaccaaccacagacgacaacacccgcaggcccggacagccaacaaagaccgtgacggagcacggacgaacgccacgctcaagagcgtggagggactacgcgaataagcagc

SEQ ID NO: 229135 - DNA, 714 bp, Homo Sapiens
  misc_feature (436)..(445): n is a, c, g, or t
  misc_feature (556)..(609): n is a, c, g, or t
ggggcacgccgggcgtgccagtttataaagggagagagcaagcagcgagtcttgaagctctgtttggtgctttggatccatttccatcggtccttacagccgctcgtcagactccagcagccaagatggtgaagcagatcgagagcaagactgcttttcaggaagccttggacgctgcaggtgataaacttgtagtagttgacttctcagccacgtggtgtgggccttgcaaaatgatcaagcctttctttcattccctctctgaaaagtattccaacgtgatattccttgaagtagatgtggatgactgtcaggatgttgcttcagagtgtgaagtcaaatgcatgccaacattccagtttttttaagaaagggaccaaaaggtggggtgaattttttcctggagccccaataaagggaaaaaagcttttgaaannnnnnnnnnatttaaattggaatttaaaagtcccaaaaacccaggtttttttcccgggaaaaaaattattaaaccccaggcccccatttgggccttaattttttaaaaaccctttggcgnnnnnnnnnnnnnnnnnnnnnnnnnnnnnnnnnnnnnnnnnnnnnnnnnnnnnngaaagagaacttttaaaacccccccggtttggccccatcttcgggcgggggggcacaaataaaaaaccacctttaaatgtgccttaaacccccctttttttaaac

SEQ ID NO: 229136 - DNA, 856 bp, Homo Sapiens
  misc_feature (379)..(393): n is a, c, g, or t
  misc_feature (507)..(577): n is a, c, g, or t
  misc_feature (729)..(738): n is a, c, g, or t
ggagtagagctagcaatgacaccttgcatttcatttcaacactgcttcaaggtttcttttgtatataattcttagaatgctcatttcttttaaatggtttaatttgtacagcagaggaatgttattgtagtagtatgtaactattacctaatactgagtttttgcaaaaaacaatgaatgctcatatgtaattgaaatacttcagatcacatgaaaatgctgatttaacatttaagtatcacagcattaaaagaaaaagaaagtatgaaaccgaaaattttattatattgactcaatgttctagaaaatcattcttaatagaccaatgattgtacacccccccttgaatattttttctaataaaaccttccatgtcggnnnnnnnnnnnnnnnaaaaatttttcaaaacttttgtttgggcggggggccccaaagggaaagggaactgggccaaaatttgttcccaaagaaaacccgggcaaggcaatggggtttggaattcccccnnnnnnnnnnnnnnnnnnnnnnnnnnnnnnnnnnnnnnnnnnnnnnnnnnnnnnnnnnnnnnnnnnnnnnncccttttcgcggggtacttttccaagggggggccccaggcgcgaccctccaaaattaaaatttaaacccccgcgccccggggcactttttttgggaggagaggggggtggaaactctctttaaaccttctttctcggcccacctggggaaannnnnnnnnnaaaaggcgggagtggaggaaaccctggaacgtccccaggggggaatcccagccctctttggccccccttgggaataataaatatattctccccccgcgggggaaaaacagcgggggcc

SEQ ID NO: 229137 - DNA, 219 bp, Homo Sapiens
  misc_feature (78)..(118): n is a, c, g, or t
ccgtgactctagtggatcccttaaactaaatgcttattttcttctgcatgtgcttgacccaactacaaactcgacagnnnnnnnnnnnnnnnnnnnnnnnnnnnnnnnnnnnnnnnnntcctacaagatctaaataattcttgtcgtaaaagtgggcaaatggtctgaggtgcctgacatccaggcattcttttacacatcagtcccaggtgtgctacg

SEQ ID NO: 229138 - DNA, 1441 bp, Homo Sapiens
  misc_feature (991)..(991): n is a, c, g, or t
gtgtggtagtccaggtgatggggcttctctctaacaacaaccaggctttgaggagattcatgcaaacgtttgtccttgctcctgaggggtctgttgcaaataaattctatgttcacaatgactatcttcagataccaacgatgagggtctttggtgggccttcgtcactgagccatcaggacgagtctcaacaacaagtagacggaacctcaagcaaagacagcaaacactgagcgtggtacctgcatgcattcctggcaacttcctatgcactcacggcagacgcccaccccactgacgactggacagcaacaatctctagcacgcgcagcctgcttcgcctcgcaaccgacgagaccctgactcctgaacccagcaacacccagacacacacaaaccctcgctactcttgcaacatccgcacacgaggacacaacgccctgcaccccacgtcagtcaacgcaaagaaaaacctgacccccctgcaggcactgcctccgcgcaaggcaggcttccattcgtcccacgaccacccctacaagagccctaagaccttcaggaccacgcccaacacgcggaacagacaccctgaccggaaccacctaccgccctcgcgggcgcgctccctgctgaaccccaaccataaacgacaattctatccccaaccgcaaggtacgcgaacgccctaggaccgcccacgccttaacgcctcgggggaacgtacccacgaccctccacatggttaccggctccacacagcggtcagcccgacgacacctactccaaacagaggacccacaggtgccaacgccaccgatccctcagaacgaccccatacgacactccatccgggacgtaccacccaacccgcaaccaccaggggaacccctaccacagcacagcgcggaattccaagacagcacagttgctgacaggaacaccacagctgagacacaggttaagacaccagttctacccgataccccaccangaagaacgcgcagcgacgcccccaacagcagccccacagttccctggcagcaagtgccttggcattgcacccccaagccgtggaacccacttctgcgaacagagctcccacggcaggcgcacactgcgcgctgagccagaacaacgaccccggcaaagagaggtcagcccgcaacaaccctcgaatacaaagattaagaggcaaaacaccacgagcccatctaaatcggaaacgacagcgaaccaaaaacattcaagggacgaacagtatagaagacaatgtcgcgtctacccaaccagcactgttccagacaacacagcctcggaaggggcaaccaatcggacgcgcaagtgtcaacacagtcgggcaggggaaagacgatgacaacccgaagtattgcggaccactacagcgacgagccgcatggtgggaatggcacatcgactcagg

SEQ ID NO: 229139 - DNA, 715 bp, Homo Sapiens
  misc_feature (500)..(500): n is a, c, g, or t
ggggtacctgctcagacacccgaccttgcaagatcgttattaaagtctcactttcgctgttcttcgtgcctctaagtccattcttcgggtttggatggaatccccttccttgtatggctctgagtaagatttggccaagaggaatttgcacaagattttagaaggcaggaacaatgcaacagacgtgactcaatgaagatttcaggattaggatagtgatggacactcactaagcataaacatccatgcttctggattcaacaaactcttggaaagcatttttctgcatcctgctggtgtggaagcatttcacctgcaaaaagctgtcaagatgcttcaagaagtgaagcatccaatggctggccactgtgttcctcatattcaaggctctagtctgctttgcaaaacttcttgaatcacagctgccctgtatgttcgttagtagttcctgggccaaatgcgctgttcatgtttccagttatctctgctgcgttatgacncattttgaactcaaatagaaaaaccccttgaagtttgaatacaaccacatcaccaatgaaaaataataacttttcgggccggcttgggccctttaaaaacctttttagaccattctttttggcgccccgggcccccataggtaagtggaacccgggccataactgttttccctaggaaaaccctggtcaatgactaagggcttggaaattcccac

SEQ ID NO: 229140 - DNA, 245 bp, Homo Sapiens
tgttacgggatcacgcggcgtactatcttatacgtgcgttgtaatgaacctcgattgattgagcaagtatatcgggtcaatgagtgcgcatttgacacctcgcaactttccatttgggcttcgcgagaaacttaaagcagagatgagtgtgcaggttcactatcaaacccgcgtcgtggctatttcacacagggggcgcgcatggccaccacctggaggtggtagtcgacctggcgcaggggggg

SEQ ID NO: 229141 - DNA, 120 bp, Homo Sapiens
tgctgatgaatctggcgtcggtttttacgaccacatctcctatccgttgaacatgtactgcttttacgcgagggcgtgttacgtcgggccgaggctcacggatttcccgacgccccgtat

SEQ ID NO: 229142 - DNA, 541 bp, Homo Sapiens
ttgtgctgaggtgatctagaggatcccatttcagttctcacacccagagctctacacatgtgaggctaacactgcagccacacccatcatcacattgtatggggcagttcttgacctgtgtgagagcagagaagacacctataaatgggcaaaaccaaggccttccattgaggggattttaagtgttcaggaaatgagatgaggtccagggggatttgtattatagaaactgcagctgaatttgagataaagtaaaaccaccaaattgtttagtttggggcttccattccaatggttaaaggaactaaacattgtttgtgagtaatttaaaaccgggaaggggaagtgtaggatgtcctaattgggggtagggcggatacataatatatattttaaatttctggtaggcactggccaagtcttggaattcaacattcaagtacccctgggaatagggagctataccaagggaaacttgaaaatggaaggcccggggtacccggagcctccgaaatttcggtaattccaatggttcataagc

SEQ ID NO: 229143 - DNA, 268 bp, Homo Sapiens
  misc_feature (157)..(171): n is a, c, g, or t
tgactagaggacccggtcattcagtccaaaataaatgatgtagtcatttcaaggcaaaattaaaacagatgactcattgtaaattccaacagtcatttactcttgacttgaagatctggaaaatatttaaagtctgctgaagaaaggcatagaggcnnnnnnnnnnnnnnnaaaagtttggatattttcccttcggttccctttgggttctcccgagaatggaccaggttataaattagagaataaaagggcttttaacctggtatat

SEQ ID NO: 229144 - DNA, 162 bp, Homo Sapiens
ggtccaggtcggggaactggctggaatcgaacaccggggtcttgatacccgccgcgcgctggttgtcgtagtcgttgaggatgcgcatggcaatcttgaacaggaacgccagggcgaacaggttgacgaacgcgagcatggtcatggtgatgtcggcgaagg

SEQ ID NO: 229145 - DNA, 185 bp, Homo Sapiens
gactctacaggatccttacacggtctgttaccacgttgcttcatccaggcatgtatcggttcagaaacgaattcttgccgtgcgctgcgcttgatggaaactaccgtgcgccggtagaggtggcccatgctaccgacgttacctggcatcagtatgacatgatttcatggcataaacaaattttt

SEQ ID NO: 229146 - DNA, 737 bp, Homo Sapiens
gggggattccagccattgctgcagctgctccacagcccttttcaggacccaaacaaccgcagccgctgttcccaggatggtgatccgtgtatatattgcatcttcctctggctctacagcgagttcagctttgtttgcttcgtgacgttggggggcacatttctgctttgaaggaaaacgaaagctaccaaggttttgggaaaatgggaagatgggggcttatcggccctttagggttcccgtggaaagtcaagtaaaattccccaccccggcttccggaaagcaaaccaccccgattgggccttgggcttcccccactaacccccccacaacccaggaattttccgcgccacacgccttgtctgcgatccccttgtggcaggcaccagtccggtaaccccgcgctcatcaacgtacatgtcccccccgcccaaacacaggactcaaccctgtccatccaagggcaacaccacccccctcggaccccacccctcgctcctctcctcccaggttaaaaatcccggcctaatttcgcgacggacaacaaatacctcctgcagatccttccccccgccgtcccgcccgtgaccccagccgcatttcacaccctccgtaagattggttgtccgagtcgcctccgtacaggacacattccccccacttattgctcaccccacccccgataacatacactcccatgttctaacctaagcccgcgatatccctccccgcaccca

SEQ ID NO: 229147 - DNA, 119 bp, Homo Sapiens
  misc_feature (32)..(33): n is a, c, g, or t
  misc_feature (35)..(35): n is a, c, g, or t
  misc_feature (54)..(54): n is a, c, g, or t
  misc_feature (56)..(56): n is a, c, g, or t
  misc_feature (59)..(59): n is a, c, g, or t
  misc_feature (76)..(76): n is a, c, g, or t
  misc_feature (78)..(78): n is a, c, g, or t
  misc_feature (86)..(86): n is a, c, g, or t
agctggggacacggaacaggtggctctcgccnnancaacgttcgtactcggccntnttnccggtgaccaggacgcngntttggggntcattcacctggcggcccacgaccaccacgaag

SEQ ID NO: 229148 - DNA, 237 bp, Homo Sapiens
gcagcacaggagacagaacgtcttctcaaagagttggagcagaatgcaaaccacccacaccggattgaaccggatagcttgcgctatccggttcaattctgcagtctcagtgtcttcccaaataaattatagacatcaaatgtctggtgataccaaaaactacttgtaccctaaaagtattgaaataaaaagtacataaatctagagaattcggccgaaattgaaccggatagcttg

SEQ ID NO: 229149 - DNA, 725 bp, Homo Sapiens
  misc_feature (555)..(555): n is a, c, g, or t
  misc_feature (558)..(558): n is a, c, g, or t
  misc_feature (577)..(577): n is a, c, g, or t
  misc_feature (590)..(590): n is a, c, g, or t
  misc_feature (596)..(596): n is a, c, g, or t
  misc_feature (602)..(602): n is a, c, g, or t
  misc_feature (613)..(613): n is a, c, g, or t
  misc_feature (636)..(636): n is a, c, g, or t
  misc_feature (667)..(667): n is a, c, g, or t
aatatatccggcctatccaggtaagctcctttctctctgcaaaaggtttctgctcttctctgctgtgtccccactctttgatccaagtctgagtcccaccttctcatgcccagtctgagtcccaccttttcatgccccgcaaccccaagctcatcttcctatatgagattgcagaggaaactagggtgtgctgccatttgatttaacccacttctctttctcccagccaggctgattacccctcaaggccatcaaggctttgggaggggaggggttttatcttgggggagaacaaaattaaactgcgctcaaattactgatgagttaaagttttataatactatacaataacatttatcccaaacagaatattacatttttgatgaatcataaggcactttaagtgattaaaatgccttttgtcattaggcatattaattattatgggtaagtgaaaatgcaaaaaaatgaaattagcaaatctctctggttgatagcatgatggatatgtcaacttttcctctactagaaaggagataaaatagagtaacatcnggngctcaatatcacctctatnggctatatttcanggtggnaatggnctaaaaacttnctgacaacaaacttattggagtntaattataaaagccattaatagtttaaagcnctacattaaagtatttattaggaaaatcacccatattatgtcatacaatatgcctaat

SEQ ID NO: 229150 - DNA, 423 bp, Homo Sapiens
  misc_feature (163)..(219): n is a, c, g, or t
ttaaatgggcacagaaattcagttacctgcttagacgcattcggtttggctgagctgagggatcatggagtgctttttatggtgttgaatttctttgaaaatttctttagaactctggagcccaggtgccagggtggagtctttgttctcccactttctagtnnnnnnnnnnnnnnnnnnnnnnnnnnnnnnnnnnnnnnnnnnnnnnnnnnnnnnnnntttctgtgcccatttcaatctctatttggcgggatggggtgagtgtaacaactttattgagatataattcctgtaccatacaattcacttgaagtgtacaagtcagtggtttttagtttattcacgaaattgtgcaactattacctgataaattttagaactttctctttccttcaaaaactcttttcttcaaaaacacccttt

SEQ ID NO: 229151 - DNA, 248 bp, Homo Sapiens
cagtcagccggacccagctctcgacgcaggtgcgatatgcaccatattttcggtggtggcgataagtgaagcggcgactggcggaacggaagagaccatcatagttttgtctccaacaattctggctgacgcacccagcaacgtagtgtttatccctccgacattaaccaagcaagctctgcttatacagattggacttctgcggccatcaacgatcattgtcgcggaaatttctgtgcccatttcaa

SEQ ID NO: 229152 - DNA, 439 bp, Homo Sapiens
tcggcccttgctatgggcacagaaatcattctctgctttcatttctcaaagggactcatttcataactcagagctgcaattaaaagttcacgtcttccattttctgacttgtacctcattctctgactgtttcagagtctccccacacatcacatgaacccaaatcacattctcaatttctgtgcccatttcaatgaaatgggcacagaaattagttttaaaattacctgattctcgatcttccttgtaggtggaagctttaaactggaacgtgaactttttagctctgtgcttactttataaaagtgctgatgtgtgaactggagaaagttacggcgtgtaggggagtgagactcaagtttatagtctggcgccatcagctcacaggtgtaggactttgggcaggtatttatcactagaatttctgtgcccatttcaa

SEQ ID NO: 229153 - DNA, 1024 bp, Homo Sapiens
ttaccggtcggaagccgcgtgtgatatcgtcgacccacgcgtcggggagaaggtgctgatgcaggagcttgtgaccctcattgaggcagcgcaacgctatcatcaactgcctggatgaggaccggcagagggaggaagaggaagacaagatgttggaagccatgatcaagaagaaagagttccagcagggcaggctgaacctgagggcaccgcacagcaaggggaagttcaagaccatgaagatgttgaaactgctaggaaacaaacgtgatgccacagagcaagtcccccagagacaagagctaacagcacgagaagccagttggggactgcacccctccatggagcagctcctgggctgtgctctgtttgaagtgggtgcgccctgactccacctcagatcagtcaggaggaagatgacataaggggagggatccatctggggtgatggcctctatcctacactcagggaacctctgacgtgctctgggacacaaagaactctctatgatttctatatccgagaccccaggcagcggatgattcagaacctgaacaaaaactgaattctgatgacatgcgggatgatgtgacggacccaaagggagcaaaatagggatacaccagggataccagggaaggaaggcgacatgactgaagcaacattacagaacacatacaaacacttgacccaagaacacatgaccaatgaagcatcattgagaaatgggatatcacgacatacaagggtatcatgacttcatatcaaaaggacaagggccaaagagaaaagtgagaaaaagatgggagacaacaaattgggagttatacataatacagtgagacaaatacaagcatggtagaatacttgaagggtactcaatggatcatacaattggttaattgatgcaggtggtaggcacatatgggaataatagaagataataacacatacaatatcaaggaaaaattagtggatattatatggcagatattaacaagtatataaatagttataaaagta

SEQ ID NO: 229154 - DNA, 380 bp, Homo Sapiens
gcaggacaggcgattggtggctatggaccgccccctgcaggaagaggagcccccgcgagaccgacgttgactcctagatcgtgtcagccctcctggagagttgccccctgcgccaccagggacttcccgtcgagggtctactggatgcctccgcgaacaggtgtcacgatattaggcgtacagggaccgtccatgcgtaccgagccgcacgaggatcgagatattgccacgctcgcggagggcttccatgccgtccagcagaccagcgtccccgggggcagtcaccctctgtgacatgttcccaagagaccgtccgatcctcagggcatgccccggaacatgatgcaagcacccgaaagcttagccagaattaccctatg

SEQ ID NO: 229155 - DNA, 1131 bp, Homo Sapiens; identical to SEQ ID NO: 169902
  misc_feature (1084)..(1084): n is a, c, g, or t

SEQ ID NO: 229156 - DNA, 169 bp, Homo Sapiens
accacggaattgggaccatgtgtcggcgctacacacagatcactcgatgatgccggcgggcaccagctacgatcggatccgacgggtcaaggtgtctgagttggcctgcatcaacacgcgtgcctgacgggcactgtcggcgtcatcaacgccatgggtacccacctct

SEQ ID NO: 229157 - DNA, 134 bp, Homo Sapiens
ttccacgaataggagaatgagccataggcgccgttgtcgttcaccttcacctcaatgccggcgccggactgcatcgcgaaatcggggccgaacacctgaagatcatccacggtcagaccgcgcggcatgttgcc

SEQ ID NO: 229158 - DNA, 144 bp, Homo Sapiens
gtgacagccccggccgtgcgcgaatcgcggctgtgagatgagaacaaaagaggtctcataaaacatgccgccatcgaccagcagtactgaggccataacccacactgggccacgatcaaccccccgacaccccattcgggtacg

SEQ ID NO: 229159 - DNA, 365 bp, Homo Sapiens
tgatcctctccttcaacggaatgcttgcacgcctggaagacgcgttcgtccggctatcaaacttctcagccgacatcgcacatgagctgcggactccggtaagtaatcttctgacgcataccgaagtcgttctgaccaaaaaacgcgacctcgatgcctacgaagacaacctctactccaatcttgaagacctcaagcgcatgtcgcgcatgatcgatgacatgctgttcctggcaaaagctgataacggcttgatcatccccgagcaggttgatatcgatctggtcgggctagtgtccagactgattgagtactaccagcttgcagccgaagaccgaagcattcggcttgcccttcaaggcgaa

SEQ ID NO: 229160 - DNA, 521 bp, Homo Sapiens
  misc_feature (399)..(399): n is a, c, g, or t
  misc_feature (422)..(422): n is a, c, g, or t
  misc_feature (425)..(425): n is a, c, g, or t
  misc_feature (446)..(446): n is a, c, g, or t
  misc_feature (456)..(456): n is a, c, g, or t
  misc_feature (459)..(460): n is a, c, g, or t
  misc_feature (470)..(470): n is a, c, g, or t
  misc_feature (490)..(490): n is a, c, g, or t
agcgcatgcccagagccctccgaaggccgggccgcgccgcttgggagcctgtccgacatgaatccgtccgttccgaagttcgccgtcgtcgtgcagccaagtcccatcgacgggatgggcgtgttcgcagcggagccgatccccgcgtacaagaagatcggagagttgcgtggcgagtcgatcagcgtgcgggaggcgcgtcggcgagccaagcggcagcagcgcatcatgatcgtcgaggtgtccgacaagcgggcgatcgatgcgtcgcaatcccaagacgccatgcgctacaccaaccactcatgctcgccaacaccgtgctgcgcatccgcaggggccggttcgagtttacgccttgcgcccgatcgctgcggaaggaactgacggcaactacgntagaccacacgaaagcactttgnctngccgtgcggtcgccaatgcangaccttaggntgnntgatttggantggtaaccttacgggtacanttgaatctatatggatagtgttctggtaaat

SEQ ID NO: 229161 - DNA, 295 bp, Homo Sapiens
  misc_feature (46)..(210): n is a, c, g, or t
gatagcttgaagggagatctcccctcatattgtcttatgcccaatnnnnnnnnnnnnnnnnnnnnnnnnnnnnnnnnnnnnnnnnnnnnnnnnnnnnnnnnnnnnnnnnnnnnnnnnnnnnnnnnnnnnnnnnnnnnnnnnnnnnnnnnnnnnnnnnnnnnnnnnnnnnnnnnnnnnnnnnnnnnnnnnnnnnnnnnnnnnnnnnnnnnnaaaatccctgtcctgttttgttctgatctaattacctgtgcatgcagcccccagtcacgtaccctctgcttcctcaatccatcaa

SEQ ID NO: 229162 - DNA, 1093 bp, Homo Sapiens
  misc_feature (177)..(293): n is a, c, g, or t
  misc_feature (318)..(360): n is a, c, g, or t
  misc_feature (536)..(550): n is a, c, g, or t
  misc_feature (757)..(775): n is a, c, g, or t
  misc_feature (874)..(926): n is a, c, g, or t
  misc_feature (981)..(991): n is a, c, g, or t
gggactcttgcatctctacaaagtagttttgtcaatttgaattcagggaaaagttggtcacagcctgcaaatgacttcatttggaagtctgattgtttcagttgcctgacaaatactacactttacaaacaatgttaacactgtgattccttcattgttttaagaagttaacctagnnnnnnnnnnnnnnnnnnnnnnnnnnnnnnnnnnnnnnnnnnnnnnnnnnnnnnnnnnnnnnnnnnnnnnnnnnnnnnnnnnnnnnnnnnnnnnnnnnnnnnnnnnnnnnnnnnnnntttttgggcagcgtggtgggggatnnnnnnnnnnnnnnnnnnnnnnnnnnnnnnnnnnnnnnnnnnnccttgtcggcccgcctcggcccctcgaggaagctttctaagaccaattcgtttttggcgccgcggggccccaagtagggaaaagtgaaaccatgggcccaatagccttgttttcccttaagggagaattccctgggcccaatgaaccataggggcctttgggatttcctacacccnnnnnnnnnnnnnnncgccccccggggcggggaaaacccggaaggcggttctcctggaaaaccaaatatcccaagaatgggggaagttttccttggaagggggtccaattttaccctggggggaattcccttattccccaacccaggggggggagatctccccacaaaggcgcggaaagggccttcccaaaaataatttcacaaaaatattttatacgcggnnnnnnnnnnnnnnnnnnntgtggccccaaactctccattttccgggacagaagaaaaaccctgggctgtcggtgaaataattttctctaattttaaaaagaggcctattttttcttnnnnnnnnnnnnnnnnnnnnnnnnnnnnnnnnnnnnnnnnnnnnnnnnnnnnncgggggggcaattgggaagtgagaaacaccccctggaaaaaattccccgccccannnnnnnnnnnaaatatttgaaggtccaaccccctgtttggggccccgccccccttttggccgcggctatataaaaaaataatttttttgggccccccccagtgggggtgtgg

SEQ ID NO: 229163 - DNA, 289 bp, Homo Sapiens
tggtgctcaagagcgctgaacggatgggttacaccgggctcaatatcacctatccctgcaagcaggccatcctccccttgctcgatgagctttctgacgaggcgcgcggtattggcgcggtcaacacggtggtgttcagggagggcaagcgcatcggccacaacaccgattgccttgggtttgccgaggggtttcgccgtggtcttgcccaggccgcacgtcaccgtgtgatacagatgggggctggcggcgccggtgcggcggtggcacatgcgttgctgtccgaagg

SEQ ID NO: 229164 - DNA, 213 bp, Homo Sapiens
  misc_feature (133)..(163): n is a, c, g, or t
ctgaccaacatcgacggaggcatcagaggacactcacagcagccgccagcttgcgagttagaaccgaagtttcttggactgagtgagttccttggaaggatgcttagtgcttattttcaaaactccttgtatnnnnnnnnnnnnnnnnnnnnnnnnnnnnnnnagtcagctagtcattccatccatcaaaccccacccttcgttagcaagatg

SEQ ID NO: 229165 - DNA, 540 bp, Homo Sapiens
  misc_feature (114)..(126): n is a, c, g, or t
  misc_feature (150)..(150): n is a, c, g, or t
  misc_feature (155)..(155): n is a, c, g, or t
  misc_feature (203)..(235): n is a, c, g, or t
  misc_feature (287)..(335): n is a, c, g, or t
  misc_feature (381)..(397): n is a, c, g, or t
  misc_feature (402)..(410): n is a, c, g, or t
ggggtatatgaataatggcatgtatgtgtttgtatatataattttataagtttcacgcataaattaatacatgcctgtgtgcatacatatgtatgggatataattttccttccnnnnnnnnnnnnncgcgcggcgcgcccccgcggcccnccccnttgttggaccgggggaaaaaaaacttccccccccaaggggtttttgtnnnnnnnnnnnnnnnnnnnnnnnnnnnnnnnnncgcaccccttttttataaaaacccctccttgaaagcccccctttgtgggggnnnnnnnnnnnnnnnnnnnnnnnnnnnnnnnnnnnnnnnnnnnnnnnnntattttgttcgcgcgcgccaaaataaaaaaatatttttccccctcnnnnnnnnnnnnnnnnncttgnnnnnnnnngcgggggtgggtaataatagaacaaacgctctttcctcgcgcggggggagagagtagagaaatttgtagtggggcggcgcggggtggcgtgccgcgccgccagccgggacgagaaaagaagagaagagtt

SEQ ID NO: 229166 - DNA, 1136 bp, Homo Sapiens; identical to SEQ ID NO: 171112
  misc_feature (927)..(940): n is a, c, g, or t

SEQ ID NO: 229167 - DNA, 296 bp, Homo Sapiens
  misc_feature (133)..(141): n is a, c, g, or t
  misc_feature (201)..(243): n is a, c, g, or t
cccgttggcgagcactgtactgttctcagtctcacacatggatatacacacacgacacgttgtaacgctgtcgctctgaatggtggcatgtttttgtttttcacttcaattctctgtagtttctcaaagttgnnnnnnnnnccctacaatgactgtatcatttaaatcagacaaaatatatctttcaaatactaaaactcnnnnnnnnnnnnnnnnnnnnnnnnnnnnnnnnnnnnnnnnnnnaaaacaacggtttggatcataacccccgggatgggagataccggttagtctca

SEQ ID NO: 229168 - DNA, 169 bp, Homo Sapiens
ttactatttatgaaattcattttttctaatacacctgtaatcgacttacttatacattgatgttcctatagcataaaatccacgcttaagaggagatcctttagatggcgcatattcgagttggcctgttttatgtttcgtgaatttatcaatgaccaacaatttattg

SEQ ID NO: 229169 - DNA, 139 bp, Homo Sapiens
ttatcagtgtgtcccccctcgactccttctacaaatccgccacaccacggaggattcggggatactccccagagggtccatccggccacgctccctccccccattacacctgatccccgtaaccaacccactgtctacc

SEQ ID NO: 229170 - DNA, 187 bp, Homo Sapiens
gccgtacgccgcccttccatggtgcagcgggtgtcagcacaggcgctggtcattctggcagcagggtcaggggggggcaggggcagcctactgtcagtccccctgtgggatgtctcgggcgcgtgggcgggtggccctgttccgggtgtccctcatgggtcggtggtatggcggcgcggggtgttgc

SEQ ID NO: 229171 - DNA, 158 bp, Homo Sapiens
caccggaacatggccacctcctactctccgcgagactatcccaacgagtgggactggactgtaggctccctcccccccctacctctccatgatatccagcgccttctgacaccctcttacaccattgatgtggatgcgctgaaacggggaacccctca

SEQ ID NO: 229172 - DNA, 148 bp, Homo Sapiens
  misc_feature (80)..(98): n is a, c, g, or t
cccattatgggacaccctggaactggggcaccctcctactctcccgagacatcccaacaggtggactggactgtaggctnnnnnnnnnnnnnnnnnnntctccatgatatccagcgccttctgacacccttttcaccattgatgtggc

SEQ ID NO: 229173 - DNA, 793 bp, Homo Sapiens
catggagccgccgctgccgggctaggcaggtcgtgccccgccgggccggcggcgatgtcgggctaccagcgccgcccgggcgccaccccgctgtcccgagcccggagcctcgccattcccgacgatgacagatttgaagatctggaagaggcaaatccattctcttttagagagtttctgaagaccaagaacctcggcctctcgaaagaggatccggccagcagaatttatgctaaggaagcctctaggcattccctgggacttgaccacaactccccaccctcccaaaccggcggggatgggctgaattatctccacccatttttcgaggatccgacctggggtcgcgacctcctggatgatgaggaggatgacgaattagggtttctgggatcctaagtgacaggaacatttagattttattgcctggatctgctttaaagacaattggtgtttacaccctcttgtcagcaaaacagctagttagggaaggacatatagttccaaggaggtaaagtcacttgattaccaatggtcttaaactatcgcctctgcaattcctttataccgggacaggaacaaaattggggggacatggtccggggaaccccccgcattgggggtggcatttgaattccacaaatttcgcctgaaaattatgggatggaccatttgcgaagggtcccttaccaatgacgaacccgactcgtaactgacgggccagaaacctcccccccctaacctggggccacagaagggggggaggccccagagaaccgcggaattgtgtcaa

SEQ ID NO: 229174 - DNA, 227 bp, Homo Sapiens
atgccggttatgtgtggacacataagcacatatgaacttagtcctatagtagaaagcagagaacagagaactcctccaatttatcttggtatcaatgtggttctataaaaaataccagatggtttaaacttaattatttcatggagggattaataaagggactaattttaaagatatgaggagtatatatatagaaaacacaatatacacgggagcttctctggggg

SEQ ID NO: 229175 - DNA, 376 bp, Homo Sapiens
  misc_feature (40)..(40): n is a, c, g, or t
  misc_feature (122)..(122): n is a, c, g, or t
  misc_feature (147)..(147): n is a, c, g, or t
  misc_feature (200)..(200): n is a, c, g, or t
  misc_feature (245)..(245): n is a, c, g, or t
  misc_feature (263)..(263): n is a, c, g, or t
  misc_feature (284)..(284): n is a, c, g, or t
  misc_feature (307)..(307): n is a, c, g, or t
  misc_feature (317)..(317): n is a, c, g, or t
  misc_feature (349)..(349): n is a, c, g, or t
atgatgagagcatcaagtacccactgaaaactggtgcagnacaataaatgacgactgtgacttctgtgaccgtggggatcgttcattgccatcctcgcgatcatcacgggggaattctaccnggatctattacctgaagaagtcgcngtcgacgattcaggaacccctacggtgggcagcacttcttattaaggcaagtnggggcttgctttccctcttttgggcttgttgccattcaggcccangttcttttcacaggacanttgccaaaggtgttccattangggcggccttgcggttccttcantttctttgangtgtcttgcaaaccctggattttcaagcccanattcaacttgcttttgaagggcttaac

SEQ ID NO: 229176 - DNA, 365 bp, Homo Sapiens
cgcttggggctttcgaggtgccatgggaaccagaactgcatttgaaggccaaagcaggtgtggcctctgattttgggaaagaaactgcattctttgaggctcgtggccttaccaaaataactttctcccctctccctcatgccttccgttgccttcaggcctttctactacagacaggagacggaaagcaccaagacctcaagtacatctcaccagagacgatggcggccctattgacgggcaagttcagcaacatcgaggataagattgtgattgtagactgccgatacccctatgaatatgaaggcgggcacatcaagactgcggcgaacttgcccctggaacgcaactcgaaagcccaagcg

SEQ ID NO: 229177 - DNA, 239 bp, Homo Sapiens
cacctggcggctctaattggaaagcctaccgcccgcgctctcatggacctcctgcagctcacaagggaggagggtgctgagggcctgccatgggctctctctgtcactatgtcctacttagagatctaccaggaaaaggtgaggctcttttctgatcgaggaatggaagagacaaagggttaaatcagacttagttgtagaacccgtaagacataaccgcccgcggttatgtcttacgg

SEQ ID NO: 229178 - DNA, 438 bp, Homo Sapiens
  misc_feature (92)..(108): n is a, c, g, or t
  misc_feature (121)..(232): n is a, c, g, or t
aagagtggagctgatcaggcctatattgcagtgagagctccagccgtgaggactacatcaggcagttccttaatgctggcaagcacgtgacnnnnnnnnnnnnnnnnngagatggagtctnnnnnnnnnnnnnnnnnnnnnnnnnnnnnnnnnnnnnnnnnnnnnnnnnnnnnnnnnnnnnnnnnnnnnnnnnnnnnnnnnnnnnnnnnnnnnnnnnnnnnnnnnnnnnnnngcatatggcaccatgccgggctaatatttgtaatttttgcacagatggggtttagccatgttgcccgcctcggtctctcaaagtggtagaattacaagcatgagcaagcatgaccagagaactgtgaccattttgaaagccatgatttatgggaatagcagttattagtcttagtgtaaataaacagaggccaccaaaataagaac

SEQ ID NO: 229179 - DNA, 115 bp, Homo Sapiens
cagatttcacccgcctggccgatcggcagatcgcggccttcgtcgtcgcggatggcgatttcggtgcccggaatcggcaagccgacggtgcccgagaacttgtcggtatcggttg

SEQ ID NO: 229180 - DNA, 1063 bp, Homo Sapiens
  misc_feature (140)..(279): n is a, c, g, or t
  misc_feature (362)..(362): n is a, c, g, or t
  misc_feature (897)..(897): n is a, c, g, or t
  misc_feature (932)..(932): n is a, c, g, or t
agggttcttcagtaccacaaggatgtgaagcatatgaactctgcaggagtcctggccacactgaggaattatgactactatgcaagccgagttccagaatctattaaaaatgcacttgttccttaaaggaaagtttcatnnnnnnnnnnnnnnnnnnnnnnnnnnnnnnnnnnnnnnnnnnnnnnnnnnnnnnnnnnnnnnnnnnnnnnnnnnnnnnnnnnnnnnnnnnnnnnnnnnnnnnnnnnnnnnnnnnnnnnnnnnnnnnnnnnnnnnnnnnnnttaaactgggggcaattcccttggtcccaggcgcccggggccgcccccagcctaaacatttgtgggggagagaggcagggccngggcgcccccccgccgtagccccaacccctcacccctgctgcacggccacaagcccctccgctgctcgccgcaacctcgcgccgacgcgctctctcccccttgtgtcgattcgtgtcgctctggagaggggaactacccccctccgctgcgggcaatgtagaaatctcgtcccccccggtgcgccgccagacaaaccagcggcctacaccgctcccacacacccccgccgtggcgcgcgccgccccttctcaacctctatccggccattaaaccgacacaatttgagagtgtggccccagacagggtgggcgacacgcacatcacattccgggcaaacgcacgccgccggcggtagacccaggcccgcgtgggatttgcccccggcaccccaggggtgcggggtcggccatcgatgcgcttactactaacggggcccgcactagccgcagtgcggcgtggggtgcggtgcccaccgccctgcctacgccgaggcaattgctcgttgcgaggtggccccacaataacgaccagcgntcgtcgaacacaactggagccggcagagcgggtanacgccaatgagatccacatctactccacgcgctgtggacaccacgtgggatgtactggggcttatggaacagacagtaggggcggcgcgcggcccctcgcctgccgattgtactgcccggtgctaagggta

SEQ ID NO: 229181 - DNA, 525 bp, Homo Sapiens
  misc_feature (464)..(478): n is a, c, g, or t
ctttggacgactctagagggtacaacttagaagacacttacttctcagctttagaataaaggaggcattctcagatgggtctctatagaccctagatttgctgaaaagcattaaatgggtagaaactaggtgctctagggaactgccaaatatatttcctaagacagaactgggatggagaattttttgcgttacagcctggagtaaattagaaggcaactcgaaagccccaagcggctttcgagttgcacagatgctgtattatatccgctcccgctgtactgcagccccgcgccagctggtggggaactgtaagcaatttgattgcttcccttctatttaaaaatagccacaaaataacaaaaaatactgaaaatatgaataaatattaccttttttgctgtaactttttaaaagttttgactttaaaaagtttacaaatcgtaattagaagcgctctctannnnnnnnnnnnnnnaattaaagacaaggcaactcgaaagccccaagcggggtaccgagctc

SEQ ID NO: 229182 - DNA, 538 bp, Homo Sapiens
ggctatcacattatcaatcatgaagaaattatgttgccaaagccttaagtgaatggagtactactctttccaaaatatgcaaaatggggtacacggtgagatgcccttcccattttctgtaacagttattttccaatattttaccaaaaataaacatatgtgagtaattttttagtacagtcattttattgactgaactcacaggaagtctttatctgaagctgggtcctaaaatcatgtgatattttattagactccaaacacaattttggataatgtgatagccggctatcacattatctcataaattgaaaaataaaccttaataggcttctaagctcaagcatcattaaatgatagatgcaagtggtaatgtgtacactgttgtatttcctttcccttcagaatttctcgatgtcagaatagatccaggatactcaagtgtacttgattcatccttgtagaatggatctagacaagtctgatgttgcacatacgaataagaatatgtgactaatagtgtgtaatttcatatgta

SEQ ID NO: 229183 - DNA, 857 bp, Homo Sapiens
  misc_feature (387)..(443): n is a, c, g, or t
  misc_feature (527)..(528): n is a, c, g, or t
  misc_feature (562)..(572): n is a, c, g, or t
  misc_feature (575)..(637): n is a, c, g, or t
ggggtccctgcccggactccgaacgccgaagaccaggggccggaagcgcgcgccgccactgccgcgccgtgtcagtcgggagggagggagcgagcaggcgaagccgcggaggacggggtgaagatggcggccttctccgcctcccaactgatatccaggctgaatctatcccactgatcttaggaggaggtgatgtacttatggctgcacaaacaggaagtggcaaaactggtgcttttagtattccagctatccatatactttatgatactctgaaagaccatcaggaacacatccactcaccatccttctctcacccattccttgtcgccctccctcggccctccaaaactctttcataactttcccttcgcgtctcgctttctnnnnnnnnnnnnnnnnnnnnnnnnnnnnnnnnnnnnnnnnnnnnnnnnnnnnnnnnnactgttgcttcgccccccttttccattaataccctccccgcaccacacgtctacccgattcgcgcacccgcatgcgaataaaannaatagcgcggctttgcccgcgccccctctttttnnnnnnnnnnnctnnnnnnnnnnnnnnnnnnnnnnnnnnnnnnnnnnnnnnnnnnnnnnnnnnnnnnnnnnnnnnncttttctcgccccgcacccccttacgctggctttttaatccccattccctacaacaccttcttttggcaatccgcatgcgctctatttttcgccctcatatctatgatacggatcccggctcaacccacggatccccattacaccccgcgagctgttacgttgttctttcttgtcccccttctcatcacccctcacgtgcagcatcccgccccttcctcg

SEQ ID NO: 229184 - DNA, 980 bp, Homo Sapiens; identical to SEQ ID NO: 174274
  misc_feature (331)..(390): n is a, c, g, or t
  misc_feature (393)..(440): n is a, c, g, or t

SEQ ID NO: 229185 - DNA, 263 bp, Homo Sapiens
  misc_feature (123)..(126): n is a, c, g, or t
  misc_feature (128)..(128): n is a, c, g, or t
  misc_feature (130)..(131): n is a, c, g, or t
  misc_feature (135)..(151): n is a, c, g, or t
tgagccaccgcgcccggccatatacttgattttctaagagcatatgtgggtttctctcaagtgcccacttctttccagattgggaaataatctgtcactaacttcattcaaatcctagtagcnnnnanannaaannnnnnnnnnnnnnnnncatgtcggccgcctgcggcctctagaattgcttataaaatggctggctcatggctctgtcacccagcacctctgacgccgccattttataagcactctgatttctaaaagtt

SEQ ID NO: 229186 - DNA, 574 bp, Homo Sapiens
  misc_feature (85)..(85): n is a, c, g, or t
  misc_feature (95)..(95): n is a, c, g, or t
  misc_feature (97)..(97): n is a, c, g, or t
  misc_feature (107)..(107): n is a, c, g, or t
  misc_feature (111)..(111): n is a, c, g, or t
  misc_feature (119)..(119): n is a, c, g, or t
  misc_feature (123)..(123): n is a, c, g, or t
  misc_feature (128)..(128): n is a, c, g, or t
  misc_feature (145)..(145): n is a, c, g, or t
  misc_feature (154)..(154): n is a, c, g, or t
  misc_feature (160)..(160): n is a, c, g, or t
  misc_feature (193)..(193): n is a, c, g, or t
  misc_feature (198)..(198): n is a, c, g, or t
  misc_feature (201)..(201): n is a, c, g, or t
  misc_feature (209)..(209): n is a, c, g, or t
  misc_feature (216)..(216): n is a, c, g, or t
  misc_feature (218)..(218): n is a, c, g, or t
  misc_feature (230)..(230): n is a, c, g, or t
  misc_feature (238)..(238): n is a, c, g, or t
  misc_feature (247)..(247): n is a, c, g, or t
  misc_feature (263)..(263): n is a, c, g, or t
  misc_feature (269)..(270): n is a, c, g, or t
  misc_feature (317)..(317): n is a, c, g, or t
  misc_feature (330)..(330): n is a, c, g, or t
  misc_feature (332)..(334): n is a, c, g, or t
  misc_feature (337)..(338): n is a, c, g, or t
  misc_feature (348)..(348): n is a, c, g, or t
  misc_feature (372)..(372): n is a, c, g, or t
  misc_feature (403)..(403): n is a, c, g, or t
  misc_feature (412)..(412): n is a, c, g, or t
  misc_feature (468)..(468): n is a, c, g, or t
  misc_feature (474)..(474): n is a, c, g, or t
  misc_feature (481)..(481): n is a, c, g, or t
  misc_feature (518)..(518): n is a, c, g, or t
ttttctttttttaatttaaacttttgttcagttgagatgattgtgaactaggtatctttcattctgactctagtttaacattaantttgaccccnangagttacgtnaaanccaaaccnatanctaanaatggggaaaaggaccnttcctggcncttggnaccaattaaaaggtttcctccaatggaaaaccnggcgnaanggaagttnaggaagnanggccagggaaantggaaganctaccggtnataatggaaccaccanaacggnnggtttaggccaccaagaacccccaaattggaccatgggccccaaaangaataaaataacnannnggnnaaccttaggngtggctttccaaggttaagacacnccaaaacccacccagaagttaccaaaaggcnacaggtggntccaaataccaggtaacctggcaaccaaagtttggtaaccctaagggaggcacacnggggantcccaanatagcccaggtgtgtaggtaaggctaccctacaccanctaggtttgtgtaaagtacactctgaattcaccacaatgatgaaatttgcctaatg

SEQ ID NO: 229187 - DNA, 1058 bp, Homo Sapiens
gggtaggcatctgctacggaagcatgaaccggcagggcccagaaagcaggctcggccgcaacagcgcctcctggtgcgtggagtggttcaacaccaagatctctgcctggcacaataacgtggagaaaaccctgccctccaccaaggccacgcgggtgggcgtgcttctcaactgtgaccacggctttgtcatcttcttcgctgttgccgacaaggtccacctgatgtataagttcagggtggactttactgaggctttgtacccggctttctgggtattttctgctggtgccacactctccatctgctcccccaagtaggcaggctgtaggcacttgggctgactgcctgcagaagtcccaagaccctagtcgaaatacagcaggcagaactctccttggataattccccaatacgtcccgaagattgggaacatgcgaaggaaagctggacgaaagcgagaaaggatgtgcaccaacgagtccgagacacggtgaataaagggccgcggagaggcactcggacaggactatggcggcaaacggatgggggcatagtggcacccacgccagacaacgcaaagactccagttgtggagtatcgaacgaaacgcgccggagacgccacgacgcccaaatgtcagcaaccaatggctatgcgcttattgcccgcacacgtacgcgagatagcaccacaccgagcacgggccacaggtgcagcgtggcacccactagcgactccacagggcgagccaacgcgacagaaacgcgcagtatgtagtcgggccacctacgtgccagggcggatacggcataacgcacgcaatcgtgtatacacattgactgagttcgattgccggcaccgcgcaacgcacggagacatcaccgactgaatcacccgaactaaggggtagaggatatgggagcctgcagacagccagcggtatacacaagtccacggactactacgtacgaagcatgcgaaagtgtgatgcgatgtactgcgctagcgtcaagagcggttagcgcattacacgcatcgcaggagcataggctcgc

SEQ ID NO: 229188 - DNA, 765 bp, Homo Sapiens
ggacgcgtgggtccaggagatctccctggtgcccacagatgtaaaagaactctctaccaaggaaccctgggagaactctggagccccaggatgctggctcggatagctgggaaagctccctgagtcttcgagagatgacacagataacgattccatgctgggagaggaacgtgagtaatagttgggggcccagtttaagcttcagtgccagtagctcccctgagagacagcctggatccttttcctccccggatcttaaaggaggagcccaaaggaaacggagacaaggaggttgatggtctgttgacttcagagcccatggggtctcccgatctcctccaagacagattccgtatcggataaggaggacaaatcagccctggcagcatcaggaggcactgaggggccatgagcagtcccacaacagcttgtcctgagcctaaactgggcagcccctccggtgggcctcatcaatgggagaagacaagagatgagggccctgttgctgatcaagttaaagagatcgatcgtagagaccctaatgctgaggagttcagtcctacgaagcctctgctgtctgtgagataatccaacatgtacccaaagttctaccggggccccggaatcattcaattccctcaatcccggtgctgacaggcatggccagagtgaggttatacagccccacagtacattctgtacattagctcatgatccaaattgggaccagcgtgtgaaggcacctcgagatgtatccatatcctg

SEQ ID NO: 229189 - DNA, 1264 bp, Homo Sapiens
  misc_feature (405)..(469): n is a, c, g, or t
  misc_feature (649)..(649): n is a, c, g, or t
  misc_feature (929)..(989): n is a, c, g, or t
gggtgtccctaatagctcgccgtgatcgtatagtggttagtactctgcgttgtggccgcagcaacctcggttcgaatccgagtcacggcattgtgaggacaatggcacggcaagagcagctcctttggactattcctgggaggactctgatgcaggacgtctgttgctcccctgggtcacctcctccctgctcgctgacatctggggctttgaccccttcttttttaatctacttttgctcggatgcatttactaaacaacaagacagagagagaaaagtgtgagggaccaaatgcccacctatttcccttgcctcataggcttcaggggatggcatcacctccaaatcggggggtggtggtttccaagctggtgaatagagtggttcctaactgtattcggcannnnnnnnnnnnnnnnnnnnnnnnnnnnnnnnnnnnnnnnnnnnnnnnnnnnnnnnnnnnnnnnnttcgcaattggttgtaatcagaggtgtgcgggctcacgtatatcaccccgcctttacgatgtgtacggacgagtggctgcgccgggagcgccgtgcacgccctcacacgggcgcccctccccccctacgcggcagacccgcgccgcaaacgattggtgctgtcaagcaacccctgctgtncgagtctctcgttgaaaacctcacatttcctctgacccggtcatagtcgtgcgtagtgacaatatacacgcgtcggccgtcgcgccgaaccaacacgcaccagagatcgctgggagggccacggaatgttccagcaaccctctctttggtgacgcccctgtggtggggggtcggtcaccacggtcttgctctactcaccctccacgggactcctcccgcacccccgcgccccgaccgaaaatgggggttgtgatctgcgtaaaacacactgccggcccgnnnnnnnnnnnnnnnnnnnnnnnnnnnnnnnnnnnnnnnnnnnnnnnnnnnnnnnnnnnnnttaacctcccgagtggactcactccactttggattcccatccatctcaagcactctcctcccccctcccctctgcttacgtgtggtattgctgatgacacgcatgtctgcaggggcttctgccggcctcagtaagatagacaccccacggacccagcactcctaccgtcttctgccctataccctctagacccgcctctgatgccaccacccccatataccatctacgcgcgcgccccatccctctctctagcttattccacccccgctccccag

SEQ ID NO: 229190 - DNA, 799 bp, Homo Sapiens
  misc_feature (70)..(79): n is a, c, g, or t
  misc_feature (90)..(242): n is a, c, g, or t
  misc_feature (245)..(259): n is a, c, g, or t
cctggagaaccattaccaccgttaaccctcaatacagctctgctagtaagggattcgtctccccaaatgnnnnnnnnnngtaatctcagnnnnnnnnnnnnnnnnnnnnnnnnnnnnnnnnnnnnnnnnnnnnnnnnnnnnnnnnnnnnnnnnnnnnnnnnnnnnnnnnnnnnnnnnnnnnnnnnnnnnnnnnnnnnnnnnnnnnnnnnnnnnnnnnnnnnnnnnnnnnnnnnnnnnnnnnnggnnnnnnnnnnnnnnngttgacaggaatggccaaacccaagtggggcgttataaagtggggggtgctaggatgggaacccaagcgtgatttaaaacccttattgcaggcccttttcctctatattggtactgccctccttaacaaagggaacgattggattaacgcccctacttttggtggccagtctctggttatcaagtccggtaaatggcttttaacggtaaatttttccttttggggtttaaaaaacctctagtttcttaaactactagtttaagtggtctggctaaaactatgtgctctggaataaggctacaatttatttcacacttatctcatggaactcttcctggtatgtgatagtggtcatatggaaacaatggcttaccaggacagctaagtctatttggcacccatacagcgtttcataattgagcttttacaattcacagacagtccccgactttggcgggtcgatgtggggacttttgggggaaaagcagtatacattcagaatgccctctacttatgatgggggcaactccctggtagacc

SEQ ID NO: 229191 - DNA, 890 bp, Homo Sapiens
  misc_feature (409)..(448): n is a, c, g, or t
  misc_feature (450)..(451): n is a, c, g, or t
  misc_feature (453)..(456): n is a, c, g, or t
  misc_feature (464)..(464): n is a, c, g, or t
  misc_feature (762)..(762): n is a, c, g, or t
ggtgatttatgggtcagcatgaccattaattactgagtagaaattgactaaactttgatttcctttttttaaatcgtgttgcatttgattcctgagcaaattccctcaaagtgaactcttgttcttaaattttgaattttatggtgagattgtaaagatagaggcaattgaaacattgttccttatttatgaactgcttgaagtgaatacttaatttaagttcgcactttaataccaaacttaaaaccaaacactcatttaaaagtaggttaagtgatcatggatcattgttattagctttgtggctttgtgaaattctaaaggaatcaaataattcatcatgatttaaattttctagagattttgatttttttataatgtttctttcctgtagattgtgttcttgttnnnnnnnnnnnnnnnnnnnnnnnnnnnnnnnnnnnnnnnntnncnnnnatttaagncgttcattgtcctctgacctcacccagcaaatttggtgtcgaattcaccttggaatcgcatgaaatcccggggaaaagtgaattcttaaggggggttttcccccagccccacttttccggaaaacggccccccaaacgtatattccagccttccccccaaatagaattggccgttccgccttacttaccgcctaccacaagtaactactttaactggcacaaatgttgtccctcggccccttttacaatgcgccatcctagtgcggggcctgctgcgctcataatcctcttgtcgcanacgcccttctgccacaatctatacgtactgcgtgggacgctcatcggtcacgtgcccccctcacggacactggtgcaacgttctatcagagggaataagcgtcaacactcctccacatgaaccagata

SEQ ID NO: 229192 - DNA, 1001 bp, Homo Sapiens
  misc_feature (20)..(20): n is a, c, g, or t
  misc_feature (342)..(546): n is a, c, g, or t
tagtttggggttgtggcaanatacttgtttgtttgtttctttctttcacatgactgcccttgacatgatcgctgtgtgctttgcgtttttccatttaggagggtattctgggccttctgcccaggcagcagcctcatgggtgtggcttctgtggctttcatttgagtatctttggccccttttcacctactgcgaccacccacctcatcctggctcagcctggtgatggagaagtgctgatggtcttggtcccagccagggtcgtgggggcagccactctctccaaagcatagtcataggtgtcatgaaaaaataccaaatgtaagagaacctccaagtcannnnnnnnnnnnnnnnnnnnnnnnnnnnnnnnnnnnnnnnnnnnnnnnnnnnnnnnnnnnnnnnnnnnnnnnnnnnnnnnnnnnnnnnnnnnnnnnnnnnnnnnnnnnnnnnnnnnnnnnnnnnnnnnnnnnnnnnnnnnnnnnnnnnnnnnnnnnnnnnnnnnnnnnnnnnnnnnnnnnnnnnnnnnnnnnnnnnnnnnnnnnnaccccaagacgtggtacgctaccgaaccgccaccaacaccaaagccacgcccgccctaccacaaccaacgcccccagtcccccacacaaactgaccacgcatgagcgagcccccaccacacgaagcaaaacggaaaataccatacagcatatatcctacgacgaggacccgccacaacccaagccctctcgcgcgcaaaaggggcacccacgcgggaactacgagccaaccaacctagtaacagagacaaggacactcagctcaacagaaagagacctcacgccacacagggtcgagtccggggaaccaatctaggacgagacgaaacagacaacagccgacacagtgaaacgactacgcggcgcgctggaacgagcaccaacatattgcagcaccgccgaaccaaccgacaaactgacccaattcaagtccactacacacacagactcaactcc

SEQ ID NO: 229193 - DNA, 1168 bp, Homo Sapiens
  misc_feature (946)..(946): n is a, c, g, or t
  misc_feature (967)..(967): n is a, c, g, or t
gcgggcggcggccgggcggcccaggggctgccgcgggactcggggcgcagccgagtggctgcaggggtggagtgggccggacgagccgcggggcccgggtgccgcgggttcgaggccgggccccgcgcgaggaggccgcgccaccccgggggagctgcccggcagcgagtttgccccgctgccgaaagaaggcgggagccggcaggggccttcgaaaccccctggcaacccaggcccggagtccttggggagcggctgtttcctgggacgccctcccggacacccccgctgcagggttacggttctgggcccccggcagaaggctcctccgggtgacccccggcggggccctgcgagccgcgggagccgaccccggggcctcgagccgggaggaagggggcttccggaggcggagggccgggggccgagggagccgggcctctcggacgcggggcagggcagcgcccggtctggagactgactctgggcaccctcggctggcgggggtctcagccacttggccccgccgcctacggctggtttgcggctgtgtccctcccccgggcaccccttttcctcagatgagtaccggttccctaggcggtgccaatatgagagtgtcttctaactccagcgttatgctggcgcacgcctggctggtaccgcgccccgttttagggaggcctcccaattaatgggccccccggagtatttttggtatccctttgctgtgtgctgggaggatattcgtgttcacctcttccgtcgtatatgtggtacacgacgctattcccggtatgtcgtcttagaccagcgcgtgttgcggtgagctcgtcgctcatatatggatttatccttgcggcgcgccggcttgttcggggtcgtgactacgtgccttctccgcgcgtctcactaccctgacgccctcctcgatctgtgacgcgtntggcgtgagctcctgcggctngcacggaggcacgacttcgtcgagtactctgaactgtccgacctcgagcgagcggccgccggcaagtcgggctaccgcggcgttgtcttcgacctcgctcggccgcctcctgtatcttccctcgcttctcaccgcgtgcgttatcgtccttgaatcctatgtacatctgtgttccatcagtcttctcccgcctgttatgca

SEQ ID NO: 229194 - DNA, 428 bp, Homo Sapiens
  misc_feature (50)..(164): n is a, c, g, or t
  misc_feature (172)..(205): n is a, c, g, or t
  misc_feature (277)..(288): n is a, c, g, or t
  misc_feature (320)..(351): n is a, c, g, or t
agtcgacggtaccggacatatgcccgggaattcggccattacggccgggnnnnnnnnnnnnnnnnnnnnnnnnnnnnnnnnnnnnnnnnnnnnnnnnnnnnnnnnnnnnnnnnnnnnnnnnnnnnnnnnnnnnnnnnnnnnnnnnnnnnnnnnnnnnnnnnnnntctccagnnnnnnnnnnnnnnnnnnnnnnnnnnnnnnnnnntaagcgtaacttccctcaaagcaacaaccccccccttgcccatgcctccagctacaaaacaattcaattgcnnnnnnnnnnnnggtccaaaataaaacctcagctagctctgccnnnnnnnnnnnnnnnnnnnnnnnnnnnnnnnncacaccaactccactccttctaaaatacccaccaaaacgatttatcacacccccctacaacccctacaccaggcggg

SEQ ID NO: 229195 - DNA, 900 bp, Homo Sapiens
  misc_feature (59)..(59): n is a, c, g, or t
  misc_feature (354)..(419): n is a, c, g, or t
ggcatgagccaccgcgcccggcctgaactctcagttctaggcggcagggattcaggaantgggctttcagactccttctgcagtgtcacagtccagactttttttaaatgaaggacaccccgcagtggctcacagtgggtcccaggctagcaggagcgtgctggggagccggctctgtctttgttcgcagtgggtcccggtgctggcaggagtgtgctggtgagccggctctgtctttgtaaatccttcaggggtcctacggctgactccaccggacagcccgtcctgggccgtgttaagcacctttgtgtagaaatcgtatttttattaaaacatcaaatctgtgttcctgtnnnnnnnnnnnnnnnnnnnnnnnnnnnnnnnnnnnnnnnnnnnnnnnnnnnnnnnnnnnnnnnnnngagagagcatatacaaccgacaaaaacaacagaaaaagagagaacacacaaaaagcaagacgcaccgcacgaaaaccggtacactaaaagggagaccaacaacaaacacgcgacaccgaagagacgaagaagacccgcaggcgagcgaacgacacaacacccagagcgagcacgaggtagaggcaagtcaacgccgccgcggccgccacgcgaacacaggggtagcaagagaacaccccgagccaccagcagcaaccagagaaggcccaccagacagccggagcagagaaagcacgacgaagaggcagaaaaagggccatacaacccaggcgaactaaaagaccagcaatacagcagcgcagggaaaacacagcacacaccaagagaggccacccaccgccgaaacaaaaggtcaaaagcagaagagaccaacagacaagagctcgcaaacacagcaaaaccaaaagagaagaacccccaa

SEQ ID NO: 229196 - DNA, 551 bp, Homo Sapiens
gggagttgtgagagaatgtgtggaggagccagctggctttggacaggtcctgcggcacagtctgtggcttctgagggaaaagggcctcggggccgtcatccagctcctcccagtgggaaatatgagtgagcttctaagagcaagatcccaatcctcagaaagaggaaatgaccaagagtcttcccagccggttggatctgtgattgtccaggagcccactgaggaaaaacgtcaagaagaggaaccaccaactgataatcagggtattgcacctaggtggggagattgaaaaatcaagcaggggcctggctttttcaaggggccttggacattggaaagcctttttcaaacagggaaacctgggctcctgctttaagaataaaagggatggaagccctgggaaaatggggcccttgaatggtcaagggggaaagggggaaatttattggcccccacctttttgtggattcctccccccttaaaaagagggggcttggggaaaaaaacccaagggggtgggaaattgcggcccaacaaacccccaaccccgg

SEQ ID NO: 229197 - DNA, 528 bp, Homo Sapiens
cgtgagccactgtgcctggccgacaatttacttgtcttagtattatatgtagatatgtgattttttgagactgtatttttagagcttgaatttttgactaaagacttaactttataataatgaagatacctttagagaattttagttacatattgactttatctttagggctttgtatgtttcagatgccaacatattaaagtttcgtatatttacttggaaaaaaccgcgcggcgcggaaagaaagataaacatggtcggccgccttcggcccctcgaaaaagcttttcctaaaccattccttttgggcccccggggcccccattaagggtaagggaaccctggggcccataaacttgttttcccctaaggaaaattcccgggatcctggaactaaagggactttggggaattctctcccccacattaaaataaaccgcgccgcggggcgggcaacccggaagggggtttttcgtatacaagaatctcccacgaataggggaacttctcatgtgatgcgggctcact

SEQ ID NO: 229198 - DNA, 1268 bp, Homo Sapiens
cggtttacgcggcgttaagacttcgtagggttagcgaaacttgaggtttcttggtattgcgcgtttctcttccttgctgactctccgacatggccatggactcgtcgcttcaggcccgcctgtttcccggtctcgctatcaagatccaacgcagtaatggtttaattcacagtgccaatgtaaggactgtgaacttggcagaaatcctgctgttccagctggaactggcgcacgacaggagcgtgccacacacagggcacacagaccactcgactttcgactgatgtggcctgcaactaaaccacagacactccttacacgccttccttcccccttcacatccgcacagcgaccaatctcgccccttgccacgcgacaactgtcaaccacatccagcaaaccaccacaacggcagaatcccgacccaactccccaaaacaattccctcgccacccaaaaacaaggacaacgcatcatcaccgaaacgccccgcctccccaccctcctgccactgcatcacaacgtgctcctccacgaccgccttccgcaactccaccggcctccagcgcacgaacctgacccattacaacaagctcggcagccctgccccctgccacgcctttgccaacacaccctcccgccggccaaaaccccacagaccacttgccagcgcgattctcccattccctgttggcccctccctctaccgttaccctggtgcccgttttccctgtggctgccgctcctgcccaagccttgaggcccttcgcacacccgttggcccccacgttctcggaaccccggacatctcggagccatccaacgccgcgcacgcgacgccacggaacatggcgaccatctgagacgacccaaacgggaacaccccagaatcggccaacaaccagccccccctcgaaacgcgagacaaaggaacgcgccataacccacatagggcacacaaaaagagccccttagcctctgcgaacaaccccaatcgcaagcactaacactaagacgaaaactggaaaaacaacctccccatgggcagcacctaccgacacggaaccagccgggcaaacagctgggaacaacaaaccacaaaaatggcacaagggaacaaaccgacaacggacccagaaacgccaacagccaaagccacaatgcaacacgtgagccacccacaagaaaaacacctatccgtgcgcaaacgttggggacggaacacactggcaacggcaaagcgcaaagccccaccaagaggggaaagc

SEQ ID NO: 229199 - DNA, 1085 bp, Homo Sapiens
  misc_feature (108)..(148): n is a, c, g, or t
  misc_feature (165)..(187): n is a, c, g, or t
  misc_feature (356)..(366): n is a, c, g, or t
  misc_feature (831)..(831): n is a, c, g, or t
  misc_feature (986)..(986): n is a, c, g, or t
  misc_feature (1042)..(1042): n is a, c, g, or t
gttggcctaacattgaggccttaaaacctgaggctcctgtgcctgatggaattcttgtaacatacacttgtgtatcatataaagataccactctgtttctcttagggnnnnnnnnnnnnnnnnnnnnnnnnnnnnnnnnnnnnnnnnncccgcaagccacccctnnnnnnnnnnnnnnnnnnnnnnncccaaacaaaatgaaccaccaaaaaatagaacctttgggggcccccgcgcccccaaaaaattttctaaaccattttgtgggcgcgggggccccaacgggaaaggaaccgggttaatatttttccctaaagagaaccccggcacaaaccaaccgcgcgggaattcacccnnnnnnnnnnnccccccggggagaaccccaacgtgtttttgaacccaccccggaaggggttccctcaggccctttcgcgggggtttatctccaaggcgcgtcccagcggcggcgcctcaatatcccatatttaacccccccgcctcttggacacaattctctctcagaaagacaggggggtgagaacatccccctataaactattttcttttcgcccaaaacttgccaaacaataccccctccatagacgcgcgcccgaagaggacaaaaacaccctcctgaacaaccacccgcccgaggcctgtcacgctccacaccaccagcgatgtattgtggcgcacacctgcttggggggtaaaaattaacatactatttcttccccccctctgctgggttacacatacacacaagagagtggcggggacaaaagaaaatctctgtcgccccaaaacattatggtcgtcgcgcaccgtgtnttttataaaatcaccacctgaaatgggcgtcgggaaaaccacactccctcgcaccccagcgagacattatttgcactctctgacggttcacacccgaagacaagacatttccgttatcccccgccacggaagatagacacacatcccctctctancgagcgggaataaaataatgggggcacgcgacgaacattttttctcgccccccccnacgaagtacaaagcgcccctctcttccattctctttcgtacgc

SEQ ID NO: 229200 - DNA, 805 bp, Homo Sapiens
  misc_feature (13)..(13): n is a, c, g, or t
ctggaccaccaanggccaaggagatgggccttcaagcgccgcgtgttgtggagcatgccagcgagaagctgcagcttgtcatcagctacactggctccaactgcagccaccaagtccagcaggaactgtctgggacctttgctcatctgtgtcagcaagttgacgtcacccgggagaacctggagcgggaaattgccgccatgaacaagaaaattgaggttctatgactcacttcagagcaaagcaaagctgcatcaggaataaagccggttggttggacagtgagctcaacatgttcacacaccagtaccatgcagacccagacagatagtgggacacctgaggcgcgagtctgcgatggagaggggcggtgctgccagcacctaaagatgccgtgtgggctcccccagggagcacggtgtgagatcacattgaaacaatggaacactgaacaagacgaagggaaggcaaacacagaatcatcgaaaacacaaaaaaggagacacatacacaagaacaaacctagataaaaaccacacaccgaagaccagaatgaaagactggcagagagccaggacagcaaaagaaacgaaagggaaagaggaaagagacaggcctcaagggaaccaaggcacagggaaacccaaagaagacaacaagaaaaggaccgacaggagaaacaagccagcaacacaaatgagaaacgcaccgaagcacggaaacaaacaaacggccacgaagaaatacacccaaaagcaacgaaacacagagagacgaaccaagacgagagacacgaaagaacgga

SEQ ID NO: 229201 - DNA, 1268 bp, Homo Sapiens
gggggtcccgggaggcttttctccaagctgttgccaccagacccgccatgggaaccctggccacagaagcctcccggggagtgagccagagcctggaccgctgtgctgatgtgtctggggtggagggagggtggggagtgtgcaagggtgtgtgtgtgcccggggggtgttcatgggcaagcatgtgcgtgcctgtgtgtgtgcgtgcccctcccctgcagccgtcggtggtatctccctccagccccttcgccaccttctgagcattgtctgtccacgtgagactgcccatagacagcagagctccacgtggttttaaagggagacctttccctggacctggcggtcttgccgtatctcatggaccagggctaaatgacccgacttgcatcacctgccctttcgatgaacaacctccctgtccccccgccccagtgacctgcccccggcgggcgtcttcacggcgaacgccctgcctccctgacaattggatggcgtcactggcaaccccacacttactattccgtggactggcggacatacctttcgttggttaccccttgcggtgggtctaaccgaggtgcaagcactttgtgcacacgtctacgaattgtgccgccctccgacatctcgtctatggagaacgaccgctctaggggtgctacgcggcaataacgctcacctatatctggccacgcctaagttttatgtcagattaccgccacggcactatacgatctgagttgataggacaagttcctaactactccccacccaccgactatcgtggtgaacggacccccgcccgcccttcacatcaatacacccctatcacgacaccccgccccgtcttcttagttatacgcgatagcccttcgcccaatgcaacgcgcccaagcatcccgattgatctcttcccccgcatatctttattttgtgcccgaagtagacatcccccccatgtgtgaggggacatcctgctgcaccgtgcccccgctgcgtgcggtccgatgaccctctctctccttcgtagacccactcagcatttccaccgtatcgtctagcacgcgcaagacgttccaaggagtaagagaccatgcctccagaataactcgcgacagtttctcgtaatccccggttggtctctgagtactgcgcacctccgggctgcccgatagagcactcatctgagtcagagcgacactatcctccaggagcggaacaagcctttcttcccccgtcctccatcgcacagctgtctctcaata

SEQ ID NO: 229202 - DNA, 130 bp, Homo Sapiens
gtctgactctagatggatcccctagttttaattgggaacatacgatgatggagcaaccaaactacaatgatgatgtgcactggtgtgctcatatggtggtacctgatgctctgaattctgtaaatccatt

SEQ ID NO: 229203 - DNA, 186 bp, Homo Sapiens
  misc_feature (77)..(77): n is a, c, g, or t
ggaattgtgtggtgttatggtcccggcactcacaggccgccacttggcgcactctcagctccccccggctccatttnggtttctctttgcaccacttcggtgtttggcgaattcgagaaccttcgactctccagatggttctcgaaccttctagagagttgtagatctctcgaaaatcttcaattt

SEQ ID NO: 229204 - DNA, 198 bp, Homo Sapiens
cttagctcatctgctgagctctctggagcatcagtgcagccatgccgtggtgcagcagtgggcttccccacccactttatcaggtgtctacctgccatgcggatcactgttagtcctatgaggccctgggttaccacttaaagaactcccatgccttgcttggggttggccaaagccacaagggcacagtccattggc

SEQ ID NO: 229205 - DNA, 140 bp, Homo Sapiens
acagttgccttgtcagctgtgagtgacaaagctgatactgttgtgtgcagagctcggtacgatggcgcagggcgcttgcctacatgcagaagcaggtggtggccgaggtccagacccgggttcagccagtttgggtcctg

SEQ ID NO: 229206 - DNA, 114 bp, Homo Sapiens
tgcggcgatgaggggccactgtgggagtgagcattattgagatccggtgagggagcttgagacgaagacgggtctcgccgacggtgcctcaagacaagttcggctactgcagtg

SEQ ID NO: 229207 - DNA, 129 bp, Homo Sapiens
gaagtcctagaaaatagaaatgtaattttaaactattccaataaagctgatgggagaagactggtgctcccatcaggacaaacctcttcatcatgctgaacagatataacaatcgtgtggactctgatg

SEQ ID NO: 229208 - DNA, 244 bp, Homo Sapiens
acgtctagagggagatgtcgacaagtcaccgcattcgaggtgccacaggcagggactgtcaagtagtccaggatttctctgagaacgggatatgtggcctttcaggttgcttgtaatctttcatctggaaacggggtgagggtctaccccaggagtactggcagacggcccaacacaggggggggtatgggctgcagggcagggaaggcatggccgactagataaccgtgtgagctgggcggga

SEQ ID NO: 229209 - DNA, 158 bp, Homo Sapiens
gcttcctgctgcgcaccaccttcgcaagcacagtgaggccaaacctatgtgtgaatgtgtgccacgtgcttacgcttggctgatgcctgcgcatcatgcctcaccacacgacggcacctttttgcgctcggataaaggcacaagtccgtgcacattca

SEQ ID NO: 229210 - DNA, 558 bp, Homo Sapiens
acacgacgtcgtgtgaggagttcgaaggattccaatattgcctggggacaagccagcgagagattgtgcacgcgtcgttgatagatcggccctcggagctcatcttcgcgggtgatagttttggccgccccaacacgcagttttcaattcgtctgcagaatgtccctatcgggtctaataacatgccgcacttccgtcatctggagacagcgaacttcctctttgtagatggacacgtcaaggcttttaatgacggtcagcgcgataaatgcgagatgtggaatcgcgatgcatccgtctgtccgtaactcgaattccatctgttgcccgaatcggaattcggtcaaagctcattaataacggccagtgaaagcaagcctcaatctggggacgttagctgacgcctcgaaagtaactctcattattattaaccctggattcaagtagtacgtgcaccaggttgtacctcgtagaagagttggttgggggtcggaacgtccagagtttggcgcggccggttattgagtcgctgcttgacatgatcgatgtgctgctgag

SEQ ID NO: 229211 - DNA, 166 bp, Homo Sapiens
ccaagcgtacaagtcatctcaggaccctgtgctctacaaaactgcaccatcttatcatatttcatgctcccatgcatgaataaaattggttatgtccagtacagacgtcagcaaacgtgtcagtaggtgtgcatttatgatgtgtacctaagtcaacagagaacat

SEQ ID NO: 229212 - DNA, 415 bp, Homo Sapiens
  misc_feature (72)..(210): n is a, c, g, or t
  misc_feature (231)..(369): n is a, c, g, or t
caagggggcccacagacagaaggcctgctgggccaatgacacacacttgctatgtcagagagatgcagggannnnnnnnnnnnnnnnnnnnnnnnnnnnnnnnnnnnnnnnnnnnnnnnnnnnnnnnnnnnnnnnnnnnnnnnnnnnnnnnnnnnnnnnnnnnnnnnnnnnnnnnnnnnnnnnnnnnnnnnnnnnnnnnnnnnnnnnnnntaaaagggctgggggctgacnnnnnnnnnnnnnnnnnnnnnnnnnnnnnnnnnnnnnnnnnnnnnnnnnnnnnnnnnnnnnnnnnnnnnnnnnnnnnnnnnnnnnnnnnnnnnnnnnnnnnnnnnnnnnnnnnnnnnnnnnnnnnnnnnnnnnnnnnnnggcatgagacattgtgcccagcctctctgtctctttaaaatcatga

SEQ ID NO: 229213 - DNA, 132 bp, Homo Sapiens
tgtgtcgcgggcggacttcctcacccgcttctacaacagcctgcagctggcggcgctgtcggccaccctggcgacgctgatcgcggtgccggcggggctggccatcacccgctaccgctttcccggccaggg

SEQ ID NO: 229214 - DNA, 362 bp, Homo Sapiens
cattggagttatcagatctgggaaggaggatggagggcgagggactggggttgtggaatcctcagagacccttgtactgcgcggggggcgcctgtgaggaagagttccccgcttgagggatcggcctctcgcgattaggccgtgaggttagtcctggtagagcatgtctcgggagctcccggggtcgatgggcggagggctcgatagaatgtcgtgggcggagttgagggattgaatgggtggaagggtagtcgaggtgaaaggcacaggttgagtcggtccggggttgaagccttgttgggggctcagaagatggaattgtgaccccattcaagattacgcggttgcaatctcggggttgg

SEQ ID NO: 229215 - DNA, 115 bp, Homo Sapiens
  misc_feature (31)..(31): n is a, c, g, or t
  misc_feature (41)..(41): n is a, c, g, or t
gtaaggatctcaaggaatctcagggctccgnggaaatcttngccggctcagtaactatggttagatgcaacgaaattagagcatatgtcaagataaggtaattaacgtatttcct

SEQ ID NO: 229216 - DNA, 287 bp, Homo Sapiens
  misc_feature (144)..(160): n is a, c, g, or t
ctgttatactttctcacgaatctagctgcttcttctcatgctgggcactgcttacaaactataaacattttatgattgtctggttaacaagtacctcccttactaacatggtatcttcagacatcacttgcttttagtatttcnnnnnnnnnnnnnnnnnggccagtgtgtgcccatgggaagggatggaggaaaatggggaagaggatactgtggctttctacaattacagttctattcacttggcagtaagcagagagatggacagtgtaactttggggtagggt

SEQ ID NO: 229217 - DNA, 157 bp, Homo Sapiens
cattcattcaatcattcactgctgttcagcagcaaatgcaatgcagcctcacagcatgcatcaggcatgtctccatgtaggtgtcatgcgcatcggggtcagtcctgcagtcacacggtcggtggccattccagcacatcaggccgggggatcaccg

SEQ ID NO: 229218 - DNA, 175 bp, Homo Sapiens
taaaatagctttggaggtaaagggtgcatttcagcacagtgagcatggcctcctccagatgagtcgtgggtcacacacatgaagctgtcctcaatgctcttgatacgaagaaatgctcatattctccaaaacactctacagaagaatacagtgagataccgagcaaaatacgtaa

SEQ ID NO: 229219 - DNA, 462 bp, Homo Sapiens
  misc_feature (281)..(323): n is a, c, g, or t
cgcatagtataatactaggtactagaatctcatgatagtaaactagtagaggacttgtcttaaagagaatcattgtatatgtaaggagtagattaagtccaaatggaaaagaaatctggtgctgagagacattaacagcaataactgcagtttcttttcgacaccaatcttctgcaacatcatcctgttcaacattagttcaacataagtgcatatattcactccttgaaattatgcaaaacatacatgcaaaattgtcatgacagcaatttttcacatannnnnnnnnnnnnnnnnnnnnnnnnnnnnnnnnnnnnnnnnnncttgtgacagcaatcatcgtagcagtgcacacttataccaaaccatagcataatatagctagtctgtacacctaagggtatcatggtataagacctataggctcctacgattaaaagacctttcacagcatgtatgctt

SEQ ID NO: 229220 - DNA, 124 bp, Homo Sapiens
tactgaaaataacagaaaaagtaaagggtactacgtaaacatatcactattataaatccctgtccatgaatataagatgtctgttcaacggagctttatatatacttattcacatataccacag

SEQ ID NO: 229221 - DNA, 215 bp, Homo Sapiens
taaacacaaaacatctttggggacagacatggatgacaaatggtttactagtgtaaaatttaagaatagaggcagacaaaagtatggaaggccggttaattttcccctaccttactcctgcttccagtttcgtctacctataggtaatccgatagatccacaatagtcaacgttgtctactcacgtaattagcattcattaagcgtgctgtacta

SEQ ID NO: 229222 - DNA, 117 bp, Homo Sapiens
cccacttccattatcgggcaagagcctagaccagcactcccataaattatctccgacaaattgtcctgccgtgtcaaggtcccacgactacttttgagtggatgatcgactggagtt

SEQ ID NO: 229223 - DNA, 229 bp, Homo Sapiens
  misc_feature (43)..(160): n is a, c, g, or t
cctctcaagtagctggatttacaggctcccgccaccatacccnnnnnnnnnnnnnnnnnnnnnnnnnnnnnnnnnnnnnnnnnnnnnnnnnnnnnnnnnnnnnnnnnnnnnnnnnnnnnnnnnnnnnnnnnnnnnnnnnnnnnnnnnnnnnnnnnnnnnngcgcgagccactgcgcccagctggaacatgattcttaaaaactacagattcaattcagctttaggaatt

SEQ ID NO: 229224 - DNA, 420 bp, Homo Sapiens
  misc_feature (196)..(242): n is a, c, g, or t
cgtgacatctccgccttacgtttgttttttttaagatatgattaaacaataataaaaaatcatttacagcatcattaaaaacttctgatttaatcaatcaggttatagacctgggtctggagtaaagtagtacgttagatccaatcgtagacaaaataaactgcctagacaaaaaaccagaagtttttactgatgnnnnnnnnnnnnnnnnnnnnnnnnnnnnnnnnnnnnnnnnnnnnnnnagattctaacttctcatagcaaccttgacaaatcccggtctcaaacattacaaatgacggaaattgagaccatagacgctttgaacgttccttatgtaatactactacctactacttgggaccgtaaacctatattatatccctaaacactcgagagtgtcatccatgaggtaaggcg

SEQ ID NO: 229225 - DNA, 196 bp, Homo Sapiens
ttgcacatctccgccttacgggcgaggcggctcgttgtggccatacaaattattacggatactagtataagagatcaggttcgtcctttactgttgtgtctggctctcctttgttttgcggttcgttagataagtcattgttgggtggtcattagtaccggttgttgcatagagctatttcggcaggtggggatcc

SEQ ID NO: 229226 - DNA, 199 bp, Homo Sapiens
tctctacaggttatacctagtgtccaaagagctgtcctctttggactaacagttaaagtttccaaggagattaagagggtctagtggagcaattataaagttagaactaaagatactatcttaagacaaccacgctatcaccaggctcagtaggataagtggcctctacctaatcaatcttcccacatatattgctaca

SEQ ID NO: 229227 - DNA, 152 bp, Homo Sapiens
aacatctccgcttactaaaccatccactcggtagtagcgacggtcggtgtgtacaaagggcaggtcattaatcacacgcatagcttattacccgcgacttacatgtggaattcctcgtacatggaggaataattgcacatctcccgatcccc

SEQ ID NO: 229228 - DNA, 492 bp, Homo Sapiens
gcgtttatgtctattaataggagaacgaccatgggcgcgctatcgcacctgcgggtactggatttgtcgcgagtgctggctgtggcccttgggcccgggcagatactggctggacctcggcgctgaagtgatcaaggttgagcggcccggcaatggcgacgacacccgtgcctgggggccgcccttccttaaggatgcctatggtgagaacaccactagaggcggcgtattacctatcggccaatcgtaacaaggagtcggtgacgatcgacttcacacggccggaggatcagaaactggtgcgtgacttggcggcgaagtccgacattactgatcgagaacttcaaggttgggggctatgagcaggcctaacgggctgaactatgagtcgctcaaggagatcaatccggagtaagatctactgtactattaccgggtacggtcagactgggccctatgcgacaagggcgagctacgaattcatgatccagg

SEQ ID NO: 229229 - DNA, 267 bp, Homo Sapiens
tggagccggccctgttcatcatagcgcttccgccaatttcagcatgacgttgccgacgaacccgtcacacaccaccacatcgcagactccgtgcatgatgtcgcgggcttccacatttccgacaaacgcaaacatttgtcgcgagaacagggaataggcttccttcgtcagcgcattgcccttgccaggctcggtgccgacattgagcagcccgatgcgcggtttgtcgacagcgagcacatatttggcgtacagattgcccatcac

SEQ ID NO: 229230 - DNA, 217 bp, Homo Sapiens
agatggacgtagctagaactgactctccaggcatccattcttgcttcccccttccacccagtaccacgaatttgcaagcctgggatgcgttcacattgccctcaccctcaattccagtatggtcttatattatttttgaacatagatctgtattcatcttgtcgccatcaataattgattctttcaatgaatcggtcacatcatgcgggggatccat

SEQ ID NO: 229231 - DNA, 113 bp, Homo Sapiens
cgaacgcggccggaaacttgcgccatggcccgatgaagccaaggcctcaccaatgagcacaatccgacggtcaaggcctatgcggtcgtgcagttgcgtcaggataatgcgct

SEQ ID NO: 229232 - DNA, 201 bp, Homo Sapiens
  misc_feature (48)..(126): n is a, c, g, or t
tcgagctcgtaccccagcccctgagttctgatctatcgacgtggggtnnnnnnnnnnnnnnnnnnnnnnnnnnnnnnnnnnnnnnnnnnnnnnnnnnnnnnnnnnnnnnnnnnnnnnnnnnnnnnnagttggacaaggaaggagaggaagaggagcatagatttccaagcaacaggacagcttgcgtgatttgccgaggtg

SEQ ID NO: 229233 - DNA, 156 bp, Homo Sapiens
cgacactgtattaagcaggcagtgaatcacaagctccgggtggataaggcagctgctgcagcagctggtgactacaagcgccaatcagatgagaaggcgtgcggatgcagtgcaagaatgcctgtgtgtagtgtaatgaaatgtgaacagaacgtg

SEQ ID NO: 229234 - DNA, 325 bp, Homo Sapiens
atcttagacgaaagcctataatcactgcgcccgctcataaggggatggccatggattaggttatacgatagttgagtggtaggtgtgaatgattgaggcaggagtccgaggaggttagtcgtgactgtgaaaatgcttacggatcgaggctatagtctatttgtgtcgaggtgttgacttagcctttctcttctgttcctagtgtgtccaagtcaacctgtggggactgaactggactatcccctgggtgagagtagtcccgagggagatgttgttgtattagctttatggaagcagtggaggcagggccacagggtaccgagct

SEQ ID NO: 229235 - DNA, 586 bp, Homo Sapiens
tactgtttagaaggcaattacctaagtcggagttgtatttctatcagggatgcagttctagatatatactatcagttgaaaacagctgcaagtcattctctagtactagataaagcaccactatacacttacctgacatatgtagagtgaaatacagcagtatgtacggttgtgcctctcagaaattaagaataactaagggtctcaagttcccttatagtaggatacatacagagtcactgagttcccactagtatgctaaataggaaccgcacatgcataaccaagggtagtaactacccccaggaccacatgcaacccccaagtctgaggcacaactatatacttctgccagtgaatagctatacaagcatatataaaggctgtattcggctatcaagcgtacaacctactactttaatattcatactatgtaaatcacatacacaattcaaaatctaataagacaggtgaaacgtctccaaacactttttacataccattctccatacaatttatagtcagcatatttacataaggaagtgtcacacttacaaatgcaaccacaattttcaatcgtcgtcca

SEQ ID NO: 229236 - DNA, 657 bp, Homo Sapiens
aggatgttctaatactttctgctctgagacgaatgctatgggcggcagatgacttcttagaggatttgccttgtgagcaaataggtagatggtttggtggtgtggaagcttggaagcggtcaggtagttggctactttctgcttggatctattaaatacctggcagctctctgtctttttgtgggttgttgccctgtgattagttctgctttttaacccactccctggatgcatttttccctccttgcatttccctcttttcctggagttcatactagagaatctgcactatgtttttccctttttgtcttgagatgaaagttttaaaacctcaaataagattgtgttattcacctgcttaaaacctttcatgactttcagtgtcacgtagaacagaaaacacttttcttaccaaaggctagagagctctacgtgatctggctatttttaacgtttcatttcactcacccttttcctctataatcaaactactctgatctcaagggttagttcttgaaagatgatcatgttctttaatgactttaggttttggtgtgttattgtctatttctgggatgtttattctctgttccttacatgctggccttttgcatccttctaaggtctcagcttaatgtcacttcaagaagcttgaca

SEQ ID NO: 229237 - DNA, 625 bp, Homo Sapiens
accgagcggtggcaggtcatggcatctgcgatgtaacgacgacatatacaacgctcatcgtcacagccacatgcatgcgaaatcatcttcctcagagtaatctccatcataatcggaggctccgtcaactgactcacgatgccccgtaagtaatcggtgcccgcggagtatggcagtctcccacgtcatagacacaatcactgtgccgggtgatccatacatagaggtcgacactgtcaatagctactgcaaagtcttgggcatcctggctcgtcggttttacactggcacgatcggtctaggtcattcgtactctgtgaaaatatggtgatgatgatcacaaatgcagttccgttagaggagctgaaataatgtctttgagattatatgccagctggtagccatgacaattcatgggcgggtggaattgctttgatcagaagtcatctctttttgctgtctccatgccttcattatcagtctctccagattcttgtctccgtgtctctcctgtcctgtgatgttctgcatactatattggattacctgcggtatgactagctaaaatgtagtgtaactcagatagaatgcattcttctggtcctgcagcattgaaaccttttct

SEQ ID NO: 229238 - DNA, 247 bp, Homo Sapiens
ggagtcaacccagtaaggcggcactgaggagatctagggtgatgccattgggccactgaatgttcttctcatgcattaagcttctataaaaactcatttgcactggactgtcatctcattcttgttacaactgtataattactatgttcacatccaaccaaactggttagctagcgaaaaaccgtgcaaatctgagttgttacgtagtctattttgctccaacgtcatatcacatacattggtggat

SEQ ID NO: 229239 - DNA, 431 bp, Homo Sapiens
tagacctatatcctatcttctgagtctccataacgatacatattgatgtccatttgatagtgtcctatatgtcactatcccctttttgttatatgctcctcagattaaataatttataaataacctatcttcaagtatgcacgattttttctccctattttggtctgctgtgtaactcgtctagtgaattttacaattccaaaaatgaatatcgtgtccagaattagtatggaaatcactcttggaaactatttgtaatttctatctcattagtagatactctcatctttgctcatatatccttaacctcacatagttctttctctgtgtcagactttcactcttggagtataagagacacttgtggtaaagactgtgtctagtaggctccaatgccggtatagcttcagggacagtaagtagtgatcttg

SEQ ID NO: 229240 - DNA, 217 bp, Homo Sapiens
tagaacatgtagggactttttaagttgccaaatttatacaatgaagaatgttacttgttacatcaagtatctaagcgtgcatttcatgctcatcaaactctagtttaataacttagatacacgagccctattatcttagacatctacacctcagtgacttctaatatgaaagtgttaacatcccaaatgttgcctcacatctacggtgaactattaa

SEQ ID NO: 229241 - DNA, 554 bp, Homo Sapiens
tataatgtatattagatattaatagaatacaagagatcaaatgttgtctactccattgatatgcactgagtaaaatacagggacaaattatttacaaagaagtggggtggcataatggatggataggtggtccaccttgataactacgcatctacgcctattgaactgagtatgaaaaactcatctcagagcagaactagaatgctcgtgcgctcgagatagtgacatcatctcgagtaggactgcccgttactaagatatatctagatacttggaggaatcctctacaatcccatgtagtatgcactcgctcagcaagtcactaggacgatatttagattgcagtgaataaccatggactaatataactcattgattaattgcaacattaaatgcaatcagacaatgctgagtgtggtggcagatataaattttccaggtaacacacaagattaggcttctgcttttaggtaagatactatgcctggaggatgaaagatacacagaagtaaaagatgtggtccctgcaccaactccaactcaatcaatacatt

SEQ ID NO: 229242 - DNA, 391 bp, Homo Sapiens
  misc_feature (65)..(95): n is a, c, g, or t
  misc_feature (176)..(275): n is a, c, g, or t
cacttgatcttagccaaaaggccgagaatcgatggggttttggtcttcttaagagacagagtctnnnnnnnnnnnnnnnnnnnnnnnnnnnnnnntattcacaggcatgatcatatcacactgtggcctcaaactcctgggctcaagggatcctcctgccctttccaagtagctgnnnnnnnnnnnnnnnnnnnnnnnnnnnnnnnnnnnnnnnnnnnnnnnnnnnnnnnnnnnnnnnnnnnnnnnnnnnnnnnnnnnnnnnnnnnnnnnnnnnnttaagtaaataaataaatatacagccacgagcagattggttaaataaacccatttaatgccaaatatgtcataaaatggcactctctggggaccagtcttttttcctccaactcat

SEQ ID NO: 229243 - DNA, 120 bp, Homo Sapiens
tcctttctcatgagggatgcccagtatgctcctatcccagtctgtgtgatctcttcccagatactgcgtgttagcgcgtgtgtgacagagggtttcaagtatgatgtcacccccagccca

SEQ ID NO: 229244 - DNA, 261 bp, Homo Sapiens
  misc_feature (63)..(75): n is a, c, g, or t
  misc_feature (153)..(210): n is a, c, g, or t
tcagctcggtaccgtcaatccgtacagtttttaaatagtctcaaagaagctgtccagataacnnnnnnnnnnnnnggaattccagccatccaaaagtttggtttctatccgggtttctcctatgtctgatcataattggctttggattgtttnnnnnnnnnnnnnnnnnnnnnnnnnnnnnnnnnnnnnnnnnnnnnnnnnnnnnnnnnnacctcggtcactgattcccccccagggctccaaaaagcgcggagggagaac

SEQ ID NO: 229245 - DNA, 446 bp, Homo Sapiens
  misc_feature (11)..(11): n is a, c, g, or t
  misc_feature (60)..(310): n is a, c, g, or t
atatcgtacantctattcaactaaaccaacactaatcattctaaaatatatacttgatannnnnnnnnnnnnnnnnnnnnnnnnnnnnnnnnnnnnnnnnnnnnnnnnnnnnnnnnnnnnnnnnnnnnnnnnnnnnnnnnnnnnnnnnnnnnnnnnnnnnnnnnnnnnnnnnnnnnnnnnnnnnnnnnnnnnnnnnnnnnnnnnnnnnnnnnnnnnnnnnnnnnnnnnnnnnnnnnnnnnnnnnnnnnnnnnnnnnnnnnnnnnnnnnnnnnnnnnnnnnnnnnnnnnnnnnnnnnnnnnnnnnnnnnnntaaataaaatgtatccatactttccactagttagacttgaataccccataactaaacatggaaaatagcgtttcccatatctcaagtaacatacctttttcatcacttctgaatcccttttccatactatccccac

SEQ ID NO: 229246 - DNA, 598 bp, Homo Sapiens
  misc_feature (69)..(353): n is a, c, g, or t
  misc_feature (370)..(528): n is a, c, g, or t
acattattgggcaatggactaaatacatacgttcatttatttcaaaaatttatacataattactttagnnnnnnnnnnnnnnnnnnnnnnnnnnnnnnnnnnnnnnnnnnnnnnnnnnnnnnnnnnnnnnnnnnnnnnnnnnnnnnnnnnnnnnnnnnnnnnnnnnnnnnnnnnnnnnnnnnnnnnnnnnnnnnnnnnnnnnnnnnnnnnnnnnnnnnnnnnnnnnnnnnnnnnnnnnnnnnnnnnnnnnnnnnnnnnnnnnnnnnnnnnnnnnnnnnnnnnnnnnnnnnnnnnnnnnnnnnnnnnnnnnnnnnnnnnnnnnnnnnnnnnnnnnnnnnnnnnnnnnnnnnnnntacaataataaaaatannnnnnnnnnnnnnnnnnnnnnnnnnnnnnnnnnnnnnnnnnnnnnnnnnnnnnnnnnnnnnnnnnnnnnnnnnnnnnnnnnnnnnnnnnnnnnnnnnnnnnnnnnnnnnnnnnnnnnnnnnnnnnnnnnnnnnnnnnnnnnnnnnnnnnnnnnnnnnnggtccagctattgggaggctgggtggaggatgttgagccataggtgtggtgcatgactggacaggcgtgc

SEQ ID NO: 229247 - DNA, 573 bp, Homo Sapiens
  misc_feature (325)..(347): n is a, c, g, or t
  misc_feature (496)..(506): n is a, c, g, or t
tctagagcgatcccgtgataatccgtaccatgtaagaactctgcttgtaatgttaaagcaagaagtagatgttgtgtttcaagaaaatgaagtgatggtccttgcagttgaccatataagacgtctgcaactcattaatggaagaacaggtcagattgattatctgactgaagctcacgttagctgctgttgcttaagtccacatcttcagtacattgcatttggagatgaaaatggagccattgaggtattcagtgctagtcttcagaatctttctgtacagaattaaataaaactaattatatgtctggcattgtgcacttcnnnnnnnnnnnnnnnnnnnnnnngaaatggggtcttgctgtgtcacccacgctgagtacagtgacacgatcacagctgactgcagccttgaccttctgagctcaagtgattttcccacttaagcctcctgagtagctgggactaaaggtgtgcgtcaccatgcccgactaannnnnnnnnnnggtagagatggggtcccctgtgttgcccaggttgttctcaaactcctgggtttaagcgattgtccgg

SEQ ID NO: 229248 - DNA, 112 bp, Homo Sapiens
tactccgtacactgtcagctaacataataatgtaatttagatatgaaacacaatctatccttggcactcccttcaggctttaatccaattattcttgttcattctaaccgta

SEQ ID NO: 229249 - DNA, 242 bp, Homo Sapiens
agtcagcctggctaacagactgatggaactcttatgcctgccaataagcaaagtgttgaacacgttcacaaaactatttatactagagagcaggcttgaaaagagctatacagaatcatgttctggaactcagcaaaccatcaggagctcgtaagtgagctccacgaaagaacttcaagcaacagatgtcccgtcgatgatccatattacggatataattctatatgtcaacggaggagatg

SEQ ID NO: 229250 - DNA, 263 bp, Homo Sapiens
caggacgaacgcggacagcaggcataaaagcgagaagacagcatgaaagggacgggatggtcaggaggcagaggaggggaagaattctcaagaaccaggaaccacatgtgcacagctacagcaaacaggtggaggcatgaagggcattctgtacctggatcagtcccatcaccaccctcagcatcatcagcttcataaccatcatagccatcggcactaccagttccctcattactatcctcaccctcatctcccatccctgt

SEQ ID NO: 229251 - DNA, 192 bp, Homo Sapiens
  misc_feature (47)..(98): n is a, c, g, or t
cagtacatcatacacttggtttatttggagacagcttggctcggtcnnnnnnnnnnnnnnnnnnnnnnnnnnnnnnnnnnnnnnnnnnnnnnnnnnnngggggttcgggcaattctcaggcttcagcctccggagtagcggggataacgggcccatctcaataaaatttaaagaagtaagctgaatattccg

SEQ ID NO: 229252 - DNA, 101 bp, Homo Sapiens
cccagaaaccagtaatacccttatatccggattcactgggcggccgtttaaaaccaggaacccgctttacccggagaaacgggttatacaccggcagacgc

SEQ ID NO: 229253 - DNA, 554 bp, Homo Sapiens
  misc_feature (397)..(424): n is a, c, g, or t
taccgtcaactcctcttcatccctccctgcagtcttgcctggagctatgacgctccggtggtatagtttcctgcctctatgaatctagagctgactttgacttgtcttagctaacaggacgaaagaaatgttataccagttctgagcctaggccttaggaaagtttgcgggttactgccatcacagtgaaaaaaacccacttgggctagcctgctggtcccagaaggaggttgatggaccagagctgtcccagttggctcctcttagaacaatcctcagtggaaagctctggcccctggagtcagcctaggtatgaccctcagatttgtcatttgcctggcaaatggatgactctgcagttctcctacccttagtttgcccatttgtaaattgggannnnnnnnnnnnnnnnnnnnnnnnnnnnacagaagtgtaataataatactaatatccaacttgcaaatgttaggtattatacactggtcccagttttcccaaatcctcagcgttctgacatgtgaacattgcagcaaggctcctcttcctcaaatcat

SEQ ID NO: 229254 - DNA, 359 bp, Homo Sapiens
agctggccacggagcatgcctgtggcgcagtcaggtgacaggtcatcaccctgaacctccacgggctgtatttacagtcagacaggtattcagaaagtggtgtctcagaacatctggacttgggctaaaaatcatataaaaagacacaaggccccttccccaataacttctaattaggtagcacagaatccagtctacagcttacgtcaccaggtttagcacacatgcgtgtttttttccccccggtattttccacacccgttgagcaacttttctccaagggcacactgaggagcaactagaatgcacagaactggcagttctttatttcccacatggtcacgatgaaggaaacgata

SEQ ID NO: 229255 - DNA, 154 bp, Homo Sapiens
caagctttagcagcacggtatgtgaaatatttcatagccagtattcaatcatctaatatagatagataataagagaggatacagggtggcagtattagagtgctaagagcgattacattcaaaaagtgatcttgattttatattgtgaggtgga

SEQ ID NO: 229256 - DNA, 218 bp, Homo Sapiens
cagcacatgcgcccatggccacccatttttccaacatttcacatcaagcatcactgtcacatcacaatgcaaacacacatcaaattcaggtcaatttcaccaagcaacatgttttcccagcattcacacatcagagctcatacacttcagctttcattcatgcacatcaaacatttcatcggccaccatccatcaccattatattaccatccaccagc

SEQ ID NO: 229257 - DNA, 185 bp, Homo Sapiens
  misc_feature (54)..(73): n is a, c, g, or t
  misc_feature (115)..(125): n is a, c, g, or t
caggatctgcgttagatatataaaactggaaactcagtagaagtacgttatttnnnnnnnnnnnnnnnnnnnntgttaaaagcagttttactggggtagtaggtatatgtacaannnnnnnnnnnagtttgttatatacttgctacctctcgaaacacatctttttaagaaaacattgaagtaat

SEQ ID NO: 229258 - DNA, 159 bp, Homo Sapiens
cacgcacatacaccagaatgtctgagcctgcggtacctctcgtactgagcaggattcccctgtgcacgcaacacctcctcagtcgggtaaaaactaagctgtctcaagacggtctaaacccagctcacgtaccctattagtgggtgaacaaatccaacg

SEQ ID NO: 229259 - DNA, 187 bp, Homo Sapiens
gcatgtgaagcagaatcacagcgttggattgtcacccactaatagggaacgtgagctgggttaaaaccgtcgttgagacaggttaggtttaaccctactgttaatgtgtggtggccagtggtattcctgctcagtacaaaaggaaccgcagttccaaactttggtggtatgtgcttggttgatggtg

SEQ ID NO: 229260 - DNA, 131 bp, Homo Sapiens
ctgaacatgagggaaaaaattacggagtggcggtaaaagagggaagttggtaatgagcagttctcttaagcacgtaggtgggagggtggggattgcagcgtcatagctagaggaatggctttgcttgaatg

SEQ ID NO: 229261 - DNA, 631 bp, Homo Sapiens
  misc_feature (156)..(195): n is a, c, g, or t
  misc_feature (295)..(586): n is a, c, g, or t
gcggtgatctagaggatcccgaggagatagcaggataagcaggacacatattagggctgcaggctgagaaggaacctaagttggactctctgaaaagctggggtaccagcctggctctgtctcttaccagtaactgggccagtcctcacaatttcnnnnnnnnnnnnnnnnnnnnnnnnnnnnnnnnnnnnnnnnccttgaatgattgctataaggagttcaagggcctggcacttcataggaactcagagaatgctagcttttgatattatgttcctatatgatccaaaacacnnnnnnnnnnnnnnnnnnnnnnnnnnnnnnnnnnnnnnnnnnnnnnnnnnnnnnnnnnnnnnnnnnnnnnnnnnnnnnnnnnnnnnnnnnnnnnnnnnnnnnnnnnnnnnnnnnnnnnnnnnnnnnnnnnnnnnnnnnnnnnnnnnnnnnnnnnnnnnnnnnnnnnnnnnnnnnnnnnnnnnnnnnnnnnnnnnnnnnnnnnnnnnnnnnnnnnnnnnnnnnnnnnnnnnnnnnnnnnnnnnnnnnnnnnnnnnnnnnnnnnnnnnnnnnnnnnnnnnnnnnnnnnnnnnnntgagccactgcacctggccttttaaattttaaatgttgagatggg

SEQ ID NO: 229262 - DNA, 739 bp, Homo Sapiens
  misc_feature (562)..(652): n is a, c, g, or t
ttcagaggatcctcgagatagcaggacacagtatggcaggtttatttatttacaccaatgaatcaaagataaaggaaggaaaaaaggcgttgtgaagaatttgggcgtatggcagaatgtttccatctctggtaatgttgtcaaaacaccaatgatgatgcaaagcaaatgcctgtcagacaaacccaaaggaagcttatttacacgtttgggatgagcagggttgtaaatgatggtttaattgggaaaatctgcttagtcatttgaacaagcagacctaaaaacagacataacatagtgctgcaaggaaaacaaatgtaagagaatttctctttcattgctttactctaatgcatttcctgcttatctcctcgaggagataagcaggaacatatagtgagagatgggtcagtttaacaggaagacagatgattccatgttctttcagtgaaagaatagttagaaattttctttaaaaaatatttttataacaatagaagtaaatgtactgctacataaaatagcatagatatatcttataaacataacagttataaaattnnnnnnnnnnnnnnnnnnnnnnnnnnnnnnnnnnnnnnnnnnnnnnnnnnnnnnnnnnnnnnnnnnnnnnnnnnnnnnnnnnnnnnnnnnntagggattgagaagggagaacatgggggcaatctaagtggtgttttattcatcatctgagtggtgataaatagatttgtctatgggg

SEQ ID NO: 229263 - DNA, 395 bp, Homo Sapiens
gtgactatggtgttatgcagaggagctcagctgacgccctgtgaaacctcaggtctgaataagagttctctaggaacctggaatgagtacctgtctacctggagatgatggtctggggtgccaccctgttagaaacctacttacaccggtgaactccttaccctggggtaggtggttgagatgatcgaagttgaagctgggttgggtgagaagttgcctaactccctgcccgttcgtcctcctgcctgctggaaagagctaaagcagatgtcgagcaggggctggatggggtgtgctactcacattttgcaatctgatctttagagttccccgccttatgcgtacaggaggtctgatatcactcagctaatacgagtgtctctctctagtatagg

SEQ ID NO: 229264 - DNA, 139 bp, Homo Sapiens
tggcggtcataagcggatgaaactcccccaccaacacaagccttttccttttccagaacgcctaatctactccacctccaccacaaccgaaagtatcatctcagggaaacttaattcctgcccgtcctgcttatctcct

SEQ ID NO: 229265 - DNA, 150 bp, Homo Sapiens
gtaggtggtccgaggagatagcaggagtacattcaaatattaaacaactggtatacaggaaaggggacagacactggccgtgagcagtggcgagaaatatgctcagcttcaagctgatctgtagctcccgcatctgtcctgcttattcct

SEQ ID NO: 229266 - DNA, 105 bp, Homo Sapiens
cgcggtccgggagatagcaggagctcattgaacctgggaggaggaggtgcaggagcaagatcaagccacgcacgtagccgtgtcatagagtgagattctgtcttt

SEQ ID NO: 229267 - DNA, 448 bp, Homo Sapiens
tggtcctttatgaaataaaaccaattagtatgacactttaaaaacctataatagcataatcgtacaaggccagaagaaggacaaatccctccttggtggtctaaaaaaatattggaaaccaggtgtggcccagtaagagtatatgcgtaggtgaatattctggagttaaagttggcagtggctgggcggtggcggatcgttaaaatagtattataaaatggattaaaagcctcataaaggctcatcccaaagggttacatcattatgctattttggggctcaatgggtttgactttggaataccttttacgcattatatggggggctgggtcccaagttggattaattgtagctaaatggattggtcagagtagaaaatcagagatttggaaaatgggacataaattggtggggttagaggcattttctggtaacacccatggtcatt

SEQ ID NO: 229268 - DNA, 504 bp, Homo Sapiens
  misc_feature (57)..(94): n is a, c, g, or t
  misc_feature (194)..(248): n is a, c, g, or t
gtgtgttctgaggatccagagatagcaggaggttatgatttacagacatgtttggtnnnnnnnnnnnnnnnnnnnnnnnnnnnnnnnnnnnnnnggacagatggtacgtgctgaggtgaaatgaaacaagaggcagtctggttgatgaattcttgctctacttaggaacttgtccaggatacaaaatagacggnnnnnnnnnnnnnnnnnnnnnnnnnnnnnnnnnnnnnnnnnnnnnnnnnnnnnnnaaccaggacaaagaaacacaggataccccacagcacaatagtgggtgtgtgccagggcagatgaagatatccaggccagatgatgtgattgaagccctgtcagatgagcgctatatctgtatgacgtgagttcaaaaggcaaagaggagtgtccgcccataagagacagtatggggataattacaccatcctgcaatatagatggtcaattcacccagccttcctgggcacagatacctacaggtgctgcttatct

SEQ ID NO: 229269 - DNA, 176 bp, Homo Sapiens
tgcctatcaacttcctgattgtagtctgcctgtcctacctattttgaccacgggatacggggaatcagtgttcgattcctggtcgagggagcctgagaaactggctaccactatcaaggaatgcagcatgcgcgcaaattacccactcccgccacggggggaagttgctatggtgg

SEQ ID NO: 229270 - DNA, 228 bp, Homo Sapiens
tctagaggatactggcgccctagcacttccggacgggctgcgcacaacgagggcacacgggcagtggacagaagcgatccatttcctcgagcgtcaggctcccctggagccgatcgaaccgtcctgccctgctcgcccgcgccgcgcgcgaccatgtccgcgagcagggtcccagcgggcgcaccgggcatatctcggccgatggcggcaggaattgctagggcggcc

SEQ ID NO: 229271 - DNA, 424 bp, Homo Sapiens
gagatgcctatcccttattctataaaaaataagtgagtgtgtcaagaaaccaactctatgaggggggggttaaaaatcacccttacctatgtgttctatctaattatgttggtagtaagtatggtgataatggacagtcaagttaaattttatatataaagaatactgattgatagagattgaagtcatgccagcacgtgtatgtaaaaatgaaggtggcaccggggtgagaccgaaagagaaatagtctactcaggttgtaaaaatatttgattctattctcttcctactgacctccttgccgtcttggtctgaaccatagcagaaggagtcctgcatctctcatgactggcgggctgaggtgatggaatgatcatacaacatacatctcagtctctgttgcatgaaatagcggctgtagtgg

SEQ ID NO: 229272 - DNA, 322 bp, Homo Sapiens
ctagcaggatctcaatacagcagctatccaaggcaatagagatgagaacctcaccgattctaagaatgagggccagcacggcagcacaccatatcatgacagatggtgaagatgcggattacacatcacttgacaaagcatcagattccacacggcataactcaacatcagagtcctctcataagggttatcattacaaacattaggaatctaggaatctgccttgaacatggactcactatcccgaatatcactcgggcgatacacaaagaatactgaccagcgtaacttggtgactcctgtgtccagcgattcctgggga

SEQ ID NO: 229273 - DNA, 132 bp, Homo Sapiens
  misc_feature (71)..(90): n is a, c, g, or t
gttcatggttacattttgttattatatccctattgcctcttttaatctacaagagtccctgtgcctttaannnnnnnnnnnnnnnnnnnnctagaaaaaaattcccccccggtggcatacccaaaagggagg

SEQ ID NO: 229274 - DNA, 291 bp, Homo Sapiens
  misc_feature (86)..(104): n is a, c, g, or t
ccattagaaagccccattagtggaataggaaacagtgtgtgactcctggatggtcaattaaatagtttcctcatcagaaaaattannnnnnnnnnnnnnnnnnnctattggggtggatctagatgccattgatatcatctcaaacatgcagggcatcaacaacttcatttaatcagctcgcacaatcgcaccaataaatcaagcacatgctcaaaccagcacattagaccaattcatcatccaactctcaacacattttcacagcaccagccccagcaagcaccattcaat

SEQ ID NO: 229275 - DNA, 326 bp, Homo Sapiens
taagataaacatatgctatcattttttcttctgtgaacctgaaagatatcatttgggtcatagctctgctctgttcagattatgttaactctgagtctgtccaaatgagtatacacttccattctccacatttaaacgcaatcatattttcaatttatactatagtatttcttactattatgaccaagaattttatcggcattaattatttcacgtgtcgcttagttgctccaaatcactgtaatcatcaaaatgatgcatattgtcacactactattaactaggcttcagtatatcagtgtacatttcattgtgttaaatgtata

SEQ ID NO: 229276 - DNA, 190 bp, Homo Sapiens
  misc_feature (18)..(18): n is a, c, g, or t
aaggtctgatgcaactgnaacggtctgtcgtcctgaacgcgcaggaattctccaaccgtgccggcgctttcctgcacagcgacacttccgatactcacatcaggatcaagggacggctcgacaaccgcgacggtacgctggccagcaacgccagccacattgtcgttgaagggcagtttgataaccgtcg

SEQ ID NO: 229277 - DNA, 517 bp, Homo Sapiens
  misc_feature (152)..(442): n is a, c, g, or t
cattatactctgctcagtgatcttaaatgtactcagttacgtagaaaaataactctgtgtaggtatgtcttacccatccccacctccaacgaaaataaacaaaaacagtccttcatggcgtctctagagtgtggctcaagagcatagctggnnnnnnnnnnnnnnnnnnnnnnnnnnnnnnnnnnnnnnnnnnnnnnnnnnnnnnnnnnnnnnnnnnnnnnnnnnnnnnnnnnnnnnnnnnnnnnnnnnnnnnnnnnnnnnnnnnnnnnnnnnnnnnnnnnnnnnnnnnnnnnnnnnnnnnnnnnnnnnnnnnnnnnnnnnnnnnnnnnnnnnnnnnnnnnnnnnnnnnnnnnnnnnnnnnnnnnnnnnnnnnnnnnnnnnnnnnnnnnnnnnnnnnnnnnnnnnnnnnnnnnnnnnnnnnnnnnnnnnnnnnnnnnnnnnnttctctatgtatccacctatcttacttgagacactcctatgtgtttttcgaaattgagtgtctaatcccaaacct

SEQ ID NO: 229278 - DNA, 351 bp, Homo Sapiens
ctaacacggattcttggtcgattatcacggtctggtgcacgtcacgctagatggagatatccgtcgtaattttggtccagtcgtcacgttgccattcgtagacattcattcattcctattgttatatattacatgcccgaactgccacttgcctcttgtacccaaattccaatggactttcttaccctatcgctggcttgccccatccgtggttttccccagctccgtgttatcggttgtgttttcatcctggacttcagcccgtctccgttgtctccttggggagtagcgggcactactcccttttcgctgtcatagctttttcctgtttaaaaatggggattcccggtg

SEQ ID NO: 229279 - DNA, 556 bp, Homo Sapiens
  misc_feature (126)..(413): n is a, c, g, or t
ccgacttcttacagatgtccggttggtaggaggtacagtgaaaacttataaacaaataaataacaaaattctaggatatatctatttccaacaaaattggaatctttatcttaaatagaccttgannnnnnnnnnnnnnnnnnnnnnnnnnnnnnnnnnnnnnnnnnnnnnnnnnnnnnnnnnnnnnnnnnnnnnnnnnnnnnnnnnnnnnnnnnnnnnnnnnnnnnnnnnnnnnnnnnnnnnnnnnnnnnnnnnnnnnnnnnnnnnnnnnnnnnnnnnnnnnnnnnnnnnnnnnnnnnnnnnnnnnnnnnnnnnnnnnnnnnnnnnnnnnnnnnnnnnnnnnnnnnnnnnnnnnnnnnnnnnnnnnnnnnnnnnnnnnnnnnnnnnnnnnnnnnnnnnnnnnnnnnnnnnnnacaaaacaaataccatatttttgaaggataaaacaaataccatatttttgccacacagaaaaaaatgatggacattttgtcatataaaaccagacagtaataaccatctgtgggactgtacccaagacccaacaccccttctg

SEQ ID NO: 229280 - DNA, 487 bp, Homo Sapiens
  misc_feature (160)..(408): n is a, c, g, or t
acagcggaagggcccggctggatggaactgtccatcttcaccaccaccatcagccgggatttgtaggtgagaggatcttctgccatctcttcctggatgctcacaaaagctcggctccaggaagacagcacacgacccctgcccgatggaatcttactcnnnnnnnnnnnnnnnnnnnnnnnnnnnnnnnnnnnnnnnnnnnnnnnnnnnnnnnnnnnnnnnnnnnnnnnnnnnnnnnnnnnnnnnnnnnnnnnnnnnnnnnnnnnnnnnnnnnnnnnnnnnnnnnnnnnnnnnnnnnnnnnnnnnnnnnnnnnnnnnnnnnnnnnnnnnnnnnnnnnnnnnnnnnnnnnnnnnnnnnnnnnnnnnnnnnnnnnnnnnnnnnnnnnnnnnnnnnnnnnnnnnnnnnnnatgagccaccacggtcggccagaaacacctttaaaaagacaatactacatcatgatcaggaagcttttcaacatcgtaa

SEQ ID NO: 229281 - DNA, 143 bp, Homo Sapiens
cctttacagcttaaagttcatatagtaccagacaatgctgcatctgagaatttccatatgcatgaagcctattccacatgctgtaccagagtgcgggaggcatgccaggaggaatgcctgggggatttgctggtggaagggag

SEQ ID NO: 229282 - DNA, 371 bp, Homo Sapiens
  misc_feature (161)..(210): n is a, c, g, or t
ccttaccattgtcatcaatactacaaccattctccctgacaccccgacttcccttgtctggttttagttgtttcctttgaggagcactcatcaccaacattaactatatacctcacgatcgtattgtgtctattgtttgctgtccgttcccccctccctcnnnnnnnnnnnnnnnnnnnnnnnnnnnnnnnnnnnnnnnnnnnnnnnnnntaaaactatctggtgaataaatgaaataaatgaaagggggaataaatcctgggtaagcaaaaacgacactgctccttacagaaagcttctcagagaaccctgcataaccaacccagtttccatatgtacaggaaggttgctagggcaggaaggttgctagg

SEQ ID NO: 229283 - DNA, 216 bp, Homo Sapiens
  misc_feature (65)..(130): n is a, c, g, or t
tcataggaggagagaaaaagctgtgattaggaaagggagctttgggttgggagtcaggtatatannnnnnnnnnnnnnnnnnnnnnnnnnnnnnnnnnnnnnnnnnnnnnnnnnnnnnnnnnnnnnnnnnacttttaaaaaattgaattgtatgtttatgatttattcatttttcttctttacttcttctgtgagtctcaagtctagttctgaagg

SEQ ID NO: 229284 - DNA, 498 bp, Homo Sapiens
  misc_feature (34)..(34): n is a, c, g, or t
  misc_feature (165)..(178): n is a, c, g, or t
  misc_feature (196)..(294): n is a, c, g, or t
ccggtacgggcaagattctgtccctcttcaccgntggtcagatccaagcaagaaaactttattagattattaagatacgatcctaactattgtttgacctgatagaggctggaaattttgtctccacattgtttgagtggctccttaccactgaggtcctaaaannnnnnnnnnnnnncctgatagtttcgctctnnnnnnnnnnnnnnnnnnnnnnnnnnnnnnnnnnnnnnnnnnnnnnnnnnnnnnnnnnnnnnnnnnnnnnnnnnnnnnnnnnnnnnnnnnnnnnnnnnnagttctaataggttgtctcaacattcatggccagaggaattgaaaggcaccgtgtcatccttgaatagaacagctatgttatactgctttaaaaaggaggtttaaagtggaaaaactgaacagcctttttaccctgtgattcagtggcatgtctcaaattctgaggcatttagcaggaccccaaagtgagaaccaggtagtaag

SEQ ID NO: 229285 - DNA, 116 bp, Homo Sapiens
tcgacctagaggatcagctctaatttcttttgactgcggtgtggtggtgaggctttttaagtggttaaccttcatctaaatttttttctcccactggatttatagatcctctcgaa

SEQ ID NO: 229286 - DNA, 207 bp, Homo Sapiens
tcgactcagaggatcagctctaatttcttttgacttgcgggcagcgaaagccaccaaagcaataaatgcgatttttttcatggtaatcattaattagaaatataaaactaataaaaaagtccccaatctcaacagtgctgttgggaatggggacctattatttcagaagtacttaattacttgatttctactgatccctagagtcga

SEQ ID NO: 229287 - DNA, 259 bp, Homo Sapiens
cgactcaaggatcagctctaatttcttttgacttgcgggatattgttgatgtaaatcaggatgaattaatgagcattgttggcaatgatttaaggcggcgttgtgctggtttaaagcttgcttcccgtattgttggaattgcgacggcgaatagagttcagttggatgacgccggggtacttcaaagtatgtctgatttcatgcggagattatcggtattgaggcaagtagctttaacaacccttcagatcgataagga

SEQ ID NO: 229288 - DNA, 280 bp, Homo Sapiens
taacaactctaactcgaaaggccggttatatacgctgacagctcttcacaaaaatagctatgaacggtcagtcacagtgctaagttgctgtacagcgaacccaaaatccccatattcggtggtccagtgaaccaattgacatttctgctccatatttttttatatccagactatgctctgaaaccttgttccatcaagctgaacccccacgttgaacagtgaaactgaatctatctgtaatgtgccttccatggggtcctctcgctatgaactagcggtc

SEQ ID NO: 229289 - DNA, 500 bp, Homo Sapiens
cggtaccggtcactctagaggatcagcaccagcacggcgctgagcgacttcgatcaggttgcgcaggctgacctgcgtggcaccgatcttccaggtgatgtcttccaactcacccagcaccatgggcatgacgcccgtcacccacagcacggtgacgatccaggccagccaggacacggtgcgttcgaccaccctcacggtttgcgattgagggaaggccacccgcagcactttgaccgtcaggcggatcacagccagagaagccagcaccgggataaccagccgaaacaccgtcaggggcagcacgcccaggaacatgcgccgggcggccagcgacagcagcaaggccagcacgggaaacagcaccccgtccacgacatgccggccaaaccagacggaatgagggtcacccttctccccacgccacaagcgcagcatcaaccaggacagtgccagacagcccagcagaatgccggcttcggccagagccgagcgctgct

SEQ ID NO: 229290 - DNA, 336 bp, Homo Sapiens
tatcagctcgccggtctctctagaggatagctctaatttcttttgacttgcggctccatcgggcgcttccactatggggaggatggcgacaagggctggctgctgtgggaggtggatacctcgtcagcggtctgcacgctgcagcggacacctgctcggcgaacggttgacattgtgtttgacggcaagccagacctcgacaccttgcgggatgcggtggcgcgacaggacgttgccggggcgttcgtgcgtgtccggtggacggtggcggacgaagatcgccatgaggtcaatcgccaggccattcaggaggcgttggggatcctctagagtcga

SEQ ID NO: 229291 - DNA, 396 bp, Homo Sapiens
agctctaatttcttttgactgcggggtgacggcgctggatggcgcaaccggccgcaccgtgtggcaaggcaaggcggatgtcgatctgacctccggcccgggaagcgacggcacactgacggccgtggctggtgagaagggcaccgtcgtcgcgttcgacgagaagggcgcgcagaagtggaagagcaccgtcaacggtgaagtcctgaccgctccgctggtcggccagggcctggtgattgtgcgtacgaccgatggccgcatccttggcttggatggcagcaatggcgatcgcaagtggatctatcaacgctcgccgtcggcactgaacctgcgtagcagcctgccgatgatctttgccggtgacaatgtcatcctgggctttgccggtggcaa

SEQ ID NO: 229292 - DNA, 525 bp, Homo Sapiens
  misc_feature (180)..(468): n is a, c, g, or t
tggtagggatgtacatgcaaagctatcttgcctacaaacaacaaactgttgtaacataaagtatttttcgttcactcattgtggaaacaacatgctcctgtgtgcctcttatttataaccaaataggccatgtgttgaactggggaatatttactctgcttcaacattaaaaccgctttnnnnnnnnnnnnnnnnnnnnnnnnnnnnnnnnnnnnnnnnnnnnnnnnnnnnnnnnnnnnnnnnnnnnnnnnnnnnnnnnnnnnnnnnnnnnnnnnnnnnnnnnnnnnnnnnnnnnnnnnnnnnnnnnnnnnnnnnnnnnnnnnnnnnnnnnnnnnnnnnnnnnnnnnnnnnnnnnnnnnnnnnnnnnnnnnnnnnnnnnnnnnnnnnnnnnnnnnnnnnnnnnnnnnnnnnnnnnnnnnnnnnnnnnnnnnnnnnnnnnnnnnnnnnnnnnnnnnnnnnnnnnnnnnncacctccaaaccaagaaataggtttgttgacctcagcactattgacatttggggcag

SEQ ID NO: 229293 - DNA, 171 bp, Homo Sapiens
ctagtctgactctagagttatccccttgtgacagaacctacggctggacagtcgatatggatgcggatcatgaaagcccatgcacttcgggacaactccatccatgggtctatactatggcgcacaaaagcaccttgagatcgacccttatcagcccatcgtgcagacgct

SEQ ID NO: 229294 - DNA, 522 bp, Homo Sapiens
tctcatccttctgaatcctctgtcaaactggtatattttccttcaacttttcaatcgttcttgctcttatattcctctagtcctctggcgaacttgctctgttcttgtccttcctttcttccagttccatgttagattcttctacaagttgctctcgtgcctcaacttgggccaggaagtctatgccagcaagaataactctgctactccaggtgagataatttatccatgctaaagactgatgctcttgtatgggctttaggaagatctttcccccgttcctctaattcagctctctccttgtttcttatcgtctacttccatgtcgagctttgtatcgagtgctttcctgtccgcatcactttgtgtttgcttttgaatcatcgtgtgtggggagactgtcgggattccccttctttttctccttgtctctccatgttctccggacttaacctctttatcctcatcttgctctgacccactgatatcagaggctgagatttcctctccttcttcaagctt

SEQ ID NO: 229295 - DNA, 401 bp, Homo Sapiens
  misc_feature (388)..(388): n is a, c, g, or t
cctcgattgctgtgccgttggtcctgttgcggctcacttagccaagatgcctgaggaaacgcagtacccaagacctaacgcgtctggaggagcgaggaggttgagacgttcgccttacagggcggaaattgcccagcttgatgtcattgactcatcaattactgtctatctccaacatagagatctttcctgagagtagctctatttcaacattcatcagtatgcattggacaaacatccggctatgaaaggcttgacatgatcccattttaattacgactctgggaaaagagctgtcatattcactcctgtatacccgaactaaacaattatcgacactcgtctactattgctcggatactgcgatattggaattgacctatacgcntgatccttgatca

SEQ ID NO: 229296 - DNA, 484 bp, Homo Sapiens
  misc_feature (71)..(79): n is a, c, g, or t
  misc_feature (248)..(248): n is a, c, g, or t
ttatccccactgtggtccgtaccactatcaagtgttcatctgcatgacataactgcttacctttattggannnnnnnnngggagaactccattacacttacacgttgtctcctacaaaagactctgggaaggatgctattgagtggtttcttttccacagcttgtgtatttgattcattggctgctctatgtgcttaatccagaataccagttacatttgctctgtcccaggtggaactacacgaagnttatgtatatcttccttcgctgacattaactgtgacgcccatctacaacttttccatgcttcagacatatacctcacttccacctctttctcaaggcatgtcttgagacaggaatagatgtgagcttgttaccccttccaagatccacagcattgcactgtctacctttgcatcttataattggcccattttgaggcttcttaggggttcgagccccaatacgtaatcctggtcgt

SEQ ID NO: 229297 - DNA, 165 bp, Homo Sapiens
cgcagcaccgatgctgcagtcgactctaagtatccccacgtccgcattaaagtctaaccgccttagataaataccaagtttacactcacatgaacttactaaaataaatcgtcacaaggactcttccattcacgctgtacattaacaactatttgcacacagcgc

SEQ ID NO: 229298 - DNA, 294 bp, Homo Sapiens
ttcagtcattctgatcaccaccacagaatgttgtgaagctaccatttgatgaatgtttatcatgtttactacaatgtgttattaacagctctaagtatacatttaatctaccttttggcacacttttacattcactattgggttattttagtggattcatggtccctttaaacatattccaatgttgatttagattgaccagttatcattgttttacattttcaagccattccttccaaatgttaggacaccctctatcatggactggcaacttggtctctttcgccctttctt

SEQ ID NO: 229299 - DNA, 500 bp, Homo Sapiens
  misc_feature (66)..(96): n is a, c, g, or t
  misc_feature (98)..(355): n is a, c, g, or t
cgaaatggagaagtgatcgtaggacggggagaaattgacaggtgagggctacttagcaattagaannnnnnnnnnnnnnnnnnnnnnnnnnnnnnngnnnnnnnnnnnnnnnnnnnnnnnnnnnnnnnnnnnnnnnnnnnnnnnnnnnnnnnnnnnnnnnnnnnnnnnnnnnnnnnnnnnnnnnnnnnnnnnnnnnnnnnnnnnnnnnnnnnnnnnnnnnnnnnnnnnnnnnnnnnnnnnnnnnnnnnnnnnnnnnnnnnnnnnnnnnnnnnnnnnnnnnnnnnnnnnnnnnnnnnnnnnnnnnnnnnnnnnnnnnnnnnnnnnnnnnnnnnnnnnnnnnnnnnnnnnnnnnnnntggcatgagccaccgtgcctggccagcaattagaattttaacactggcagttatgaataatatgaaggagaggtagatttctgagtgattctggtttaaccagctgggtggatggtggttccacgtattcaggtggcaaacagga

SEQ ID NO: 229300 - DNA, 551 bp, Homo Sapiens
  misc_feature (199)..(245): n is a, c, g, or t
ggcccgtctcagtctactgaatccgtaattgatcatcacaagatatcgcatacaagatagcacaactctggaaaaaaatccgctctctaatacaagcaaccacaaagaagagtgaaaactgtcataatagttccctacttgttccagagttttcagcttatttgcactcaatcttgatcaactcaggcaattaatcacnnnnnnnnnnnnnnnnnnnnnnnnnnnnnnnnnnnnnnnnnnnnnnncggtatccaatgtccccagcatcagtagattgccaactccctctccttgccacactccagccagtgttatgctggtgctgtcatacccatcccttatttctgtatcagaatgcagttgttctttagttgtgagggaaaatggtatcatcggaggcaagctgtaaaagaattacatagtacattgatacgtcttttaaatgaattgctgccatgggaaccaaagttaatgaaggctttccaaagaaacaggagccgcctgaagaaagactatgatgatttcagaagacaacctgatcatgatacatt

SEQ ID NO: 229301 - DNA, 628 bp, Homo Sapiens
  misc_feature (311)..(471): n is a, c, g, or t
atgcacaacaaataactgctcatacacaagctcttgttctctccatggaaataatagctctacattttatttttgaaaaacagtaacaagtctgaaataaaatagtattaactttttactccattagaaaaaatttaaactggttcactcatcctttctttccatgcaattactgtattattttaaaacatctgagtaaaaagaaatctataatatatccatttaattcaacctaaactctaaatatacaaatgaaggccaggtgtgagttagctggagtagaatagaggtatagaatcgttcctaaatannnnnnnnnnnnnnnnnnnnnnnnnnnnnnnnnnnnnnnnnnnnnnnnnnnnnnnnnnnnnnnnnnnnnnnnnnnnnnnnnnnnnnnnnnnnnnnnnnnnnnnnnnnnnnnnnnnnnnnnnnnnnnnnnnnnnnnnnnnnnnnnnnnnnnnnnnnnnnnnntgttaaaaaatattgtgaggtaagttggtcagttaggttgggcagcttttatttcattgctaagggatttggacttgatggtgtaataaagcattaattgaacaaatatttatggagcctgtactatgtaccagatgcagactgtgctagcggttgg

SEQ ID NO: 229302 - DNA, 242 bp, Homo Sapiens
ttattcttctttttaaaaatttaaaaaccaaagtatatttagtgtgaacattcatggaaagaaagagaacgcaagacaaaccttcagggagaggaaaatcgaagtgggttgatttcacccgtggacttaagtggacacagcttattcttgttacgttactaggcgtttacaaagttgttttcaaaagcagttgtctttaacccaacactttttttgaggctctcctctgtgtcctgtgatag

SEQ ID NO: 229303 - DNA, 562 bp, Homo Sapiens
tccacttctgaatccgctggggcgggttcctgcgcgatctcaaaaccaaccgcattatctgatgacgcggggtgaacttcaccccgttgcttccagcagcagtaaatccatcagcagcaccagattcgactcaaatgacgtcacgcctgctgcttcagcagcgaaatgtaccgcttcgtcatagagggcaaagtgtacgtccgccatccccgccagcgtattggccgaggcgcgggtaaacgcgacgacggtcatcccgacgtttttggcaattcgcgctttatccagcacctgctccgtttcgccgctgcgtgaaacggcaatgaacacctgatagcgggcggcgttgctgagaaaaatgttccggctgtcccccggcccggagataaatgccgttttgcccaacacctgcaatttcttggtcaggtactcggcaaacagataggaaaacccggcaccgtagagaaaaaagctctctttctggcgcagcaggttggcaaactgctggcgtttgtcctgggtgacccactgaaaagtttgctgatagttggcgatgaattgg

SEQ ID NO: 229304 - DNA, 257 bp, Homo Sapiens
ccatgcccctcaaaggacatatgtccacaattcctatgtcctgtgatcgtgccacgtactgatattgtcactctacgcaagctttcctgaacaaaatctcgctgaaagagctatatcgcggactccatcatctccttgttactgcatagtgcatagcttcccactgtttgaccggtgagtaatggacacacccactttctctctgacaagcctataaagtgactctttgtctttgagacagagtcttgctctgtcaa

SEQ ID NO: 229305 - DNA, 108 bp, Homo Sapiens
ggaccagcacaacctgatctttttcaatggttttatttgcttccagcacaacctgggcacaacctcagcacaacctcagcacaaccccagcacaaactggggggatct

SEQ ID NO: 229306 - DNA, 468 bp, Homo Sapiens
  misc_feature (73)..(425): n is a, c, g, or t
agaagctttactctcgaaagcggggttagcatgagctatatatgtctgcggacagactgggtggtctagaacnnnnnnnnnnnnnnnnnnnnnnnnnnnnnnnnnnnnnnnnnnnnnnnnnnnnnnnnnnnnnnnnnnnnnnnnnnnnnnnnnnnnnnnnnnnnnnnnnnnnnnnnnnnnnnnnnnnnnnnnnnnnnnnnnnnnnnnnnnnnnnnnnnnnnnnnnnnnnnnnnnnnnnnnnnnnnnnnnnnnnnnnnnnnnnnnnnnnnnnnnnnnnnnnnnnnnnnnnnnnnnnnnnnnnnnnnnnnnnnnnnnnnnnnnnnnnnnnnnnnnnnnnnnnnnnnnnnnnnnnnnnnnnnnnnnnnnnnnnnnnnnnnnnnnnnnnnnnnnnnnnnnnnnnnnnnnnnnnnnnnnnnnnnnnnnnngtctagaacgagctcaccaagaccctgggaccagcacaacctg

SEQ ID NO: 229307 - DNA, 152 bp, Homo Sapiens
  misc_feature (114)..(114): n is a, c, g, or t
  misc_feature (130)..(130): n is a, c, g, or t
ataatctgctctgtacctcccagggtctttgtgagtccattgctgaacttgatacactgaatgttgactcatacaaatgacatgcacaaccagtggaccatgcatgggtgatcnctctagatgtctgacnctgcatgtgcatagcaatgctt

SEQ ID NO: 229308 - DNA, 113 bp, Homo Sapiens
atcacaaccatgcacaacctgtggaccctgcacaacctgtggaccagcacaacctgtggaccagcagtggatccatctaagagtctgacctgcagtgctatgcacatgcttgt

SEQ ID NO: 229309 - DNA, 114 bp, Homo Sapiens
aggtttgtgctggtcccagcgtcttggtgaggagagagatttgatagttatcctatggtcctgggtgcccagcaccagcacaacctgggccagcacaacctaggaccagcacaa

SEQ ID NO: 229310 - DNA, 115 bp, Homo Sapiens
gtcccaggttgtgctggtcccaggttgtgctagttgtgctggtcccaggttgtgctggtcccaggtttgtactaggtcccaggttgtgctggtacccaggatgtgctaggtacca

SEQ ID NO: 229311 - DNA, 111 bp, Homo Sapiens
tactggtttgcagcgttactggtttgcagcgatactggtttgcaggctcttggtgaggaggtacaggagttactccttgcaggatcttggtgagggagggtcttggtgagg

SEQ ID NO: 229312 - DNA, 174 bp, Homo Sapiens
agacatgagaggcagaagcaggaagcggcagaggcagaagcaggaagcgttttaagcaggaggtgtcagaaaagttaccacagggtcttgggtgaggagcagaagcaggaagcaaacattgaaagctatttcatgcaaacctttatctactttagcttaaaagtgaaagtggta

SEQ ID NO: 229313 - DNA, 295 bp, Homo Sapiens
agcgcttctccgctaggtctcttcatctaggtcagtgtttcttattattgagttcctgcattgagggcatatggaagagcgatttatcggtggaatgtcattatctctttttgcgctctccaacgcctggttatacatgctaaccaacttgaccccacgcttaaacggtgtgttagcctgtggatcgctcgcaaacttgtagtcgataaggtcggttactaatttagttagttttctgtatgctccaccgaacgtaacctgatcgctgtctaacaaatcgtcttttatgtcgttg

SEQ ID NO: 229314 - DNA, 543 bp, Homo Sapiens
  misc_feature (60)..(381): n is a, c, g, or t
  misc_feature (457)..(457): n is a, c, g, or t
  misc_feature (511)..(511): n is a, c, g, or t
agcttaataaagacacagttacatatagaaacatatatagatatgtgtatatacacaggnnnnnnnnnnnnnnnnnnnnnnnnnnnnnnnnnnnnnnnnnnnnnnnnnnnnnnnnnnnnnnnnnnnnnnnnnnnnnnnnnnnnnnnnnnnnnnnnnnnnnnnnnnnnnnnnnnnnnnnnnnnnnnnnnnnnnnnnnnnnnnnnnnnnnnnnnnnnnnnnnnnnnnnnnnnnnnnnnnnnnnnnnnnnnnnnnnnnnnnnnnnnnnnnnnnnnnnnnnnnnnnnnnnnnnnnnnnnnnnnnnnnnnnnnnnnnnnnnnnnnnnnnnnnnnnnnnnnnnnnnnnnnnnnnnnnnnnnnnnnnnnnnnnnnnnnnnnnnnnnnnttaagtagatacaccacccttaaggaggtagaacataactcatcaccactaagtgtgggctgtacatagtgacaantttccagagtacagtaggaaagagaggaggggaagagtactttgcagaaaacanactctgcctcaagccagatgagcagggttaac

SEQ ID NO: 229315 - DNA, 172 bp, Homo Sapiens
gaggaattactatttgcgaggaattactatttgcgccgtaccaaaaccactgatggtgatatttgaactgtcatctgcccaggcaccagacaccgcagcagacattaccaataaggccataaaaggttttaatttcatgctatctcctcgaaagtttcttcattttattcct

SEQ ID NO: 229316 - DNA, 286 bp, Homo Sapiens
  misc_feature (114)..(239): n is a, c, g, or t
ctggctacgatactttaatacatacaagaacatatgtgcttaactagacaaactgcataaaatctattttaaatgatgacagccatgttttgtgaggaaagatggaaactcacnnnnnnnnnnnnnnnnnnnnnnnnnnnnnnnnnnnnnnnnnnnnnnnnnnnnnnnnnnnnnnnnnnnnnnnnnnnnnnnnnnnnnnnnnnnnnnnnnnnnnnnnnnnnnnnnnnnnnnnnnnnnnnctgtcctttcagtaatgagttatccctctattggttccttgattatt

SEQ ID NO: 229317 - DNA, 408 bp, Homo Sapiens
tggtgctgttctagaggatcccggcacattgggtggctccttgtgaggccctttgagaagggtaacctggtcgttgaggaagaggctgctgaagctggggatgctcttggcgaactcagtgagctcccgcacggtctccactgtggtgcactggcagcggtagaagacgtgcacgctgatctccttgtagggaggcaggccattcaccaactgcttccacaccagccccttcgtctgcctgcccaacgcgccacgcaaagagccacccgaagagccacaccaagagccacgcgaagagccacgccaagtgccacacgaggggccacgcaacgagccacgcaaggtgccacgcgaagagccacgcaaagagccacgccaggagccaggcatagtgcacaggctgaagag

SEQ ID NO: 229318 - DNA, 254 bp, Homo Sapiens
atggctcatggcagcgtagggtggctcttcagtgtggcatcgttgtgtgctcttggggtggacccatggagggtcgcatggtgtggctcgttgcgtgcggcaaggaaacatgacagctgccctacaggcagatctgaagaacccccctatgagccacgcgaagagccaacctaggcgcccacagaggaggtggacagcaccagcaggcggtggcacagcccagaggcggtggaccgctggacagcacagcgggg

SEQ ID NO: 229319 - DNA, 116 bp, Homo Sapiens
ccgggcgtttgtggcgctgcgtatcgttccgcctgggcgggcattctgcattcacaggcgttccagtccataatcccacagtatggtagcttcgccccgacgagccgcacaaagag

SEQ ID NO: 229320 - DNA, 154 bp, Homo Sapiens
atcttacgatttgtacgtaggaccgctacggacctcaacaggagccacacagatgagccacccaaagagccacccaaagagccaccccaagagcctcgctgatgtgccaccccaagagccacacgatgagccacccaaagagccacccaaagag

SEQ ID NO: 229321 - DNA, 145 bp, Homo Sapiens
ttgggctcgttgggggcagtgtagcagcagggtgcattgcatgtcatcaggcccatcccacgctggctgcacagcccccaagtcagtcagtgtgccatgttctatgcacagcatgttgctgcccacagcagtccctgcattttgt

SEQ ID NO: 229322 - DNA, 122 bp, Homo Sapiens
ggctcattgtgcggcctcgtagtggcgcttcgggaggccctttgcgtggctcttagtgtggcgcctggtggtgcccgcgacgagccacccctaagtagccacacaaagcgccccccaacgag

SEQ ID NO: 229323 - DNA, 305 bp, Homo Sapiens
gggcgtcggtggtcttagcggggtctcgtgtggtcttcgtggggctcattgggtggctctttgcgggtcatcgcgtggcccttggtgtggctcgttgcggggttcgtggggtggctcgtggtgtggctcgtcgggtggcgcatgggggcccttggtgtggctcttggggtggctcttggggtggctcttcgggtggcccttcgagtggctcctggtgggcacatcgggtggctcgtggtggtgcccttccgtcaattcctttacagtttccagctttgcaaccatactcccccgggtcaccgagc

SEQ ID NO: 229324 - DNA, 216 bp, Homo Sapiens
aactaagaacggcatgcaccaccacgcgcacacgaggagccacacaacgggccacacgaagagccaccctaagagccccgccatgagcacgctaggtgcccgcaacgaggcacaacgagccacactaagagccctcccaatgagccgcacaacgagccacgctaggagccacacaaggagccacgcaaagggccaccccacgagccccactatgag

SEQ ID NO: 229325 - DNA, 236 bp, Homo Sapiens
ccgattgacgcgatgtgatttctgcccagatgctcagaatgtcaaagtgaagaaatgcaacgaaggcgcggtgtaaacggcggtgagtaactatagactctgcttaagagtatccaatactgcctcgtcatcgtaattagctgacagcgcaatgaagtggagtgatagcgagattccgcactggtcccgtacgctacataaaccaacagagccggagtaccagagctacgaattcg

SEQ ID NO: 229326 - DNA, 273 bp, Homo Sapiens
tgattctagaggatctccggccgtggtggcgcttggtgtggctcatggggtgtgctcagttgtgtggctcattggggggctgagtggtggggcctatcgcgtggatcttagggtggcacctggtcgtggctcgttgcgggactctagagggtggctctttgcgactcttggcggggctctttgtgtggctcttggggtggctctttgtgtggcgcattgggtggcccattgggtgggctccttgggtggcatctttgtgtgtcgcatttgcga

SEQ ID NO: 229327 - DNA, 161 bp, Homo Sapiens
tagaacacagaggaggtggacatgcatgaggagggggcagagaggcggctcagtgttgccctggctctgtggcctcaggactctctgcctcaccctgcttcagcccagtgacccctgtgagactagatccccgtctgtgctagtccacctacctctgtagc

SEQ ID NO: 229328 - DNA, 107 bp, Homo Sapiens
cctcctgtgctgtccctcctcagtgctgtccacctcctctgtgctgcctccgctgtgctgtccaccttctctgtgctgtccacccctctggccctcctctgtgctgt

SEQ ID NO: 229329 - DNA, 217 bp, Homo Sapiens
tcctacggcctcctcttgctagtccacctacctctagtgctagtccacctacctctagtgctgtcacacctacctactgtgactgtaccaaccatccacatgatgcatagacatccacatagatgcccatccatcaatgatgcaatgatccaaccatccatcatgccatccaatcatgatgcatagtccaaaatcccaaacctacatactagtagct

SEQ ID NO: 229330 - DNA, 131 bp, Homo Sapiens
  misc_feature (54)..(62): n is a, c, g, or t
acagaggaggacagaggagtacacaatgctgtggtacactggctcacagaggannnnnnnnnaatgtatcataagcggggagggggcttcgcggaggtgaccggttgagtaggggtcctcctctgtgctgt

SEQ ID NO: 229331 - DNA, 120 bp, Homo Sapiens
cctcctctgtgctagtccacctcctctgtgctgtccgcctcctactagtgcctcctctgtgctgactacctctgtgctagtccacctacctctgtgctagtccacctacctacctgtcca

SEQ ID NO: 229332 - DNA, 252 bp, Homo Sapiens
tcctctgtatcacggctatagctttatagtaagatactctttacggactccacccccttagtgagtcttaaagccatgtcgaagcccccatcgctgggtcaatagtacttggccggcagtactcctttaaaaaaactaaggcggctatggtataatacgcctcaactcatctatcccctgaaaaaacatagctacccttctgtatatcctatgaggataatatataagctcatctgcctacgacaaacagac

SEQ ID NO: 229333 - DNA, 319 bp, Homo Sapiens
ccaagccgtcgtgtagccattaatgcgtaagttttcgcccgatgtaacagcgccagtacggtcgtcaccgtcaagcgcaacatacggcggtgcgttgaagtcgccaaacgcattgccgagcgcctgacacacccttttgagccgttcgtaaactcaaacaaacagcctaaatctaagtcgacgttcgttgagctaccaccaagcaacgatgagaaaaagcctttcttttgcggcgcttgtagttgattccagtttaagttaatgtgaatttcaccaagtgactgcgcgcccttcgttaagttgatcgactgcttggatt

SEQ ID NO: 229334 - DNA, 148 bp, Homo Sapiens
tctcagtacggagcctcagtaagcggtaaggggcatcagtagcgggcatcagtaacggagcatcagtaagcggagcaacacaacatacccccagcaggcgtgaccgctccgcttactgaagtccgcttactgatgctccgcttactga

SEQ ID NO: 229335 - DNA, 129 bp, Homo Sapiens
ggtctgctcggacgaccgatttgcacgtaggaccgctacgtgacctcacccagagtttctctggcttcacccgggccggacactgaccggattgacagattgatagctctttctcgattcccgtgggtg

SEQ ID NO: 229336 - DNA, 173 bp, Homo Sapiens
ggatcatcagtacggagcaggaatcgcgatctctgggaacaactcgatgcgctgaaagccgatgttgaacgtctggcctcgatcaatgaagtgctgcttgacgagaacgccacgctgaaggcgcgcctaggtagcatgggcaaatgcccgcttactgatgctccgcttactga

SEQ ID NO: 229337 - DNA, 206 bp, Homo Sapiens
  misc_feature (81)..(81): n is a, c, g, or t
gctctgtagcagacagagtcacctctctgatattgggaggacgaagtacaggtgtcgtgtgagtgggagctgctctgctgncagatgctaacctgacttggatctgctgctcggtgttgccactgtcccattacatttcccactctgtctgctgcattcctctgttgcgggtaggcttgatatcacctctaggatgtccgagcgga

SEQ ID NO: 229338 - DNA, 159 bp, Homo Sapiens
tcagtaagcggagcaccagcaagctgcctacatcggcgtgagcaaggaaggcccgtacaaggctgaccactaccgctactaagccgtacctgccggcggacattccccgccgccggcgctatcaccgaggactgctccatgagactgctcgcttactga

SEQ ID NO: 229339 - DNA, 138 bp, Homo Sapiens
cactctagaggattcctcagtaagcggagcatcagtaagcggagcggtcacgcctgctgggggtatgttgtgttggctgcgtgaaggaagaagaggaggcgaggaggtggcatagaccgcttactgatgctccgctta

SEQ ID NO: 229340 - DNA, 361 bp, Homo Sapiens
agcaggtccatagcttactggagcaacaagggcccagccgacgtgcggttgaagctcgagctgctcaagcagccctgagacgagcacacagctggccgtcgtgacgatgtcccggcgctgtgaactcagaggagaacttccaagaaccgggaaaactcgccgcatcagatccagcacgccttacgtgtctcggtcctgaccgatggcaggaggagacgcgccgctgaatcggcgcgttttcgggctgcacaaaccacgggacggagcctcgagcaggcgtgcgaatagcagctgcagcgcatcaggtctggacgcagagcctgaaacctcaagcccaggagccagcatggatctcactacg

SEQ ID NO: 229341 - DNA, 205 bp, Homo Sapiens
  misc_feature (19)..(19): n is a, c, g, or t
gggtccgctcggacgacanagaaaatctgccacacaccttctacaatgagctgcgtgtggctcccgaggagcacccgtggctgctgacgaggccccctgaaacccaagggccacgggagaagatgaccagattatgtttgagaacttcacaacccagacattgtacgttgctatccaggctgtgctaatccttgtacgccttggt

SEQ ID NO: 229342 - DNA, 140 bp, Homo Sapiens
agcggagcctagtagtagttcagtaagcggagcggcacgcctgctgggggtatgttgtgttggaggcgaggaggtgggatagaatgacggcaggagcagcagcggagtgtccaaccaacacctactgctccgcttactga

SEQ ID NO: 229343 - DNA, 103 bp, Homo Sapiens
cgagagatcggtctcgttcgagctgcttgagttccaggcggaatggccgcgttgcccgccgaatcagtctgatcttcatacggcggaacaagcggcgcatgat

SEQ ID NO: 229344 - DNA, 294 bp, Homo Sapiens
  misc_feature (209)..(209): n is a, c, g, or t
tctggtgctctagatttatcccggtcgctcggacgaatgctcggattgttttaagaaaactggcagaacaaaaccagacatgggggaaaatcgcagcttcgataggccaagcttgaaggaaaacggagacgcaggggaaggaaaaagaaacaccctgcgcgaaccaaaagagacatgagcggagaagcggagtgaatcctagatctggnagggattgtccttaccccacgtccttcttcccgagaccccgagggtcgtgatgtggaggaaaggagccaccctgcaagatggccg

SEQ ID NO: 229345 - DNA, 163 bp, Homo Sapiens
  misc_feature (124)..(124): n is a, c, g, or t
ctgtgctggtactctagagatcccgtcgacatgcaagtcagttccatctagtaatggtgactgagtatatcacagttgcacttttggcagcgtgtgtcacttttatattcactgtctcatacanctacagtgtactatgatgcactctatttatagtcaaaca

SEQ ID NO: 229346 - DNA, 190 bp, Homo Sapiens
acacactcagttagactttggctgcattctcacttggctgtatgcgtcacactagtaagaatagacagcgtcaccagagaggactgctctcacctcgggattttactgacacgacattagacttaggtcattggccagagagacttattctttaccgataccaccccaaccatggtcgagcggacgcgta

SEQ ID NO: 229347 - DNA, 203 bp, Homo Sapiens
cctagagttcccggtcgctcggacgacagagatggcgagaagttcgccgcctgggtgaccagcatcaactggtcgcagctcatcgctgacgtgaaggagtttttccaggaactcgacaaaggggtgcaggcgctgggtggctggaaggtcgtgctgatggcgctgctcggcttgaagataatctcgatggtggtccgagcgga

SEQ ID NO: 229348 - DNA, 169 bp, Homo Sapiens
gcggtgactctgaggatccctaagcggagcaggcagattatgcacctcctcgcctctcttcttccaacacaacatacccccagcaggcgtgaccgtccgcttactgatgctccgttactgatgctcgcttactgacgcttactgacgcttactgatgcccgcttactga

SEQ ID NO: 229349 - DNA, 205 bp, Homo Sapiens
attgggcaggtgtacattacatattagtgctcaaatatatgttcatttccagaatgaattttgcacagtaatcatatatccatttaatacgcaatgagagatttaaatctctcattgggacaatctaacttgggttctcattaacagtgaaaacctaacaacctcagcctaagccaaaaatggccctcaagcacgtaacagtacc

SEQ ID NO: 229350 - DNA, 182 bp, Homo Sapiens
tagacgtatctctttaagttcaggggttgatgtgcaggcttgttacatagctaaacttgtgtcctgagggtttgatgacgtcatcaaaccctggtcatcacaccctcatcaaaccctcatcaaaccctggctgagtggtctacttgtagggtttagggtttcgatgaccagggtttcgatga

SEQ ID NO: 229351 - DNA, 115 bp, Homo Sapiens
tttatgaaacctgtcatcaaacccttcatcaaaccctgtgaacctgcggaaagctaatataagaaggcccccaaatggctgtagtggtctacttgtatacggagggtttcgatga

SEQ ID NO: 229352 - DNA, 126 bp, Homo Sapiens
acgtatgccaattaacgcggttatttggggggcttcttatattgcttcgatgaatggtttgatgggccatgattaagagggtttgatgaagggtttggatagggtttgatgacagggtttcgatga

SEQ ID NO: 229353 - DNA, 128 bp, Homo Sapiens
  misc_feature (59)..(59): n is a, c, g, or t
tgaggatcccctcatcaaaccctaccgcacgttcgtggggaggtcatcgaaaccctatnattgtgtgaacaatccaacgcttggtgaattctgcttcacaatagggtttgatgaccagggtttgatga

SEQ ID NO: 229354 - DNA, 108 bp, Homo Sapiens
gtcatcaaaccctgtcataaaaccctgtcatcgaaaccctatacaaggaggccactacagccaatttacgcgggtgtttggggggccttcttatattgcttcgttgga

SEQ ID NO: 229355 - DNA, 140 bp, Homo Sapiens
gaggatcccctatcaaaccctatcgaggccggaatagaggtccgacaaatcccattcctgaagatggccgaggtcggcgcgggaccggaggcgtccgcccgactggcggaggccgcgcgcacctacgagggtttcgatga

SEQ ID NO: 229356 - DNA, 164 bp, Homo Sapiens
  misc_feature (68)..(68): n is a, c, g, or t
actctttaggatcccctcatcaaaccctgaaagcggggcctcacgatccttctgaccttttggggtgnaagcatcatcgaaaccctgtcatcgaaaccctaaatctctcattgcgtctagaatctcctatttttgaggctgatccacggctaagggtttgatga

SEQ ID NO: 229357 - DNA, 116 bp, Homo Sapiens
gaggatccccgtcactcgaaaccctgtcatcaaaccctgtcatcgaaaccctattagtggtttaacaatccaacgcttggtgaattctgctgtcagggtttgatgacagggtttga

SEQ ID NO: 229358 - DNA, 118 bp, Homo Sapiens
ggatccccgaaccaacccgtcatcaaacccttcatcaaccctaaatctctcattgttttatcaaacccttcatcaaaccctgaaacccgtatacaagtagaccactacagccagggtt

SEQ ID NO: 229359 - DNA, 333 bp, Homo Sapiens
cgcgcgagtttcagggtttgatgaagggtttgatgacagggtttgatgacagggtttgatgatcatcgaaaccctgatctaagcaagaatacgaccacacacaaaacccaaacctctctgctctcccggagcttatagtccagtgggtgccaatctgatcacactctttctccacctgaccaaagcaatctttaaggccagtccatacccaccttagggtttgatgagtcatcaaaccctaatctctatgcgtcatcaaaccctcatcaaaccctaacctgcggaaagcaatataagaaggccccccaaataacgggtttagggtttcgatga

SEQ ID NO: 229360 - DNA, 307 bp, Homo Sapiens
tatgaggatccctcatcgaaacctattgtgaagcagaattcaccaagcgttggattgtcacccactaataggagggtttgatgacagggtttcgatcatcaaacccttaggaaagaagacagtagggagggggaagagaaggaacaggagagaattagcaccccatagggtttcgatgaggtcatcgaaacccttttgtagtcaatcacctgctactgctgtagttaacaattgtttatattaatttttctattttggaataaccagtgtggtttgtgtctcctgactgatagatagggtttgatga

SEQ ID NO: 229361 - DNA, 129 bp, Homo Sapiens
gagtcttatcaacctctatattcgtgaagcataagtcacaagcgttggattgttcaccactaatagggtttcgctgaggtcatttaaccctacgagcgcacgtgttaggacccgaaagatggtgaacta

SEQ ID NO: 229362 - DNA, 312 bp, Homo Sapiens
  misc_feature (242)..(271): n is a, c, g, or t
tggggcatgatctactggcattgtggtggtatatctaagtgggatgacaaaacgctacgactcagtcaatcatattctgcatttccgtcttactactcaacaatagtgttacagggtttgatgaccgtcatcgaaacccttcatcgaagcccttcatcgaaacccttcaagtcatctttcagctcctttccatatgctgcttgatattgctagggtttgatgactcgaaaccctctcggcannnnnnnnnnnnnnnnnnnnnnnnnnnnnnccctatgatctctgtctcacctactttacagggtttgatga

SEQ ID NO: 229363 - DNA, 205 bp, Homo Sapiens
cagttaaccttcatcgaaacccctcatcaaaccctgaaaaccagtacaccactacattcaattaacgcggttatttgtggggccttcttatattgctttccgcaggttcacaagcaatacccaaataaagggtttgatgaaaccctcagatcaaagttaatgatgtcaatggaaagggtttgatgacagggtttgatgagggttt

SEQ ID NO: 229364 - DNA, 383 bp, Homo Sapiens
ctgtgcgtacagcgccgggctcaaccccaacatcgacgcgctcagatggcgctggtatatgcgcaggggatgttcgaaaacgcgcagggcatagacatccgcagctcgtacctgaacgagctactgcagaagttgcgccagctagcgtacacgagctgatgatgtgcttgacgagctggtgtacttccgcatccaggacgcgcttgaaggcacctaccatgccactgccgtttatgatccaggctgcaatcgacggccttgttgtccacgttccccacatcgctaaagatgtcgccagtacactcaagctcccctcatgctcatgtgctgctagcagtggtgatctcgacgaacgagaaaatggtggcacacagggatgcctc

SEQ ID NO: 229365 - DNA, 214 bp, Homo Sapiens
gagctttccttaaatagagggattgactcgggtgttgtgtgatcattatggctgacgcctgtttctctgcgaggtaggacggctgctttctggtctggcagggatgggtccgctttgcaaatgctctacgaggctcctccttgcatggcctgcaatctggccgcagcccctagtagattcctcgctgatccgatttcttttctctctgcgcttg

SEQ ID NO: 229366 - DNA, 259 bp, Homo Sapiens
  misc_feature (68)..(172): n is a, c, g, or t
cggatcccccaaacgcagagaggattaaagtggattctaaggctctaagggacctttttaaaaggggnnnnnnnnnnnnnnnnnnnnnnnnnnnnnnnnnnnnnnnnnnnnnnnnnnnnnnnnnnnnnnnnnnnnnnnnnnnnnnnnnnnnnnnnnnnnnnnnnnnnnnnnntcctctctgcgtttcaaacgcagagaggacaaacccagagaggcaaacgcagagaggttctcgcgttgaccaaggaactcctgcttg

SEQ ID NO: 229367 - DNA, 100 bp, Homo Sapiens
ttcaatttctacacgatgcaggcttggatgcgaattcttttcccgattgcgcctcactcatgtattgaaacctatcagggtgtgtagtgtagaaattgaa

SEQ ID NO: 229368 - DNA, 581 bp, Homo Sapiens
  misc_feature (263)..(410): n is a, c, g, or t
ggtcaattgtctacactttagcaattttcaagtatatggtacattatcattaactacagtcaccatgttgtaccacagacctccagaatttattcctcccatctaactttaggtgataattctgatgaaagaggtgtagaaattgaacgttcaatttctacactgataataaactagctgagaaagaagcccaaaaggcaatcacatttacaatagctacaaaagaaaaaacaccctaagaataaatctaatataacaggtannnnnnnnnnnnnnnnnnnnnnnnnnnnnnnnnnnnnnnnnnnnnnnnnnnnnnnnnnnnnnnnnnnnnnnnnnnnnnnnnnnnnnnnnnnnnnnnnnnnnnnnnnnnnnnnnnnnnnnnnnnnnnnnnnnnnnnnnnnnnnnnnnnntgtagaaattgaacgttcaatttctacaccaaccaatatagatagtatctgattccattgcctaatggctttttggcattgttttccttcttttcattactttgagtcatatttgagagatgtgaaacaacctaaaaaacaatggtagccaaacctagtgtagaaattgaa

SEQ ID NO: 229369 - DNA, 178 bp, Homo Sapiens
cgctgctgctgcggtcgcatctcacagctaccccgttccatttctcaccatggcccccttctccccttctggccttccacagttctccgtttgcacatcaatttgctcactcaacccacccaagcatctgcacctgcggcggtgtcagcccttgcacacgggtcccgcagctcgcaca

SEQ ID NO: 229370 - DNA, 316 bp, Homo Sapiens
  misc_feature (93)..(153): n is a, c, g, or t
gtatatagcttataaaagccagcttatgtgaaatatgggtatacttatgaaaagtttattatgctaaagtatatgtaatacaaaatttaccannnnnnnnnnnnnnnnnnnnnnnnnnnnnnnnnnnnnnnnnnnnnnnnnnnnnnnnnnnnnggccccccaggtaaaagtgccgaaccaaaatcagggcccacgtgcgccccccacctcgtgggccccaattggaaccctctaaatagcggccccccaaggtgctgaaaatcacgaggcatgaacccatgtgcacgtggcccattttaaccctttttaaggttgt

SEQ ID NO: 229371 - DNA, 115 bp, Homo Sapiens
aggatcccgttcactttctacactggatgcgaattcttttcctgataggacatgagtgaggcgcaatcgggaaaagaattcgcatccaatgcctgcatgcttgtagaaattgaac

SEQ ID NO: 229372 - DNA, 550 bp, Homo Sapiens
  misc_feature (110)..(395): n is a, c, g, or t
tgaggatcccggtcaattgctacacacaatcgatctatatctatatctagagagacacagatttcctatcactggctgtgtccactggaaagggaaaaacaatattcaannnnnnnnnnnnnnnnnnnnnnnnnnnnnnnnnnnnnnnnnnnnnnnnnnnnnnnnnnnnnnnnnnnnnnnnnnnnnnnnnnnnnnnnnnnnnnnnnnnnnnnnnnnnnnnnnnnnnnnnnnnnnnnnnnnnnnnnnnnnnnnnnnnnnnnnnnnnnnnnnnnnnnnnnnnnnnnnnnnnnnnnnnnnnnnnnnnnnnnnnnnnnnnnnnnnnnnnnnnnnnnnnnnnnnnnnnnnnnnnnnnnnnnnnnnnnnnnnnnnnnnnnnnnnnnnnnnnnnnnnnnnnncagatatgctgcaatctatgaatttacagtcatgctttcaaaacacagtgacttggttggacactgtgaactagctgtatcgtgcaaatgggtaaatagacagaatctagtatattatcctgcttttcctacaaaacctgaagcaccgggtagat

SEQ ID NO: 229373 - DNA, 180 bp, Homo Sapiens
ttcatttccaacttgacaatgtcagacttacttagaggactatttaggtctcaacttaccaagagagttcaacggatgaccctaaagatgtgcgtgccaggtaaagtcgtgactcttacgtgagctctggactgtatctatattatccatcaggagtgagactgagtgcatcgtcatatt

SEQ ID NO: 229374 - DNA, 645 bp, Homo Sapiens
  misc_feature (437)..(467): n is a, c, g, or t
ctctagaggaccccggtcaattgctacaccttatgcgactgacacatgcggcctggtagctggagcccgggaagtggttcaacgcaataaagaggcttctggctcccagcaaatggctcggtaagcatagtatcctctgcctgcaagtctctcctgatgatgtcagtatgcatactggggtggttgagatcatctaggtggggatgatgcaccccaaactaaagcccctctctctcgcggctcgctttgcagggtgagtgcagacatctgtagcaatggaaggtaagtgccttgtgttgcatatggacgaattactaaatgctactatgattctgtgccaggtttcgtgccttctaggatatagtaatgactgaaatcatagtgaatgggagcatccagtcaattacttagaacagatttgtagtttgtacttaaannnnnnnnnnnnnnnnnnnnnnnnnnnnnnnggcaggcacatgtggggtaggcttataaagaaaactgaatgcacagtgtaacgcctgctactctccctggtaaacagcaatagctttttatttcaaactattcgaaatatgtaacttccttaaaatattttgacaagtgtcacagggcaagtagggctattttaaaaaagtgtgtgaa

SEQ ID NO: 229375 - DNA, 246 bp, Homo Sapiens
  misc_feature (49)..(175): n is a, c, g, or t
ctagaggatcccggtcactttctacacctacaccatgtcaacgtccagnnnnnnnnnnnnnnnnnnnnnnnnnnnnnnnnnnnnnnnnnnnnnnnnnnnnnnnnnnnnnnnnnnnnnnnnnnnnnnnnnnnnnnnnnnnnnnnnnnnnnnnnnnnnnnnnnnnnnnnnnnnnnnnggcacctaacccagaaactttctcttcctctattccctcaaatccaatggtctcttaaactagccccttct

SEQ ID NO: 229376 - DNA, 120 bp, Homo Sapiens
tttctattcatttggttttctcagctttcctgcagaaggtcttttcaccctccttggttcacatttcattcctcaggccattttcattcaattttgtgtgtcagcacacattgcacacgg

SEQ ID NO: 229377 - DNA, 278 bp, Homo Sapiens
  misc_feature (96)..(116): n is a, c, g, or t
  misc_feature (136)..(192): n is a, c, g, or t
gtgtcatggctgttctagagtatcccggtcatcttgctacacccagcccataacagaactttaaaatgcagtaggatttgatagggtgtagaggannnnnnnnnnnnnnnnnnnnnagacagggtctcggtctctnnnnnnnnnnnnnnnnnnnnnnnnnnnnnnnnnnnnnnnnnnnnnnnnnnnnnnnnngctcaaatgatcctcccgcttcagcttcccaagttagctggaactacaggaggcacgtagttggggtattttgtgtagaaattgaa

SEQ ID NO: 229378 - DNA, 145 bp, Homo Sapiens
gacgtggataaaacctggacgatcgtacacttccactttccaccaatccttgcttggtgctgtatgagtaatgcgtacgaaatatctcccttctgtcatggtagacctctcggaggactctatctcctgcatttttattatttct

SEQ ID NO: 229379 - DNA, 104 bp, Homo Sapiens
tcacttgtctagacagagctcatcgggaacgctgcggagtcaataaacaggcttagtatttaattccgtagcagaaaactacgagaatcaacatgaattaacag

SEQ ID NO: 229380 - DNA, 124 bp, Homo Sapiens
ttcattttctacactctacaagcatgcaggcttggatgcgaatccttttccctgataggttcatatgacatgagtgaggcgcaatcgggaaaagaattcgcatccaagctgcatgcttgttgaa

SEQ ID NO: 229381 - DNA, 199 bp, Homo Sapiens
cattgctacaccaatcataagattatccatgattaaaagcgaaagatatgaacagagaggaaaactaaatgacagaaataaaaattaaaagcacaatatactctatattccaatatccatgtagcactgatcccaataattacagtctgccatatacagtagtgtagacaattgaatcgggtacctgagctctgaattc

SEQ ID NO: 229382 - DNA, 313 bp, Homo Sapiens
tcacgtactactgctgcagaaatttctgattgttgtcttcgtctttgcttccatatttcatcttcatcagactacttgcttgcattggacgggaaacggggcctgtgtcttccagtgtactgcgctgtcgagtctggacggtggactgctagctgtgcacagcaacctttggcaggtggtggcagcatgtgacagatgttccactgttcctgcattaacatgaaggtacctttcaccatagggacactttgtgctaactgatggcttgggcagcgtatgagggaagcatgatttagctgtgtagacacttgaa

SEQ ID NO: 229383 - DNA, 267 bp, Homo Sapiens
  misc_feature (66)..(194): n is a, c, g, or t
tggtactgctcgcggtgactcttgaggatcccggtcaactgtctacacagcgtacaagagtacagnnnnnnnnnnnnnnnnnnnnnnnnnnnnnnnnnnnnnnnnnnnnnnnnnnnnnnnnnnnnnnnnnnnnnnnnnnnnnnnnnnnnnnnnnnnnnnnnnnnnnnnnnnnnnnnnnnnnnnnnnnnnnnnnntaaatacatgggctttccgtgaagatgacatatgcaagcctggaacagctggatattcagtgagtgacacagt

SEQ ID NO: 229384 - DNA, 259 bp, Homo Sapiens
gtcactttctacgcagtattaggattataacaatataaaaaatacatatatggaaaagaaaagaacagatgaaaacgaaacaaattaatgttccagatagaactggagtcacccgttttatttacgttatatatttatacatattcgtatatagtgatacaacacatggtaacgtgtaaaacaacagacacaagaggtaaacaatcttgtattgtcgtagacaattgaagcgttcaactttctcacacaaagatgtgag

SEQ ID NO: 229385 - DNA, 240 bp, Homo Sapiens
gtgatctagaggatcccgtcatttctacactagtcacagttccagaaatcaaaactgttagcagatgatgtgattgcaaggtttggttgcttctactaataaatcagattgcttatttgtctaacgaatgttattagccaaacttgtgatacttggacacattacaagttttagctcaccgttactattatcaaatgttgaacagatgacgatcttgctatttgtgtgtagacacttgaa

SEQ ID NO: 229386 - DNA, 182 bp, Homo Sapiens
  misc_feature (56)..(134): n is a, c, g, or t
tcactttctacgcaacagaaagtatactacttttttaaaaaagtgggcagaattcnnnnnnnnnnnnnnnnnnnnnnnnnnnnnnnnnnnnnnnnnnnnnnnnnnnnnnnnnnnnnnnnnnnnnnnnnnnnnnntttttttaaggagagacgagaatgtttagctagaaaattccacagcct

SEQ ID NO: 229387 - DNA, 190 bp, Homo Sapiens
cggaatcagcggggaacgatctaatctgccgtgggcctgtcgtgccagtcctgggagcgagatcggagtcagaaatagagttcaattactacacgagcattcaatcaaattcattagaataattataagtatccgtccaggcagtgacagacaggattgcatttagtagataaaacgtgtaaaacttgaa

SEQ ID NO: 229388 - DNA, 226 bp, Homo Sapiens
agttgatctcagaggaccccgttcatttctacgactagcataaccagttggaaaacacaatagaagaaatgccaacatatatctaagaataagcataacaagaaaaatgtaatactttaatgagagaaacacttaacaaggagctagtcatgtcctgcaaaaatcctcatctaggaagaaaactggcatgctcaaagagcagaaagaagaccactttgcttaagta

SEQ ID NO: 229389 - DNA, 133 bp, Homo Sapiens
tttagacaggcaatcccaggatagcatatgagaacagctgctgctttcacgaagggatcgtggcataagcaatgataaggctggcaagatgactgtaccaataccgagcaccaggaatcagacacactcctac

SEQ ID NO: 229390 - DNA, 632 bp, Homo Sapiens
  misc_feature (157)..(219): n is a, c, g, or t
  misc_feature (338)..(451): n is a, c, g, or t
ttcaactttaaccgtgcagtatcagggatctgttaaatgcagatcttctttagtaggtttgggtagggcttgggattctacgtttccatatgttcccaggtgataccaagtgctgctggtcctgcaaccacactttgagtagtaaggctctagacannnnnnnnnnnnnnnnnnnnnnnnnnnnnnnnnnnnnnnnnnnnnnnnnnnnnnnnnnnnnnnacaagagaaaagctgtttttgggggggtctgtatttgtctgtggacctgtcattgtgctttttgttgggtatttaatgtcattctcccgtctaaatgcaatcatgattgcatttagacnnnnnnnnnnnnnnnnnnnnnnnnnnnnnnnnnnnnnnnnnnnnnnnnnnnnnnnnnnnnnnnnnnnnnnnnnnnnnnnnnnnnnnnnnnnnnnnnnnnnnnnnnnnnnnnnnnagtctgggcaaccaaagggttgatttttatcctttgaaatttaatattactttagtgtcctgacttaaaggattaatttaattatgacagaatcaaaaagaataaaaaagttttctctttgataagatatgggagtttggaggaaatgtgataagactcttaaaatcctgtctaaatgcat

SEQ ID NO: 229391 - DNA, 338 bp, Homo Sapiens
cggtagtgtcagtacatgcttttgaacgtatgtaggtttgtcagaccatgctcccattttgttgactactagattaccaagaccgccgaccagccagaggttcaaattcgaacttggctggctacaacgggaaggattttaggttatggtcaaaagaatattggaaagaccagttgttggtgagtctccaatacagagatggaataataaaatatgttccttacgcaaacacttgcctagatgggctcgtcacacaacaggtttacttaaaaaagagaaacaccatctttcatctattatagatgacctcgaggctctagggggtctaaatgcaatca

SEQ ID NO: 229392 - DNA, 137 bp, Homo Sapiens
tgattcttacgggcagcacacacggtgtgaatgtcagcatgcaaacaaagccgaagaacagcaaggcaattgccccgaggttgccactgcccagcgtgctggcgatgcggccgagcttgtcgtcggaagaggactcg

SEQ ID NO: 229393 - DNA, 298 bp, Homo Sapiens
  misc_feature (71)..(201): n is a, c, g, or t
acctgatagatttagactcatatggaaatgtaaaggactggcattgggaaaaaaagaaactttgaaaaggnnnnnnnnnnnnnnnnnnnnnnnnnnnnnnnnnnnnnnnnnnnnnnnnnnnnnnnnnnnnnnnnnnnnnnnnnnnnnnnnnnnnnnnnnnnnnnnnnnnnnnnnnnnnnnnnnnnnnnnnnnnnnnnnnnnggcccacacatatttctggaaaactaaattttggcaaaagtacaaaggcaattcagtaaagatagcctttttcaacaaacaggtctaaatgcaatca

SEQ ID NO: 229394 - DNA, 214 bp, Homo Sapiens
  misc_feature (98)..(156): n is a, c, g, or t
ctatactgactattctcgaccatctatactgactatctatactacttattatactgacgctatctatactacttatctatactgaccctatactgacnnnnnnnnnnnnnnnnnnnnnnnnnnnnnnnnnnnnnnnnnnnnnnnnnnnnnnnnnnncatactgacatatctatactgacgctatctatactgacccgccataattgtcggcgcg

SEQ ID NO: 229395 - DNA, 165 bp, Homo Sapiens
atgactcatctatactgacgctatctatactacatatctatactgactatctatcaccatactacgtatctatactaccctaaatgaatctaatgtatagtaactatctattatattcatttagggtagtatagatacgtagtatggtagtataggtagcgtcag

SEQ ID NO: 229396 - DNA, 125 bp, Homo Sapiens
tactgaacctatctatactacgtatctatcgacgcatctatacgctctatactgacttatctatactacctatctatactaccccctaattgtcggcgcggaggggggtagtatagactggtcag

SEQ ID NO: 229397 - DNA, 135 bp, Homo Sapiens
cactagctgactatctatacgaccaaacaatctgacctatctatactgacctatcgtatactgacgtatctacgtacctatctatactgacttatctatactgacctatctatactgacttatctacactgaccc

SEQ ID NO: 229398 - DNA, 218 bp, Homo Sapiens
  misc_feature (72)..(158): n is a, c, g, or t
gtcagtcggtaccagcataaactattatcaaattaaaacaaagaatattaacccctgaaagctgaaagcaannnnnnnnnnnnnnnnnnnnnnnnnnnnnnnnnnnnnnnnnnnnnnnnnnnnnnnnnnnnnnnnnnnnnnnnnnnnnnnnnnnnnnnatactcagggactctcgctttcaacttaaacagaagttcaagtccaatagtttatgctgt

SEQ ID NO: 229399 - DNA, 180 bp, Homo Sapiens
tcagcatcaactattactgcatagactataacagtatacactattacatgcataaactattacatgcatatactattcccccgagcattctcaattacaatatatacaccaccaaacaatgttcaaccatgtaactactactactcgaacgcccattatcatacaaatgcccccgttggt

SEQ ID NO: 229400 - DNA, 288 bp, Homo Sapiens
  misc_feature (104)..(144): n is a, c, g, or t
tcatggcgtcactagcagccttccactcctggtctcaatcaaatcctcctactttaacctcccaagtagatggggactacaggcatgcaccactatagccagcnnnnnnnnnnnnnnnnnnnnnnnnnnnnnnnnnnnnnnnnnctgtctccgaaaaaattggaatagtttatgctgtacagcataaactattgccaagcatgataatgatttactttatacttcctttcattctcccagaattgctcttagagctagggtgtcgtctttagcatgttgtcgctaatg

SEQ ID NO: 229401 - DNA, 245 bp, Homo Sapiens
gtatataacttaacctgacgtaacgcattcacagctgcatcataatcctctctcaaggatgacataccctactcccactattagtggatcctgtatctccaccctgccatcatgcagctttggacctgatcgcggaagtacaaccatgttctcatctctccaataacataggcttttaaaccatatcccaatttgacttaagatatgagtttatcaataatatctacatcaatagtttatgctgt

SEQ ID NO: 229402 - DNA, 287 bp, Homo Sapiens
tgtaatagctgcatctatctacaacaagtattttcagttatataagcagttaataatacccttgactcatagaccattatgatgtatcatgatattatatgcgaaaatgataatcaaaactgttgcctatacattcgtaagagttgtgtgccacctttgctgagggtattaaaattaatttccatttaccatgattatatactagtatcatagacagtgtggtcagcatctcagcatgtatctttataatcaggaatacgttttatgcttgtaatcgtttatgctgt

SEQ ID NO: 229403 - DNA, 188 bp, Homo Sapiens
agctggattgcagcatttccactgtcagttcagcatttagcttcaatcatcagttagtgtctgttgtccattcatgtcacatcctttcctcatggccaggcacaacagctcaattcaccattttaatctcactcagcatcttgttcatgccagcatcatttgtgccccattggccatcagtttatgct

SEQ ID NO: 229404 - DNA, 373 bp, Homo Sapiens
  misc_feature (126)..(331): n is a, c, g, or t
attgcgggactcgggtactccgatatctgtatacgcagaataattgtgtagcgtttattacgttggtggtggtgttcttgagacggagtctcgctctgttgccaggctgcagtgcaagtggcatgnnnnnnnnnnnnnnnnnnnnnnnnnnnnnnnnnnnnnnnnnnnnnnnnnnnnnnnnnnnnnnnnnnnnnnnnnnnnnnnnnnnnnnnnnnnnnnnnnnnnnnnnnnnnnnnnnnnnnnnnnnnnnnnnnnnnnnnnnnnnnnnnnnnnnnnnnnnnnnnnnnnnnnnnnnnnnnnnnnnnnnnnnnnnnnnnnnnnnnnnnnnnnntaatttgtaaagcatattactttattgcatagtctatgctgt

SEQ ID NO: 229405 - DNA, 234 bp, Homo Sapiens
caccgctgcacgattcagacgagccttccctagtacgagacggacccggagtggccacacctctggtgtatcggttgtcacgccagtggcacttgccgagtcgctaagtgtggaagagatacccgctgaaagcatctaagcgggacactcgtctcaagatgagtcttgccggggccttgtagccccctgaagggtcgttgtagaccacgacgttgataggttgggtggtatcag

SEQ ID NO: 229406 - DNA, 156 bp, Homo Sapiens
ctcgactctaccggatcttatacaccctgcgcggaggatcgtaacggggtaagctagtacaccgaagctgcggatatccttttaggatatggtaggagagcgttctgtaagacctagcgaaggtgacttgtaaaggttagctggtggtatcagaga

SEQ ID NO: 229407 - DNA, 158 bp, Homo Sapiens
atactacagatattagcaagcactacctccatgagaattcagtggtatagggtggatcgggtgtctagggtggtatagtcagtatcagaaaagcactacctccatgtagaattcacgtgtggggtaggtatagcttgggtaccgagactcgcaattcg

SEQ ID NO: 229408 - DNA, 234 bp, Homo Sapiens
tgatttcatgatcttatatcgatccagatgtcatacaggacacgccgctctctggtctctatggcctgggcagcccgacaaatggcgagattcagcaaagtggctgggccaaccccgctggcctatttgcccaaagtctttctgcgtcacacatggcagcttggttggcacgcaggagtcggtagcaagcagcgccaatcaaagtggacgtggctgtctgtccgggttaccgag

SEQ ID NO: 229409 - DNA, 186 bp, Homo Sapiens
acccccaccttcaccattttacagtataaaaaagcactagctccatagagaattcacgtgttgtatggtggtatcaagtgatatagggtgatataggtggtatcaggttgttatagggtggtctagggtgttatagggtggtatggagtggtattgggctgctatagagagtatagggtggtatag

SEQ ID NO: 229410 - DNA, 133 bp, Homo Sapiens
agatagtgtctgggcaactgcaggatctgggcatacccacgccagcaaggcagcacctgttgcaagtcatgcagtaccagcctttcgctgggcaagcatccaaagcaccattgcttggcactgacgcacagtc

SEQ ID NO: 229411 - DNA, 160 bp, Homo Sapiens
gcaatacggggaaatcgtcgagtagactgacgagaaattggtatctgtagctttaaggtgccacatatccatattaaatgcattcttatctgaaattaaatctaacttatagcaggagtaagtctttactgcttacagtagagaagtacttgagatctgt

SEQ ID NO: 229412 - DNA, 151 bp, Homo Sapiens
tgcatgcttgctcatgcaggcaggcctcagtcagtggggtgcaggcttggcattcagcgtttcagcaagggctcatttgtttgtgggtctccatgtagttggcagtgtcaggcatcaacatcgtgctcaaggagcagggcatgaacacgca

SEQ ID NO: 229413 - DNA, 227 bp, Homo Sapiens
caccatagcattatcccagttcacacatcaccagtgtttcatcacacagtgccaatgtatcatttcccttccccgtgtgccatcatgttcccatcattccaagtcattgcagcaatgccccagtcaacttcactcatcagccagcattcaacttttacaacacactgcccccagcacatttgctacgcacatttcaggtaccttccacacatgttttcacacatgtg

SEQ ID NO: 229414 - DNA, 136 bp, Homo Sapiens
atcacgcagcttataccgcattactggatgctcttcatggggataattgcatcccgatcccatcacgaatgggttcacgggttaccgcgctgctgcgtagggtatgcacacgctgatgcagtcagtgtagcgcgcg

SEQ ID NO: 229415 - DNA, 263 bp, Homo Sapiens
tgcattttcactatgtgtaacttgactacgtttagtggtacttgcgcgtactttgagctcatcaggtatgtgaagatgcggatataggctgagcaagaggtggtgaggtgatcgcggttatcgataacagacaggctctctagagggtttgaatcaccgccagtcctttgagtttaagctgtggctcgtagtgttctggcgagcagtatcgtagattaagctgttgaggtccagggctaagcatagtgtggtatctaatccca

SEQ ID NO: 229416 - DNA, 577 bp, Homo Sapiens
  misc_feature (120)..(205): n is a, c, g, or t
  misc_feature (560)..(560): n is a, c, g, or t
gctgatccgcttaagaccgaggtttttctcatttgcagttgacacttctcagtctgtatttctggctttcgctgtcagcaggagagtctaactttaccctgttgcttgctgcacacctcnnnnnnnnnnnnnnnnnnnnnnnnnnnnnnnnnnnnnnnnnnnnnnnnnnnnnnnnnnnnnnnnnnnnnnnnnnnnnnnnnnnnnntcccctgccagctcctcaggctccacaagtcagtgaccacatctatttctcttgtctacctaacatacttcttatttattctgtcatataaagctgtctctgttgacccttgtcatctcagtcttttttattataacctctttccttctacttttttcacttgtcttctttctatttctaatatttaagatttacactttagccagtttcttaaaacttatttgtgcacctaatattttcttggtcatcaattattgggggataaaaattccccctacttctaaaacatgagcaaggtacattggtaattctcaggtttaaggatttcttgaaattacattatctgatttattgngatctgaagtatagttg

SEQ ID NO: 229417 - DNA, 246 bp, Homo Sapiens
actaagatccgctgatcgttaagctcgtattatgtggttttagtaaacaccagacagacgagagtacatcgtagttgcatcacgtgagctcatcatgtctgcatttttgcatggaccatttgtccgggtagatcatgctgcagtagtcagcagttttacctgaacatctcagtatcagctgaatttctaaatgcacttcatcatctgcaatcagcgagatcacttcaacacacgacctctggacat

SEQ ID NO: 229418 - DNA, 251 bp, Homo Sapiens
gcggcaagtagcacagtgagctagagtgtcatgagatcagactgctaacgtcatgacctagagcgctgtctagggcaaataaaagacttacttaactgtactcggccacactgttactattgtctcatctctctctcactggttctcatttaaatcggggcatggctacgcccagcacctgcaagtttggtgagatgggtgactaaaacagatgcaacgtactggaaactgtgacatcattcccgatgatc

SEQ ID NO: 229419 - DNA, 310 bp, Homo Sapiens
  misc_feature (51)..(208): n is a, c, g, or t
  misc_feature (230)..(257): n is a, c, g, or t
actctagaggttaacgctgatccgcttaagggcgggcggtatgagagtcannnnnnnnnnnnnnnnnnnnnnnnnnnnnnnnnnnnnnnnnnnnnnnnnnnnnnnnnnnnnnnnnnnnnnnnnnnnnnnnnnnnnnnnnnnnnnnnnnnnnnnnnnnnnnnnnnnnnnnnnnnnnnnnnnnnnnnnnnnnnnnnnnnnnnnnnnnnnnaatcttttaatgtaagaccttnnnnnnnnnnnnnnnnnnnnnnnnnnnnttaaagagatggggtctcactatgttgcctaggttgtagtgcagttgctattc

SEQ ID NO: 229420 - DNA, 185 bp, Homo Sapiens
gagtctgggacctccttcttccccacttctctctgcattcattcctttctctctccttctggcctctcatttccttacactctgcctcccggattcaatgtgattctccattcctcacgcctcccgatgtagctcgggaacggagaatccacttggaggtacctgacgctcgcaattctgtaata

SEQ ID NO: 229421 - DNA, 286 bp, Homo Sapiens
gtgatcgtagaatacgagcaattcagactctgttgcccagctatgtaacacacacatggacactttcaaagtgatatgtcaacagatacagagtaggcgtactaaagtggatactctagggaaagtgactgctacttaaggtggatcaacagcagagagatgatgtctcctgaggcaaaatcaatattcatagcatggtagaaacaactgccttttggtgggctggaatcataacagggagaagtggagatattcttagggatcagggtacgagctcgaatcgtat

SEQ ID NO: 229422 - DNA, 169 bp, Homo Sapiens
gctgatcgctagtctaaaatatcatttataaatatactttctaatcagatataattgttctgtctgatttaagccctacactggctcttatttgttctcttcaactaccagcaactcctgtctccctccccaccagtataaaacttcagttaatcctttgcctatcatt

SEQ ID NO: 229423 - DNA, 328 bp, Homo Sapiens
  misc_feature (98)..(98): n is a, c, g, or t
  misc_feature (193)..(287): n is a, c, g, or t
agaggaccgctgatcgttagtctaaatcatcattataaatatactttctaatcagattaattgtctgtctgatttaagcatcactggctctacttgtntctcttcaactacagcactcctgctccctcccaccagtagaaacatcagctaatcctttgcctatcattttgcatctcttttcagcttctttatnnnnnnnnnnnnnnnnnnnnnnnnnnnnnnnnnnnnnnnnnnnnnnnnnnnnnnnnnnnnnnnnnnnnnnnnnnnnnnnnnnnnnnnnnnnnnnnttcaacttaatctttttatgtagtattcttcctgcttaagc

SEQ ID NO: 229424 - DNA, 113 bp, Homo Sapiens
cttgcgtagagacagacgaggacacacgtgactcggatagctccgcacgtgacttcgtttcagctgtacaagcagttagtctgaatgccctgatagaatgtatcttctcccac

SEQ ID NO: 229425 - DNA, 127 bp, Homo Sapiens
ggctatcacatatctgaacaactgataacatgtatctccttcacaggttcatggtcaggtgttaattccacccgcgtggattctttcacatctctggtctttatttaattcccgtcccaaactctcc

SEQ ID NO: 229426 - DNA, 260 bp, Homo Sapiens
agaggatccggctatcacattatcttcccctctctgggtagtgcctcattttaataagccatgctccaataaccgaatggacctttatcctggggatggccttgtaccaccgggagtaccaagggcttaccaagtgagtagactggctccaactaacaatccactttggctttggtttagccactttgcttaccagtgaatgggcttctacggctaaggttaatagttttccattccttgtaatttggtaatggtggtag

SEQ ID NO: 229427 - DNA, 114 bp, Homo Sapiens
ccacaggctatacaccaaagcgtaaccctaacttaaacttggtgggactctggggtgactaatgatgttgtccggtgtagggctccatcaatttgtagcggtattgtacccact

SEQ ID NO: 229428 - DNA, 195 bp, Homo Sapiens
aacgcacggaggtgtcagaaaagttaccacacggataacatggacttgtggctggccagcgtacatagcgacgtcgctatattgatccttcgatgtcggctcttcctatcattgtgatgctgaatacacacacagcgtcggattgttgacccactacactagggaacgtgagctgggtctagaccgtcgtgagac

SEQ ID NO: 229429 - DNA, 189 bp, Homo Sapiens
gcgactcaggagacagaactccgtgagcagaaggcaaagtcgcttgatctgatttcagtacatacgacgtgaagcgggctcacgatctctgacttttggtttagcagagtgtcagaaagtacacaggatactgctgtgcggcagcgtcatagcgacgtcgcttttgatctcgatgtcggctcttctatc

SEQ ID NO: 229430 - DNA, 203 bp, Homo Sapiens
aaaagttccctaaatggttacgtattatcaagacggataagtatatatcatgtatatctaatatccatacgagttatgatgtgtaagtctaatatacgtgagctaggtagtctacggggtctagtatcttatgaaagggcagaggcatcttgagagcaaggcacaagatatgtgatagcgggtacgagctcgaatcgaatcat

SEQ ID NO: 229431 - DNA, 250 bp, Homo Sapiens
  misc_feature (185)..(185): n is a, c, g, or t
ctatcacattatcaaagagcacatatgtacaatgcattttacaagagaacagaacattaccaatatcagctggcagtaagggcaagctgaagaataaatagactgatgttgcctgggcaatgtctagtcctcaaacgacatccaaacgtgcgttcaggcgagctgaacacagacttcttgcccangtgacaaggcatatgtggctcagtaatacaatacgatggatacattgtgactagccgggctaccg

SEQ ID NO: 229432 - DNA, 169 bp, Homo Sapiens
  misc_feature (82)..(82): n is a, c, g, or t
acagaggacccattcagtcaaccagacttgcctgtgcaggctgcacatcagcagaatagatctgtctgttagtgatacgtgntatcttatagacaggtacagtcgtgtagttagactatagtttgtactgtactttcttgggtggcagaggaaagaaaagtaaaacatt

SEQ ID NO: 229433 - DNA, 240 bp, Homo Sapiens
tagaggatccggctatacataatcgttgagcgatggccacccacgcgggacacccggatcactatacgacttcgtctctgctcgacatgtccgtctcgcaagtcaaagcggggctttattgccatttgcacgcaaacgagcgaatttccgaaccgcttctagagccccaacctatcgttacgcccttcccgtttaccgcttttgcgaagggcgaaccggcgcacaagttcaaaacttggc

SEQ ID NO: 229434 - DNA, 329 bp, Homo Sapiens
  misc_feature (90)..(280): n is a, c, g, or t
tgggttgtgaactctttgaggggtttctcggacagcggaacagcaatggccaggagagtggtatctggcaatggtccttaggtgctggtnnnnnnnnnnnnnnnnnnnnnnnnnnnnnnnnnnnnnnnnnnnnnnnnnnnnnnnnnnnnnnnnnnnnnnnnnnnnnnnnnnnnnnnnnnnnnnnnnnnnnnnnnnnnnnnnnnnnnnnnnnnnnnnnnnnnnnnnnnnnnnnnnnnnnnnnnnnnnnnnnnnnnnnnnnnnnnnnnnnnnnnnnnnnnnncaatctcaatgcctgttaggtctacctgggggtacccgagctcggaatt

SEQ ID NO: 229435 - DNA, 237 bp, Homo Sapiens
cactcaatggtggacttttaaagggtccatcccagggcccttgtcctctcaaaggcctcccctggtgtatccccctctacagtgcctgtcgtttcccgttactcctcctccagtggactcattccaattacagggcctcggttaggtctacctggccaggtagaactatccagtaaaagcaaaagcccaggaaggggacagaggggcggcccgataagccatggcgcagggggagag

SEQ ID NO: 229436 - DNA, 483 bp, Homo Sapiens
  misc_feature (60)..(357): n is a, c, g, or t
tcctttcacgtacaaatattcattaaagcaatagttaaatatagatgaaaaatgacctannnnnnnnnnnnnnnnnnnnnnnnnnnnnnnnnnnnnnnnnnnnnnnnnnnnnnnnnnnnnnnnnnnnnnnnnnnnnnnnnnnnnnnnnnnnnnnnnnnnnnnnnnnnnnnnnnnnnnnnnnnnnnnnnnnnnnnnnnnnnnnnnnnnnnnnnnnnnnnnnnnnnnnnnnnnnnnnnnnnnnnnnnnnnnnnnnnnnnnnnnnnnnnnnnnnnnnnnnnnnnnnnnnnnnnnnnnnnnnnnnnnnnnnnnnnnnnnnnnnnnnnnnnnnnnnnnnnnnnnnnnnnnnnnnnnnnnnnnctctgttagaactctctcaatgagtaaaccagaaaagttcagaataaatatttctgaactctgaagagcataacttaaaacattgtactgtgtttatatgtactataatatcaaggaacaataatt

SEQ ID NO: 229437 - DNA, 362 bp, Homo Sapiens
cgcacatgtcatgcagtcgatccacgcatccatgtttgcgccatagaaagcgggaaagccaagggtctccgcgaagacctcgtggaaggaaggccaatctgaaatcaggttggtcgggatcggtactatagtggtgttcatgagcgcaccatacgcgtgaaacagccaatatctgcaacgggtcgatgtcagtcttgggctccgacgacgaaagcggtcgctatcgacgtcagctcgggatggttagcgtaaatgccccggacttcgcctacggaaccgctcttcgaacggatgagaggcaagaagtttcatcagaagggactgtcatgccttctgcctctaggcgtcgagccgcagtgcga

SEQ ID NO: 229438 - DNA, 342 bp, Homo Sapiens
  misc_feature (59)..(69): n is a, c, g, or t
acctctaccccacgatcgaagtcttttgcagatcttaatttaattaagttttccttcgnnnnnnnnnnnggttggtttggtttccttaaataggatttcctgaattccttggtacctaaaatcgatattggtgtgggaaacaatattaacggatttttccagtatattttctttatttaacttattttttatatgtattggtggtgattttatacctcagtatgtggcctatgttgtaccttgtaactttcatgattattttataattactttttacaagataacttctattcaatttataatgtctgttttataatcttccttcccagattttacctgttt

SEQ ID NO: 229439 - DNA, 367 bp, Homo Sapiens
  misc_feature (84)..(232): n is a, c, g, or t
agtactaccccacgacctcctacccccacctcctacccagtatcaaacaattctcctgcctcagcctcctgcagtagccagggnnnnnnnnnnnnnnnnnnnnnnnnnnnnnnnnnnnnnnnnnnnnnnnnnnnnnnnnnnnnnnnnnnnnnnnnnnnnnnnnnnnnnnnnnnnnnnnnnnnnnnnnnnnnnnnnnnnnnnnnnnnnnnnnnnnnnnnnnnnnnnnnnnnnntgagccaccgagcccagcccctctggttgacttttaatctgagttattatactcttcagctccataattttgatttcgtgcttctttacaatttttatctctttattgatactctctgataagatgtcattctca

SEQ ID NO: 229440 - DNA, 121 bp, Homo Sapiens
  misc_feature (39)..(39): n is a, c, g, or t
actaagcgaaggcttgagaaagtctccttgtctgagcantgataaactatctagaaacatcccacaactatcagagtgacaatagctcatgctaactcaccgaggcaccccgagaaacaat

SEQ ID NO: 229441 - DNA, 183 bp, Homo Sapiens
agctgatcgacgaggcggcctggcccaggcggtcgccatgcgcgccgtctcaggcgtcggtctggacgtgttcgagaatgagccggacatccaccccggcctgctgggccagcccaatgtggtgctgttgccccacctgggttcggcgacgcttgaggcgcgtcaggacatgggcgaccgggt

SEQ ID NO: 229442 - DNA, 277 bp, Homo Sapiens
  misc_feature (190)..(211): n is a, c, g, or t
gctaccactttctacccacggtaaagagcacatagaatttgatgatgtggcctcccaaagtagttctatttcctgtaaaataaaacttattttttaggctgggtgcagtggctcataggtttgggataagaaaatcttattgtatatagaaaggaatatattttcctccctctttcccaaaagttacacnnnnnnnnnnnnnnnnnnnnnngctgcactgcttagaatttccagtacaaggttaaagagtaacgggttaaattttgctattattata

SEQ ID NO: 229443 - DNA, 292 bp, Homo Sapiens
taccccacggactatggggaaattatcccgacgcttaacgtttcattagttactggtttcccagagctgtgatcggtcaataaagatattccgccaaagaccagattcgggtcgctcccatcattgcgcaacgattgagtgcacatggatcacccaagtatctttgatgtgctattcagctgactcattcaggtgagtgtgtctcaatgaaatcactactacaatgggggtcattgttgtcagtggccaatcggtgcaattcagtggtgatgtgattcacatttgtttccaa

SEQ ID NO: 229444 - DNA, 222 bp, Homo Sapiens
ggctcggcacccttcaacaacaagtcgccggcttcatcaagaatagacccttaagggctgcggcatactgcagcattatggtcacgaagagcgtcggtcgcaggaccggcgctttttgtttgtctggaacgccgataacatacgggcgttcggggtaaggcaaagcaaggcgtcgatccacgggggtcgaactgatcgagaagcagactggttatgaataga

SEQ ID NO: 229445 - DNA, 108 bp, Homo Sapiens
ttgagccactgggttgcggtctcactcatcatatatttttatgaactggtccattttggatgggttgcactcaaattattttgtatttgtccagttaatctttgttac

SEQ ID NO: 229446 - DNA, 227 bp, Homo Sapiens
tagacatcagatagaaagtgagacatggtgtcctacggcattggactttccaaccctgacagacccgcaagacaaaacaacatggattctatgaccagacctctagtagaaatcccagtaacactcagccctgtacactgtgaataccactgcacagcatcagcaggctgctgtgccacacagtcctcaccaagaccacagactctgtcttccacaagacacgattc

SEQ ID NO: 229447 - DNA, 158 bp, Homo Sapiens
ctcccactcatcgtaccacagctgagaaatacaccagaatgagcatggaagccagtgtgatgctgcacagatgtgttcctgtgatatcatgcccgactactgaccctcgactgggatcactaatggatattcaaatgatccaactccacacatctgcc

SEQ ID NO: 229448 - DNA, 375 bp, Homo Sapiens
tccccctcctacccacgctggcttcaacatgcccaatagactcttccctgatcgctttgaaaatagatctgtgtctgggacaccatcccttaactgaattgacaggcactactgagacagtggtattcctaacaaaacgttgtcgaaagagaatcaccgcatactacaatactaccgaacagctatgagattttctatgtgtcccgcgttaaggcacagcagccggagtaacgagacgagtccagtgtggaattttagtgggtgacgagtggtataaagatgtgctgttagtcagtcatgcttcacgaggtcctaagacccagagaattctggaatttgtaggtaatactacacattcaataatgtatctattta

SEQ ID NO: 229449 - DNA, 151 bp, Homo Sapiens
cctccaggtctcctgatgcatttacattctaatttccaattgaaagtcaagaggctacaaggaagagtgaatggaggagagaatgcagaaggggtaatcagtgttggaattgaggagttaaaaggtctggagagtgcgtaggggtaggacg

SEQ ID NO: 229450 - DNA, 152 bp, Homo Sapiens
taccgtatcagcgtacgcaagtcggccaagtgttggatgatggcaggcgttcttcaaggcgatcatccctcaagcaatctgaatacaccgctgatgactgaaaattatgagccgacaccaagcgaggccttggtgtcggctcagaaacatcg

SEQ ID NO: 229451 - DNA, 409 bp, Homo Sapiens
atagcgcaccgtaccccagataacttagaagggtcaattcgtgagggtctggtaagggacgggatcgatacatttgagcgcaccgtgcccaatcctgacatgcgagcggcaatttcagaggttgctcatcaatgttcttccgctcctgcgtggtttgaattgcaacctccgcgagtgaaagacggctatagcagcagcgttggcgaccggcagtacttcatcgactacaacccggcggtctcaaggagcaagtgcaacagtcagttaacttttctgcacctgctaagcgaacgcaatcccgcttccaaaacatcatcatcaatggacgtctgaccgaaccgagccgatctgcttgcacacgattttcactgccgaaagcttaccccatgacaagctcttccgtcgctga

SEQ ID NO: 229452 - DNA, 372 bp, Homo Sapiens
atagcgacaccgtacatggcagccggaatttgttggcgcccgacgaaagctacaaagactttatgcaggcagttgtgcgaccggcacgggacatcctgcatgagcatggattgaaaggttttcatgaactgcgggcggcttacgcctgtgagcgctatgagcaactaatcggctttctcgcacccgttaatggtggtcgtgttcatcaagaggatcgagcactcgatcagcgagcccgtaagcagatcagccacgagttgggacataaccgcattgatgtggtgagtgcctacatcggaggtcggcgatgacggccgatttcgacatagcgttgttcctgcgccccgtactcaaagggtacggtgtcgctat

SEQ ID NO: 229453 - DNA, 356 bp, Homo Sapiens
  misc_feature (50)..(78): n is a, c, g, or t
  misc_feature (217)..(313): n is a, c, g, or t
tagcgacgtactctatgcaacacactcttatttctattcgctttaatccnnnnnnnnnnnnnnnnnnnnnnnnnnnnnggacaaacccttgttctgttgcccaggctaaattgcagcctctgcctcccggtttcaagcaattctctttcctcagcctcccaattagctggaatcacaaacatgtctccaccaggttccagctaactttttatcctcnnnnnnnnnnnnnnnnnnnnnnnnnnnnnnnnnnnnnnnnnnnnnnnnnnnnnnnnnnnnnnnnnnnnnnnnnnnnnnnnnnnnnnnnnnnnnnnnncccacccaattccttttttttaaaagtgctgtccataaggtgc

SEQ ID NO: 229454 - DNA, 350 bp, Homo Sapiens
taagatgaatgtatcacggatggccgtttttgtatccggtgctgcaactaaactttcgaaattgtttcaaagtcgccaaatgggctactttgatgtagaaaacggcccctgagtcgcccacgaactcaacctcttttgcggcgaaaggagacgctatgctttttccagtactcgatggtctcaagctgcacaaggtgctggtacgcaccatcaaggaattcgtcgatgacgagatgcctacctacgcctcggcactggcctaccagatgctgttctctttgtttccgttcctgctgttcctcattgccctgatcggcttcctgcatttgcccgacttcttcagttggctg

SEQ ID NO: 229455 - DNA, 359 bp, Homo Sapiens
tacagagtgaatgtacttttttgttcacggtatagtgcaaatagtttggcgtgcaattattaacaacgtctacttccgaatcttcaattaactcgtctacactcccataaaaattcggaatggaaaactgttctgccattcgtttcgccttttctaatgtgctgccgctgatagcaaccacttcaacgccacttaatcgccttaatgcttctatatgcgattttgctgaaaaaccagtaccaataatccccactttaatcagcgacatatgcttcctcctattttttcaatgtttttcttccaaatgccactgctataataataatgagtccttttacaatcatttgttggctaacatc

SEQ ID NO: 229456 - DNA, 110 bp, Homo Sapiens
tacagagtgaatgttcagagtgatgtattttattccagtggaacaagcttggatctatgttagtctcagtgtccaactaacacttgtgatttgtctcagtattttatttt

SEQ ID NO: 229457 - DNA, 212 bp, Homo Sapiens
catacctggaaactcttacacctcctacttttacctgtccatctcttactacttttaccgctatgatttgtcttacatgaacttttccacatactttctttaccactctcagttagagtctaggcgaacatttctaacaaatctcgatgaatctgctagaactcaaccatggctggcctaatcttccttcacgatatcatcgaaaccaaact

SEQ ID NO: 229458 - DNA, 356 bp, Homo Sapiens
tacagagtgaatgttctgaacaagaaaagggcggaggatatcagcgactacatcctcgccaatcgtcacgactacgttttgccgtccctgtaccgcaagcgttgatacggccatggctttcgaacctatggatgggggaaaacagcttgggaccttgcacatccccatgagcgccatgatgctcattaacgatggccagcaccggcgtttcgctatcgagctggcgctcaaatcagacccatctctacaaaacgagacagccccggttcaaatccattttgaccaagggcttcgtcgatctcagcaaatttttgcagacatcaatagcaaagccgtcaagccatcgtcagcgctga

SEQ ID NO: 229459 - DNA, 373 bp, Homo Sapiens
gtacagagtgaatgtatcaacctgatgggcgttgtcaaaggctgcaaggcgttcctgccgctgctggaaaagagccagggccgcatctatcaacatcgcgtcaatggcagcgctgatgcagggccccgccatgagtaactacaacgtggccaaggcgggcgtggtggcgttgtccgagagcctgttggtggagctcaagcaacaggaagtgggcgtgcatgtggtgtgcccgtcgtttttccagaccaacctgctcgactcgttccgtgggccaaccccagccatgaaggctcaagtgggcaagttgcttgagagttcgcccatctcggcggcggatattgccgactacatttaccagcgcgtggccgaaggc

SEQ ID NO: 229460 - DNA, 236 bp, Homo Sapiens
ttggctgggttacagctgattttatatcattttatacgaatcatgaagttacaagacgacagaaacccacagcatgtaatgtatactttggtttggctagcaaggctggcacatctcgaatgctgtgtgtgtccaggatgtgaaggacggggtgacttctatgtcctaggtttattcctgttttaacagattgacaatcggttcaaagaattaagctttgcctgaagtgtcaacgt

SEQ ID NO: 229461 - DNA, 279 bp, Homo Sapiens
gcacaatgcgagctcatttacaacatggaatcggtgcacaatctggtctacgcccacgctgcagttcaccctatacaccgtcgcgcggttgacatcaaccgggcgctcggcgcacaactcgcagaagcctcgcgtgtcgtggatcaactggcgcaccctaagagcgtcttcaatggaactcagtcgagatcaacccgctctgccagttcttctctggccatttatcagacaacacctgattgccgtcgcagtttcatcgggttgattgtctatggcacc

SEQ ID NO: 229462 - DNA, 392 bp, Homo Sapiens
tcctactgtgttgggtgtggatcatgtcgtgaggggcgatcactagaatccgtttgagtttcagcatcatgggcctcgtcctggtggctcaagtatctggcgtgaggcgctgaaggctctgatctttgtcaatgaatacccggtccgggcagagacctttccccgctggtcgattaaccccgcaaaccccggaatgaacagtgcgccgcagtgcctggcacctatgctggataaactccctattggcgtcatttctcatgccggaaacacgaccactgcacattcaacacctcaaggctgcctgttccagttgcagcgttttggagttgtgcctgcccatcggtctgaccggtccggaggtccaacgtctggacacgctgatcgtgcaacgc

SEQ ID NO: 229463 - DNA, 387 bp, Homo Sapiens
  misc_feature (71)..(202): n is a, c, g, or t
  misc_feature (215)..(252): n is a, c, g, or t
  misc_feature (290)..(332): n is a, c, g, or t
aaacgctttacactactctgcaaggccttagtcttctaacttagctcctctaacttttgctttttgtttgnnnnnnnnnnnnnnnnnnnnnnnnnnnnnnnnnnnnnnnnnnnnnnnnnnnnnnnnnnnnnnnnnnnnnnnnnnnnnnnnnnnnnnnnnnnnnnnnnnnnnnnnnnnnnnnnnnnnnnnnnnnnnnnnnnnntagcattattatnnnnnnnnnnnnnnnnnnnnnnnnnnnnnnnnnnnnnntcatgagagtaaaaggaggtattttgtatgaaaatctnnnnnnnnnnnnnnnnnnnnnnnnnnnnnnnnnnnnnnnnnnnttacaaattagccagtgattctgaaggctttttattgttttgaaagttgtgagca

SEQ ID NO: 229464 - DNA, 233 bp, Homo Sapiens
  misc_feature (117)..(165): n is a, c, g, or t
  misc_feature (175)..(175): n is a, c, g, or t
ccaacgctgctcacacacactaaaaaacaaggaaaagaaacaatagaagaataatcaacagtagtgcattttcgttttatttatttatttagagatggattctcacactgttgactnnnnnnnnnnnnnnnnnnnnnnnnnnnnnnnnnnnnnnnnnnnnnnnnntggtgttcanagagaattctccatgccttgcgcctaccgtacgtagctgtttattacatggcacctgt

SEQ ID NO: 229465 - DNA, 314 bp, Homo Sapiens
ctcacaaagctatcactatacaaatgatgacaagtgcacaatggaccaatgctcaagccagagagtgtgccaatgtaacagagcgtgacgaaggcagtcacctcctgggggcccaggtagggcacactgatcaggaccctttgaattataccctgaagaatgaatagagaatttttgagagggcccgaaacaagatatcgacgcacaacagaaacagagagcttactaggtcaagaactcaaattgaaatcctcccctgtcacacgcgacggcccttgaccacttcctgcctatagctatgggctgctgaacta

SEQ ID NO: 229466 - DNA, 363 bp, Homo Sapiens
  misc_feature (51)..(270): n is a, c, g, or t
ccattcgcctcacacaaaaatacaaaagatcagtaagataaaaagttgacnnnnnnnnnnnnnnnnnnnnnnnnnnnnnnnnnnnnnnnnnnnnnnnnnnnnnnnnnnnnnnnnnnnnnnnnnnnnnnnnnnnnnnnnnnnnnnnnnnnnnnnnnnnnnnnnnnnnnnnnnnnnnnnnnnnnnnnnnnnnnnnnnnnnnnnnnnnnnnnnnnnnnnnnnnnnnnnnnnnnnnnnnnnnnnnnnnnnnnnnnnnnnnnnnnnnnnnnnnnngaaccactggcctttcttccctatctaactcttccaaatcagaatttaagtatttaagcatgctaaagattcttctattttgtgagcaggtgg

SEQ ID NO: 229467 - DNA, 290 bp, Homo Sapiens
  misc_feature (42)..(107): n is a, c, g, or t
  misc_feature (130)..(243): n is a, c, g, or t
tcacactggagtgcatgtggctgagatcacagttcactgcannnnnnnnnnnnnnnnnnnnnnnnnnnnnnnnnnnnnnnnnnnnnnnnnnnnnnnnnnnnnnnnnnatgtgccaccatgcccagctaannnnnnnnnnnnnnnnnnnnnnnnnnnnnnnnnnnnnnnnnnnnnnnnnnnnnnnnnnnnnnnnnnnnnnnnnnnnnnnnnnnnnnnnnnnnnnnnnnnnnnnnnnnnnnnnnnttagctgccgtgcccggcccgtgtgagatttgatgtgagcagcgttg

SEQ ID NO: 229468 - DNA, 117 bp, Homo Sapiens
tccgagtcggccgagattctccttcaatgaaaacaaaaaccctcaattatattttactagcaatctatctgtacaggactaagctggccattcagttacatgtaaccctctttttct

SEQ ID NO: 229469 - DNA, 337 bp, Homo Sapiens
tcggccaatctgttacacaatctggttaagctgagtaaccttattttaagtctgcagtcttgctgcatgataagcagacgatatcttatcttctaacagcaactgtactggttctgtgaatctttctgagctttacgaaagtgattttgcagtgtatacaggtgctaattttccttccttaaactgcatcatctgttgatcaaaattcttcaacttctcatttaagatctgttttttattttcaagatccgattgagtttgacttacattttgcttcacctgtttaatttgttgttcgctcatcaattacacgttgttggtcttgtgtcaactgatt

SEQ ID NO: 229470 - DNA, 503 bp, Homo Sapiens
  misc_feature (52)..(68): n is a, c, g, or t
  misc_feature (72)..(309): n is a, c, g, or t
cagtgttcttcagatgactaatgtcaaaaattgagacatctgttgcggttcnnnnnnnnnnnnnnnnncccnnnnnnnnnnnnnnnnnnnnnnnnnnnnnnnnnnnnnnnnnnnnnnnnnnnnnnnnnnnnnnnnnnnnnnnnnnnnnnnnnnnnnnnnnnnnnnnnnnnnnnnnnnnnnnnnnnnnnnnnnnnnnnnnnnnnnnnnnnnnnnnnnnnnnnnnnnnnnnnnnnnnnnnnnnnnnnnnnnnnnnnnnnnnnnnnnnnnnnnnnnnnnnnnnnnnnnnnnnnnnnnnnnnnnnnnnnnnnntgagccaccgcaccctacctcattttctgtaacaaagctaagcttgaccactgtggattgtctggaaaaacactggagtgttcttcaaaagcttcggcgccaaatgatagtctaaagaaatttatgaactccctacaccggcccgaaggacagtgttacagcaattattcaaaaagaaaaacccagggcctttc

SEQ ID NO: 229471 - DNA, 219 bp, Homo Sapiens
acgtgttcttcaagagagctacatttgaagccattgccccacaggttggcaatgatgctgtcattcctgaatattatactaaatgaattatactacgatggcacatagtatgccaatagttcagtggcgggacctatccttgcgagcagacggttagaagtccgggctaccgaggctcgcaattctgtagatcagtggtcattagcttgttctatccag

SEQ ID NO: 229472 - DNA, 221 bp, Homo Sapiens
agtgtctacagagcaaatctttagagtaggtcaggtaggaagccatttgccatctaagacgggctttatctctgtgatgcagagtgctttattacaggcagacataaagcggagaatggcagttctcccttcctgtctatacatcacgctgcattcactagagataaagcagcggctttgaatgcaacactggaaacatacccacaagctagaattttcaa

SEQ ID NO: 229473 - DNA, 251 bp, Homo Sapiens
  misc_feature (128)..(176): n is a, c, g, or t
gtaaagacacatagctggaaataaatgttcaagtactacctaggccccatttgatgtgtggtgctctctggattgagttgaattatgttcaagctttgcaatttcacttgtggtaaaggctctaacannnnnnnnnnnnnnnnnnnnnnnnnnnnnnnnnnnnnnnnnnnnnnnnnggcgcggtgaagttcgtttcttgttgccctgtctgatcgtgcatcgatgcgacctcgtctcagggtatacctcgg

SEQ ID NO: 229474 - DNA, 206 bp, Homo Sapiens
agtgttcttcatgaggaaaacccgatagtgttgtatgagtgcattcagatcatccttgacttctttatatctgagtctcccatcaaaggacgtgcacagcctttatgatcccaagtttttacgactgaaatcctagtgattataggtaggttttacaagtgagtgtttgactgacctgtcgcggcaccgccccggtgtggatttcc

SEQ ID NO: 229475 - DNA, 225 bp, Homo Sapiens
  misc_feature (52)..(60): n is a, c, g, or t
agtgtcttcaagaactcgcagtacattaccagctgtgattctccactgaaannnnnnnnnaagggagctcaaggtcacaagaagaaatgaaaggaacgaatcagcagccctgttcatgcaggtggtttggaagacttcatatgctgtagtttaggattaactacccctgcccgccataccccgcatcccaagactgcatttataacttttgtggactgtaggatc

SEQ ID NO: 229476 - DNA, 177 bp, Homo Sapiens
tgtgttcttcagaggagccggaagtaatcacattggaaatgataatggaagaccaggaggagctcttcgtagttccagaaacggtagaatgctgggacgtagtattacttaacttcttagctgtcactaccatgactattcacctgtcactcccttgtgctggcagcggcgcagttc

SEQ ID NO: 229477 - DNA, 251 bp, Homo Sapiens
gcagtgtcttcaagaaggatgggtacaacaagcccgaactgcatatactacaataaattactaagctcttcaagtgcgccaggacacacactaacatccaccagaatcaagatcatccaggctgaacataaccatcaccaagacaaaactaacaggcctcacgaaatcagatgatatgtagacctcttcacagacgagaattcaaatataactacctttgagggaaacgtcaacataaattcatagatgac

SEQ ID NO: 229478 - DNA, 127 bp, Homo Sapiens
ctctagacgatccccgagtgtcttcaagaaagaatataaaagaaaatgaacagtgtataaatctataaaacggaagttcattacattcacacagattcaagatggagaagaagacacaatgatattc

SEQ ID NO: 229479 - DNA, 210 bp, Homo Sapiens
tccgctgtgatggacctgagatccccagtgtctcaagatagcatggtactaacatagaagataggcatgaatcagaataaaagtccaggaataggccgtgtgtagtagctcactgcctgtaatccatacatttcttaagtaaccatattcttttaacaccttgcttcagagcacagtaccatttaattatcaccattccttccagaatat

SEQ ID NO: 229480 - DNA, 223 bp, Homo Sapiens
gtagttcttctaagatctgccggagatagtacagatcaacactaggactaactcagcatgtcaggcatgtgaaataacagtggagctctagtgttgacagtgttatacattgtaggttgtaaaccatcatctggactgccaacgcagccgcatgtctgctgtcatatatgagagaactgaaactgcatcttgaaaggcagatgccagacagtcgaagtgcaca

SEQ ID NO: 229481 - DNA, 543 bp, Homo Sapiens
  misc_feature (43)..(295): n is a, c, g, or t
actcatagttgttctagagtatccctgttctcctgctattacnnnnnnnnnnnnnnnnnnnnnnnnnnnnnnnnnnnnnnnnnnnnnnnnnnnnnnnnnnnnnnnnnnnnnnnnnnnnnnnnnnnnnnnnnnnnnnnnnnnnnnnnnnnnnnnnnnnnnnnnnnnnnnnnnnnnnnnnnnnnnnnnnnnnnnnnnnnnnnnnnnnnnnnnnnnnnnnnnnnnnnnnnnnnnnnnnnnnnnnnnnnnnnnnnnnnnnnnnnnnnnnnnnnnnnnnnnnnnnnnnnnnnnnnnnnnngggcctagagatacctttaaggggggttctaaagcctcagaaattatatatcctgaagagaaagataacagtgtaatccatggcataatgagggaaagttaaggcagagtatcttagggttgggttttccattaaaagatcagggtccttacagatttaaagtccatttaaaattttggcatagtaatatatgtacttggttgaaaaaagtctattagcccagaaggcttataatagggatcaagaat

SEQ ID NO: 229482 - DNA, 512 bp, Homo Sapiens
  misc_feature (52)..(70): n is a, c, g, or t
  misc_feature (72)..(180): n is a, c, g, or t
gatgtagcccaactgagtagctgatacaggcttgcgccacatgcccggctannnnnnnnnnnnnnnnnnngnnnnnnnnnnnnnnnnnnnnnnnnnnnnnnnnnnnnnnnnnnnnnnnnnnnnnnnnnnnnnnnnnnnnnnnnnnnnnnnnnnnnnnnnnnnnnnnnnnnnnnnnnnnnntgacccaccgcgccgggctggtcctgggcccacttctagctaagtaatatatgctggggtgagtcacgccctcctctgtcagtttccctgaatgaggggatggcctcgttaagcaccttacaggtgttttctcccattgaagagcatgctgggccaatacgttctggcagctaaaatcaaacaggggtctctcccaagacctttgtaaattaacaccggcaataatatttattggtccagaggttccacatggtaggttctccccccataaatatctccaaatcgggggtaccggctacccggtatataagactatattacaatgggtgtct

SEQ ID NO: 229483 - DNA, 347 bp, Homo Sapiens
gagataccagatgtagagttatctgacaagtatttaaaggaatcaccataaatatgtttcagtgagcaactgtaaacatacaaacaagcaaaaaaatagtctcagaaagacatagacaatataagaaatagtcactgaaaatacatcttacatggaataataggggcgatgatgctcttatggtacggtgaatgcataaagagtaatcaccgaaatcggtacctcttcgtcaaagagccctggaagttatgcagactgcaaggcagtacgccattagtgtgatacaaggtgggctacgtcgcttaccgaggctcgaactctgaacatctaggtcctagcagttgcct

SEQ ID NO: 229484 - DNA, 259 bp, Homo Sapiens
atcctagccacgtgacgtagcacctgacgtaccccagctgctgcctcgtactttgcagatattaaagaggagcctgaaactgttccttggacatcttatgaatgtcagaaaatacctttggcagggttagaatgatcatggggacagtggttgttcacaatttgcatgccacgtgaacaggcgccagatcttcacgttggaaaacatgaatcacagccttgtgaaagacgatcatccgctaagcagtgtgggctacgga

SEQ ID NO: 229485 - DNA, 662 bp, Homo Sapiens
  misc_feature (197)..(559): n is a, c, g, or t
gagcgttcagagtgacacggtgataccgcaatgtagtacggtgctagttcctcgcccaagacgaatgtttccttttttcgtgtgtcctaacaagtgtgcttacataagcagatatattatatatgtgtgtatttatgggtacatacatttatatatgtatgtgtattggtatgttataaaattatatttacatagannnnnnnnnnnnnnnnnnnnnnnnnnnnnnnnnnnnnnnnnnnnnnnnnnnnnnnnnnnnnnnnnnnnnnnnnnnnnnnnnnnnnnnnnnnnnnnnnnnnnnnnnnnnnnnnnnnnnnnnnnnnnnnnnnnnnnnnnnnnnnnnnnnnnnnnnnnnnnnnnnnnnnnnnnnnnnnnnnnnnnnnnnnnnnnnnnnnnnnnnnnnnnnnnnnnnnnnnnnnnnnnnnnnnnnnnnnnnnnnnnnnnnnnnnnnnnnnnnnnnnnnnnnnnnnnnnnnnnnnnnnnnnnnnnnnnnnnnnnnnnnnnnnnnnnnnnnnnnnnnnnnnnnnnnnnnnnnnnnnnnnnnnnnnnnnnnnnnnnnnnncatcagtatgagtagttgcatgtgtgtgcattctgaaacactatggtcatagaaggaaggcaagtgtggagagcagaatgataggtcccaattgtgtgaagag

SEQ ID NO: 229486 - DNA, 273 bp, Homo Sapiens
  misc_feature (162)..(162): n is a, c, g, or t
gttgtgcggtgatctagaggatccctggagttgtgataaatgacctagttctctcttttcaaggagttacaccctagtgacagagactaaagaagtactaatatatggaaaaatatggtaatgaaagtgttataagagaaattagaactcagatgaacacangaagtggatgtatatacatctatgcctatgagaccagtaggtgtcacgaaaaacgcttttattgaagaggtaaccttttattctcttaagaatttcaagtggtatccgagc

SEQ ID NO: 229487 - DNA, 270 bp, Homo Sapiens
  misc_feature (207)..(207): n is a, c, g, or t
  misc_feature (220)..(230): n is a, c, g, or t
attaactatttttgatgtattttgaggctagtaacacaatttagaccagaataggttttcatatatcaaaaaaaggaaaggaacacggagagcacagatgagacatatggaggctctatactatagacccatccttgctcttattggatacattgtactagaaatacgtggcagcttttgaaccttcccattagtagttaaaatttngtttcgatatgcnnnnnnnnnnnggcccaaaatcatgaattttaaggaaggaatatatagaga

SEQ ID NO: 229488 - DNA, 234 bp, Homo Sapiens
  misc_feature (187)..(188): n is a, c, g, or t
  misc_feature (197)..(198): n is a, c, g, or t
caatggcattcattcagttccatcaggtcatccacctttttttcaaccagcacatgtcttgttccctctgcacatccatcacttgtgcacagcgtcgtgccacattgtccatgcagcacagcatgcattcctgtgtcatgcttcttccatcccatgtggtttcattcacaccctcaggtgggtcagnntgggtcacnngcagctcgcacatttcgtcacatccatgggtccatc

SEQ ID NO: 229489 - DNA, 303 bp, Homo Sapiens
  misc_feature (37)..(37): n is a, c, g, or t
  misc_feature (136)..(153): n is a, c, g, or t
  misc_feature (175)..(229): n is a, c, g, or t
cgtcctgatgataggggctatcagtgctcaatgcatnctctccctgcagccctatacataagttgccactacaggcatcgccgaggcccaggttcctgagctttcttagcttgtctgctaaggttttgacaaaacnnnnnnnnnnnnnnnnnnaaaagacagagccttattcttnnnnnnnnnnnnnnnnnnnnnnnnnnnnnnnnnnnnnnnnnnnnnnnnnnnnnnnggggttcaagcaattctcaggtgtcagcctcctgagtagctgggataacaagtgtccaccaccatgtccagtta

SEQ ID NO: 229490 - DNA, 240 bp, Homo Sapiens
  misc_feature (55)..(55): n is a, c, g, or t
cgcatcactcatatacatcagtcagcatcttgtggccctaacatgaggatgtggntgtcgtgagaaacagcaaaacactaagcctgacctctcccaaatgggaagacagaggagaaagtgcaaaactgagggccaatgctaaatttgcagtgaaagaaatcagtggagccctcaactgcttttattcagctcttagcaggaactgacaaaaatcacaatttagcatgacgttacaacgca

SEQ ID NO: 229491 - DNA, 113 bp, Homo Sapiens
cactcaaagcacacagcatgtccctgtgcccatcactccttggagcatggtaacagggcttctccaacctcgcatcttgcagccgtctgcgatgatcacatccttcaggggtt

SEQ ID NO: 229492 - DNA, 117 bp, Homo Sapiens
cacctctgtttcagtttgtggggtgctcatgctttcctttcattcttctccgtaggtacagctctcatgtcctcccctccctaacagaactttctgacaaagctaagcccactgata

SEQ ID NO: 229493 - DNA, 197 bp, Homo Sapiens
  misc_feature (41)..(93): n is a, c, g, or t
atcggccctgttacatgcttatttcattcttcctccatctnnnnnnnnnnnnnnnnnnnnnnnnnnnnnnnnnnnnnnnnnnnnnnnnnnnnnctacatctcctcgtctgttattttcctcctgttattttttttatttaaatctctatcacactctatcctcaggcaaccgcctcacaacctaactccctaaacga

SEQ ID NO: 229494 - DNA, 171 bp, Homo Sapiens
cgcacagtgttcaaatgaagatgaacagtgcagtcagtcagctcatccatctggatcacccagcaacagctggcggcagcagtatatatttgtttgtcaacacataggataattgtagaaaaacccaagaaattgcctcccaataaccagagaaaatcagaaccaacacac

SEQ ID NO: 229495 - DNA, 397 bp, Homo Sapiens
  misc_feature (248)..(354): n is a, c, g, or t
gaaattgggaaatttaaatatcaaaactcacccaatgggcggcaagactatgcagcaaaccagtaagatgttatccattttaatttctagaaacgagggtctcactctgtcacccgaggtgggagtgcaagggccagatcacttgctcactgcagccttgaattacccagagatcctccagcctcagaccccccggtagctagaaactccgggcacatgccaaccatgcccaagctattttttttaannnnnnnnnnnnnnnnnnnnnnnnnnnnnnnnnnnnnnnnnnnnnnnnnnnnnnnnnnnnnnnnnnnnnnnnnnnnnnnnnnnnnnnnnnnnnnnnnnnnnnnnnnngtgtgcgctcatggcaatctggataatgtttcccattttagaa

SEQ ID NO: 229496 - DNA, 586 bp, Homo Sapiens
  misc_feature (99)..(286): n is a, c, g, or t
  misc_feature (460)..(539): n is a, c, g, or t
aaatgtcctgcttatgtaataatgagagtccttacaagtggaagagaagcagaggaggaggccagcgtgatgtcatgtgagaaggactcagtgtgctcnnnnnnnnnnnnnnnnnnnnnnnnnnnnnnnnnnnnnnnnnnnnnnnnnnnnnnnnnnnnnnnnnnnnnnnnnnnnnnnnnnnnnnnnnnnnnnnnnnnnnnnnnnnnnnnnnnnnnnnnnnnnnnnnnnnnnnnnnnnnnnnnnnnnnnnnnnnnnnnnnnnnnnnnnnnnnnnnnnnnnnnnnnnnttgtcagggctcagccaccaggcatgcatcagtgggcaatgctgtcccagagctgcccacacatggagtgcccaaatcactcctctgtaggaagtcagaaccttcaggactgtgttgcctaaggatgctaggcagggctcaggaaccagaacaacctcatgcaaaccctgacgnnnnnnnnnnnnnnnnnnnnnnnnnnnnnnnnnnnnnnnnnnnnnnnnnnnnnnnnnnnnnnnnnnnnnnnnnnnnnnnnccaggaaggagtgatttgcccaaggtcacagagctgtaatgtagtag

SEQ ID NO: 229497 - DNA, 561 bp, Homo Sapiens
  misc_feature (51)..(317): n is a, c, g, or t
  misc_feature (421)..(473): n is a, c, g, or t
cacttacgtgggaaatgtttaaagtgtagcatgttacttctagcatccacnnnnnnnnnnnnnnnnnnnnnnnnnnnnnnnnnnnnnnnnnnnnnnnnnnnnnnnnnnnnnnnnnnnnnnnnnnnnnnnnnnnnnnnnnnnnnnnnnnnnnnnnnnnnnnnnnnnnnnnnnnnnnnnnnnnnnnnnnnnnnnnnnnnnnnnnnnnnnnnnnnnnnnnnnnnnnnnnnnnnnnnnnnnnnnnnnnnnnnnnnnnnnnnnnnnnnnnnnnnnnnnnnnnnnnnnnnnnnnnnnnnnnnnnnnnnnnnnnnnnnnnnnnntatacataaaaatctaatgtggattaaacgaaagaaatggttttctgctctactcccggctacagtccccaggaagaactagatttgtcccttgttatctgaannnnnnnnnnnnnnnnnnnnnnnnnnnnnnnnnnnnnnnnnnnnnnnnnnnnntgatatgaacatgacatagtatgtggatattacctatgcacatcctcgcatatacttaaatcatctctaatacctacattatctgata

SEQ ID NO: 229498 - DNA, 342 bp, Homo Sapiens
  misc_feature (64)..(141): n is a, c, g, or t
  misc_feature (190)..(298): n is a, c, g, or t
ataaccggacacagatatgagcagtgaaaataccattagctagaagagaacatgagctccgtgnnnnnnnnnnnnnnnnnnnnnnnnnnnnnnnnnnnnnnnnnnnnnnnnnnnnnnnnnnnnnnnnnnnnnnnnnnnnnntaatgaggaagatgggccaaggggacagagaagcttgctggaattcacnnnnnnnnnnnnnnnnnnnnnnnnnnnnnnnnnnnnnnnnnnnnnnnnnnnnnnnnnnnnnnnnnnnnnnnnnnnnnnnnnnnnnnnnnnnnnnnnnnnnnnnnnnnnnggcaggtttgatggtgaatgagatgttgcatggtttcaaaatcc

SEQ ID NO: 229499 - DNA, 256 bp, Homo Sapiens
tctggtggttgcggggatgtgtttccactggcgtagtcggtcagatacttctggtccttttgggagtgcatggatgtgacgcggttcagtgccacatgttagccaagtgctagtgtaattcctgttcacagtcactacaatccactatggtgcagctacaataggtctatgttaacatgctgaagcttgaatcatacaaatcgtctcctctatatatcaagatatattcctagtattcaactgttcccaaccaaat

SEQ ID NO: 229500 - DNA, 308 bp, Homo Sapiens
ccgtacggacgcactgttaatggcagaacgctctaccacacctgaccggcgcttgagctccaggcgccgcacgaactcctccagcaccaggccatacaggtcgtcctgcaagtaggcatcttcgatcccagcatccaggttggggttgtcgttgacctcgatcaccacaaccctgtcgcccgactgtttgaggtccacgccataaagcccatcgccgatcaggttggcggttttcaccgccagctccaccaccgccttgggtgcctcatggactgccagggtgcggcattcgccagcgtccgtagcgg

SEQ ID NO: 229501 - DNA, 576 bp, Homo Sapiens
  misc_feature (47)..(275): n is a, c, g, or t
attggaggggctcagatgtccactaagcagtaggatgggatacagtnnnnnnnnnnnnnnnnnnnnnnnnnnnnnnnnnnnnnnnnnnnnnnnnnnnnnnnnnnnnnnnnnnnnnnnnnnnnnnnnnnnnnnnnnnnnnnnnnnnnnnnnnnnnnnnnnnnnnnnnnnnnnnnnnnnnnnnnnnnnnnnnnnnnnnnnnnnnnnnnnnnnnnnnnnnnnnnnnnnnnnnnnnnnnnnnnnnnnnnnnnnnnnnnnnnnnnnnnnnnnnnnnnnnnagtaccaatggggcctccagggtctggaaaagattgtttctggataatacagattctggtgacacaggtgtgtttcctctaaacattcaccctcaatcagtacactttttgggtgcatgccctcctctgcatgtgtaagagtacacgttcaacagctattaagattactatccacaagtcacttggttgctgctgcataatgacaattctgtcatttcatccatagtccatgggaagttatacagcataatggaaaaaagcatcaggcttgaagaccacccatcttgcagtacggcgccca

SEQ ID NO: 229502 - DNA, 179 bp, Homo Sapiens
  misc_feature (63)..(63): n is a, c, g, or t
  misc_feature (72)..(72): n is a, c, g, or t
aggtgaacaatcaagcttggtgattctgcttcacaatgataggaagagcgacatcgaagatcnaaagcgagngctatgacgcttggcgcacaagcagttatcctgtggtaactttctgacagctccttgcttaaacccaaaaggtcagaaggatcgtgacggccccgctttcacggtct

SEQ ID NO: 229503 - DNA, 215 bp, Homo Sapiens
gtacggatcagccgctggtcagaagaagcggctgcgccgttatcgatgaaacgggcaccctttgcacgatatttgtcagcgcggcagaagaggattggaagttgaattgccagcggcggtgttggctgaacatcaccccccaggccaaattcgcaccgatctggggggctgatattcattctttgaagtctatgaggatcaaatgggtaacagac

SEQ ID NO: 229504 - DNA, 208 bp, Homo Sapiens
ctgttactcgagaacctgaggtctgatcaaaagacaacgatgccgagcgtctgttcacccgatacgccaccaagtgctacacgtcagccttgcaaaatatgccccggagatcagcgaaactttcctattacctatctggctggcctgagcttggccgaaagttacgctggcagttacgcgaacattctagggccgtcccaggcgccca

SEQ ID NO: 229505 - DNA, 185 bp, Homo Sapiens
acgctgtgtagtctgagctcgctgtattgggactgggcatgcgtgtagacgtatcagcacaggcgcgctgtgttgatctactcatacgggtcttgctaaccgaccgaagcttggtatttcagcgtactgatgcgtttcacagagataggttcgatcccatggtctcgtctacgcagagtgcgcaa

SEQ ID NO: 229506 - DNA, 159 bp, Homo Sapiens
cagccgggtacccttctattacgtagcgttgtttgaacctcgcattgcttgagcacgtatatcgggtccactgagtgctgcatttgacacctcgcaactttccatttgggctacgcgagaacttaacagagagtggttgtgcaggttccactatccaaa

SEQ ID NO: 229507 - DNA, 340 bp, Homo Sapiens
tggctgttaccctgcacatctgaaactggatgaagccccatccgcgccctcgggtggaggctcgcacacaaccctttctcttgcgtgggaccttatccgctctgcgctactcgagacttgcagaactcccctgttgagcgggccaggggttccctgccaagtgcaactaccaaggatagccagttggcaaaggccttggaaaaaatccttcggcgcggtgcaccccgtatctgaatgacgggcgcttgaccttggacgtccttgaagcggatcgctgttcaaccgacgggtgaaaacgaggtgttggacaacgcgatccaggtcgtcagcgaaattctca

SEQ ID NO: 229508 - DNA, 181 bp, Homo Sapiens
agaggatccccgacggtcgttttgtcggtcgccagcgtatcgacagcgacggctgcgtgcgcgtccgctggtggtgggtaacatgctttatgtgtatggcaacggcggcaagctggaacccctgaccatcaagtaaaggtttgactatgcttggggtaacccccaggttaacagaccgtcg

SEQ ID NO: 229509 - DNA, 186 bp, Homo Sapiens
atctcactgcaacgctctagcttagccaatatgaccagccgagaaagaatgctgcgcgtgggccaagataggcaccggcaaaatcagcgaaggttttgaagctccaagtatggaacagtcaacatattcggccccatggtcacggcattgaaccgaaagttaggaacgaaaacaaggaaccggatt

SEQ ID NO: 229510 - DNA, 146 bp, Homo Sapiens
gctgtacttccggcagaagctcagatgtttcgcaagaagctttcatcaaggcatattattctctagagacattgcagaacgagtacgccttttcatcttggatcactcgtattgtatctcgtttgtgtcacgatccggcattccag

SEQ ID NO: 229511 - DNA, 130 bp, Homo Sapiens
atcctgtagctgtacagtgagctgatcagcatcgtgccgtgacatctcggaactgctgcggctggtccggggatgatgggtcggctacacaagcggcacccaggcgtccggttgaaatttaacccccccc

SEQ ID NO: 229512 - DNA, 319 bp, Homo Sapiens
tgaggaccccgaggctgttcctcaacgggcagttgcgcgatattcaccacgagaaggatccccatcctggatcgcggctcactgcggagtaccagaggattattcctacggtattcggaaacgaaaaaatatagacaagaatgaccgctgtcaaaggtcgaaagtgaaccattggtcatttccgaactattggtgtggtgaatgatcatggccaaggcacgttgcttttgcggtgataggtctgtgctagagcgttttaggtaggcttggcctaggaattggccatacagtttgccctggcccggaggccgttatgacc

SEQ ID NO: 229513 - DNA, 327 bp, Homo Sapiens
tactctaagatcggcacggatcgtgaatgtttgaagcagttgcactgtcacaagcgatacgacagtgtcatgagacacagaatcgaggagagaggagtgcgaaccattacatgtagcggcacgagggagatcagcgtgcaagctagtcgcagagtcaggtgcaccacagcatttacatcctcccagaccctacgtgtctcacggtggtgcagtggcccccgcactacagaagaacatgcgagcgagctcaggcgcgctggtggtggtttccgatacaactcccactcaaagaacccgtgtatccccggtcgaggggtaccgagctcg

SEQ ID NO: 229514 - DNA, 140 bp, Homo Sapiens
gacggggatctacaaccaccacgactaaaaacaaaccctgcacatagttcaccattcaatgcatctttttcaatttcaacagcacacacacagcaaacattcagccagtcatcttgcgacagcccattccagcattcaac

SEQ ID NO: 229515 - DNA, 340 bp, Homo Sapiens
  misc_feature (43)..(74): n is a, c, g, or t
  misc_feature (252)..(252): n is a, c, g, or t
gtgactctaaggatccgtacgggattctaaggaggaagaagannnnnnnnnnnnnnnnnnnnnnnnnnnnnnnnacgtgtgctacactcaggcatgtgtaatattttcctttagtttaggtcaaattctactattctaattatttcctatagacgagcttacattttttcttttgtctcctctattataagagtgcctcagcgtctctactcatcaggtttttctacggtctttcgagaaacattcttattnacttaatctttatccgtgtggacagttgcttatacataaagcgtctgctaacttctaaagtgtcattactttaacctccagacaattt

SEQ ID NO: 229516 - DNA, 232 bp, Homo Sapiens
  misc_feature (46)..(97): n is a, c, g, or t
  misc_feature (108)..(108): n is a, c, g, or t
tacctaaatggctgtggctgtagcacataggactttttacatggannnnnnnnnnnnnnnnnnnnnnnnnnnnnnnnnnnnnnnnnnnnnnnnnnnngacttccattntgctaattgtaaaacagaacaattagtcaaataaacacagcatggaacatgttcccatctctgagcagggatcacaaggaatgaaaaactttaaaaaccaaaagagccctatataaatttagcc

SEQ ID NO: 229517 - DNA, 291 bp, Homo Sapiens
ctcttgagctatgctgcttagatgtacattccaccagatacatactaaatcatcacccccaagttcatagattcacagatctccagtgacaaggtcacatgtgcagacctctgattgggcaaatcaacatgtagctattggctccatattcacacggaaattacgtgatttttactccgacgaacttataagatctggcacttcacatgaccatcgcttctgtacagccttttgatcacacagtatataacaagatctctacacggggtccacagcattatgctcatcatt

SEQ ID NO: 229518 - DNA, 140 bp, Homo Sapiens
tattcgtgttgcacctccccgtgtatcatggtatattattttcttcaacatagttcaatttcagttttcaacacagcactccatgtacttcaacacacagcaattccatggtctccaacaaatgctataacagataacat

SEQ ID NO: 229519 - DNA, 109 bp, Homo Sapiens
cgactcataggatcccctgatcttccgtgccccatgaatacatagcgacagcagtcactttatactattgttcagaggggagaaaaaaggagcgcaggggcacggatca

SEQ ID NO: 229520 - DNA, 113 bp, Homo Sapiens
acccccggaaccgcgggtgaaaaacaacccccaccgccacgattgcatacctccagcaagaccctggaggaccccctgaaattccaggcccttggaaaaaattaccgcccccg

SEQ ID NO: 229521 - DNA, 110 bp, Homo Sapiens
tcgactcttaggatcccctgatcttccgtgccctgacctcggtggtgttcattatccttcttgagtgttcacggaagatcagggcacgggaagatcatggcacgtaagat

SEQ ID NO: 229522 - DNA, 397 bp, Homo Sapiens
  misc_feature (116)..(333): n is a, c, g, or t
ttgaggatccccccgcgcccagttaataagtgtcagggctaaggtatgaacccacagggtttaactctaggacctgtactcttcggcaccatcctttcagtgaattaccagtagcnnnnnnnnnnnnnnnnnnnnnnnnnnnnnnnnnnnnnnnnnnnnnnnnnnnnnnnnnnnnnnnnnnnnnnnnnnnnnnnnnnnnnnnnnnnnnnnnnnnnnnnnnnnnnnnnnnnnnnnnnnnnnnnnnnnnnnnnnnnnnnnnnnnnnnnnnnnnnnnnnnnnnnnnnnnnnnnnnnnnnnnnnnnnnnnnnnnnnnnnnnnnnnnnnnnnnnnnnnaaccaggaagaggccattgacagaactgaaccagggtggctcgcacctctagcactttgggacg

SEQ ID NO: 229523 - DNA, 135 bp, Homo Sapiens
gattcgtgccccgtacagctgagaatgtagaccagggtaggaagtgagaggagtaatatgcaatatgagagtaaggggaagtggtaaagtaggctgagagttgggagaggtcagatcatatggcacggaagatca

SEQ ID NO: 229524 - DNA, 171 bp, Homo Sapiens
tcctgtgcctaattttcgttacattattttatttgcataaatatgcatgcgagaaggtagaggaaaatgtggttgcatcttgtagtggtctaacagaaaaaacagatgtcctgagaactacaaacaaatcagacaaagcccacatgacatcttagtggactggaagatcat

SEQ ID NO: 229525 - DNA, 155 bp, Homo Sapiens
  misc_feature (143)..(143): n is a, c, g, or t
cgctgggtgagcttaagctaggcgcggccggtgagcgcgcaggtagatcttggtgtagtagcaaatattcaaacgagaactttgatggcgaagtgagaaggtccatgtgacagcagttgacatggtcagtcggtctgagagantggcgaagatca

SEQ ID NO: 229526 - DNA, 346 bp, Homo Sapiens
  misc_feature (129)..(291): n is a, c, g, or t
agtctagtaggtatcacttttagacttgtttatagagataaataaactttttatttgtattattttttaaaagcatagttattttgagttttgcttttggagacagatcttttattgcattcccctccnnnnnnnnnnnnnnnnnnnnnnnnnnnnnnnnnnnnnnnnnnnnnnnnnnnnnnnnnnnnnnnnnnnnnnnnnnnnnnnnnnnnnnnnnnnnnnnnnnnnnnnnnnnnnnnnnnnnnnnnnnnnnnnnnnnnnnnnnnnnnnnnnnnnnnnnnnnnnnnnnnnaggggaaattggggtacaaaggcagacacacgccacagggggaccggaaggatca

SEQ ID NO: 229527 - DNA, 169 bp, Homo Sapiens
  misc_feature (57)..(57): n is a, c, g, or t
tactgtgtcgtatcaccaacactttatggggtctgataagcgtcggatcgggcgctntaaccggcgtcggttcatcccgcagcgccagttcttgcttacaaaagtgggccactaggcactcgcatttcacggccgggtccacgccagcgagacggggttcttaaccatt

SEQ ID NO: 229528 - DNA, 250 bp, Homo Sapiens
  misc_feature (99)..(99): n is a, c, g, or t
  misc_feature (130)..(130): n is a, c, g, or t
gattctgcgtattaatgtgcttcataagatctatcatgctgcttcttatagtacttacaatatatgcaaggtcagtagaagtgtgcatgtatatatgcnttgatcattcaaatggctaagattgaaaggngaacgatacccagaatttcagtagtttgctagatgcagagtatttatctaccaaaagcctgagatttctttacatgaattaaaaagcttccattcgaaagggtaatagcgacagcaggca

SEQ ID NO: 229529 - DNA, 140 bp, Homo Sapiens
ctgaggatcccttcgcggtatataaactccaaccccgtttcgcggtatataaactccaaccccgtttcgcggtatcataaactccaaccccgtttcgcggtatcataaactccaaccccgactggtagcgacagcaggca

SEQ ID NO: 229530 - DNA, 106 bp, Homo Sapiens
acttagggtcttagggagtaagcacaatgaggttgtctgagaagaaacaggtttccaaggtcctgggaaacctgtttcctcccagaccctactccctaagacccta

SEQ ID NO: 229531 - DNA, 331 bp, Homo Sapiens
tctgggtccctctccactccagggatgtcgctgggataaagctttgacaggcaggtcagctgacctgggtcttggtcagctccatccgggatgggggcagggtgtacacctgttggttctcgcgggctgccctttggcttttggagatgggtttctcgcatggggggctcgggcgggcttatgtttggagaaccttgcactttgtactctcttgtccattacagccagtcccttgtgcacggaaccgggtgagagacacgcgtgaaccaacaaccgggtacagtgcttggttggtacttggctccctctccctaaagaaacccggggtacc

SEQ ID NO: 229532 - DNA, 130 bp, Homo Sapiens
  misc_feature (65)..(77): n is a, c, g, or t
tagggtcttagggagaccatggcaaagtggatccagttagagcccattaatcttgatcattccgnnnnnnnnnnnnngggcccattttgttccttttggtttgccccggccccgaaaaggaattttaatt

SEQ ID NO: 229533 - DNA, 275 bp, Homo Sapiens
cagttgagcatatctatataagtatatcggtcatccagattcggcattctgttcagttctgcatccatctcctttttctatttttttccttataagcagtcatatgttagtgaccttcaaactcttcctgccccttacttgagggcatgtgctaaggaatactttgaccgaaatcattagcttgcagaaagtagcttttatccttagacatatctctaccctacttaccccaacccgtctggtgtaggggaggttaccttgtacctacactgata

SEQ ID NO: 229534 - DNA, 298 bp, Homo Sapiens
tagggaggtaagcaaccggtctatagacacatagctaatctgtggcgtggaagagatctgctgtctgagctcaagtctgtcttgggctaccagaacgccacaggttctctactttgcctctgactcattttctgttgtgggtaaatggctgtctattggacttgcaattgatccccatactgggcatataaaatccagatggacccctgtatatattcgtgttctccatagcttgctaattaaaggacaaagcgcgagaacttgtgatacattttctacaaagaaacaggagatttta

SEQ ID NO: 229535 - DNA, 595 bp, Homo Sapiens
  misc_feature (215)..(325): n is a, c, g, or t
cgctgagtaagtagttttattaattacaatgtgtttattaaataaaggccaaggttatagaggtcctgatgtgtcacatgatatcaccttcttgcatttgagaatcaaatacaaaaccaccctttatttttaatttaccacctcacccattccaggcatactgctctggaagtgtccttcatgtgacatctgagtgcctccctaagacctagggnnnnnnnnnnnnnnnnnnnnnnnnnnnnnnnnnnnnnnnnnnnnnnnnnnnnnnnnnnnnnnnnnnnnnnnnnnnnnnnnnnnnnnnnnnnnnnnnnnnnnnnnnnnnnnncaagtttaaaaaatcatttaggtcacagaatctcaggaaagaatgtacaatgtgataggagaatctgttttacaaatgtatgaaacaaactcactgaagggcatgagaaaaggtgatgtaagtaactctggaaacgaagagcctaaaaccaaatgcaaaggaactgcacataatcactgtactccagtagacagagttgttacccacagagatatgggttaacaactctggtactgcaatacatatatactggaaatatacgattaagca

SEQ ID NO: 229536 - DNA, 646 bp, Homo Sapiens
  misc_feature (257)..(380): n is a, c, g, or t
gatcaagggtctagggaggggaccatgtgatacaggagagattggcagtgagaaacaatttgaagtttagggctgtggtgcagagaggggatgagttagggtttttgagctcaggaggcaataaggcttgcagagatgtttctctctttttccctctgaactggtttctgcactcctcagtgcagggctccaggctggatacttttgaggacactacttaagttcttttcttggactctgctgccatcctccataannnnnnnnnnnnnnnnnnnnnnnnnnnnnnnnnnnnnnnnnnnnnnnnnnnnnnnnnnnnnnnnnnnnnnnnnnnnnnnnnnnnnnnnnnnnnnnnnnnnnnnnnnnnnnnnnnnnnnnnnnnnaccctacataatctccctaagaccctatcttagggaggtagctgagaacttggcactgcgcacacatactaggttgaaagagagttgaggaaaccagaaggccaagtggatctgctggcaaaccctgaacctgtctcctgcgcttgctctacagttctgaagttgaaaatccttttcatgcctagcatctgcttgagttataaaccccaaggcagccatgtcatagactagtgttactcttgttttgacttgttttagtgctccct

SEQ ID NO: 229537 - DNA, 126 bp, Homo Sapiens
acggggagcatgaccttgcagtagcacaggttcagacactgttgagttttaaacaggtagtaattcaaaaaacttaacacaccaacaaaaaaatcaggagtgtacgtcagaacattgtgcgcttca

SEQ ID NO: 229538 - DNA, 413 bp, Homo Sapiens
  misc_feature (84)..(95): n is a, c, g, or t
  misc_feature (174)..(282): n is a, c, g, or t
  misc_feature (284)..(335): n is a, c, g, or t
aaggttggtggaaatctttagatggttattaagaaacaaagaataaactggaaactgttggtgttaaaacaaagatcttagtgnnnnnnnnnnnnggagatagggctctcaaaacaaccaaacaaccaaacttaaccggtcagtaggtaatataatcaatccacatgccaaagnnnnnnnnnnnnnnnnnnnnnnnnnnnnnnnnnnnnnnnnnnnnnnnnnnnnnnnnnnnnnnnnnnnnnnnnnnnnnnnnnnnnnnnnnnnnnnnnnnnnnnnnnnnnncnnnnnnnnnnnnnnnnnnnnnnnnnnnnnnnnnnnnnnnnnnnnnnnnnnnngctagccgaactcagacgcaggagtgcccctcccggggatacgggggtcacgagctcagaatcgaaatcagggccata

SEQ ID NO: 229539 - DNA, 360 bp, Homo Sapiens
tccggggagggggagggcaggggagattacaaacagaggtgcagcgtgtgaaggcccacaggggcttctgagcgatcaaagtacttgactatggctggcgagaggatgagtgttgatgctggagaggcgagcagggtgagcctgtggaggttctgcctgggcccacggtagacagaggagaatgaatagattattgggacagggaaggctttttggaggtggaggttcccgtcgaacagtggttgcttgggggctcttctcttcaaagcctggcctagatttctaattgtttaagctcccccggggataacagtgcgttaccgagcctcgaaattcggtaagtccattgggtccataggc

SEQ ID NO: 229540 - DNA, 299 bp, Homo Sapiens
  misc_feature (55)..(155): n is a, c, g, or t
cggtactgttgagtagatagaatctcagttttgcgagatgaagagtctgaagatnnnnnnnnnnnnnnnnnnnnnnnnnnnnnnnnnnnnnnnnnnnnnnnnnnnnnnnnnnnnnnnnnnnnnnnnnnnnnnnnnnnnnnnnnnnnnnnnnnnnngaaaaagaaagaaagccaacgatcttctctactcaccattgcgtccatgaaaggaaaggcgggcgaggtacaggaagggccttctcgtcttggtccccgggatacaggggttaccgaggctcgaaattcggtaattcatgggtc

SEQ ID NO: 229541 - DNA, 441 bp, Homo Sapiens
ctctagaggatcttctgtatcccggggagaacatgcagagacagaccaataaaggcaaatgcaagaatacactagatacttaccacaagctatactataaacagtgcaactattctaatccaaaaggcatcctagttcttatgtgaaatgacctactgtggataaaccagaaagctagctatctgagtcaaagggaccacatagcactacagagtgtaaaaaggtgaaagcaggaaatgtatgccctttactgtgctgctgttgcagctgttgttgcatgctgttagttgctgccgtggctgctgtggtaagtgcgtgatgctgctgctgctactgttgctgcttcggtccacttgagaggaactagaacactggtaatatttaaatgcctccccgggatacagtgtatcccgggaagctgtcggggaggtcttaaggaat

SEQ ID NO: 229542 - DNA, 595 bp, Homo Sapiens
  misc_feature (245)..(531): n is a, c, g, or t
tgtatcccggggagtggtattggaagtatgagaccgtacatccctgcttaggtgagaagggggtcagagaggtcaggcacagacagagaagggaacgcaggctcctggccactagcctctctcaagacaggtgaactttgtgttaagcgaactcatttaatattttgggcctaatagaagttatttgtattttctctcctctcctttcctccccgggatactgtatcccggggagttggggagcnnnnnnnnnnnnnnnnnnnnnnnnnnnnnnnnnnnnnnnnnnnnnnnnnnnnnnnnnnnnnnnnnnnnnnnnnnnnnnnnnnnnnnnnnnnnnnnnnnnnnnnnnnnnnnnnnnnnnnnnnnnnnnnnnnnnnnnnnnnnnnnnnnnnnnnnnnnnnnnnnnnnnnnnnnnnnnnnnnnnnnnnnnnnnnnnnnnnnnnnnnnnnnnnnnnnnnnnnnnnnnnnnnnnnnnnnnnnnnnnnnnnnnnnnnnnnnnnnnnnnnnnnnnnnnnnnnnnnnnnnnnnnnncaaggcagagggacacaccagtgtagtaatgacgcagaagcacacaaattttttcacaaatttt

SEQ ID NO: 229543 - DNA, 455 bp, Homo Sapiens
  misc_feature (152)..(317): n is a, c, g, or t
cccctccatcccggggaggcattataaaggtatttgtagaattcagatggttttgaatttaaaaaaagataataccaggggggctagttattaaacaagataggaaacaccaggtgctcagtaactatatcaagagatttaatttgtctaannnnnnnnnnnnnnnnnnnnnnnnnnnnnnnnnnnnnnnnnnnnnnnnnnnnnnnnnnnnnnnnnnnnnnnnnnnnnnnnnnnnnnnnnnnnnnnnnnnnnnnnnnnnnnnnnnnnnnnnnnnnnnnnnnnnnnnnnnnnnnnnnnnnnnnnnnnnnnnnnnnnnnggaggaggaaaataaatttatggtttgcagaatgcagggcccagcgagggtgtaatttgtcaccttgataaaagaaactgtgcagcaactcgtgctttttctgacgtcagaaggacaacggaaataaaacctgagctc

SEQ ID NO: 229544 - DNA, 386 bp, Homo Sapiens
  misc_feature (168)..(182): n is a, c, g, or t
  misc_feature (218)..(290): n is a, c, g, or t
ttctttaggcaaatcatttaaactctctgaactgttcttcatctgaaaaaatggagattcttctgaatatttattatatgcccactatgtgtcagatgctgttctaggtgctgggggtctacttgtgattaagagtattaagctcggacgggtgcggtggctcatacnnnnnnnnnnnnnnngagaaaggcagtattggcacgagttcctgtgtcgannnnnnnnnnnnnnnnnnnnnnnnnnnnnnnnnnnnnnnnnnnnnnnnnnnnnnnnnnnnnnnnnnnnnnnnntggtaggaaacttctgggggtgggaacaaattcagtaaattggggtcagggcttggaaaatttggcctaaatgaggggtccgagctcgatttcgaa

SEQ ID NO: 229545 - DNA, 113 bp, Homo Sapiens
ctggtaagtgcaagtcataagcttgcgctgattacgtccctgccctttgtacacacgaccccccgtccatcacaataccatatttaacacggaattttcgatatcaagcttat

SEQ ID NO: 229546 - DNA, 129 bp, Homo Sapiens
gctcggtacctgatgtgtcttcggtgtgcctggcgggcggctggtggcgctggcgggcgcacaggcccatgttttccagcaccagcccggtccccatgctctgctgccaccgaaaagccggtattgatg

SEQ ID NO: 229547 - DNA, 264 bp, Homo Sapiens
tagccctgaagctcatgtcccggtgtttgtttgtgtttatctctctgattttttcctccttgaggcagcttgaaatgtgaaagggcaagggaaccgagctaacgtagggtggaaacatggttatatgtacattaagtgtcttactctactcaagtttgcgtactcactgtaagcccaatggggagaccaaggttctggtgtccacacacgcatgtgcagaggaagacagttgacataatgatgaggctagtgcagatctttatc

SEQ ID NO: 229548 - DNA, 365 bp, Homo Sapiens
  misc_feature (51)..(270): n is a, c, g, or t
  misc_feature (273)..(310): n is a, c, g, or t
tctcgggtttggtgtggtctttttgtttgtttgcttgtttttgagacagannnnnnnnnnnnnnnnnnnnnnnnnnnnnnnnnnnnnnnnnnnnnnnnnnnnnnnnnnnnnnnnnnnnnnnnnnnnnnnnnnnnnnnnnnnnnnnnnnnnnnnnnnnnnnnnnnnnnnnnnnnnnnnnnnnnnnnnnnnnnnnnnnnnnnnnnnnnnnnnnnnnnnnnnnnnnnnnnnnnnnnnnnnnnnnnnnnnnnnnnnnnnnnnnnnnnnnnnnnntgnnnnnnnnnnnnnnnnnnnnnnnnnnnnnnnnnnnnnncctagcccactgtgagcacttcttcaggaaatttctctgaactggatcaggtgaa

SEQ ID NO: 229549 - DNA, 353 bp, Homo Sapiens
accaatcctggtgctgatcgagatctgccccgctgggccaccgaagctgataaagccgagcttgagccagaacagaaaagcctgaagcaaactgacaggctcagtacttggcagatcctgctctacaggtggcagtgtggtctcattcatcagaggtctcttctttcacgaatgccgcgagcagaccatcgaagatggcgcaagcagcggtcagcaggtggtcgtcattgaggatggtctcgcgcagcccagccaatacacgctcgatgccaacagcctcggcgggttgaacgccaccgatatccaggtaatgcaccaaagcagcgatgcggcttaggcctggctcgaccagt

SEQ ID NO: 229550 - DNA, 321 bp, Homo Sapiens
  misc_feature (55)..(176): n is a, c, g, or t
  misc_feature (184)..(279): n is a, c, g, or t
ccactaaataccacaggataagcttgttactatcacgtggaaaaaatatatctannnnnnnnnnnnnnnnnnnnnnnnnnnnnnnnnnnnnnnnnnnnnnnnnnnnnnnnnnnnnnnnnnnnnnnnnnnnnnnnnnnnnnnnnnnnnnnnnnnnnnnnnnnnnnnnnnnnnnnnnnaagaaatnnnnnnnnnnnnnnnnnnnnnnnnnnnnnnnnnnnnnnnnnnnnnnnnnnnnnnnnnnnnnnnnnnnnnnnnnnnnnnnnnnnnnnnnnnnnnnnnaaagaccgatggtgaaaggttggagaacaatgaggaagatgt

SEQ ID NO: 229551 - DNA, 229 bp, Homo Sapiens
gggctcggtaccctccctgacacggccatcacttctcgacggtatcgctgacacgatactgcttcgcctgccgttgatgacgtaactggccgtcgtgcgcgaaacgcccgcgagacgcgcgatttcatccagtttcacattaaccccttaatgacgctgaaaatagaagtgaaggctgtgctcggattaaccatgacatcccgtgcggttattcaatccagcctctgcg

SEQ ID NO: 229552 - DNA, 104 bp, Homo Sapiens
tcagagtgaccccggtgagagcacagccccacacaagcataagttatcaacttggcttgtatcagcataaagagtatatcttatactgaagcaatctaaaattt

SEQ ID NO: 229553 - DNA, 332 bp, Homo Sapiens
cctataaggagcattggtttcaaaacaggtcaggctgtgctggagcccaggcagacaggcacaaagccatgtagtgtaacttacttaatatatgccatttagcagacgcttttatccaaagcgacttacagtcatgtgtgcatacattctacgtatgggtggtcccggggatcgaacccactaccctggcgttacaagcgccatgctctaccaactgagctacagaaggaccacatgtcaggctgtgctggagcccaggcagacaggcacaaagccatgtagtgtaacttacttaataatgtcacttacttagtaatgattgtgtaacttcc

SEQ ID NO: 229554 - DNA, 335 bp, Homo Sapiens
  misc_feature (42)..(235): n is a, c, g, or t
ggtggagcaattgggaattcctacacattgctaacatattannnnnnnnnnnnnnnnnnnnnnnnnnnnnnnnnnnnnnnnnnnnnnnnnnnnnnnnnnnnnnnnnnnnnnnnnnnnnnnnnnnnnnnnnnnnnnnnnnnnnnnnnnnnnnnnnnnnnnnnnnnnnnnnnnnnnnnnnnnnnnnnnnnnnnnnnnnnnnnnnnnnnnnnnnnnnnnnnnnnnnnnnnnnnnnnnnataaactatacagttatgaaaatgagctacaacaaaatatgaataagtcttacacacataaggttgactgaaatgaatcagagacaaaataatacatctt

SEQ ID NO: 229555 - DNA, 365 bp, Homo Sapiens
ttggcacgcgggggctgcaccaaaaccctgcaaccacctgcaccttggcatgtctttgggtggcggctgtgcccagaccccgccccctctcatgccctctgggttctcgggagggtccggagactccagtgatataggctgggacaacgagagcaaggaccctgacaaggtagcaccattaaaaaccatgtctttctaccactctcatatcttccaattactgatgtgtgtgtgtggaaaggaatatagtcttctgactatcagtacagtactgcatagtgttggcacaataccagaacgtagacttcattacagatactaggttttgtatcccgatgttcaataccaaaacgataccgaggcac

SEQ ID NO: 229556 - DNA, 504 bp, Homo Sapiens
gctcagttgatgatgctgttgctgaggcctccaaggagacgcaagcttcgtgatccttctgtccacgcggagcaggggggctggaatgtcgagctgcatgcagagcaagacaatacggtgcactggctcagtggtgtacgccaacaatgtgagcaacggttggcgcagagcctgcgccagcctgtcagtttgtatctggcaaaatcgaggtaggcatgatgctgccacctttgatacttcccagattcaaaaccgatattgcggttgcccggcagcgcttggggcaagggttgtgtatgccgttcgaggtcgctgggtcgagtggcgagttgagaatggagcctggtactgctcctgtgggcatccagccgctctgcttcgaaaccgcctgtggcgtcttggccttcagtgagccaggaccacagttcagcttgatgggtgaatgccccgtgacgctcgagccggccgggaatgatccggacgcctggttctgggagttgtccc

SEQ ID NO: 229557 - DNA, 213 bp, Homo Sapiens
tcttaacatcgagaccgtcaacgcaatgatccaagacaatggatggcattcacgtcctgaccagcagagtgttgatctttgcacggaaagacagctggaagattggcgcaccctgtctgactacgatcatccagaacagagtctaccctgccacctggttgctccggtctcagagggtgggaatgcagactcttcgtagaagacccatgacat

SEQ ID NO: 229558 - DNA, 274 bp, Homo Sapiens
tcctttgcgacgccgataaagcttcagctggaagagatcgctttcgacgcctccctgcgtgtcatcccacctgacctacggacccccccattgcaacgcatgctgcctggcttgcaggcacctctcaggaccctctctggaatccccgaaaagagcaagtcagacatactgtacctctttgactgctcacccaaccttgtgggccatttccctatttctctgtaacttactctcctagcatgatcgatgagctcaatgacgtggccagaaacga

SEQ ID NO: 229559 - DNA, 166 bp, Homo Sapiens
acacctgtacgtcgctaaccccactaaaactcaccaagactcaacctctgacccccatgcctcagtgatactcctacaatagccatctacttgttcctggcatctactgttcctggcatcttggtggatccgtctacgagtctgaccttgcatggcattgcaatgc

SEQ ID NO: 229560 - DNA, 453 bp, Homo Sapiens
caaaatgggaagcaatcatgctgagacacggtctgaggaaaacagtctatgctgatacaagattaccaaagaaacgcccaatatcgtcttcctactactgtttgacattctcttgctcgccgggagcactctctggtatgcatacttgctgagatacggtctgaggtactacagtctatgctgcttcaagattaccaagaggaagttctatactcttccactactgtatcacttctatcctatccatggctgtcttcttataattctgttcttttgctcactctctttcgtcttgtatctcccttatagagtggttgtctcgcaacttctttactgatctggctctccttcgtgtctggatctcacggggggttcttgaacaactcattctcttttgtgtcgctctttttgttcctgtggaagccttctttcccagctcctccgttcctgacc

SEQ ID NO: 229561 - DNA, 224 bp, Homo Sapiens
ttcgacggaagcaggaggcggggttcagatcttggccctacccctcctgtgttaaagtccgcgagcctcagtttccctcacagtatttggctgcctcgtcgcttacccggtttgacgctgaactatcccgatcgcgaaaacaggaagctggatcttatcttgaattccctcgtcttgtgcttaaataccgcgacccactgtttccctcacggcatgttttgcct

SEQ ID NO: 229562 - DNA, 255 bp, Homo Sapiens
ggatctaaggatccccgttcgacggaagcaccagtgcatttatgctcttaaaaagtgtaaagagctctataaatgcaagttaataatacaagcagtaatgattatctgaaaacttaatgctaacctgaggacccgattgcccgtgaactaccaatcatatatgcacttaagacgttgtacgagctctataaactgcaagttaattatacaagccgtggtggttatctgtagccttgtttcttgccttggtacttt

SEQ ID NO: 229563 - DNA, 239 bp, Homo Sapiens
ttcgacggaagcactaaaaatggtggccaacaattaaaaagcataatagttatagaaatgcaggtgtgtaataaatttatgaaaggtgtcatggctgcttgtacggaatatgtcacctagatattccttgatcactgagaaccttaaaagttgtggctaacacctaaatcacataagtgttattcaaatgcaggtcctgtatgaatttatgactggtctgatgcttgcttgcaggttat

SEQ ID NO: 229564 - DNA, 227 bp, Homo Sapiens
ttcgacggaagcaaaactgacagaattgaagggagaaatagacaatttaacaatagtagatggagactttaataccacaactttcaatactggctacatgcattcttacagccgtaacgctcaagtgaccccgatcgaccggattcaaacctgactaaactcgaccggaacaatctactagtaatcctctcgattctggagacttcaagtaccacactttcctctca

SEQ ID NO: 229565 - DNA, 147 bp, Homo Sapiens
tcgacggaagcaggagtaaggaatgtgtgattgagaaggtgataaaagaaaattaaaaccttcatctgctccttattctgcttacagttggcagttactattgatcccccgcttttctcaccttgtttcctacagcgtatgctctta

SEQ ID NO: 229566 - DNA, 229 bp, Homo Sapiens
tcttgaaaatttgctggtcattcctttggaaatcagactcagcctggagagaactattcttcaagagacgaacagtactttcatctgaactagagtaaaaatctctgacgaacgggagcctgtaagatctgccgccattcctccgagaaatcctactcgacctggatagagctattccttcgagagcacgaactgtacttacatcctaacctgagttaccagaatctct

SEQ ID NO: 229567 - DNA, 395 bp, Homo Sapiens
ttcgaccgaacaaggtcgggcgttggtctgtcattcgcttcatagccggctcacgcttggggttccgtggcatgggtggtgacgagctgcagcagcagcgtgtgagcgtggtctaactcaaaggtatcaaccgcagtccgcaaagcttggacttgcgcgcgttcgccgagactttccaggcccgtgcacaccttctccagtaccgcatcgctcaattcactgtgctcaaagcatctcagcagagcctgcatgtgggcgaggagttcgggctccagcatgggcgattgaggtacttcgttatcgacgacgagtgcctcactggcctgtagctccttggcggctgactgcagcaagaggcgcagttgggtgatttgcggtcgtgcttcctcgcgcca

SEQ ID NO: 229568 - DNA, 264 bp, Homo Sapiens
  misc_feature (192)..(192): n is a, c, g, or t
ttcgacggaagcatacaaatcaaggatggaattaggtcacactggctagaaacatacggtgacaatgagtcttgctaaaactgtagatggcatctctgtaaaataggaaagagtaggatgaagctgctgaatacagtgtagcagccacgttgcttgcctatggtaaccactgatgactgagatgaacatccnatcatggacgtgaggcctttaaaatagtcccctgacgtgcacctttctgtaagtttcagattagtgagctcc

SEQ ID NO: 229569 - DNA, 187 bp, Homo Sapiens
ttcgaccgagcagctaatacttttaacttgtttttatactgttcgttttccaaaatttcttgtttcactgtaacgtttggattttgtttttcaaattctttaataatatcattgacaatcatgttgtgttgcttcgagcttcccgctgtccaaagatgcataaacgtaatcgttacttttttgtctt

SEQ ID NO: 229570 - DNA, 168 bp, Homo Sapiens
tgaccgacgaagaataagtctcagacatcttagcagtctaagcttgtatcatcgacttccacagccccacctacctgattcttggcactgtgccggtagccgtgtgtggttagggaggtggaattaccaggaagaattagatgaacatgttgcaaaacacatgtacat

SEQ ID NO: 229571 - DNA, 131 bp, Homo Sapiens
cggagcctcctacttcgatatctgttgtattctagagctactaccttccgaccgggcgctgacccccttcgccgggtggggattgctgtgcatttctcagatcacaaccaacccggtcagcccctctccgg

SEQ ID NO: 229572 - DNA, 282 bp, Homo Sapiens
ctcacggatccccgcctgatccggagctggaattacccgcggctgctggcaccagtacttgccctcctaatggatcctcgtcgtaggatttaagagtgcactctcttccaattgcggggcctccacagattccctgtattgttatttttcgtcactacctccccggagtcgggagtgggatattagcgcgcctcctgccttccttggatttggttatccgtttcctcaggctccgcgctccggaatcgaaccctgtattccccgtcacccgtggtctccatg

SEQ ID NO: 229573 - DNA, 171 bp, Homo Sapiens
gtagtatcccctagcgctcatccggagctggaattaccgcgtctgttggcaccgcgacttgcccttccaatggatcctcgttttagcggattccagaggtgaactctttccatcttacaggggcctccaaagagtcctgtattgttatttctcgtcacttactctccccag

SEQ ID NO: 229574 - DNA, 205 bp, Homo Sapiens
gatcccccgtctttaccctcgaccagcagcaccgcctgctggccgccacccactcggtcggcgtgcgcttcatctgcgcctgcctcccgacccggccaggcttgtcggctcggacaatctatgcctacccagctggcctgttctggcgcgctgctgccacgaattaggtaccgcgcccgacgcattgcgtgcccagcccagccag

SEQ ID NO: 229575 - DNA, 334 bp, Homo Sapiens
  misc_feature (308)..(308): n is a, c, g, or t
atccggcagcacgcttgattcggagctgccgcttcttccatcaggccctccaggtccattgctctctataatctagcactgttgtgctgtgatcatcatttatgctgtaaaacggaccatctttcaacagggaaagcattactgtgatgtgcttaaaccatttccatttacagaagcacacactgtaccacattacgaacagcgaattttttttcaccctaggtgcataaaaataattatagtagaataactctttccccatcttcatcacactgtccactgtccactattacaccatcaccctgatntagagtacaagcatttgattttcaca

SEQ ID NO: 229576 - DNA, 228 bp, Homo Sapiens
tggtaccgaaatggaacgaacaccacaattttgcttatgggtatcccgccgcgtcagtgatcactgtggctgccgtggggccgtagtgttgctgtgtacatttccagagttcatcaaacgtcgtatcgggcgcaacggggtcagcgtgaatcggcttgagtaactggtaatgagggccatgactccaacctggcaaactcggcaacaccatgactgttcgttccattt

SEQ ID NO: 229577 - DNA, 324 bp, Homo Sapiens
gctcgatagacccgagccctaggggcagcattcccctaacagagttaaaaccgacagctctccagtgcctattagatatgggacaaatgtgaagaacggactctgagctgaatgagatcacacttctgagaaccaggctctgcgggctgatcctggcctgccactgaaaccacaccactccccgttctgaaaaatactctgattcccctttctcaactcccttgcttctcagtatacggccgccattgagagagagctacacacccgggcacgtgaccacaccgcctggttgcaacatttctccctatctcagctctgccaagg

SEQ ID NO: 229578 - DNA, 128 bp, Homo Sapiens
tcgcaaggggagctcgacaaggggagctctcgaaggggagctctgccaaggggagctctgccaaggggagctctgccaaggggggctctgccaaggggagctctgccaaggggagctctgccaagggg

SEQ ID NO: 229579 - DNA, 175 bp, Homo Sapiens
ccccttggcttcctctgatcagcagtattccggctcatacgtccatcaggtttaagcgatctgctgtgtttagaggacagctctgccaatggggcccctttggcagagtctctgtagggagattctaatacagacatgccttctcatcaacaccatctagaaagccggtttttac

SEQ ID NO: 229580 - DNA, 358 bp, Homo Sapiens
gcggcccaggccgagcatgtcgcgcagccagtcggtggtgacttcctctatttcggtgagagccggactggattgccaggacaacccaatcacacccaggccggtgctcaggcaatcgcccagcactgaggacagttccacattggaagggaagaacccgaagaaactgggatgctgccaatgcagcaagccgggcatgatcagtttttcgacgtcgcccatgatctgttcgaacggtccggccgtgtcaggcgggctggccggtagggcagctttgatctcgccaggtcgggtggtgggctgcacgccgcgttgttcgatgttctgtcggtagtctgcaatcaggtcgatcatggca

SEQ ID NO: 229581 - DNA, 122 bp, Homo Sapiens
ccattctactgtcccggtgcgcagtatcgccggataatgactgcgtggcgtggggctgcgctcgggtctgcgatcagcgccatgctatccttgcgtggaaactttcggcgcggaaccagtct

SEQ ID NO: 229582 - DNA, 102 bp, Homo Sapiens
gaacacgtagatggctgacagctgatctctacctccgtcagagtactcctcgttccgtgcactcttcctccgtcgtagtcctaggtgccgcctggaaaatca

SEQ ID NO: 229583 - DNA, 347 bp, Homo Sapiens
atactatgagatccctggtgaacatgtgactcattcactgagaagaggctacatattcaggctgtaagggtctagaaactgagaggccaagtcctggtaaagatacatttgacagacgtctctttcttactcctagctacagttagtgggactcttgccggcacctcgttgctggtcatttactccacagccttcacatttcagtccttgacgttccgatccccagcgcatctcaccacagtaatcacagcaagtcggagctttgtcagcctgtacatcgcgcgtctgtggacgaatctggaagtcttctactgtggctaaagaggtgtgagccaccgttgccaggt

SEQ ID NO: 229584 - DNA, 135 bp, Homo Sapiens
gtatgacgtggaagagagacacttacctttccaccgataacttttgaatttcatttttattaaagtattaacatagtttatggtgtcaaatctaacaaattggcaagctgtttctgtagatgggtaagtaatcaa

SEQ ID NO: 229585 - DNA, 172 bp, Homo Sapiens
actattggaaatagtggtatctatcaacttttacgagctgaccgtcactgaattcagatgcagcgaggagtcataggaccctcacaacctcctggaactggtagtcactatcatccttatcctgagactagcactggtcacactagctttctcacaatacccttttagcact

SEQ ID NO: 229586 - DNA, 172 bp, Homo Sapiens
gggaaatctagctcaaatatccttgaattttcattaggattgaagtgtacagcttaatcaaaggtaagactgtagtaaacattgttatattaactgatacttaattggaacaagtgtcactaggatgtgtaactgtataacacgtacactatgaaaattaagacaagttatc

SEQ ID NO: 229587 - DNA, 125 bp, Homo Sapiens
tagaggatcccccgtcagtaatgtttagctaaaggaagatgtggatgagctggcagtgatggggttcttcctctcctactgcccttgatgcgaccctgccacactttactggctgttccttcttg

SEQ ID NO: 229588 - DNA, 465 bp, Homo Sapiens
agcacggatacccgtataacgtagtagtagtaggtcgtatcatatagcagattgtcctccaaaatccatctctgactgtggccgagtcaggtacagagtccatcactcctacactatagaaccttttggcctgactgctgtactatgccccctgtgggctccatgcatcagccagaaagagctatactaaaacctcaatacacgtcgtgtctactctacagctcaaaagtaccccaaagccctcttatttactagcatgaaggataaaacccaaagggccccaatgctgcctctgcttacctatatccctccacttcatacacacttcagactgcactgacagtaatgtacatcaactctattcaaagctcatacctgcctacagggccttagcacatatgtaccctcaacctaaaatgtacttctactacatattctcctagtaaagatctaccacacatcata

SEQ ID NO: 229589 - DNA, 244 bp, Homo Sapiens
cccaggtacggatctgcctggtgcgggattctgacttacgaggcgttcagtcactacatcccactatatggtagcttcgccccatgggctcctcagacccagcacactgcaccttctgtctgaacctggggtccctcgcgtactgcgcacgattaccatgccaacaacacatcatcaatcgggtataactaacctttctcacgacgtgtctacaccctgctcacgttccctattagtggatggc

SEQ ID NO: 229590 - DNA, 191 bp, Homo Sapiens
ttagataaatacaaaattatcaatatagaggcgcataaaaaacgtgcccattatacatgctgaccgataaggcaaattataaccaaatagcatgtagtataagcagccctcatattataataaaacaaggagtctgcctcatccatttccaaaagataaatttccgactgatcgggataaccaaacttaca

SEQ ID NO: 229591 - DNA, 157 bp, Homo Sapiens
ccggaactagatacataattgctttcctctagatcatccagaaaaactgcacacatcaatttaaccttacaactataaatgcaagcgccgattaataaaacgcacggcaatctgacgtcatggactaaagcgatctgcggccttatttcaccttgag

SEQ ID NO: 229592 - DNA, 106 bp, Homo Sapiens
aggatttccggcagaaggtcctgtgtgtcctggacctttaggatctgagagtgacttcgtaccttcttgtgctaaggcctacagcctacgagcatctactgttccg

SEQ ID NO: 229593 - DNA, 187 bp, Homo Sapiens
catccccggtagcgctctccagctgagtgtcccgcgggcccgaagcgtttactttgaataacacattagacgtgttcatcagcagcgcccgagccgcctggtataccgcatctagtgaatatatggaatctacgaccggcggttctacttttgttcggttttcgcgaactagaggccactcgggtac

SEQ ID NO: 229594 - DNA, 166 bp, Homo Sapiens
atttctcgatttgtttttcaaccaaatgcgagtatgggtttaaacattcgatcatacttgtacggtgtggaatatatcgaaaatggatatcgctttacaatttacattgttaggatagcgcaactctaatactgtattaaatggcaagtcaacatatccagttcag

SEQ ID NO: 229595 - DNA, 293 bp, Homo Sapiens
tagaggcatttagtcttccgaatttgggtcgtccattggccgatggtgagttccttgttatttacgtttttcttatttatttattgtaggatatgagttatggcttaatgccaacattcaaggctttaacatcaccaatcatcctgatattaacactacaagttgcattatgctatatatgtagataccattacgtggttatgggattatggggagttaaagttaaaggcttatcttattttaagcattttgtacgaccttataaggctttgttaatactcaatattttcgag

SEQ ID NO: 229596 - DNA, 269 bp, Homo Sapiens
tatatgtcatcatcggcctgtctgtggctggctccctattcccatcccacgcctgggaacggcgcacttgctaaggcaggtcaaggacgatgcagctagacctgccgcccaagccccacgaatactagagcaacagcttcagcctacggtgggccttctcgtactctctcactcgcatgcccgcccgcggctatccatgcgcgtcagagtactggtcattaactacaatgtacgaaggaagtacgtattcgccggcggacaggacggca

SEQ ID NO: 229597 - DNA, 164 bp, Homo Sapiens
ttctcgctgatagtcattgttgccgtgcactaccctttgccatcgggtttgatcaccagacaggtcgcactcgatacgtccagcacgcgctctgcggatatgaccagatcagcaggctgtccagaatggccacgggacgctgatgcccatcagcaacagaccga

SEQ ID NO: 229598 - DNA, 150 bp, Homo Sapiens
cgttcatgccggagaaccaagcggcatccctgggtaggaccaggccgcgtgcgttcggcttttcttcgaggagacgcttgatgtccgcggccggcaacgctggccttcgcatcacgtatcctgccgatctcgcgccgctgtggcatggag

SEQ ID NO: 229599 - DNA, 125 bp, Homo Sapiens
actctagaggcatccccgattaagaatagatgcacaatcagattgtgagaattttaagactaaatatttaaaattacaaattgttcataataggattaagacttatagttcctaaataaatctaa

SEQ ID NO: 229600 - DNA, 154 bp, Homo Sapiens
tgtgtcgaggtcctggcgcagcagcgtcatctggctcgcgcgactcgcggagcagctccacgagcttctcgttgccgccgcgcccaacgtgcggtttcttctgctgcagcatcacggatggtgtcggccggggtggtggctcgggcggccccgt

SEQ ID NO: 229601 - DNA, 139 bp, Homo Sapiens
tgctaggtcgatctctagcagcatcccctcagcaatggtgggctggctgagcgcgcggcacgcgacttgctaacggtttacaggggcgcggccgccgcctgaaccgtccgacgtccggcagtcatttttccaaggagag

SEQ ID NO: 229602 - DNA, 425 bp, Homo Sapiens
tcacgattctttgccctgcgcaatgacttcgatggctgcagtcaacagttcaccgcgtttttccagacggttacctaccgggcggccgcgacgtggggcgggcgctgaatcactgtcttgggagtgctgactatccgtggaaggcgcttgagcatcatgcatgagagaaagtgattccgttggttgaaggcgttgagccggcagcggctgcgaacgccattttggcttggcacgtcgcgatcatgcaatcgttcagattcgaccgctgccaatcaccgcgacggcccgaacctccacgcgcaagcccggcattgccagttgtgaaatgccgacagcggtccaggctggataacgttcagggaagtattcgtcctttacctgtccaaaggcgtgcacttcgccctgcagatcggtatgaaacgtca

SEQ ID NO: 229603 - DNA, 353 bp, Homo Sapiens
actacgtctttgccatgcgaattttgctcgttgctgccttggccgtcagtgttgtcggctgtacccgctggtcgatggaccaccatttgaacaagcgcttaccgtgcctatggggtcggtgattgccagcgtgtcaccctggagttgtcccaggtcgatcgcgagagccgcactcgccgctacgtgcaaccggaggtttcgacgttgcgtgggcagtgcctggaacgccagaaactctttgtcgatgccgcacagacctatcagttcatcatcggccactacccgtcgagcgagtacgcctatcgagcccgtgcgcggctcgataccttgcagcaactggggcatctgccggc

SEQ ID NO: 229604 - DNA, 229 bp, Homo Sapiens
gatctctgcaaggaatcagaatctaaaaagagcaggccgactataccaaaagggacagtatggcaaagaaggcacgattctatatgcctacaaggatactccaccgataactcatctagcccataaatcataggacacagaccccagcgatagtgcacgggtcagagactccacaccctactatggaaatgcctcatagaagctagcatagtcactcccctagatgctt

SEQ ID NO: 229605 - DNA, 222 bp, Homo Sapiens
tagattctttgcccatggtgaacacttccatctctcccgaacgcccgccgatgtccatttgtgcctcctgcgcaaagctgtagttcccaaccaagtgctactgctgcaaaaggcaggattgtagcatttggctcacagatgaggagtcacccatgcgtatcaatcccccccttgtagcattgtccgtcggtgcctttggcatcggggtcacagagtttgccc

SEQ ID NO: 229606 - DNA, 140 bp, Homo Sapiens
ccaccgcgtctgccgatatccgcgcagtggtgtacgacttcagccccagccgctcgggcgaacatgcacgcaacttcctgcaagactggaagggcaagctggtctgcgatgattttggtggttacaaagccagttttgca

SEQ ID NO: 229607 - DNA, 318 bp, Homo Sapiens
ctcgatcttgcccagtgatgaaaacgtcggggatgccgggctgggtctctttatgcccgtggccgacggcgtctccgtgcgcaccatcacctcaagggctggcggcgtgacctggatgccttcggtgatgctcagccataccttgctgacggcgatcgcccacagcgacgacgtgataccgattgcagtccaggaactggacgccgagatccgcctgatcacccatatcgcacctgccaacaacctgacgttgaccgacgaagtccccatcgacggtcacgccaccgtacaagtcaattacctttaaggagtccctac

SEQ ID NO: 229608 - DNA, 296 bp, Homo Sapiens
  misc_feature (68)..(128): n is a, c, g, or t
acgatctcgcctactcaacctgcaaggaagagatgtcaagtcatgttgaatcataacttctggttgcnnnnnnnnnnnnnnnnnnnnnnnnnnnnnnnnnnnnnnnnnnnnnnnnnnnnnnnnnnnnnctaatccaaatatttattttttctctgcagatagtggtgtggtacctatttcagattgtttcagcagtgagctgcatccataaagctggaatccttcatagagatataaagacattaaatatttttctgaccaaggcaaacctgataaaacttggagattatggccta

SEQ ID NO: 229609 - DNA, 204 bp, Homo Sapiens
agggtgattacagactaagcatgatctctcttcaagtttcatttccttagtatgtgtatcgtctcgtgcgtattagcttagatgagttacaccgtttggctgcattccaagcaccgatcggagaccggccgcgcgccgggctgtaccggcctcacacgtccacgggctgtgcctcgatcagaaggacttgggcccccccaagtg

SEQ ID NO: 229610 - DNA, 156 bp, Homo Sapiens
gtggatctagaggatccctcacacgcacttgggagtcgtgtgttggatgcagcaagcggtgtgtaaactccatctaaggtaaaataacggcacgagaccgatagtcacagtacgtaaggaagtgaaagacttgagagagagtccagttggtgggta

SEQ ID NO: 229611 - DNA, 131 bp, Homo Sapiens
aaagtcttttcaactttccttaacggtgacttgttgacgtatcggtgctcgtgccggtcattttaggctttagatgggagtttaccaccgcttatgggcgtgcgattctcccaaaggcaaacccgacttcc

SEQ ID NO: 229612 - DNA, 114 bp, Homo Sapiens
  misc_feature (87)..(87): n is a, c, g, or t
aacgcactggagctgactacggtatgtggaccagacttgccctccaatggatctacgtaaggattaagtggactcattcaattacanggctcgaaagagtctgtattgttattt

SEQ ID NO: 229613 - DNA, 251 bp, Homo Sapiens
  misc_feature (24)..(24): n is a, c, g, or t
  misc_feature (61)..(61): n is a, c, g, or t
  misc_feature (96)..(97): n is a, c, g, or t
  misc_feature (135)..(136): n is a, c, g, or t
gcttagtgtaaactttcgtttatntgctaaaggttcaatcaccttgctgtttcccgtgggnggtgtggcttaggctttaagcgttttgaggctgcnnattgctgcgtgccttgatgccttgtcccttttttgatnncgtggtgatttaggagggtgaacctcaactggaaccggggatgccttgcccatgtgtaatcttactttaagagctaatagaaaggctaggaccaaacctatccaagttgcgtgtg

SEQ ID NO: 229614 - DNA, 181 bp, Homo Sapiens
  misc_feature (125)..(133): n is a, c, g, or t
gcctgcggcatctagaggatcccatgctcatccctccttgatgaagaatgtcaggtgtaatgtactactatttaggttgaaattttgggttttaccctttgtattatatcttatagtgaaaggcnnnnnnnnnggtacccatatatccagggctgattcctaaattttccaattcccaaaa

SEQ ID NO: 229615 - DNA, 295 bp, Homo Sapiens
tctcatcctcttatggggcctgtcaacggtacgcagtgtctagcgagctcagagacagaaactcccgtgagcagaggcaagtcgctgtcttgatttcagtacgatacgacgtgaagcgggctcacgatcttctgagcttttggtttagcaggagtgtcgaaaagtacacaggatactggttggtgcggcaagcggtcatacgacgtccttttgatccttcatgtcggtcttcctatatgtgaagcaaattcacaagcgttgattgttcaccactaataggaggatgagcatggta

SEQ ID NO: 229616 - DNA, 242 bp, Homo Sapiens
  misc_feature (167)..(167): n is a, c, g, or t
cgctaagaccagcccacagatataccagactcaagtataggactcttcagtagtccgatatgtacacagcctaccctagatgctttaacgaaaagtaacttactttcacttatattactatatgtaaacaaacaaaacccacaaatgctgtatagtacagtactatngatgccaagcagtaaaaaatactgactccaatttagttagaaaatgttaactaagaaatctgaattgctgctatg

SEQ ID NO: 229617 - DNA, 115 bp, Homo Sapiens
tacttaagaccagctccacagagattatatcaataggctattctattaagatatgcatcagtagcgtaacttcaaacagaaacacaggccaatgagtctgctgaggtggtgattg

SEQ ID NO: 229618 - DNA, 345 bp, Homo Sapiens
  misc_feature (135)..(205): n is a, c, g, or t
aagctcccaacaagactaatttggagaaaagatatcacaacttatctttttcttgcactgttgaaatctatttggctaagtgctggtatatatatttttacttaaggggaggatgtctcactaatgtggtctacnnnnnnnnnnnnnnnnnnnnnnnnnnnnnnnnnnnnnnnnnnnnnnnnnnnnnnnnnnnnnnnnnnnnnnnttgagccattggccccagtctggactttccttaataatctgtcttctttataatagccaaccaaagtggggtatgaatcaagtagtgtcagtcagagatgatgatgagtggagagtggagacaaaaaatgtggataatct

SEQ ID NO: 229619 - DNA, 114 bp, Homo Sapiens
ggatcgctccacagacaaggtgaggatataagtagagtctaccaatgcgacttgtgtctcggagatcaccacattcatgtcatgcgagagtcactacgccaattaaagagatgt

SEQ ID NO: 229620 - DNA, 313 bp, Homo Sapiens
aagctccaacaagataaactctagagaaagacgggcaggctgcatctttccgttcaggcaacttagtcattccagcctgcggctttggagaatacaaaccgacggagggacagaagagatcccccaggacaggataagttgtttaacaaattcatggccagactgcttctgtaagcaggcctcctgatcccttgttcccacttcaacttggacaggacctcccaaactgggggcctcccagctaacccccaacaagcaattccttttggccaaatggacaatgtgaaaacatgtttcctcgggacaagaggct

SEQ ID NO: 229621 - DNA, 223 bp, Homo Sapiens
taaggaccagctccacagatttttctagtgtcaagagctgtctctttggactacagttaattacacgggattagagggtctggggcaacttaagtgaactaagatctatcttggacaccagctatcacccagctcggtaggtttgtcgctctactataatcttccatatttgtacctagacggtggctcttagctgtcttaggtagctcgcttggtgggagct

SEQ ID NO: 229622 - DNA, 162 bp, Homo Sapiens
  misc_feature (106)..(106): n is a, c, g, or t
  misc_feature (120)..(120): n is a, c, g, or t
ttaaggaccagcccacagatgatcagacatctcacatctgaagtataatgatgagagtggatatgaagacaggaaacagaggaacagcagaggcgcttattctcgntctacaagcaggcntgtgctagagaatggcgtatgatatggaccagaacagttcaa

SEQ ID NO: 229623 - DNA, 174 bp, Homo Sapiens
tggtactctaaggaccaagctccaacaagaaggcttagattgatcatttgttctattctactaggaatatccctattcttaaggtctcagtgtactattgtgatgtgtacctgtgcttatttcattccctaggtgatcagctctgatcaactgctgctctcttgttgcgagctt

SEQ ID NO: 229624 - DNA, 191 bp, Homo Sapiens
gcgcgtggggatcgctcgaacgataaagagcatccggagctgttctccggcctggtatggtcgggcgagcaggcattgccgctggcttgattgacggcttgggcagcgccagctcggtggcgcgggatatagtgggtgagaaggagttggatggattttacggtcgaggaatcgccgtttgatcgcttctc

SEQ ID NO: 229625 - DNA, 186 bp, Homo Sapiens
  misc_feature (99)..(99): n is a, c, g, or t
agcggcgatctagcaggatctcctctctcacactggattacactattgacttgttagtggggtagtacttggactggcaggacaatctcccatgacgtngaatgttctagagagatggagcacgagaaggggccattatttgggaaataacacgtgtaacagtgcactgcgatggatcattggccc

SEQ ID NO: 229626 - DNA, 190 bp, Homo Sapiens
ggtctttcactggactatactctaaacagaatttggtttcctgaagggcatgccctgcttcaaatgggcccttatcctactgactacagaatactgtgtttgagtcgtatacgattacaccagacaagactgtgaacacatgtgagctactcaaagatcctattctgcttccttataaagataaagggct

SEQ ID NO: 229627 - DNA, 137 bp, Homo Sapiens
agactggcatcagtcatcagatgtgttagaacatagaatagctatgatggactgatgcggatgtgtgagaaaaagaggactccagttgtgattgatattaggagacagatgctgtgatcgagatgtgggaagaatgt

SEQ ID NO: 229628 - DNA, 374 bp, Homo Sapiens
tcacgctccttgatctgccggctcaaggctgattgcgccacgaacgggcgctcggcggcagcactgaagctaccgctgtcggcgatttcgacgagataacgcagttgccgggtggagatcaagagtcatgcctttttgagatgagtagcgagcctggaagatattagtcgcaacccttgccgatggctaaagtgaacggcatctcaatagaaggaataagtcatgagcccggttgagctgatgagccagtggactttcggcggtattgattggctggtgatcggcctgggcgtgacggtggcttatatcgtgttcggcattgccgggttcggcacggcgctggaggcggggccgatcctgattttattcatgcc

SEQ ID NO: 229629 - DNA, 177 bp, Homo Sapiens
  misc_feature (159)..(159): n is a, c, g, or t
tgggcattgccgatccgcaatggggcgagcggcccttcgccttgttggtggtgcgtgaagggcatgtgatcgatgcgcgagagctcaaggaacacctcaagccttttgtcgagctgggccatttgagacaagtgggcgatcccgaagccagtatcgccngttgttactgtaaattcc

SEQ ID NO: 229630 - DNA, 458 bp, Homo Sapiens
gactgattattcgactcgatgtatcgctcgatttccgctatcaccaccgtatcgactacaccgcgcacctgctcggggtaagcccgctgcatcttgggctccaaaccctcgatctggcgcaggatgtctgtctgattcacacggtcaccacgaaaggcaatgggcaacgaaggatcatgatcgggccaaggatgctgttgatcatgccgatcaccggcttgttgggctggtcgtctccatcatctgggccgaagaactcggtttccagcggaccaaccttagcgcgcttgatggccatggacgcgatgtagtccggattcaggctcccaggcttgaccagctcacgcagcgccccctcataggtagcctgctcaatttcgcgcggcacctcgccatcggggatagggtcgccagaccgatctactgcgcctgtacgcggccattgcagggcttgcacc

SEQ ID NO: 229631 - DNA, 585 bp, Homo Sapiens
  misc_feature (42)..(344): n is a, c, g, or t
ttcagttctctgactaagaaattattcttctattgattctgnnnnnnnnnnnnnnnnnnnnnnnnnnnnnnnnnnnnnnnnnnnnnnnnnnnnnnnnnnnnnnnnnnnnnnnnnnnnnnnnnnnnnnnnnnnnnnnnnnnnnnnnnnnnnnnnnnnnnnnnnnnnnnnnnnnnnnnnnnnnnnnnnnnnnnnnnnnnnnnnnnnnnnnnnnnnnnnnnnnnnnnnnnnnnnnnnnnnnnnnnnnnnnnnnnnnnnnnnnnnnnnnnnnnnnnnnnnnnnnnnnnnnnnnnnnnnnnnnnnnnnnnnnnnnnnnnnnnnnnnnnnnnnnnnnnnnnnnnnnnnnnccattgttcactcacatttggctcagaataaatatcttcaaatattttacagtgaatctttttgtcaacattgtatgggcaataagttaaagaagaatatttaaaactgaaaaactaaattgtaaaatgttaagtagtaaagtgggactcagagcattaaaaatcatgtaaatactagagtaaaaaatagagtataaaaatactaaccattacaattatgtaaataaaaagggaattatta

SEQ ID NO: 229632 - DNA, 343 bp, Homo Sapiens
  misc_feature (133)..(302): n is a, c, g, or t
gagctgactcatttcagttctaccatcaagccatgtagcctgtgcaatcacttcagcattttgattctctagttgttatgctataaaatgtggacgatgacttgcccaatctgcctcagaggaatactttaannnnnnnnnnnnnnnnnnnnnnnnnnnnnnnnnnnnnnnnnnnnnnnnnnnnnnnnnnnnnnnnnnnnnnnnnnnnnnnnnnnnnnnnnnnnnnnnnnnnnnnnnnnnnnnnnnnnnnnnnnnnnnnnnnnnnnnnnnnnnnnnnnnnnnnnnnnnnnnnnnnnnnnnnngagataagttcatgtgaaaccccttgtacaactacaaagtg

SEQ ID NO: 229633 - DNA, 150 bp, Homo Sapiens
ctcagtatgttgtcagtttttctcaatattgatatatagattctgtgagagcccctaaaatcccagcaaattatttcatgaatatcaacaaacaaaatctaaagcttacatgtggaggcaaaaaaaccagactagccatcacgatattga

SEQ ID NO: 229634 - DNA, 281 bp, Homo Sapiens
tctatctcattcatagccatcaattgcctaaaaagaaagtcattatactcagcgctacgatcagcgaaacgattgctaaaatgatgtttggaccagaagttaaatactgggatgttggatgacggaatcaaaaggggaaattgtgcaaattcccatcaaaagttttagccgctatgcgataaaagagaacgaagaacttttgaacttggcaaaaaagttaatagacatctacaatcctaacagcactattattacctacaaaggatttatggaacaagatg

SEQ ID NO: 229635 - DNA, 506 bp, Homo Sapiens
tcatcagcagagtacagcacatgcgcactgatcgttgtcgcggccagccaacccttccttgctgaagcatgaacacgacttcagctgaaaaagtggagaaggttgtcagcccgccgcgagaaatccgtagtgataagaagcttccaagcggggtctaggctaggactttttatgaagaacgctatagcaccgccaatgatgaagcccccgatcaggtttaccagcagcgtgccgattggaagatttgggaacaggctgttgagtttgagtgcgagaagccagcgtgcgacacagccaacagatccaccgatgattaccgcgagaagagagctatacatagtgtcagtccatttcctgaagggataattggaaagacacgcacgagcctacgtccctttccagggttcgtaggcatcattagccagaggcggttgaggaggaatgccatctccttgcatgtagcttagcagtcggcttcggggattttcaacgccccaacgattggg

SEQ ID NO: 229636 - DNA, 225 bp, Homo Sapiens
tcattcatcgaaaaggcaccaagcctgtatgggtcagtgtgctgtataccccggatgcaccagatggcgttgccttccgggagctgaccaaggggctggtggagctggacacgccgaaagcaaaaccggaatggcagacctatttcacttcccagatggccactaaggatacgaaagagatcacacggatcttcaacgatacgcgcagtgtgtaccgctatacct

SEQ ID NO: 229637 - DNA, 634 bp, Homo Sapiens
gggtgttcgatccagtcatcaaaggcaaacgggaaatccgggccgaagatggtgatgggtttcttgccatcgcccgggtggcgattgggcttgctgagggtgctggacggaatgctcatggctgaccttactgacggctcggcgggaggagggcccgttgagtataggaaaagatggcagccagtttagggaacgttacgcgcgttaataagacgcaatctgtcgtcggattgcgctagttttagtcaatgtgacgagctaagtggtcagattggttgtccgcgatccaatttgttactgaggatgatcgaggtggtggttttctccacgccgtcgacactgccgatctggtccagcaattggtccagttgctccggcgaatcggtgcgcagccaagccacgtaatcgaactccccactcaccgcgcacagctgctgcacttgcgccatggcgctcagcctgcgcaacacctctttgccggagcggggttgcacggtaatgcccacgtaagcctgcaaaccaccatccgcaacgcgctggcccaggcgcacgccgtaaccggtgatgacctgggtttctccagggggaactgaatgagccggtacgagtcgaatcggaacagggcaagtgttcg

SEQ ID NO: 229638 - DNA, 322 bp, Homo Sapiens
aagactgtgttataatcaagaacgaaagtcggagtcgaagacatcagatacgtcgtatcgacataaacgatgcgacgggatcgggggtatcccataccgcggctctccggaaacaagtttgggtccggggagtatgtgcaagtgaacttaaggaatgcggaggcaccacagagtgtagcgcggtaatttgaccaacaggggaacctacccggccggcacggacaggattgacagattgatagctcttctcgatccgtggtggtggtcatggcgttcttagttggggagcatttgctggttatccgataacgaatgaatgagc

SEQ ID NO: 229639 - DNA, 151 bp, Homo Sapiens
  misc_feature (121)..(121): n is a, c, g, or t
tctctgagtatgacgggattaggcgacaccctcttttcgccatcgcaagcctgctggaatactgacgtagccaggcttcttcgggtctctgaaggcattgaagttgtcgcgcagttgtttngccaactcttcgcggttcttcaacgcgtac

SEQ ID NO: 229640 - DNA, 389 bp, Homo Sapiens
cggccatcgcacagcaggttcgctagcaggatcggcaaggctggagtttttcgcaccggaaatgcgaatctcgccatcaaaggcgggcacgccggtaataatccatttatccatgagaatctcgacgccttgggggctcaggtgcgctcggcccaggcagcgcggatgaaaaaatttcatagtgaccgcatggattgctgccctcggtgatccatgggttcacatgggcatagatcttgctgatgacgcttgaccgggctcaatgccgcccagtatcatcgcttaatcacgttcagcttggaaattgcagccttcgccttcgaatactacagtcgtatcaggcagcttcccttcaaggaagctcttaacttctagggacatgacatgag

SEQ ID NO: 229641 - DNA, 510 bp, Homo Sapiens
  misc_feature (180)..(231): n is a, c, g, or t
gactcatttcagttccggtaattagagacaattgtggttttggctttcggctcacagtaattgcaccaggtactgtgaatactgtgatcagtaagactagtgaaccccttgactccatgaagctcaagttttagtgggaaaaacattggtttgggtgtcggaagagctgagtttaatctnnnnnnnnnnnnnnnnnnnnnnnnnnnnnnnnnnnnnnnnnnnnnnnnnnnntataaagactctaggccagaatctcttcatacatacagcaaggctagtttttttgagtgtttttgtgagactgaaatgagcgaactgaaatgggctcatttcagtttcctcataaaatgacctgaatttttatttacatctatctcatcaactagaatgtaaatttcgtgagagtctcggtgtggtctgttttttccacttctctaaccccactcagtacctagaactcagtagacctccacaaatacttatggttcttttgctttacattcttactca

SEQ ID NO: 229642 - DNA, 339 bp, Homo Sapiens
  misc_feature (85)..(286): n is a, c, g, or t
gatctagaggacccccacccaggctgagcgcggtggtgtgatcatagctcattgcggcatcaacattctgggttcgggcagtcgnnnnnnnnnnnnnnnnnnnnnnnnnnnnnnnnnnnnnnnnnnnnnnnnnnnnnnnnnnnnnnnnnnnnnnnnnnnnnnnnnnnnnnnnnnnnnnnnnnnnnnnnnnnnnnnnnnnnnnnnnnnnnnnnnnnnnnnnnnnnnnnnnnnnnnnnnnnnnnnnnnnnnnnnnnnnnnnnnnnnnnnnnnnnnnnnnnnnnnnnnnctaccataagttttaaaagacagtaatttttttatggaatgttgactaaatgt

SEQ ID NO: 229643 - DNA, 494 bp, Homo Sapiens
ccggctattggtcaatctgcgcgcgtatttgatgctcaacttgcgcgagcgcgtgagactgcttgcgtggcacaacatatggcgagcctctggtcggagcgttttgccggggacatgtcgacacagaagcgcctgactgatcactttgcgcggctgcttgagcgcccgtttgtcgggccgctcaacgaggaacgggtggctcaggctcgcgaagcactgaggggcgagtcattggccgacgtggtgtatcgggtactgcgcgaacaagctcgcgacctggaacccttgcgcttggccgagggcaatgtatttgctggtatcgccccctccgtaccgggtttctataccaaaaggtatctgcagtactttgagacgcaggccccacggttggttgacaccattgcccgggataactgggtgctcggtgagggtgccgacctgggccatcaagatttgagtcggctgatggcgcaattgcaacagcgctttttcag

SEQ ID NO: 229644 - DNA, 289 bp, Homo Sapiens
cggtgactctagcaggatcttagctcatttcagttcggctgatcttgcggtggcaaggccttcgcggctgacttgcaaattgggtgatatgggtggcgtccactgccaattgggtgaggatcaggtcatgcagcatgcgtgggaaatggcggctgccggtgctggcgatgaccttgcctatctgtgggaacaggtgtgagttcatcaattcgtccatgagtttcgtgcaggtattggggccttatagcgacgggggttaagaaggtaactaatgtgaataacctgcagt

SEQ ID NO: 229645 - DNA, 269 bp, Homo Sapiens
ccacctggtttcccgagcgcgagcgcgccacggttatcggcgtctatacctccgggcaattcgtcggcctggcgttcctcactccggtactggcgtgcctgcagcaaccagtacggtgggcacatggtgttggtggtgaccggtggcgtcggcatcctgtgggccgcgaatctggtacgcggtgtaccgagaagccacaagatttcaaaggcgccaccgaagccgaaattccaactgatccgcgaacggtccggcctggtgcacttccg

SEQ ID NO: 229646 - DNA, 186 bp, Homo Sapiens
  misc_feature (153)..(153): n is a, c, g, or t
tcctaggcgttgtcagtgtagcgcgcgtgcgccggacatctaagggcatcacagacctgatattgctcatctcgggtgctgacgccatgtcctctaagagttggggacgcgacgctcggggtcgcgtactagttagcatgccagaggtctgtncgttatcgggattaaccagacaaatcggtccac

SEQ ID NO: 229647 - DNA, 201 bp, Homo Sapiens
actacgacctatgtagtggtgcatgcgctagtgtggacgattgtctgtatcgatacgaacgaatctgcatgctaactagttacgcgacccgagcgtcggcgtccccacttcttagagggacagtgcgtcagccaccgagatgagcatacaggtctgtgatgccttagatgtcggggctggggtaccgaagctcgacattcg

SEQ ID NO: 229648 - DNA, 443 bp, Homo Sapiens
ttgtcaggggtatccggggagcttcgtaacctgaatgatgcgctctgcaatcagcaggcagcacggctgtgcaggcgccacatctgagacctggatcttggtcacatacggggttaggcggaatggctgtaccgatgtcctggatcccggtcaggacctcctctgatacggcagaaagacggacttctccttgggtaaagtcccttgagtgcttgaaccttgctgagtgcccctgtgccccccagtgtgggcagggcgaggatgggagcagttggaacgcataggaagacttcccacattcctgggggagccagtgagctccagagaaggcgggtaccccggaaacacgttccggcttgcaaacgcaagagggacggctggctgctccgaaattgtaacgaattcgggcccgtcaggacggagacagccactgacacgggcct

SEQ ID NO: 229649 - DNA, 316 bp, Homo Sapiens
gtggccagcctgcaggttgcgggagcgaggagtgggcgtctgcaccaggcatccaggcgtgctcttccccaagaacagggcaggcagccttacgtggtggagtctgttgagcccctccgccagcctggcccccgacagcgaggaacactcgcttggagggacaaatggaggacatcaagctggaggactcctcgccccggggaacaaagggggccctgctccttccatgcttgatcaactgacaaggggcctcacttgacaaggggggggttaccggagctcgaaattcggtaaatcaatggtcataagcttgttt

SEQ ID NO: 229650 - DNA, 242 bp, Homo Sapiens
gaggattacagtgcctgttgtcagtgccagtgctggggagtatgactgggtgcggtacaccctgtcaaactggtaactgcagtgtgtacctaaggctgagctcagggaggacagaaacctcccgtggagcagaatgggcaaaactgctacgcttgactcttgacttttcacgtactgaatacatgacctgtgacaagcggtggccatcactgatccattcttgaccatttatgtggttttaa

SEQ ID NO: 229651 - DNA, 328 bp, Homo Sapiens
aggtcgttgtcagtgtccagcgtctgagtggcatcattcaccactgatttttcaagccacgaaatgcacagtccagtagggcacgtgataatctctcctttgtcatggaacaaaggcagatcggagttttcagccctcactgcaagggagggtttacaagggcttctgattacaggctggagggaggacgtggaaccaggcaagagtctgggccctgtgtacatatggctagcctattaatccaaagataaagccctcctacatcagacaccagctccttttgtttgtaaaatccataaggtcattaaacaaatattgactacagaaa

SEQ ID NO: 229652 - DNA, 131 bp, Homo Sapiens
cgagggtataccgtgaaccatcgtgatggggatcggggattgcattatcccatgacgagaatccagtaaaggttgcgggtcataagcttgcgttgattaagtcctgcccctttttgtacactcgcgactga

SEQ ID NO: 229653 - DNA, 305 bp, Homo Sapiens
gtatgctaagatttcgcgtagcttggtttggtttcatccacctcatctgcctgctatgatggttaccattgatgagagtgaggagaaggcttactgtcccgtgggggccagctttggtctatcatgcagatgggggcttgtttttgtcatgtgagaagaacgcagcgccgtatcgtcataggggtgccttgggtcacctccgggcaccacaatctgcatcgggggctttccctagattttagtcgctataggccgttttgaatctcttatccgatcaagtctttgattcggtactattggctcct

SEQ ID NO: 229654 - DNA, 345 bp, Homo Sapiens
tacacggataccctgtggtagcaacaatccaatcgctgcggttaattctgcgtcacacatcgataagaagagccgacatccaaggatcaaaaagcgacgtcccctattaacgcttgatcgccacaagccatttatccctgttggtacctttcctgacaccccctgcttaatacccaataggtcacaaggatctgtcaggccccgtctttcacgggtctgtattcgctactgaaaggtcaagacttacgctgagcttttgccctttctgcatccactgcggatgttttcttgtctctccctgatgctcgccctctagagatcacctcgcgttatccgtttgttagc

SEQ ID NO: 229655 - DNA, 235 bp, Homo Sapiens
  misc_feature (204)..(204): n is a, c, g, or t
tgggtagcaacaacacatcatcagtagggtacaactaaccctgtctcacgatccattctgacctttttgggtttataagcaggaggtgtcagaaaagcttaccacagcggataactaggctttgtggcgtgccaagccgttcgtaagcgcacgtctgctttcttgactcctatcgagtgctcagactcattccttaccacttgntgaaggtcagaacttcacctaagtcgattgt

SEQ ID NO: 229656 - DNA, 218 bp, Homo Sapiens
tgtattacttgtggtcgatctctacacggatcccccatgaggtccataggtttgggtcctagtcctttctattagctcttagtaagattacacatgcaacgcatccccgttccagtgagttctaccctctaacatcacctacgatcgacataagggatcaagcatccaggcacgcacgcattgcaggctctaggaacgcgttagccctagtccacacc

SEQ ID NO: 229657 - DNA, 124 bp, Homo Sapiens
atcttgttggtcgtctctgcaggatccccccgttatcgtcgcctgtgcgggattactgactgaacgcctcttagtcagatatcccgccctggcggaacgatacggtagcgccgtaaacagtata

SEQ ID NO: 229658 - DNA, 211 bp, Homo Sapiens
  misc_feature (69)..(101): n is a, c, g, or t
gtcgtctctagcaggatcccccccggacataaggttagaggcggaacctacaattctggcctcctcctnnnnnnnnnnnnnnnnnnnnnnnnnnnnnnnnncgccatgaagtgtgaacattacagaaggagctggcccctggactctggccactgctttggcccccgttgccctgtgctgtagcctcgctggctcgtgcctagtcgacacc

SEQ ID NO: 229659 - DNA, 123 bp, Homo Sapiens
tctgggcaacctacaaactaatatcgtttatgtcttggggtcggtgttggagatgccccaaggtttatacatagtaggggcggtagtttgactcgtcctacaccaggtcatggacaaatactg

SEQ ID NO: 229660 - DNA, 291 bp, Homo Sapiens
  misc_feature (153)..(153): n is a, c, g, or t
  misc_feature (163)..(163): n is a, c, g, or t
  misc_feature (252)..(253): n is a, c, g, or t
gcacactggtctcacatatcagcaggtgctcaataaaagtccgttccctcgcttgtgtatggcattctaatgaagacttacaacaatagtttttcgaataatatgtcacctgttttcgaataacatatcaccaaggtaaggcagatggccagngaaagtttanggcctccaatgttaatttgactcatcatactacaatatgccgaggctcagcacgccttaatccagtcgattgagctcttggtctgtacnnacttcgcttcatatctaggcaatacacctgacgtgctg

SEQ ID NO: 229661 - DNA, 153 bp, Homo Sapiens
ctactatgcctcttccggggacagtgccaggtggtgcgagtttgactggggcggtacacctgtcaaacggtaacgcacggttcctatgcgcgagtctcagggatggacagatcacctccctgtggtagcatacagggcacaacgctcgctttg

SEQ ID NO: 229662 - DNA, 282 bp, Homo Sapiens
gcctaagtggaactgctcggacaggttagtactgaccctactgattatgtgttgtagccatggtaatcctgctcagtacgacgaggaaccgcagtttcagactatatgagtgtattgtgcttggattgaggagccacagtggagcgaagactaccatctagtggagattagtgactgaagcgcctctaagttcagaatccgcgcccaggtcgtaacgtatacggacagtcgccgatccagcaaatcccagcttagggcggtttaccgaagctcgcaattcgt

SEQ ID NO: 229663 - DNA, 294 bp, Homo Sapiens
ctggtctgcactagaggatcccgcctaagtggaactgctccggctaagtggaactgctccgcatcccacaggcccagctctgatttcagccatagctgtgctggtcaggtccctgtgaactcatcccaaccaaacccatctggaacagaagcctcacatttctctgcagttttctgtcctagggatttctccaagaagaaggcactcggcagtagccctcacccacacacaatcatggtggagaaatatgggagactttatatgcctggggggcaaccccggagcagttccact

SEQ ID NO: 229664 - DNA, 176 bp, Homo Sapiens
gccttagtggaactgctcggatccacgttgactctggttagtgtcagaattgaataggaatgcgggacagtcagccggcgtcagccgcttgctgtggataacccacgcgcctggggtcggaagtcttgtgtgagagcaaaagaaaacacagtgagttttttcttaggcatacactc

SEQ ID NO: 229665 - DNA, 142 bp, Homo Sapiens
tgctcagatcaagatggtctctccatattccgctggagttgcgcacggtgcatcggactctcgtgctgtctctacggagggaccagcgtaacgcggcaagtaaatgcttgatggaggtacccggcagcagttccacttagtg

SEQ ID NO: 229666 - DNA, 164 bp, Homo Sapiens
cctaagtggaactgctccgtgggtgatggagctgctccgtgggtgatggagctgttctgtctaattatgatcgtgtctctgagatgatgaacaacatgggtggtgatagagtatgtagatttaccagtagagtagacggcatgctagttccactataggcgggc

SEQ ID NO: 229667 - DNA, 204 bp, Homo Sapiens
agcatggatccactgcattccatcaggatgctttgggcatgctgcatacaatccactgcattcaatcgggatgcattgggcctcgctgcatggactccacgtgcatacaatcgggatccattgcgccaaaatgcatggaatcgactgcatttaatcacggtgcatggcaatccactgcattcaatcgggatgcattttaccaca

SEQ ID NO: 229668 - DNA, 169 bp, Homo Sapiens
ggggataaagaaaactcaatgaattgagaaagtataatttgctcaggagaagtgcattacatgatttctctgagaaagaccaaaaacattccttatgaatagagcccaaagactttgattaaaattgactagaatgagtccactatacttctatttaaaaatgagaagg

SEQ ID NO: 229669 - DNA, 153 bp, Homo Sapiens
tctctactgagctccaggagcactgccaccccaccatcacagaatgtctgagctgtcttgagcacactgctggactcaatgagtgcagattctcaatggacaggcgtgaggctggctcagctgtcccctgccgcagcacatggccaggcacgt

SEQ ID NO: 229670 - DNA, 197 bp, Homo Sapiens
ggggtgtaacttttccttgccgaaggcgcgaatcaggctctgggcgatctgatcgagcaccgccggattcggccatcattttgccgagcatcgtgcccagcgcgaggatgatgccgacaaagccgagtactccgccgaaaccgtcctggaacgccttgatgatcttgtccacgggcatacccgaggtcaggccgagg

SEQ ID NO: 229671 - DNA, 155 bp, Homo Sapiens
cgcccgctaccaataaggaaccagctctcagagagccctgaggcagctcagaatgcagttatttaagccaggacttaattgttgttcatgcgccaaaaaagagtgttagttttcctctatgcttagctcaaaaattctatcaaatatagagttcc

SEQ ID NO: 229672 - DNA, 163 bp, Homo Sapiens
ctgtgcacgctggcatccttaacccactgagcaaggccaggatcaaacccgcatcttcatggatgctagtcgggcgccttaacaactgagccacaaggggaactcctatttcctctttttatgtgggtgtaactcataccctgtgatgatcttaatgcttccc

SEQ ID NO: 229673 - DNA, 226 bp, Homo Sapiens
ctggatcgacgaagagttgtggctgggcttcaccaccgtgctgctcaggacagccccatgcctgctttgtcatatccccaccagaatatccctgcccagggaagtgagaggctctctttatggagccatgcagaactggtgcagagaaactaagacggatggaagagatggagtgatcttacggcaggggtagagagagctgagttgcggacgcagtccacttagg

SEQ ID NO: 229674 - DNA, 176 bp, Homo Sapiens
tatgatgtatccctgcttatagtggattgcatctgacgacgatgtctcaggtagcccagaaaatctgaggagttcaatcaacaagttcttacataccagaaagactgcaatttatgaggagactaagcaaaggggggagttctcctggggtttcctgacactgtctggatgaatga

SEQ ID NO: 229675 - DNA, 195 bp, Homo Sapiens
gaggtagtgattgacgtgaatcgcatatgtcatccccttaaaggtcggtaattcactcaagtaacttgactaagtatacagaggcataagtgtgccaattctccggggcctttgatttacgggagagggcggattcaggacgggcgatagggcactgaacgtgcaccgaagagaggggagcagttccacttaggc

SEQ ID NO: 229676 - DNA, 360 bp, Homo Sapiens
gacgaccgacgtacgatttctgcaccttcgaagacttcgaagtcgctgtgtggcgagcgtgaagccaaagtgatcaaccgcttggccgtcgatcaacagcatcgccacggctgggcgagtaagctatggcccaacctgttgggcgaaattggtatttaccgggtcagcagccctggcctgaccgaccacaagattgccgtctaatcattttcaagagggacgctcatgagtcgtttggctgtttttctattgactgcactgcttggcgccaacgccatggccgccgacgttatcgaccctaatcgcacgaaggaattcggcgatattacggtgcgctacaacaccttcacctccagcttc

SEQ ID NO: 229677 - DNA, 306 bp, Homo Sapiens
tggactccgactaacatatgaattctagacaatagacatcactcatcatagttagtgcaatcaggatactgccattgctgtccccagtcatttgattccgctgggctttctcttgcagctgtcagtctctttaaatcctttctaactgtcacccaatgtccttactttcctcttgaaacttcgcacgttgcctatgcgtcggtggtcacgggaccttaatcggtaacggaggcccttctcgaacttagtcccgatctcgctttcacgctctgatcgagtccgctcccggatccagttccacttagt

SEQ ID NO: 229678 - DNA, 158 bp, Homo Sapiens
tcgtcttttgataggcagggggcacaagatagactgcgagagtctgttgaacatatatgtacgcacattaactctaacccgaagtgctacaaggttccgaactaagctaagccctatcacctaccagtggacccaacatacatgcgcggccgcacagt

SEQ ID NO: 229679 - DNA, 119 bp, Homo Sapiens
tcatagctgattcttgagggtaaaacgacgtccagagaggcgtgatttattccttgagctttatcttggaaataaaagatctttatagcagacagcatattacatttgggttgtgcaag

SEQ ID NO: 229680 - DNA, 275 bp, Homo Sapiens
actctagagtatccccacacgaacgccttcggtaccgggcgtgcgggcaacagcttgccgatggcgttgcggcgttcggtcggcggcgatgtgacgttgcgggtggtgccggggctgtattacgaacgcttgagcttggaggccaaaagcagcttttttgccgagccgtggacggtcggctccgaggccgatcgcattggctatcgcttcaagggcggcagcgcgttgagctttcagccgcgggaacagccgtttggcgccggctccgatccttc

SEQ ID NO: 229681 - DNA, 361 bp, Homo Sapiens
tgcagttgattgccggagttccgttcgaagtcagcgaagctgtctgatcgtagagtacggtgcctgtgccgcgattgctgtgagcgatgccgtggttggcgagcgagatgcggcctcccgccgagtggcgcatctgcgaatagttgcttgcggttttttccgattgtgggtgtcggtgaatctgtgcgatttttgctttagagccgccggtctgtggtccatagtgagtcttggccgcattggcgttgttggcgttcgagtctgaggcagcgagtgccatcagaactgcggcggagagtaaagagagcttgctgtagatcctgctttcgatcatgtgatccccatggaaggcggggtaccg

SEQ ID NO: 229682 - DNA, 245 bp, Homo Sapiens
cttctttacgacgaacagccacggtttttgctctggcgagacaccaagatttctcacaaactttgtgttgaagtccccagtctcggtcctattggtaacgtactggggacgcaacgcaggagaagggtcaatttttccaactccgatggctacgtttccctctccctctattgggctggtttcatagccgagaaacccctcatccagtctcatctgagtttgggagcgcaggttattgtgaagcc

SEQ ID NO: 229683 - DNA, 194 bp, Homo Sapiens
cacgtaacgccttccgcggccacgctacccctacacgagtaggagtagcactgccgctagccttggagtctaggcctcgggcgcgggtccagccgccgccgccgcagatgctgatgttggtggcagatgttcaaactcgaactttgactttcgaagccgagaaggcgatacctgtgcgtaccgagatcgagctc

SEQ ID NO: 229684 - DNA, 323 bp, Homo Sapiens
  misc_feature (186)..(231): n is a, c, g, or t
ctacatgacactgcgccgacagctgtattaataactcttgaaaacgagaagcagcataaatcgcctttactaggggagtcgacaaattggcggatatcatagaatgaagcattattcattgctagacctaagtagctctcaggccacaaaaagaacatgtggacagttaaatgcctattgctaagnnnnnnnnnnnnnnnnnnnnnnnnnnnnnnnnnnnnnnnnnnnnnnacgtgacttgcgctatagcaaaactattagagtctgctgcaaaagcacgcaatcctgagtaggtgaagtaccgccaattgtctagcagggcg

SEQ ID NO: 229685 - DNA, 282 bp, Homo Sapiens
tgctcaggcggaagctgttgatattcatcgctatccatgaacgaatcgacaagggcgatcgtgcgacgaataatcgcatcctcgtatcggcgcatgttttgcaaattcattcgcaaaaactcggcatttttaaaacctatttctcgtagcaactcagcggccatattgtgaaacgttgtcatatgaagcatatgcttgcctttcacttcatggaatcgcggcgactgagccactcgttttcgcgcgtcttcgatgagcgtcgtattgaacgggggaccgagc

SEQ ID NO: 229686 - DNA, 314 bp, Homo Sapiens
cctatggcacaacaagggtggcagccaggacaacctttagaactcaaaccgacgataattaccgcagggagacgaaacacttattggggtggtgaaggcggaggctacgtaggaagtggagatggctggggccttcaagaagggccacgtcgaggtgaaggagaccgtagccgcttcaagcagtttgacttccctagcaccaccgccgatttcattggagagcaaaagtacaatcaatccttgattgacgcggagtacagcgcacggtccgcaaccctcactactgaaactgaaggcgttacggggtaccgagc

SEQ ID NO: 229687 - DNA, 109 bp, Homo Sapiens
taacgccattccagaaatagaaagccgaccttcttaagctagtggctaagtaatgtcgccggtaggatccaaccgggccgcggcttacgccgggtgcaagtacaacaga

SEQ ID NO: 229688 - DNA, 272 bp, Homo Sapiens
cgtaacgccttcccgcagcgaattccagaactgctggcgagcaaccccagctacgtattcttcagtgcccgccccgacagcaacgaaggcccacgcggttcgctgaacgtgccattgaccgccggctacagtgtggcagtggatcgcaaggtgattccgctgggcagcctgttgtggttgtcgaccaccaaaccagacggcacgccactgtcacgccctgtcgccgcgcaggataccggcggcgcaatcaccggagaagtacggagtaccga

SEQ ID NO: 229689 - DNA, 580 bp, Homo Sapiens
gctaagcggcggatgcccgataaagcgcacctgtggaaactgcgtcagggccgctgggcgcggtggcacccggagctttttggaccgggcatgcagcaccgcttcggaggtagaggtacaactgaacagggcacgtggatcgaggcagatgcgctcgacaccgcgatcgcgcaacaggcggttgagcatgcgctcagcatcacccttggcgaagaactgttcatgacgcacctccacggccagcggccgatcaatgccatcgagaaatccagccagctccgccaggcgtggcggcgtaaagctcttcgagagctgcagccacagcggtgaaacgcgctcacccaaagggctcatcaagccgacaaaactttctgccgccggcaactgttcacgcaaatcgccagcatggctgatatcgccggggaatttggcggggaagcgaaaatcatcaggcatgatttcggcccagcgctgcacagtggcggccgaggggcgagcataaaaagtggtattgccctcaacggcgttgaagacctgggaatagagcccgaggtaatcgctggaacgtgccttaacggga

SEQ ID NO: 229690 - DNA, 186 bp, Homo Sapiens
actgtccaccgtgggccaggccggcgcctgtctgacctaccgtggctacgacgtacgcgaactggccgccgacgctacagtttgaagaagtcgcctacctgctgctgtacggtgaattgccaacccaggccgaactggccgcttacagcaacaagctgagcaaattacgtgtgggtaccgagctcg

SEQ ID NO: 229691 - DNA, 539 bp, Homo Sapiens
cacgtaacgccttcgggtgccaccgaccagcgtcctggaatctcaggtactggaacgcctgatcgtcgaaaacctgcaactgcagattggcgaacgttccggcatccgtatttcggacgaagaactgaaccaggctgttggcaccattgctcaacgcaacaacatgagcattgatcagttccgcgccgccctggcccacgatggcctgtcctatgaggacgcccgtgaccagatcaagcgcgaaatgatcatcagccgtgtgcgccagcgccgtgtggccgaacgggttcaggtgtccgagcaggaagtgaagaacttcctggcttcggacctgggcaagatgcagctctccgaagagttgcacttggccaatatcctgattccaaccccggacggagccaactcggagcagctcaatgccgctgccgctaaaacccaggcgatctacgagcgcctgaaagcgggtgcagattttgcccaaatggccattgctcagtcctgcagcgataacgccctcgaagcggagatatgtcgaaggc

SEQ ID NO: 229692 - DNA, 415 bp, Homo Sapiens
tcaccttgatgtaaatctccgtaccgtacattttgatcagatagacgtcctgccttatccggtggtctgcataggctgtcattgatttgtacaacattcgcgtttcaagggcgcagaccgccaaccgcatctggccgatgctcaattcaagttgacgagcgccctcccgcgcagttgccgtaaaggctctgaggcccagccggatgacttgcgccttgatcaaggccagatcgtaatgaggtgtgtacttttccataagacacctgagtccaataattaccctctgagggtaattttaccaatcgaaaatactgctcctttccctgcctaaaaaccctagtgcgttgcctttgtaggcgactcctaataggctgtaggaaaattcatcctatgattggacgaaagcgtaaagccc

SEQ ID NO: 229693 - DNA, 490 bp, Homo Sapiens
cgatcttctgaagatcgacatattatagcaatcattaagacagcccaggcaaacataaagacagatcgtgtaaacaaaaatgtactctccccccaagcaaactgtatagtctcataccacttacagttcttacacatttagtaaattatagacgcggagacatttcttaaaaagtctgacttcactttcaaggaattcttcaattaactttacgttgctttaagctgctcatccaacgagaaaacaatctgtggttactgactcctttgtgtgccaatggctgccataatttaatccatgccttgccttagtcccaaacatgaaagtcatcaacatttcaacctttatattctcacaaattatttctcctcttagctgcatgaatttctacttccaagtgcacttagagcaggtggtaaacatcccaactcttctcatacaagcagattcatggaagtttagtacttagaaacaatagtatctccattgg

SEQ ID NO: 229694 - DNA, 189 bp, Homo Sapiens
acgacgcggagagtccggcgtcccgcagccaggccgggtgaggctggcgggcggggcgatcaaggtcagccagcgggcgtcctgatcttcgctcaattcgcacaggataggtgccagcaggttcaggcagctctcagccgcaccgcgcaacgacaattcactgaacgcctcaggttcgccgccccaggt

SEQ ID NO: 229695 - DNA, 204 bp, Homo Sapiens
ggccatgcccctgagcgagacgtcagcgccggcaacgtgtacgccaacaacgggacaactccatggcccgccgccggggctatgaccaactgcaacggcaacatgcgtggctgcgacgactacctgccaacaccttccctgcccgccagttggctggataaaccctttgccgactatagccaggaactggcaagcctcaagggc

SEQ ID NO: 229696 - DNA, 224 bp, Homo Sapiens
aagccgcactgtcacgaatggcaacctccgccaggcccacttcaaaactgcggttgagcaggtgtaggagttctggatcgacacggcgcgcggcaaccgcgggcttcggccaggcgaggaatttcatggcgccccacggcgtttcgttggacaggccaatgtggcggatcttgccggcctttacctgttcatccagggcttcgagcgtttcctccagtacgcgg

SEQ ID NO: 229697 - DNA, 196 bp, Homo Sapiens
taaggaaatgacatgaagcacaaccctcgctccgccgacttcgaattcattgacgccaccttgctcaaatacggcgaagaccactcggtgctgaacatggccgaactcgacggttatttcaccgcccgtggtttccagcccggccaaggtggatgtggccgagtggttcccggcaatctggggtgggcaaaaccct

SEQ ID NO: 229698 - DNA, 345 bp, Homo Sapiens
tcggcatggagcagcgaggttgggccgaccacggtcatcaccgcgcgacttgcccgaccgcatgaacaccggcgccgacaacgcatccacgccgggcatcagcaggccatgtacaaagtgcaggccgcggctgcggatttgctcgcacacgctggcataggcctgatcgtccgccaaggtgtgagcggtgccggcttgaacctcgcgttcgcgcagctccacggtttcccgcgacggcaagtaggcgctgaacaccagcccggtggacgaactgagcagcggcaacaccgagcccaactgcgtcaccacggtgacggcgcgcactgccggctcaatctacaccag

SEQ ID NO: 229699 - DNA, 382 bp, Homo Sapiens
ggaaactatacagtacacatacgccgacatggaacaacatgggctggtccatggataagcgaggtcgagccagaccatatcgacgaccacgatccgcctggtgcgccacaacgaattcgtgatgggcggcatcattgatgcctcggtgcgcatctttctcgatgtggtttcggccaaccgctctcagttcctgttcctggctcgcgaacagtacggcggctgcctggccgtgcgccaagccatcgcagccctgcgacgaagacatcactcgcgaacatggacgcacgacctgacactgatgcccaaacttcagcacttggatgccgaaggtttgcacgtgatggccgaactgatcgtcaagagtgtgtacgacaccctgccc

SEQ ID NO: 229700 - DNA, 184 bp, Homo Sapiens
ggcagataagcacgcgtcgacgacatcccgcgtcaccacaggtaactcgccccaggcgtgatcggagtcaccgcccagaagggtatgtccaagtcgaataaagccaggcgcatagcagatactcgcggaccagtctgtaccacggcgtccagcatacggtcataacaggagagtgcacataagg

SEQ ID NO: 229701 - DNA, 216 bp, Homo Sapiens
gggcatcgaccgatgagaccggtctggcagactcatccgcgcagtcaatggagaacgccaggcccttggcctgggcgctgccaggtgaactgatggcgcaaggtatcgagctcgccgcgcaggctgaacacttgcggatgggccaccaggcgagcggcctgcaactcggtgaaggtgaggatgccgttgaccatgcgcatcatgtcccgcgccgag

SEQ ID NO: 229702 - DNA, 184 bp, Homo Sapiens
cgcgtggcgtactacgacactgaacgcgcgtatcacaggacctggatacacagactgtcagtacctgttgtatagcgacaaaggcgtgctgcgtcgcctgcatgcccaccatttgctcagtgaggggcatgccaatgtgcgcgtttatcgacccgccctaagacgcgggccgcgggtgacactt

SEQ ID NO: 229703 - DNA, 341 bp, Homo Sapiens
cacgcagtatgcctatggcagccaggacgaggattgctgacaatgcggattgaagccttgccactgctcgcgcagaccattgctccagatccgcagtcagaccggcataggaagcaaacaaggcatcgcacttgctgcgctgaaacaccgccctgaacccttacctgatagcgccacgccggcggaggccattcgtggaaaccgtcgccgtgctcgtcgagcaggatgaccctggagctgccgtcatccaagcccgatcacttcaaccggaatattgccgatcggaacgtcgaacgctgactcgacactgctctggatcttcagcacaccccctgccggac

SEQ ID NO: 229704 - DNA, 162 bp, Homo Sapiens
actttggcacccggaagctgcccggcgggtcatgggacataacgccgccgacatcgccggtcggcacctcgtttactggatcggacacctaccgacacggtactctgactcgatcttcgacaccctccgacctttgcgttcttgacttaactgacacacacc

SEQ ID NO: 229705 - DNA, 155 bp, Homo Sapiens
gtcaccatgggcaacgcggcaccaagggcctgcggaaatgacggaaaatcgcttctgtatgttaatagcaatatatgacctctgctttcatgtattcgatttcaaccggcgagcggctgtaggtcaggtagtcgcgcttggtcatgcccacgccg

SEQ ID NO: 229706 - DNA, 127 bp, Homo Sapiens
  misc_feature (62)..(87): n is a, c, g, or t
ctcgtaaccttctgacacgttgggacgtgagttcgatccccgcaaacgggatctttctcacnnnnnnnnnnnnnnnnnnnnnnnnnntgccaagcgggtggagaacgattaattcgttagtacacaa

SEQ ID NO: 229707 - DNA, 422 bp, Homo Sapiens
agtagtcaagtatgtccatcaaataaaccagcgcaaacggcgtggtaaccgtgaccgcacaaaattttggtgacaccaatattgatgacaaatcgattacattaaccccatatgttgcaggaacaggtggaaatactgcacttgatgtgagcgccgccaataaagaccaaggaaaagctattgcggagtggcgctgcggcccagaagccaccaatggaattgcagccaagtacttacccggatcctgcaaaggctaatttaattattcaacacgaagtcagttaattatcgtgaataccagcaacgcatccccgaaaagggatgcgttttttattgccctcacgtcccctgactaatcttaatcgtcggaaacttgctcgaataatccttggccttcggagccacggcaatcgccacctgcc

SEQ ID NO: 229708 - DNA, 118 bp, Homo Sapiens
atatatgtaggatataggtagtggtgtgagcttgaacgcttcttatgggctgctttaggcctacatgggtgtaatttgtactctctctacaggtttttcctagtgtcaaagagctgtt

SEQ ID NO: 229709 - DNA, 139 bp, Homo Sapiens
taaaacgccacaccggttattttctctgtatactgagtacggagcgaaaactattgattttcggcggctgggagtttgccagttcaattctcaagcattaaagaagaacacgaagcggttcgcacgcggtgcccggttt

SEQ ID NO: 229710 - DNA, 173 bp, Homo Sapiens
aacgcacacgttattttctctgtatctgagtacggagcgaaacgattgatttggcggctgggagttgcagttcaattctcagcattaagaagaacacgaagcggttcgcacgcgtgccggtttatttgatgtgtcgcatatgggcgaatttgaagtgaaaggacaagacagcc

SEQ ID NO: 229711 - DNA, 151 bp, Homo Sapiens
  misc_feature (122)..(122): n is a, c, g, or t
tcctaaacggtctgttaccggatcattaccacgctaagcgtgaaacgatcagcggagcgtgggaacgatcaacttcctataatccaggatcatgtgcggcagaaaccggcttgagtccttgngtgatcaatgctattggtcctctcgcacc

SEQ ID NO: 229712 - DNA, 171 bp, Homo Sapiens
ggcaatgttccaacgcgtcctgcaacagttcgtcagcttgcaacagctgctcagcttgatcggcgagcaacatgaatacctgcaagccaacgcacccgtcgatgcgacggcggtacgctacgaagtgccgggcaaaggcttcttcggtgtgatcgccaacgagagcgtacc

SEQ ID NO: 229713 - DNA, 271 bp, Homo Sapiens
cggatcctgaacggtctgttacccagtgcggtttatcggcgcctgggataaaaaaagctccctttttcagctatatccggtatagtgcgcgccgtgctttaaccgggccgcgtataggtagcgcaattccccgaagtcagcttcggctgcacgtccgcacagcggactcttccttggacggaatctttttccatttcatttcggtttttcgcaaaatcccccggccgaacaaatgcagcccagggcggacttctttggagtctcaaacact

SEQ ID NO: 229714 - DNA, 494 bp, Homo Sapiens
tgcgcagcaacctgctatgacgcctcgccttttgaaaatcgacacacctgagtcctacgacctgtcctgtcacctcaatgacctgaccgacgcgtggaaactctatgccggtgcaacctggacactgctggatgcccgcctgaaagacatcaccgtcaagaacgaaggcgtcagctggcgcatactttggcggcgcgcttgccccaggcctggccagcacatatcaatgtgaatgaccatgaacgtgtgcactgacactctgggcctacgccgtggtgtacttctgtaccatgctcaccaaagcacatgtgggtacttgcgtaccggcctgacattcgaccatgtcgcctaccaacaacacggatcgctcaccgcgcatcccgaccggcgaccgtactatcttcagcctgggcctgggctaccaggtcatggataacatgaccatcacctggctactcctacctgaaggaagaggacgtcaaagatcttcggga

SEQ ID NO: 229715 - DNA, 500 bp, Homo Sapiens
ggtctgttacccctacgacgcagaaggcgctgcgcaccactgacttctgactcctaaatcacgctggaaacctatgcatagtcttcttcctgggaacggtataaaattcgcgtagcattgcagagaggctggtacgagatactgcgcgagttggcgaacacatttggcggtatagacttggtaccacatatcgaatctaaaccgctgtccatgtctatcgaggagttatgcgcccgctctccaatgccattccaaaaagcagagcataagataaaagttgaattcgcaaagttactcaagcagatcgagtcggtcgaagctcacactagggtcttgtggtcaattcaacgtgatcatgaccacgaactatgactttacgattgaggaggcatatgccgggacacttcactctccaggatcccttgctcgcgaatcgcgatacagcctatatcgtcggcacactgcgggcaagaagggattctggcatgtacatggcgacg

SEQ ID NO: 229716 - DNA, 598 bp, Homo Sapiens
acggtctgtaccgccaggcggatgctgtccaggcgcccggcctggtattcgcgcgccagcaacgaggcgagccggtgaggatgtcattggcgaagttattggtggcgccgttgcgcgcaaattcttcggcggggataaaggctcgcacttcctccgggcacggctggcccttgaggtgcgcagccaggcaattgacgtaagccacgtgacggcgcaacagcgtcgacttcaccgggttcacctcaccaggggcgtcatcgagcagggtcaacacttgccgagcaaaactgcgcgagttgttgaccatcgcaccccacagcgtgcgtgcttcccaccagcggttgtaggcgctgctgttgcgaaaactgatcagcaccaccagtgccgagccgagcaaggtcaggggcatcagcggcaaattgatcttggcggtgagaaacagcatgaaatccaccgtcactgccacatcccacaacaacagccagaacaacgcccagcccacatagcccatggtcttgatgatcaggcggtatttcttcagaagggcagctttcaaacgagaacctcgcggtggggcggtgggcacaatcccctgtta

SEQ ID NO: 229717 - DNA, 357 bp, Homo Sapiens
aacggcatgttactacccagtgacaaacgcttcgcgcagttcatccacgtgaacaaactgctggagcagatgagcctgaatgtcatcggcaaatcagcgctctgagtgcaactacaaggaaccctcatgcccaagaccaccctgttcgacctcgatggcaagattgcgtttgtttccggcgccagccgtggcatcggtgaagccatcgccaagttgctggcccagcaaggcgcccatgtgatttgtctccatgccgcaatgctggatgggttgccagcatgtggccgatgcgatcatcgccgagggcggcaaagccacggccattgcctgccatattggagaaatggagcagatcac

SEQ ID NO: 229718 - DNA, 518 bp, Homo Sapiens
ttgatcacagcaacctgcaacccaataaatgttttgagtggaatatgagcattggttgataaacaaatcagctcggctgtcatgccctgattaagataatgttgcccatctatacgttgtaaaaaaacctgactattcagggatgcatctgaaaactggaaatacaccgaacgatgctgtgagagaaaacctatactctctaaaacttgggacatattattaaacattatgtttgttataaattgagacttaatcgattatattttataaaatgcgtacagatctgtctattttttatatcaattgcaatgttaatggctagtcggacaccctatccatacactaaaataaaaagctcaataattcagcgacctgtgccgctaactcatctttaaaactcatgaaatacacctactgcggagatagcagtgccaaagatctaaagtcgatcaaaataaaaataggcgtaattgtagcagatttataggtactgactagagatgttgagttgcatatcc

SEQ ID NO: 229719 - DNA, 164 bp, Homo Sapiens
tgctgcggtgactctaccggatccttaacggtctttaccatatgcgacggcatgctgcgtcttacacaccacgttctgcgtggaaagcggccctgtgcagcgagctcgacggatttgtttgtagcagaggtagagcatttttcaccgaggcgttgtttgtggtg

SEQ ID NO: 229720 - DNA, 616 bp, Homo Sapiens
aggatcttgaacggtctgttactcattcagctgataggaaggtaccgctgttcatgccattgcgaggcaagctgaccggtgccggcatcacggcaacggcatctataccgtagtgacgtgctacgcgaaaaagggccgggattgaggtcgacggcttgggggtccatggactcagaagcgaccgcagccaccaacgccctggagcatgaagcagatatcgccaaggtccaggattggcttgggacatgccaacatcagcacgaccaaaatctacgatcggcggcagaatcgaccagaggactcgccgacctataaagttcggtattagaaaatcatgatgactcgaagctccactaggctacagagattctgtacgtgcatgtgcctcaacatcattactcatgatcgtccttcgttgtcgactcattcagcgtagcgtgaagctatccgccgagatgggtttccttcaggcacaaaaaacccgccaataggcgggggcatgtctaagactggtcgtctgtatcgaagcggtccagaagccttggaagccaagcgtagagccaggcaaaagctcgaaccataccgattgctttcgcacacagacataccaagcgtc

SEQ ID NO: 229721 - DNA, 207 bp, Homo Sapiens
tgtaacggtctttacctacttatggctgatcgtatgtcatgtggcagaaaccaacgtgacatgtaaacgcaattatcctccagtttaaaaaatgacaatatttcttaaaacagagactacatttttttacaagacaaaattatttcatttcaagagattagaggatttcatcacaggaaagaaacaaacaagcatgtttctatgaag

SEQ ID NO: 229722 - DNA, 114 bp, Homo Sapiens
aaatgctagtggtcgccaccttgagaggatgccttggtcggctgcaatctggtgctcggcaccagcgcccgcgaccggcgtatcccttgtgcgctgctggatcccgcgtgaatg

SEQ ID NO: 229723 - DNA, 486 bp, Homo Sapiens
ggtgactctacaggatctttaacggtctgttacccacccgctcaccctgctgacgttgcaggcgcacttgcaggtaatggctggcgccaaaaaagatcgagccgcccacccgcaacacaacgcttcaccgtcgcgccagtgttgcacctgtggctgcgaggtgcgcttgaggtagaaaaacagcgacgccagtaccccggcatagatcgccgtttgcagctccaacaacaaggtgacgacacaggtcaggctcatcaccacaaattcggcgcggctgacccggaacagcgcacgaatgccgcggtggtccaccaggccccagcagatcagcaggatactcgccgccatgctcgggatcggaatatgcgcaatcaacgctgcgccaaataacgcaaataacgccacccacagctccgaaaacaaccccggcaatggcgaacaggcacgggaacagaccgtcggggtaccggagctctgattccgtat

SEQ ID NO: 229724 - DNA, 352 bp, Homo Sapiens
gagcttaacggctgttacccaccactgagattatctccaactccggaaaatccgcttcactgcgccgccacgtcataacgcaacggcggaatgtcccggttctccttgggcgacacccctccagaatcgcaatccgcgcatgcactggtaaaacttggtgcaaccggcgttcttcaccgtcccgacgaagtcacacaactcggcataactgtcccgaccattgatgccgatacggtgcttcaccgtcaccggaatcgacaccgcatcgcgcaatgtgccttcacacagtccgccacaagggcagggtgcgccatgaaggatctgcgccgaatcattgttgttcctgcaccag

SEQ ID NO: 229725 - DNA, 124 bp, Homo Sapiens
gccactctgaggatccccacattgcaggatcaaaagcgacgtcgtataacgcttggcgcacaagcagttatcctgtggtacttttctgacactcctgcgtttaaaccaaagtcagaaggatcgt

SEQ ID NO: 229726 - DNA, 159 bp, Homo Sapiens
  misc_feature (71)..(71): n is a, c, g, or t
gctctagaggacccggaacactacgatggcaactgtttattttcatgtcagagtagaggtcacttgctgtnaatatcaacaagcattaaagatttgtctttgctagaataagtgaactaatactacgtgtttcgtcaaattgacccagaacgtatatcc

SEQ ID NO: 229727 - DNA, 225 bp, Homo Sapiens
  misc_feature (20)..(20): n is a, c, g, or t
aacttacgcgactatcgagnacgtgctttggagcacccctcttcccgcgcgggtacgataatcaaatggtattggggggatctggccccacaagtttgatgagttgacactgacgaacgaaggggacggtgacactcttacgcgaacggtgccttggttgatcattcgtgcagtcggcaatagaacggtcccagtgttctatacgctgggatggccgactaatga

SEQ ID NO: 229728 - DNA, 625 bp, Homo Sapiens
cgatggataacgttgtataaatagttaaagcagtgaggatctatgcaatcaccactggttcagaacgaatcaccaagggatctaattgaagaggcagtagttgacccatggggttactagaatgaacctctcaggattacttagacctgtgtatgacgagactttatgttcttgggctacccgctgcgcccttagccctaatataaagttgatatcagagagcaatatcgatgagtggtcaagccccgataatcgtcagtacttcaaccctgattggctactcgggagagagtttgaactctacgaatctcaagcggtagaattggctcgtcaattgaagttggacattgacgaaattgcacattttttccgtccgcgttctgagtttctcttggctccagcaagcagagttgcatattgccatttgtgcattcagtctgatgtagcatttaaaagatatccatcgtggagaaagtcttggtgctattcaacgaacgcatattgctttcagcatagatgtttgcttaggtttttaggtgacgctcttgtggcagataagcaatggaaagcattttggaagggggatgcaggtgattatcttccgggaaaaagagggtcgcacatt

SEQ ID NO: 229729 - DNA, 154 bp, Homo Sapiens
acagacacttacggcttcaaggacagcactctgggtccgcgtggtacgcagagccgcggttttgaccggagcggtaaccagggcactgtcgctgaatcggacaacgacccgctggcattcggtggtaacgtgctgatcccaggctggtgccgga

SEQ ID NO: 229730 - DNA, 262 bp, Homo Sapiens
atgcaactgctactttcatgtcagagtagagtcctgctgtaatatccaacaagcattagacttgtcttgctagataagtgaactatactagtgtttcgtcaattgaccagacgtatatcgtgctcagggtatacgcctacgtagtgatggcaaccttctttatcttctatccggtccttggattcaaaagaagaggtagaataatctataaggggtgaaaatgaggctgaacctcacgaaatagttcttaatggacaccata

SEQ ID NO: 229731 - DNA, 276 bp, Homo Sapiens
  misc_feature (101)..(101): n is a, c, g, or t
  misc_feature (251)..(251): n is a, c, g, or t
gaccggcactacgatgtgcatagactattgtgagtcagccatctcacccttatagatatctactctctttgaatcagaacggtagaagataagaggttgcnacactacgtatggcgtatacctgagcacggatatacgtcttggtcattgacgaaaacacgtagtattagtttcaactaatcttagcaagacaaaatcttaatgcttgttggaatattacagcaaggtggacctctatacctctggacaantgaaaaagtaaagcaggtttgccat

SEQ ID NO: 229732 - DNA, 380 bp, Homo Sapiens
gctcaacactgccctgatcacggcaacacgatctgctggttgaggagagtcgaagaatccccacagaagcatcgcaagtgctacgcagctggcagcagtagccaccagacacgcccaggattttttttgatagggagggggtgtggcgggcatcatgggctctgggaggggaaaacgtcgtcgtatggcaacggatcgatgcccacgtgcacgatcaatcttttcgggggaccttgaaagccgcttcgagttcgccgacgcccgtgctgctgcatgagctggaagcgcccagctatctcttcaggctcccgcctggggcccatgcaagatagaggcgtaagttgtctcccggggaccccgcgtccaatttggtaaatcag

SEQ ID NO: 229733 - DNA, 185 bp, Homo Sapiens
  misc_feature (141)..(141): n is a, c, g, or t
cttgtgtaatatcaacaagcttaagatttgtctttgctagatagtgaactatactagtgttcgtcaattgacagacgtatatcgtgctcaggttattacgcatacgtagtgattggcaaacttctttatcttctattcgtnccttgattccaaagagaggtagaagaatctataagggtgagaat

SEQ ID NO: 229734 - DNA, 136 bp, Homo Sapiens
  misc_feature (100)..(100): n is a, c, g, or t
cgactctaaggatccccacattgcggacactcaagcagtgcttcgagctataagtaatgtaacatttctggcagataattggtgagcttgtctaaagganctgggatcgatagaaaggaatgtcaggtaaaataag

SEQ ID NO: 229735 - DNA, 146 bp, Homo Sapiens
  misc_feature (100)..(100): n is a, c, g, or t
gcgtgagccacgtgtgaggtttcagtataaatattctaatagccactttaacagtcaaaggaaacaggtgaattaagttttaaatctttatataacccanaattatatggccaagttattatcactttcaccatttaatccagtat

SEQ ID NO: 229736 - DNA, 223 bp, Homo Sapiens
  misc_feature (52)..(65): n is a, c, g, or t
ggaaagaaatcttacagaatagaaaatgattttggaaggtatgtgtccctcnnnnnnnnnnnnnnctctcccccggccgggagttcccaaagccaaactcttttccaatataaaataaaataaaaccaacccattttaagggtcccccacagacaccaatatcttaaccgaattacaaattattttgggaaggtatttcgacccccggaagggtccccagagg

SEQ ID NO: 229737 - DNA, 256 bp, Homo Sapiens
tttttcactcagcttctttcatttgatcgcataagttcgcttccgaattcccgttcatactctttagtataatggggcaaattcttgttttccatgtttctcgttcctttttcgttaatttcgttaatgtgcattcgtttattttgtttcatttgcgcctattcttcctcgttttgcatgctttgactgttttaatgttacaaatcgtcgtttcctgtatcgcttccattattttttcttgaagtgtcttttggta

SEQ ID NO: 229738 - DNA, 282 bp, Homo Sapiens
cggccagtgagcaccttcccttttgcgatctggtaatctccaattgagtgtaatgtcctcaagcattcatccacgctgcgcgtgtctgactttccttcgcttctatagtctgacttattttccagttgtgtatgtgcccattttgctcacccttcatctgttgatggagattgggttgtttccaccttgtacctatttgactattaatcttacccaataccccttggaagcaggtagagtcagatatactatgatgtcctaatctcctccattactagcttg

SEQ ID NO: 229739 - DNA, 322 bp, Homo Sapiens
  misc_feature (44)..(193): n is a, c, g, or t
cctggctcttccctatcttactaaaatatacacaagttagccannnnnnnnnnnnnnnnnnnnnnnnnnnnnnnnnnnnnnnnnnnnnnnnnnnnnnnnnnnnnnnnnnnnnnnnnnnnnnnnnnnnnnnnnnnnnnnnnnnnnnnnnnnnnnnnnnnnnnnnnnnnnnnnnnnnnnnnnnnnnnnnnnnnnnggtggttgttattattagttccattttacaataaatatcataaatatcagagatatttagtacctctgtgagttcacagagctagtgggtggggtgaccagaactgggggttgtgtcctcgattgcctc

SEQ ID NO: 229740 - DNA, 183 bp, Homo Sapiens
tgcaatttataaggagctagctggcccagactgattgttacgctgagtgaacatcgcataccccaactttgtccgctgcatcatccccaaccacgatacgaatcgccggcgagctggacccgcatctcgtgctgaacccgcctgcgctgcatacggttttcctcgagtcgcgtccggtactct

SEQ ID NO: 229741 - DNA, 148 bp, Homo Sapiens
ataaagggcactccatagcagagacagactcctgtatttttattccagatgcattgtcttggtgattattaaattataggaaattgagtacaatagatcacggaaaaggcaatagacagggtaagccattctagattgttagacgtac

SEQ ID NO: 229742 - DNA, 213 bp, Homo Sapiens
gggcagagggggtaggcagaatgactgcaaacagaccaaacgcgatggacgcgcatgagagccatgaggaagcagaaggaagacgaaggcagctagggcggcgggtacatggcattcttaggcttgtgaagctctcacccttctttgtctttcttgattacatgctttctcttctccccctgtatgtgctgtttatcccgtttctggctgtgt

SEQ ID NO: 229743 - DNA, 221 bp, Homo Sapiens
ggacgaatcagaaagggcactatgatttgagagaaagaacggacagctacaatccagcctgtacttactccatttacctaacactgaattactcgttaggactgcattagccttagctagtgttaccatttcttgctattatcacactaggagtgcactgttattggtgcactactcgttgacccccgtctcaccctacttcctccagttcctctgtgggt

SEQ ID NO: 229744 - DNA, 386 bp, Homo Sapiens
ctaagtatgcgtagatatttgggaacaatcacagtgagtttagagaggtgacttgagttgatactgatctcagcgatcccctcattacccttaattcatctgctatctgcaatatgtcaaattcaccaactaatgcggcttgcactcagaacactatgaaaacactggagtcttttacaagttatggccgcgtttgccacttaaagtactataaactgcttgttccatgcaattacatcctatgtgcttgttcttgttagacttttcgacttatttcttgacttcctttttttcattccagttatcacctgactgatctgggctcttactgctctgtagtcaaatgtgacattgccgtaattcctgctgtgccctttctgttgtct

SEQ ID NO: 229745 - DNA, 136 bp, Homo Sapiens
tgtgcagctacctgcacctaattcacaaggatagcctaggacgaatccaatgctaaagatgactgagtgcagaacggcctcctcccctcagccattatctgagagcgaatggcttcataagctcagccttgcagcc

SEQ ID NO: 229746 - DNA, 262 bp, Homo Sapiens
acatgagtggtctacactaaagcagtagcattgaatttcagaggagtggcaactaaagaagctgttgagtgtggtaaatttgacaaagtttgcgggttgattatggttggggtgtgagggatactctgtaatccccgacttgtcctagagctcttgttggcccgtggtgtagtgtgtggcttgctggttgactgcccgtattcgtggttggtggaggatccctcatagtagatcgaccttgcaaggctatggcaagctatgg

SEQ ID NO: 229747 - DNA, 292 bp, Homo Sapiens
  misc_feature (231)..(231): n is a, c, g, or t
gccctaccagaaagggaggtttgttatcattgcttcctatgaggctctactactctaccctcatttcatttcaacaaagggcagcgacctgttccaatggctggcttggaggcaggaggagcggggtctctaattagtgctgattgttgggactgattgagcctgtatagcatgtctcctactcacgaagcctcatggtgctgggctctggctggctcactgccttgtaanttcgtagcacgtttgggtaggccgagctcaggcagcacttggtagcaggtcctgccctttt

SEQ ID NO: 229748 - DNA, 217 bp, Homo Sapiens
cagttgtgacccgcttgatttctcataacgacctaacttatcaagacgttgtctgtttcgcgccggaaacaactcgaattgggtcatttgatagttgtttccacgttgtcgggcatgtgatgcctcctggtttggtcatgtggtggacaggacagagcacgtaaaggactccagccgctcctcagccgaagagcctcagtgtgcctctttctgtggc

SEQ ID NO: 229749 - DNA, 155 bp, Homo Sapiens
aggacttatctacgcagcttatttcccgcacttactgcgacttcctcggtccatgtggcgaatattgctactcccctgcatcccctatcactgaatggggttcaccgggttacccgcgccttgccggcggtaggtgtatgcacagccctgagccc

SEQ ID NO: 229750 - DNA, 339 bp, Homo Sapiens
gtgattctggaaggcagtagtgagaagtcttcactcaagtccagagagaactgtctcagttgttcagaacagaaatgtttgcctcaggaatgtaatgagttcactgtcgctggaggtgtgtaagcagcagtttgacagagactaagatgttaggaacctgcccttgggtccaagggacaaagcacaaagctttttatgcattattacttcttctgccttaaattcctcttttcttctctccttagcacacagaagcagtctctagaacaactcttcctgagcaaagccatagctttttgttgttgttgttacttgccctttctggtgggggtaccgagc

SEQ ID NO: 229751 - DNA, 185 bp, Homo Sapiens
ccatcccgccctctgaaaaacacaaattgattaatttacattaaaattatactttagtagaggattttggactgtttctcacctacaaagaaaatgacaagttgtttgagtatatggatactgctcaattattcttgtattcattctttatcacaattgttatacttcttatctagagcattcac

SEQ ID NO: 229752 - DNA, 103 bp, Homo Sapiens
actacgtcgcatatccatcccgccctctgaaatataaaaattaattaatttaaattaatattatactttagagcaggattttgacgtgttcttcactcatcat

SEQ ID NO: 229753 - DNA, 106 bp, Homo Sapiens
caatgcactgttcattaattcaatcttaattactgcatattcattacttcttcctcctttttgcaaatgctatggtagactagtctgtggaaaatgagctccaagc

SEQ ID NO: 229754 - DNA, 200 bp, Homo Sapiens
gaggtggagcacgagcgcacgcttttaggacccgtaaagattggtgatctactgtcctggcgccgggcgaccgccagagcgaaactctgcgcagcgaggtccgtagcggctcctgcacgtgctaatccggtcgtccgcacctggtgtctaggcggcgacaacgcactacctcgcaacccatctacgtactctgcgcttct

SEQ ID NO: 229755 - DNA, 378 bp, Homo Sapiens
  misc_feature (53)..(118): n is a, c, g, or t
  misc_feature (124)..(273): n is a, c, g, or t
ctggcagcaaagcaagaggataggtgttgtttttgtgttctttgagatgcggnnnnnnnnnnnnnnnnnnnnnnnnnnnnnnnnnnnnnnnnnnnnnnnnnnnnnnnnnnnnnnnnnntggggnnnnnnnnnnnnnnnnnnnnnnnnnnnnnnnnnnnnnnnnnnnnnnnnnnnnnnnnnnnnnnnnnnnnnnnnnnnnnnnnnnnnnnnnnnnnnnnnnnnnnnnnnnnnnnnnnnnnnnnnnnnnnnnnnnnnnnnnnnnnnnnnnnnnnnccatgagccactatgcctggcccaagtttgtctgtttgttgtttagcattattattttatagcaaactttaaattcttgttattggcaggataaatagagggaag

SEQ ID NO: 229756 - DNA, 224 bp, Homo Sapiens
acactttttgcagacagcaacaacaggatttcaggaaccagtgttctgatgaagctcggactgaggagctaagctagcaagcagcagttcgtggctgaatataggaaacgagtccaggagccatgctgcgatttgagtgaagagaagctcggaagtaaggaatggagcgctaactgatttgagtgatgaagactaggaattccggattccagtgaaggagcgag

SEQ ID NO: 229757 - DNA, 307 bp, Homo Sapiens
cctggtttgttgtcacttttcatctcctctttgctttctgagaacacttaaacgtttcttgcaggtccattttattctacttgaatgaccgtttactttctggttgccacatgtttttctttcttttctgctcatccattatactgctgtgcccttactgtgattgattttccaaactaaattaccttgagcagcagtttagcataatatgccttcagtggcattctacaacattgagtttccctctagcacagttctgtctagcaagtgcgtgtgagatgtgtgtgtatatgctgtgtattgtgta

SEQ ID NO: 229758 - DNA, 146 bp, Homo Sapiens
cacagacaatgataagtgaaattgacatttgcttttcattttgaaaacatacttcatcattgttcaatcttcacctgtatgtgcccatcgatgagatggcaacaacaatcccattatctaaccacacatacaatagtcaaagtcat

SEQ ID NO: 229759 - DNA, 156 bp, Homo Sapiens
ctcatagcacgatcccctccactttttgcattattaatgtaaatataatcttatctttgttattatattgtagcaaagtcaccccttttatcacagtattcacatcattttaagataatgcttacaaaattctattatgctaaaattttaatcctg

SEQ ID NO: 229760 - DNA, 157 bp, Homo Sapiens
ctctagcaggatccccctgccgactgggtagcgaaggaccgtcatctgagtcttccattaaggaaggctcctgacctccacatctcatgaggtgaagcctctagctaactactccaccctcttccacacactactcttcccagtgtccctccagttc

SEQ ID NO: 229761 - DNA, 378 bp, Homo Sapiens
ttgctctttttaacttaatttattaagttttaatttcgtaagctccttattctgatctgttctgttgtcattcgttgattgtgtgatggagatcggaggaactgaccaatgcttctggactttctgactggatttatgtatctctctaaggctccttctgatatcatcactgagtagatgttagctgtttatacagtgtttaccacatagtaagcccgttatgtctcataggtgattagacagcttggtcatagttcatcatgagaacttgccttggattatactttctatgtatggtagctagtagtgagggccctcgatgaattatattattgtactggtagttcctctggatttattctaggtgtcatcattcag

SEQ ID NO: 229762 - DNA, 192 bp, Homo Sapiens
ccctcgaaacccagtcttcagcttgcttgattcagtttgaacctggaattgccacatgccgaggtcaggcacttcgctctagttcaactgccactccatgcccaattggcacaagctgtggtgctgagtggcataacaagctgatggcggaatcccaagctgtcacatcttcaggtcacacaatttctgtcc

SEQ ID NO: 229763 - DNA, 145 bp, Homo Sapiens
ccctcgaaacccagtaacaaactgtgagagtcttcacgttatgtacctattactttaaaaacaaccaaatgatttgggatattcatttcatgcactgtctcacattaatagaacagtcaagcaataaaagggaaattagaagtta

SEQ ID NO: 229764 - DNA, 182 bp, Homo Sapiens
ataggaagtttattacaaccatttactgccttacaagatattctttataggagcactacttttcgttaggatatgctgctaccagccttattctgtcctctaacttaagtaccctgaccagtgacactatgaagcaaccactcgaacaggttggtcttttaaccagcactgggtttcgatgg

SEQ ID NO: 229765 - DNA, 122 bp, Homo Sapiens
ggtcgtctctagcacggatccccccctcgaaacccagtcaccaacttcactatttgggttgacttacgccattctgatctttgcgtgttttgtgagcaatttgcagtgtgacagggaactcg

SEQ ID NO: 229766 - DNA, 433 bp, Homo Sapiens
gatgtttcatacacggatcccccctcgaaacccagtaggctgaataagcaggatgagctttcccgttagggtgtagtagataaacacattctggatcctttcaaagcttctctatccaaatctcaccatctcatactcctcctattaagatcaggctttccatgtctaattgcactatacagttctacgctgctggacacattcatgatttcccttctttcacatcctgtgcccctcctaaatatacccattctgagcccttatactactttaccgtctatttggtcggttagtcgatccctattgcctctctttggcacaaaagtatcctatactgcctttgtggatcagcttgctatccccgtcatggctgtccatatctggcgctcacagtttccttttcaccttagtctctcccacatctattagtaac

SEQ ID NO: 229767 - DNA, 143 bp, Homo Sapiens
tcgactctacacggatccccccctcgaaacccagtactgactttgtgcaacctagcggcctggctccactgatccccactcatcgccctccgcgtcgtgtccaactctgttatcggtaagccaccgggtagcccgtactgccc

SEQ ID NO: 229768 - DNA, 342 bp, Homo Sapiens
atcctctacacggatccccccctcgaaacccagtctcgtcatctatctgataatcaggataggatatccatagatcctctgctaatgttgccatttccggatttgccctacccaatatgtagatggaattcttaaaatagttttgatgtgttttaattatttccagttgttgttcttatcatgtggaacctattgctaacagtgtcaactttaatggaatccgctactgggttttacgaggtgctcctcgcaaaccccatgttctgatagctcacattatatataatatttaactaaaaatatattattaactgcgaaccattgaatgaacatgtactcagt

SEQ ID NO: 229769 - DNA, 164 bp, Homo Sapiens
gtcgtctctaggaggatccccccctcgaaacccagtataaggactttgagttaacattattttttaaatcctgtaggactagcatttaattagactagctgtacccaggtgcttacacagatagtggattccggtgtaactctacggaagacagctagcagaca

SEQ ID NO: 229770 - DNA, 164 bp, Homo Sapiens
gctgtacgcttgtaggacgaccctacacgatccccccccgaaacccagtgttgcctcaaccggccctcgcgcagcactgtggtctagagccgccccctcatcctcacactcaaactcagagcagatggctgcctcctcttgatgtcgtgaaaattccctgcctg

SEQ ID NO: 229771 - DNA, 125 bp, Homo Sapiens
gtcgatctcatacacggatccccccctcgaaacccagtggttcgatgagcataagagcccttggtaggctgagttgcatcctggcgcttgcggggctccctgctcacaactatactactcttgtg

SEQ ID NO: 229772 - DNA, 178 bp, Homo Sapiens
  misc_feature (43)..(111): n is a, c, g, or t
gggcttactcatgttaactatctgtagtcacaaagttgcaacnnnnnnnnnnnnnnnnnnnnnnnnnnnnnnnnnnnnnnnnnnnnnnnnnnnnnnnnnnnnnnnnnnnnnggtaagaaatgaagaaatgtaattaacaaaataaatgccatctctacaatgatgatttccacatctc

SEQ ID NO: 229773 - DNA, 252 bp, Homo Sapiens
tggtctggcatgtaccaggttgcttcaaccattcaccccactcaacaggcaccatccagtgttgttttccagttttttgccctcacatcacagctgctgtgcaacattcatgtcacaggtttttatgtgcaacatcaccattttccattttcatgggcataaatgctcaccaagggcacactgttagggttgtcatggtcaacaccccatcatcatttttgtcaagcaacactcaccctcactactggaggc

SEQ ID NO: 229774 - DNA, 522 bp, Homo Sapiens
  misc_feature (129)..(190): n is a, c, g, or t
tgagtaaatagtaccacgatgtgactatttcacataaagctgtccccaaaatggttattaaaccacatatttgtttgatgcactttcctacatctgtattatatttcacaataacaaagcttaggaagnnnnnnnnnnnnnnnnnnnnnnnnnnnnnnnnnnnnnnnnnnnnnnnnnnnnnnnnnnnnnngaagcaacaggaagaaaagcaaggcaggttatccatctaatcacacctattctcattcccaggccacttttctcaggtacaacacagcatgtgaatctcagcctccatggcagcccatgcaaaaatacagcattcaggtcatcacacacataaactaaaccaactcaaatctcacattcaccaacactttgcattaactgcaaatggcaaagcaaaaatcacagagtgctctcaagagcagcaataacaatcaggaactgtcatttaaattgcaaaggcactataagaaggagtctgacggctatgaaaacatagagctgatgcccaaagat

SEQ ID NO: 229775 - DNA, 654 bp, Homo Sapiens
  misc_feature (81)..(206): n is a, c, g, or t
  misc_feature (263)..(354): n is a, c, g, or t
  misc_feature (443)..(594): n is a, c, g, or t
gaagaagtaggaggaatcaaccttatcgtatagctaccgtcatgaagactgtgttattggtgaaggaacaggcatatacannnnnnnnnnnnnnnnnnnnnnnnnnnnnnnnnnnnnnnnnnnnnnnnnnnnnnnnnnnnnnnnnnnnnnnnnnnnnnnnnnnnnnnnnnnnnnnnnnnnnnnnnnnnnnnnnnnnnnnnnnnnnngcaatcacacttgcataggtaaaaagagagagataaaaaacaacctcaatctaagtnnnnnnnnnnnnnnnnnnnnnnnnnnnnnnnnnnnnnnnnnnnnnnnnnnnnnnnnnnnnnnnnnnnnnnnnnnnnnnnnnnnnnnnnnnnnaatctagggcaaggcaatgaactcttagagttataccaatgcatgatccataataggaaaaactggtaaattaaatttcatcgaaattnnnnnnnnnnnnnnnnnnnnnnnnnnnnnnnnnnnnnnnnnnnnnnnnnnnnnnnnnnnnnnnnnnnnnnnnnnnnnnnnnnnnnnnnnnnnnnnnnnnnnnnnnnnnnnnnnnnnnnnnnnnnnnnnnnnnnnnnnnnnnnnnnnnnnnnnttagaaaatgtcagaagctatgaaaaggctttctctgaagaaatgtatgatggttaataa

SEQ ID NO: 229776 - DNA, 200 bp, Homo Sapiens
agtgatctagaggatcccggtgtcacgcggtgaaggcagtagtgggtcaggtacagctggatgcgcacgcggtcgttggtgggcgaggggatttccagtgcttcttcgtagttgtcctgctcgaagtactccttgaagcgcgggtggcgtaccaggttcgttaccggctggccgctgtcctgaggggtcttgaggcccag

SEQ ID NO: 229777 - DNA, 151 bp, Homo Sapiens
ggcacagatggtccctcgaatggagtcgtcgaaacagaggatttagagtggactcgattccaagttacaggcccggaagagtcctgtatgttatttttcgtcactacctcctgtattgttatttttcgtcactacctccccgggccagtag

SEQ ID NO: 229778 - DNA, 206 bp, Homo Sapiens
cttaacccaggctcctttagaggtatatgaagcaccgcccgggcctttgaggcttaagctgcctctcgctgcggtctgtcgagcagctttgttgatttaactgtagaggctttatactaagcatagaggggtatctaatcccagttggggtcttagctattgtgtgctcagatatcaggccatgtactagcctagctatagttaaa

SEQ ID NO: 229779 - DNA, 321 bp, Homo Sapiens
  misc_feature (162)..(279): n is a, c, g, or t
cccttatattatcaaagtaaaagtgatattctcccattactgaaataaacagacatttattagatgatgtagtaaatcatatgctgtatattcacattttgaggtctctgatactacagaccttaataatggttttactcataagagttttgttggcataannnnnnnnnnnnnnnnnnnnnnnnnnnnnnnnnnnnnnnnnnnnnnnnnnnnnnnnnnnnnnnnnnnnnnnnnnnnnnnnnnnnnnnnnnnnnnnnnnnnnnnnnnnnnnnnnnnnnnggatgagccaccgagcctggcccacagagtggcgggtaccga

SEQ ID NO: 229780 - DNA, 417 bp, Homo Sapiens
gttgagcagccagcatcctatcactcctggggagccagacctgtgctgctggggttaggggacagccaaggggcccagccaggacatgctgggtgtcccagcctgcaggcaggctttgggaaagaaatttacttttgtttggatggacccactggtccctcatcaataaaggggccggagtccagccctgcacagctcactttgtccacatgctgctacagcctgaaccggtcaaggacacgggaagcagaaggagcctgttacagcccacgagggtgggagtgaggtggaggctgcccaggaacagtgcatcttgctctgcctctgtaagtacagggccccggagcagggcagacccctggggcacaggcctgatgctggaagagctggctaagctgggtaatcatcttcaattag

SEQ ID NO: 229781 - DNA, 202 bp, Homo Sapiens
  misc_feature (45)..(125): n is a, c, g, or t
tagaggatcccgctggagtggcatataagtcaatggagacacctnnnnnnnnnnnnnnnnnnnnnnnnnnnnnnnnnnnnnnnnnnnnnnnnnnnnnnnnnnnnnnnnnnnnnnnnnnnnnnnnnagaggcgtggtgcttccatgccctccctgggcccctgagtcaccctaaattctcaaatgcccagttctccggtaatc

SEQ ID NO: 229782 - DNA, 297 bp, Homo Sapiens
  misc_feature (185)..(246): n is a, c, g, or t
tccatgtgtcgagagaaattagcatcttggccagcgcggctaaacggcatcctgccggtttaccccccaaatcactgtcgaattgcggccatcgtgtttgacggggcgatttcagatcaagatcacgatcaaaagcgcagatcaaaagaccgctgacttcgtcatcgaaaaggatgtaagggccnnnnnnnnnnnnnnnnnnnnnnnnnnnnnnnnnnnnnnnnnnnnnnnnnnnnnnnnnnnnnntgccacagaaaagcacatatttaaaactgcctaatatctctcggaccaatg

SEQ ID NO: 229783 - DNA, 361 bp, Homo Sapiens
acagaacatgacccacgtcccaaggaaatctctagagaagctggtgattggcccagatagatgcttgaaggagattataagccgtcaaccatttttgcacccgaacgggtagctctgtggatgagtaggcacgatgaggcttacgaagctactagacccacggctgagcagctggcaggcggctgcacaagtgagacccgcactctggtttcctggtcgtcctggacgcagctggagtgactacaagtgctaatgttgtcaagatctccacggaggcacttgaccagtgcccttaaccactgtcagggaatgccgacagatatgacacagggccacatgcagccaggcacgccggaccatg

SEQ ID NO: 229784 - DNA, 298 bp, Homo Sapiens
acagaacatgaccagtccgccgtgaagcgtcagttgcgttaacagtgaccgatcccggagaggccggcgtgagcgccggtggagagttctctgctctttgtgaagggcacggggccctggaatgggtacgccccgagagaggggcccgtgctcttgtaaagcgtcgcggtctcctgcggtggtccggtgacgcgtctcgcggggccttggacatccgggggatagggtgtcagtctcgctccggtgcgtacccatatccgcttgaggtctccaaggtgaaggtgctctggccatgtcg

SEQ ID NO: 229785 - DNA, 255 bp, Homo Sapiens
acgatgaacagacccagtcctgaaagacaacaaaatagaaccgcggtcctattccattattcctagctgcggtagtccacggcgggctcggtgcctgcatttgaacgactctaagttttgtcagaagtaaagcgcttcggggccccggcggggacactcatgctgaagaggcagtcgagagggtgcgcgctgagcagggcaaggtggcgtggggacgggctggtgtggtctggcctcgtcaggcggactcgtccc

SEQ ID NO: 229786 - DNA, 416 bp, Homo Sapiens
  misc_feature (60)..(81): n is a, c, g, or t
actctttcccagacttaaccttctttcttttggtaccttaccttgtccaaaagagggttnnnnnnnnnnnnnnnnnnnnnnagttgaactagacggtcctactgaaatgttgggcatctctctcagatgtgtcgcgtctgaattggtgctcaattctgtaccgcataactcctcttccagttttctctaacatggatggtggactcaggggaactgtactctgtcggtttccagatagtagtggggaacgagatgctgtgcgaagatggctgtcctgttgaccatccaagagtgtcttctacgcccaagatggatggcttctggaaatgtacagcctcatctgtagtaaccatcaaacggtgaagcatcctggtgaagttgagtggactggggaacactcagcattcctcgcaaca

SEQ ID NO: 229787 - DNA, 291 bp, Homo Sapiens
tgagatgttctacaattttactgcgtgtcaactccttctgctccatcatttacttgcaatattgaggttgtttgaacaaaattattgtggaagactcagcggcaatgttgtatagaaaacccaacaagaagatttcaaaataaggaagaaagaacagagaaaggacctcagatctttgacatccttgagcagctgaaccaaatttagaatgctctacttgtgaatgtgtaacacacagaaaaactgaacccttcacttttgaagctactaggggttggctttccagttggt

SEQ ID NO: 229788 - DNA, 316 bp, Homo Sapiens
  misc_feature (42)..(104): n is a, c, g, or t
tatggaatacagagacggggtacacagtgtaccaggatggtnnnnnnnnnnnnnnnnnnnnnnnnnnnnnnnnnnnnnnnnnnnnnnnnnnnnnnnnnnnnnnntgagccaccgcgcccagccaacagacttctttaaaagaagctgggctacaaagttcagttaataaattgtgtggaaaaccatgcccctcatgtagataaagtgcataatacagttctctcaatatgcagcagacaaggtaggaaacaggtgtctctgctattccatttaacttaaatggaatagcaaagacttaaaaacaggcaatccaagg

SEQ ID NO: 229789 - DNA, 395 bp, Homo Sapiens
caaactatggaaaatgcctgcatgggacttgcaggctagggaatgaaaatgaaaacaggaaaaaatcatttccagagactctatacatataatatttcaaacattatgaccacagagttgaaaagtgcgcaaagaggatcttgagcacggtgattttttcataccctagaaaaagtgtgtgcttgcggagtcaccattcagttgcacattcaagcttgaatttagcaactgatgggcatgtcttcaaaaccatctactagcagcaacttagcccattgtcacttggatcttgttaaaccattacacgaattcatcaaggacagttcagaagtatggagaagcaacaagtcacagtctcataaaaaagactaaagcaagaagttgcaggaactctg

SEQ ID NO: 229790 - DNA, 369 bp, Homo Sapiens
cccagcccattcgaatgaggctcctggtcatgcttctttaccttcccttaggaaatcctcctggatgggtttctataaatcttattctgctctgtataattgtatttttcatgtggacagcatttctttcatctgcttgttcgtgctctaaaaacatcattaattaattattcatgattttatgccattatgcttctactaaaggtatatgtatcccatctcttgatctgtttaactagttttgattactttcaatcgtgcagttcttagcatttcttttaatttagtgtacacttctatcccctggcagtgtcattgtctcggctgtgagcacttattgtttgataactctcttcacagaaacatgat

SEQ ID NO: 229791 - DNA, 103 bp, Homo Sapiens
atttccactagacaacatgttgctccacacacaatatattaaggcttatattaacaagggtattgagttaaataagaacatgattaaggtgatactcacttgg

SEQ ID NO: 229792 - DNA, 160 bp, Homo Sapiens
gcagacaacgccatcctaacatccacacccatatccggtctgagttacaaacaggaaatccccaagcctcaagctacgtatcagcggcggccacagtctcaaccaccacagctccagtcctctcagcctccatactcccagcagccatcgtctgccgctg

SEQ ID NO: 229793 - DNA, 365 bp, Homo Sapiens
gaggcggaatcgaccagaatacgggctggtggtggggcaggcccggagctggtagtgtggccggggagcttcctcctggaagcaggagaatcgagcctccccctgccgtttgcagcacccgtggggtcgggtcttgaccgagaactcggcctcacagaaccgggtcatcgcgtcctcccactagagcaagagggatggatcagcctggcagcccactgttcacactcctgtcttcctcccaggctccagaaaaggaccctgggcaggcaaataagcagaggctgtcctctgctcttctggcacactgaaggggccaaggtagggccaatgaaagggacctgaggttccgttgagatcaggcatgt

SEQ ID NO: 229794 - DNA, 459 bp, Homo Sapiens
  misc_feature (126)..(323): n is a, c, g, or t
tccggacatgcctgatctcagcgtaaaaatctcagcaaaacaacataaaccataaaaaaatagagacttatcccaagtaatgcaaggttggtttgatatagaaaaagcaatgtaatacactacttnnnnnnnnnnnnnnnnnnnnnnnnnnnnnnnnnnnnnnnnnnnnnnnnnnnnnnnnnnnnnnnnnnnnnnnnnnnnnnnnnnnnnnnnnnnnnnnnnnnnnnnnnnnnnnnnnnnnnnnnnnnnnnnnnnnnnnnnnnnnnnnnnnnnnnnnnnnnnnnnnnnnnnnnnnnnnnnnnnnnnnnnnnnnnnnnnnnnnntctaagtagtgtatcaaaatctaaaccaaggagtctctggacaagaagctgggagaggcacgaactggacatctctctctctcatatccttcggcattgggttatctatgggtgcaaggagtgggcacgcttctct

SEQ ID NO: 229795 - DNA, 101 bp, Homo Sapiens
catacaactcactatgagaaaacttcataccacatcagccgagcattacttatatgatatgtctccatagccatgacaatctccagcatacaccctcacac

SEQ ID NO: 229796 - DNA, 464 bp, Homo Sapiens
ctctgctcctctgtacattctgcggaactggcacttgaaaggtaaggcgccggagctctccctgccccagtcataatgggaaaagttttcaccccaggccagcccaaacactcaattgtgttctttccctaccagatacataatccgtgtttaaatctcttggcagtcactcattagtttttttcccctacattcttttcttctttgacaagagtacaccagctatgacccaacctctctcccaagaaatacggaacactcttaaaaagggtaaggcttgtcaatgcttaaagttctctgggtttataagggaccagaggctactaattacccctaaaaatcccaaaggcaagagctgatggcattgaaagcaataaacaaagattccattcacgttctattcaaagtgactggaaatacctggagaaccgcctccacctccctgccggcttcttttcatattg

SEQ ID NO: 229797 - DNA, 337 bp, Homo Sapiens
  misc_feature (100)..(187): n is a, c, g, or t
  misc_feature (200)..(287): n is a, c, g, or t
cggccgaaaatgctatcattccataggtattccccatatactagtaccgagaaactagtgcaaaggggtgatgaggtattgctgttagatatccccgagnnnnnnnnnnnnnnnnnnnnnnnnnnnnnnnnnnnnnnnnnnnnnnnnnnnnnnnnnnnnnnnnnnnnnnnnnnnnnnnnnnnnnnnngatatccccgagnnnnnnnnnnnnnnnnnnnnnnnnnnnnnnnnnnnnnnnnnnnnnnnnnnnnnnnnnnnnnnnnnnnnnnnnnnnnnnnnnnnnnnnngatatccccgagtccttcaatgctatcattctctttgatattggaccata

SEQ ID NO: 229798 - DNA, 432 bp, Homo Sapiens
  misc_feature (98)..(185): n is a, c, g, or t
  misc_feature (198)..(285): n is a, c, g, or t
  misc_feature (298)..(385): n is a, c, g, or t
agcgaaaaataccaggcataagcatattcccttgtattgaccatatcaagaccgagaaactaggcaagaggacagggttgggtgagatatacacgagnnnnnnnnnnnnnnnnnnnnnnnnnnnnnnnnnnnnnnnnnnnnnnnnnnnnnnnnnnnnnnnnnnnnnnnnnnnnnnnnnnnnnnnngatatccccgagnnnnnnnnnnnnnnnnnnnnnnnnnnnnnnnnnnnnnnnnnnnnnnnnnnnnnnnnnnnnnnnnnnnnnnnnnnnnnnnnnnnnnnnngatatccccgagnnnnnnnnnnnnnnnnnnnnnnnnnnnnnnnnnnnnnnnnnnnnnnnnnnnnnnnnnnnnnnnnnnnnnnnnnnnnnnnnnnnnnnnngatatccccgaggccctcaatgctatcaattgctttgatattggacg

SEQ ID NO: 229799 - DNA, 331 bp, Homo Sapiens
taacaacctttctttcagagatcaatccagggatctaatccacatgcccatggatactagtaggggttgttacagctgagccacaataggaattcgctgtttattattctttaatcaagaggacagtacctgccttctgcaaccacctctctatctactaacaccctcaccctgttcctgaatgatgtttttatcctttggaaagaacaaggctctgatgcagcaacttttgtttgtgtttcctgtgtgtctcttgtcacaagtgtatttgaggacattggatgcattcattttctgtaataaagtttctaaatcaatcttccaaaaaagt

SEQ ID NO: 229800 - DNA, 177 bp, Homo Sapiens
ccgtccctcgaccgctctctgatgttcattttttcctggtactatgtcatcgtagccatggtaatagctggtatgatgtacaagtacattgagtaccaagggcgagtctgtggataccacctggatcactgctaaaactattgaaactagctagttttgttagagccagtctggtga

SEQ ID NO: 229801 - DNA, 253 bp, Homo Sapiens
tctacaggatttacgtccgtcgaccgctcgtccgtcgaccgctcgtgaccgctcagataaactggtagccccccgtcaacactcaggaaagaagcataagtgcttcagatgcacgggagataaatcaaaatggactgagggtcttgaacctagtaccataaataaagtgcaccatgaatggaggctataaaaagccgcttgcccaaaggctgaggtttggggagaaactaccatcaccacccagcggtcgacg

SEQ ID NO: 229802 - DNA, 265 bp, Homo Sapiens
cgctcatggaatcactgcattcaatcaggatgcattttaataagctgcatggaatccattcagtcatcacgctgcatggactccactgcatacagtcgggatccatttatcacgctgcatggaatacactgggttcaatcgggatgcattttaccatgagcggtcgacggacgcgtccgtcgaccgagggcccaggaggagcgggatagagctggctgacgagatcgccaacagcagcggcaaaggagccctggctgttagagga

SEQ ID NO: 229803 - DNA, 217 bp, Homo Sapiens
gtgtccatgtcacgctagctgtcaatgtcatctgcgagttggccaggtgcatccgcaagaagtacctttcccttgtccgactcttcttcaagctcatgaactcctccaccaacaagtgggtcctcatcaagattatcagactggcaagtgtcccttccggtctgtgctcttctgtcacctggagaggcacacttggtggcccagcggtcgacggacg

SEQ ID NO: 229804 - DNA, 266 bp, Homo Sapiens
accctagaggatccccacgagaactttgaagtgcgaagtgtgagaagggttccatgtgaacagcagttgaacattggtcagtcgtgtctgagagatgggcgagcggccgttccgaagggacgggcgatatgctcccgttgccctcggccgattcgaaaaggggaggcggggttcaagatccccgaaattccgggagtggcgggagattggggcccgggaagggcgtccaggtggcgtgttaacggcgaaccgattcccgggagaaa

SEQ ID NO: 229805 - DNA, 159 bp, Homo Sapiens
  misc_feature (44)..(44): n is a, c, g, or t
ctcaatcgggcttatagaacgaggtcacaggcccgactgacttnctatttattgtgagcctcagtataacattagcgtgcctacagcagacagtgagatcgtgcactaacactatggacctaaggacctggtacacaatcttgtactaacatctttata

SEQ ID NO: 229806 - DNA, 243 bp, Homo Sapiens
ggtgttgcacaaagggaatcttgattaactagtgacaatcacaacaagtccacagccttgctcctagcctgcctccatacatgacagcaattaaataccaccggtgtaaactgcatgagagtagtacatgattatggctagagtaacttattcctaggcatgcaaagaaccaggcatctaatagactagtacattccacgattccacatggccagttagatcatagtgcttagatttggtaat

SEQ ID NO: 229807 - DNA, 253 bp, Homo Sapiens
cctgggcctgtctctcccctatcttcccccagcccctcggccctgctctgagagtgagttcgtcctgtgccaatggtcgctgcatcgccgggcgctggaaatgcgatggggatcatgactgcgcagacggctcagatgaggtgggcggggagaccagaaggagggagagatggcatccaaagagttggggcagagccacaggggccctcagatctgaccaggatgcctgcttctgtgccgactaggccgatcg

SEQ ID NO: 229808 - DNA, 247 bp, Homo Sapiens
  misc_feature (131)..(166): n is a, c, g, or t
cttcccgtgcatcgccgcgccgggcaggtggagcacgatcgcacgtttaggacccgtaaagatggtgaactatgcctgaattgggtttgcctactgctgagtgaaccaaggaccaccaaggcacttagcannnnnnnnnnnnnnnnnnnnnnnnnnnnnnnnnnnngagatgcagtttcgatgtccactcttgcttgcccccggctgcaatacaactggtgcaatctccgcccgtcattattcgggt

SEQ ID NO: 229809 - DNA, 244 bp, Homo Sapiens
gtcaggatactactcacagcagtgtactgagtactttatttttttcaggtttaaggttgtgtgtgttgtttttaactcaaatgacccaaagcaaaagttaaattacaaagaaagaacaaagtacattatgatataacacactaggagttacaggaaagcctcatctaaatgaatcagtgcaggaagttccctggtgatctagtggttaggacttggcactttcccttctgcagcccaggttcag

SEQ ID NO: 229810 - DNA, 406 bp, Homo Sapiens
ggggcagtgtagtgacatgcgtggtagcggctctggcccttctgcaggtcactggtctggatggcaactacaggatcacgtgccacacggtcagtggaagtgcttcgggaacacaaggacagcgtcatggccgtgctggaagccttcgtctatgaccccttactgaactggaggctgatggacagtgagtagctcgtgcctgagaactggagtctgcacctcccaacgtgggagtgttggcgtgctccgtgtctctgacctgtccccctcacacccggagcctgaggcgctgcccagccacctgcgttacattttcacagagcagctctggtggctggaaatgaactttgcaagtatttttattaactaagaaaactccaatcatgagttaggaggaggaggagga

SEQ ID NO: 229811 - DNA, 449 bp, Homo Sapiens
ggtggtagcttggtgagcccgaggagacggcaacgtgcgcctggtattgggcggaggtcgctctctccgccgtccttacagagaccccgggcggagacgaatgaccagatccgccttttcattcttttaaatcaaatggcgggaggggagccttgcttatatacccaactagtatatgcttttagtcacaacgaagtgggaagtatcgtggtagctcatactatcttccttcatgtgctatcccaggagattgatcattctttcttgttgtactataggaggaccgtgctgattattcctactagatggtaataataatattctcctctcttttgcttgtcacatcatcaattgctggatgatgctgtacgatgagctgtagcaaccagctgtggatcatcctacaatagtccagctggagtgctgcatggttggtggtggccgtcgta

SEQ ID NO: 229812 - DNA, 270 bp, Homo Sapiens
gcctggactctctctgtgtaccccaaacagcctaccatctgggtgtgaatttggccaggcagatatgcagaaactggttccaaaggatgagaaggcaggtacgacccagggtggggcaggatcgagtacagaacatgctgcagtgggatggatgctgggttcaaggatgagggttgaggagagatactacatatctcacattcatgatgagtctcggatctggcctccaagttcagggtccaggagcccctctgtctgatgtgtgagagg

SEQ ID NO: 229813 - DNA, 375 bp, Homo Sapiens
caggcccgaacaatccccgaacaatcgtggtcctgtggagtgacttggttctggccaggactaaagccgccaggctggcctccagcctgaatgctcgctccttgcatgcctgctccctgcatgactgggacctatgtgtacagagagagataaggagagatttttccatacttctcatttaggtaaccagaaacgagtaattacagcaatgtgaacaaatgtgacctggttatggacttgagtaaaaaatgcaaattaatgattctgaacatcatttcctactgttagcaacagcagaaggcagggtttagccagagatcaactagcaagtcagatgcatttgcctaattgttcggggcctggggtaccgagctc

SEQ ID NO: 229814 - DNA, 362 bp, Homo Sapiens
  misc_feature (171)..(194): n is a, c, g, or t
agaccaagtagaacaggacttgaatcttaccaccaccacttactcagatgtgattctagaaagttcatccttattgataatacgaggtgccattgactgagtgatcgtggtgatccaggcatgcttcatcctttacctctaactcttataattgctcctcaatgtagctannnnnnnnnnnnnnnnnnnnnnnnaagggccgcacccatggcatatggaggttcccaggctaagggttgaattggagctgctgcctccggcttatgccacagccacagcaatgtgggatccaagccgtgtctgcgacctataccacagctcacagcaatatcggatccttaacccactgagcaaggcaaggg

SEQ ID NO: 229815 - DNA, 285 bp, Homo Sapiens
tagcatcagtccttctctgtctccctttttcccctttcctaccccaatggattttagcctaacgaagaagagtcctgaatgactttgaccaggaaggtctaggagaagaggaaaacatgccagaggaagacagcgaagaggatgaagagaaagaggagggctcagaagcagaacaagcccaaggtggctctgtcctttcagctcagaacgctgggcaaagcctgcatcaggaaggtgaggactcagggtgggagagacatctcaagtggcatgccgaaccgcgca

SEQ ID NO: 229816 - DNA, 364 bp, Homo Sapiens
cattctgaaaatgtagatgatgttccaaagacatcatgtgatatatgaatgttggatgccattgcatctatctctctttccctgttgcctgtgcaagatgctattaaatttacagattatttcctaataattatggtagtctaaattatatattgctttgcttatcttttgtttttatttacagcacaaaaactgggactcactgtcagatgcaccccttttgttaaatttaaaagttcaactgactcatgaaaattttgcccaccttttcttcttctagcatattgagtcttccacatcaagcatctccagtgtcacgcaccccaagcctacctgctgtagacacaagctatattaacacatc

SEQ ID NO: 229817 - DNA, 303 bp, Homo Sapiens
atggtatctagaggatccctcatcccagaatacactgtaactaatgagtcatacatattccagagaccaatctgagatagatagcggccatgtgaggtttaccatctcgagtgatacagcaatggcagcagtagcggcagtggcttaggcctgggtgaaggcagtggctactcctacagcagtggtcacagccttggaggtggcttcagttctggcagtggtagagccctgagaagtggtctcagctccactcagggaagcagttccaccatcagatacaccacctcctcctcctccagcagg

SEQ ID NO: 229818 - DNA, 246 bp, Homo Sapiens
accgcatactcggcatacgacctaaatagattttttctaaagaagatgtatgggagttctcggtcgtggctcagtggttaacaaacccgactagtatccatgcggacgcaggttcaatccctggcattgctcagtgggttaaggatccggtgttgccgtgagctgtggtgtaggttgcagactcggcctggatcgtgcttttctgtggctctggtgtaggccagcggctatagcttcaatgcgacc

SEQ ID NO: 229819 - DNA, 171 bp, Homo Sapiens
ggagaagacgtttggagttggtgtcgagctggggagaccaccagccaagcagcagtgcccacggtgccagaggcagccagaccctccttggccttatggggtggatggggctgggtgagaaacaggcaagcgctgcgatcctgagccaagaagcattggggctgaggtttg

SEQ ID NO: 229820 - DNA, 199 bp, Homo Sapiens
accgcaataccgggacgcaatactcggaggaccaacatgctagtcttatagtgaggatggggaaaatagaaagacaaggtgcaaactcattatgaaaaatcagtctgccatagctagtgggcaaaattgaaaactgatactttaggacaaatgaaaagttcaagtgtttggtatggcctcagcactcctccaacatgct

SEQ ID NO: 229821 - DNA, 222 bp, Homo Sapiens
attcctcacgccgattgggtggtgttcacctccctcgtgcaacaccagactgtgactaacagtcctagtggataaatgccaagcacatatagcgctcaacatatttcagaccatacacgagatgaccaggcccgattccagacctgagtgtcgaagtagcttattactcagacgtttccaataaaaataaggcactgtatcggcgagtaccatttgaatagg

SEQ ID NO: 229822 - DNA, 146 bp, Homo Sapiens
acagaggaggaagcatcccaccagctggttaagaatactgaatcagggctgcagcccttgtgtgaccccgctctgggctgctattgaatacttctaaaactaggcattgctgactggagtatcttggtctaggtgctattgaaact

SEQ ID NO: 229823 - DNA, 116 bp, Homo Sapiens
ttgtaatgggcacagaaatatgggataccctcactctatgaaagaaattccagatcatggatacatgtataaatgtaaagggagcaaacgaaaaagacggcgaatgtactataata

SEQ ID NO: 229824 - DNA, 248 bp, Homo Sapiens
  misc_feature (62)..(196): n is a, c, g, or t
tttaaatgggcacagaaattttcaggctatgacagctaaagggtgtttttgaagaacagagnnnnnnnnnnnnnnnnnnnnnnnnnnnnnnnnnnnnnnnnnnnnnnnnnnnnnnnnnnnnnnnnnnnnnnnnnnnnnnnnnnnnnnnnnnnnnnnnnnnnnnnnnnnnnnnnnnnnnnnnnnnnnnnnnnnnnnntacactcaccccgccccgccaaattgagatataatttctgtgcccatttcaa

SEQ ID NO: 229825 - DNA, 390 bp, Homo Sapiens
  misc_feature (139)..(207): n is a, c, g, or t
acttagtccctgcttagactgcatcggtttggctgatgctgtagggatcatatggatgtgctttttatgcgtgttgaatttcttcgaaaatttctttataactctagagcccaggtgccgtgtggagtctttgttctcnnnnnnnnnnnnnnnnnnnnnnnnnnnnnnnnnnnnnnnnnnnnnnnnnnnnnnnnnnnnnnnnnnnnntttctgtgcccatttcttgaaatgggcacagaaattgtcgaaaaagaagactttattaacagagatttcttgcatcttctctgccttgtacttttcaacttgaatatgttggcatttctctacccttgttttgttggctataatcattcagtattcatgtcccaatttctgtgcccgtttcat

SEQ ID NO: 229826 - DNA, 183 bp, Homo Sapiens
ttcaaagcgcacagaaattataaactctctgaaattgtatggagagtagtacagcagctcagttgacctatagcataactcatatctcatttcgcagacagtaatgtaagaccatatagatgaaagctgaattcctagagatgttaaatccctatctagaatagaaaagcagtattaagctct

SEQ ID NO: 229827 - DNA, 248 bp, Homo Sapiens
ccccctctgtctcatgctttccagccacctttgctaccttatcttattcctgtcttatgctataagcgagctttttggatttactgtctcgcgaacggcttcttgtcaatgtatactatacaacattcttaattgtgtctttatttttgtggcctcaggtatctttcaaattctttccatttctcactttctctagagcccaattatagctatttatgcaaaacagcatgctccacatagcccatatt

SEQ ID NO: 229828 - DNA, 233 bp, Homo Sapiens
  misc_feature (76)..(84): n is a, c, g, or t
gtctctgaggatccccttaaatcgccagaatgttcatgtgaatacgcccctcccattgatcttaatgttcgcgtcnnnnnnnnncaggtccgaatggaagttgaagggccccttgtttagcatgcctggacatgcatttcttggcccccttcatctcccttcccgatctgtacttacacttttcacgccccttagtctaagggtatatggaattctagttcccttttcaaggc

SEQ ID NO: 229829 - DNA, 288 bp, Homo Sapiens
agtaaagctttcttcggaaaacattttatcaaagccaaattgttaataaagactttccttttgtaaaactggataagagaagacatatcaggtgtgttcatctctagagatgatcagtaagttcagcatcttaaaaactgcagcaggaaactgaaagcttatgttccagatcatctcttccgttgttcaccatatatttcttagcatttggtcatcatcagcgaagcatttgtacattaataaacattctccactgaatttcttgtgcccactgttcaaggtgtaccg

SEQ ID NO: 229830 - DNA, 183 bp, Homo Sapiens
agtcactgtgaagctactgccctttgtcctctaataatttgttaaaaagaagacatttataaagacgattttttgcatttctctgccttatgcttatcaacttcaaatgttcgctttttctaacctttttttgttcgctaccataattcagtattcatgtctaaatttctgtgcccatttcaa

SEQ ID NO: 229831 - DNA, 184 bp, Homo Sapiens
gattagatactcagtatctcagcgcatcacactctcaagtaggctccctatttgcttctatagtcgaacgaaagggtcgaatgatacagacttaaacgaacttcattagctctgaagatgtcagaaactatgactatttcgcatccttatcaatcaccattcctgtgcccatctcagggcgatc

SEQ ID NO: 229832 - DNA, 117 bp, Homo Sapiens
cccgcggtacagtgcgcaataccaaacgcccctctatcgtctgatccgtcctaagtcacagcactgtcctacactcgtccatatctcgtccctatgtcctaggctgcatggacatca

SEQ ID NO: 229833 - DNA, 173 bp, Homo Sapiens
agcctggtgaccctggacggctcgagacctgggagaaccctagcggccactaggcacagctatcacaggtcaatcacgaaaaagccggaccatgcatcagagatcacattagagagaaaggaagaatagatcagataaatactgaggaacctcctgaggagcatacaaaaaag

SEQ ID NO: 229834 - DNA, 100 bp, Homo Sapiens
ttctctgggcacagtcctgttcagctaccttgcttcgacagcatctggtttggctgccctgatgggatcatagtgagtgctttgctatcggtgttcgaga

SEQ ID NO: 229835 - DNA, 113 bp, Homo Sapiens
ctattcatgtacctgtcttagacagcatcggttcggctagagctgaggtggctcataggagggctctctgcatgcgtgttgcgttttcttggtcattgctttagtcctcgcgt

SEQ ID NO: 229836 - DNA, 103 bp, Homo Sapiens
attcagtacctgcttagacagcatcggtttggctgaccgtgacgcgatcataggagtgcttttctatggctgttgacacttgtctttgaaaatttctttagaa

SEQ ID NO: 229837 - DNA, 170 bp, Homo Sapiens
atgagcctggctcccacctttcgcgggtacgcgattcttccgtcgtcccaccgactgggtcggcgcagcaactggactggtcttcgccacagacgacccggctatcgctgctggcgcagttcgaaggctggcacccggacatcctcgcgctgctgcacgcctcaaacgag

SEQ ID NO: 229838 - DNA, 415 bp, Homo Sapiens
tccttttactgcgcggtggtctggcgtcggggttgataagcccaggctggcgtcgtatccgttgcggtacatgcgtggtgtagctgacgcgttcgcgcggggtgatctcgcccacgaggtttgggtctaccgccaggatcgggttgccgagcagttggttaatgggcggtttttgccgccttttgcaagtaactgtcgaagtcgggaaactgttgcgggcttcccgggcttgcggcgtaggcctgtgcggcgccctgtgcctgttccttgaggtcggcgagtttctgtcggtcggctgccgatgcctggctggtggaaatgagcaccacgacgctggccatgcaggccgatgaatacctgcatcagatgcccaagaacctgcattaccacacctacgacaaaaagctgcgtcacc

SEQ ID NO: 229839 - DNA, 432 bp, Homo Sapiens
  misc_feature (186)..(186): n is a, c, g, or t
tcagtcagtatagcagaactagagtcggagtgacattagaatggcacggcaccgctatatcccaagctgggtcctcggtaggttacaggagtcactactagtcactatccgtgaaatcttagaatatcctctttgtcatcacaatatcagatatctactagagccctgcttcagaattcttacatngttgttggtgatgcctagatcgaatgatttatcccatctagcactactcgcagcttctgtgaatttctaagttcagggtgaggctgtacttatacattctataataacacacagactcctactgtactagacgagagttaagagtaataggtccattaaaccacggaaagtccccgccttgtttgttgactgacagtcttgtcttcccctctaattccttcagctcttggacaccggttccgagct

SEQ ID NO: 229840 - DNA, 393 bp, Homo Sapiens
atattacttattcacaggttagagaacactatgttacatctcattacactctcgtttctttacaatccttttaagctctgtgtggtgtgtatctactcaggtagcagtgttacaactggtattgatctacgccacgataattatcatgaactacgtcatttactgtctataggttctgactgcgttatctcgctcgcatgattagtttgagctcgatgatacctattcttaactgttaaaaggtctataagttactttagtattacctctgtgtgagaccatggaccacgtttctaactcagcctttgtggtacgtcttcggaaacatggcttaaaaatgatctatatcatagatcccttttattagtactgtgtccgatagctgataggaat

SEQ ID NO: 229841 - DNA, 259 bp, Homo Sapiens
acctcgagagcgtcatcagcttcaattaactggtcgtcgattcgatttgtgtccgatctgtgtcgttccattcgtgccaccgtctcggggcaacaactgcagacgcctcgtcgcccacggctgtgatccactctcagtcagtaccatggcccatcctctgaagcgcatgcccccatatcagtgcacccagctagcaatacattcagcaatcatagtcaccccctcagctctatcttcacaggcacggttgcaagccgat

SEQ ID NO: 229842 - DNA, 211 bp, Homo Sapiens
aatcccgcgtaaagtctggtaagcgtcctgtagcggtcctgacggtgctaatcggtcttccgagctgtcgtatagaggccaaagactactcgaaccatcttgtaactggttccctccgaagtttcctctcatgatagcttgcgctctcgtcacaccctaggcacccccgctacgccgttttatccggtacagcgaatcatgagtacctgac

SEQ ID NO: 229843 - DNA, 154 bp, Homo Sapiens
cgtgctcagccatctcaagccgcgtctgcaccccgacgatttaccgctgctcaagcgtgcgctggtgtaacacctgaaaggccgcagcgaggattacctggtggagtaccgggtgcgccatggcgattgtgctattgaaacttctaaaactagg

SEQ ID NO: 229844 - DNA, 145 bp, Homo Sapiens
ccccatatatgactgtcatgtggttaatcttttaagaccaattcattaactgtgtactgatactgatgctattgaaccttctaaaactaggacttgctgactggggggtatatagactaggtgctattgaaacttctaaaactag

SEQ ID NO: 229845 - DNA, 117 bp, Homo Sapiens
atgagttttcaaacagcacgagatctgatcatgacattccaaggagattacacgtcatccatcactcatagactcgttacaggggagatcctctagtagtcgatcatgcagcgcatg

SEQ ID NO: 229846 - DNA, 105 bp, Homo Sapiens
cagccagattccattgcaaaagagaaaaaaagaaatagatttttaatataggatccctctagggggtatcctactaagagtcgacgctgcacgtgcatgcgatgc

SEQ ID NO: 229847 - DNA, 190 bp, Homo Sapiens
  misc_feature (55)..(142): n is a, c, g, or t
cctagggatccttattacaaatcttctgacttcttttcttttttgcaatgcgaannnnnnnnnnnnnnnnnnnnnnnnnnnnnnnnnnnnnnnnnnnnnnnnnnnnnnnnnnnnnnnnnnnnnnnnnnnnnnnnnnnnnnnntgagccactacacctggccaatgtgcatttttaataaggatcccctag

SEQ ID NO: 229848 - DNA, 145 bp, Homo Sapiens
aggtcgctctagagatcccccttacttttttttgtggctacgaaacctagacccctttgttcttctaaacaatatatgtgtattccatcggaattaacctcaattcaataactggagtaaaagattttaagtaaggatcccctag

SEQ ID NO: 229849 - DNA, 201 bp, Homo Sapiens
ccctaggggactcttattaaaaatcaattgaggataagtataatcggttatataatctaggactctgatatctgttccgagtatagatctgtgttttcctttcttttgccattatccactaactactgttttcatataactagtacctatcgtaggtataagtatgagaatttgagacatttggaatccatccaactttca

SEQ ID NO: 229850 - DNA, 164 bp, Homo Sapiens
  misc_feature (87)..(123): n is a, c, g, or t
ggttagtggctcactgtctagtaatcccagtttctttggtgctagctgcaggctgaatcgattgcttgagctcaggattcttgagannnnnnnnnnnnnnnnnnnnnnnnnnnnnnnnnnnnncataaacaaagacacagatttttaagttaaggatcccctag

SEQ ID NO: 229851 - DNA, 153 bp, Homo Sapiens
  misc_feature (67)..(80): n is a, c, g, or t
gtcctgcttaggaactacagacacaggatcaggccaggctggccaaacaccagagtctttctcttcnnnnnnnnnnnnnngggaaccaggtctggttctggccactcaggtaagaggcttattcccggctcatggcagccaaaaatcctgggg

SEQ ID NO: 229852 - DNA, 195 bp, Homo Sapiens
actagaggatccccgataccccattttgtgttcaacagctactagagggacgggtgtatttaaaaaaacctagggcagagggctttgggaagagtaagaagaattgggagggccttaaatatagtagcttagttggaaaattgtgagggactttcgtacgggaggtccttcaggggtcccgagctcgattccgat

SEQ ID NO: 229853 - DNA, 476 bp, Homo Sapiens
tagacggatcccgggcagacaaatagatcgacattcccaaatcgatgtgtggtgcatgtagggctagtacatgttaatagttaacctctacaccctaataaatgttggccgtccatctcggaagagaatatgtcttgacaattacagttgagccgggtaaggcccaggacgggggtgtaggaaaggagctgtgcttggggtgggatgaatatgaataaccataggaagagttgatgatgaggtatacagatggagaaggtaaagaaggaagagaagtagtcggggaaggaaagtatgtaaggtgtgtcgagaggagatcagatgtcacataagggggtgtcgtatgttaggatacgccatcatgtgatgtgtatattttataggagacagaggtctcagttggtggccgaggcgggagtgcagtgatgcgatcagagctcagggcagtcgacaaccccccaggctcgggcgatcct

SEQ ID NO: 229854 - DNA, 152 bp, Homo Sapiens
cagcgagtgtgcggggtgactagaggacccggcttcatttttgtaagtaataaattacggtaaaggtgaagtgcagtagagtcccatatggcccagtttcccctattaacatcttacattagtatggaacatgctacagataacatgaaata

SEQ ID NO: 229855 - DNA, 144 bp, Homo Sapiens
acattaaatttcctggctcctccatagtggtgctttggtctatttccttccttctgataactccctgaggtaaaggcttaggtcatgggtatagaccttcttttctaatacaatcacataagggggtatcctagggtaccgagc

SEQ ID NO: 229856 - DNA, 111 bp, Homo Sapiens
taggataccccatatgtgtttctcatgttagtaagcgattgatctatgaataaaggcttatctacatttatcacgacttctagtaagcctctacctgcacgacaacacata

SEQ ID NO: 229857 - DNA, 231 bp, Homo Sapiens
  misc_feature (43)..(132): n is a, c, g, or t
gttgatctagaggatccctgaatcctggtcctctattgtgacnnnnnnnnnnnnnnnnnnnnnnnnnnnnnnnnnnnnnnnnnnnnnnnnnnnnnnnnnnnnnnnnnnnnnnnnnnnnnnnnnnnnnnnnnnataaataagttagaaaaattaagacagtgactaacatgtactcaataaatgaatataaaatgaggaagttatgtaacctcaaaaccacttcctagtaga

SEQ ID NO: 229858 - DNA, 258 bp, Homo Sapiens
cataagtgtatacattctctgtgtgtagcatttttaattcatgtggtttattgtgcctcgcatgacatttcgcaggcgggcgagacccgcgacaccggaggaggccggtttccgcaaggggctgggcaggcgtcagctgcagatgatcgcggtgggctccgcgatcggcacgggcctgttcctcggcaccggcgcccgcctggagatcgccggcccgtcggtcgcgctcatgtacctcgtgtgcggcagggtaccgag

SEQ ID NO: 229859 - DNA, 194 bp, Homo Sapiens
ccagggcagctagggaggtataatggtggggtactaggtgggtattggtcttatggtttctctactaagaaactcttccttaaaggtggttggtaatggtagcacttttaacacggaaactatactggaacagttccaacggtacatacggtatgaagctggtcctcactacatgccaggggtaccggagctcg

SEQ ID NO: 229860 - DNA, 215 bp, Homo Sapiens
catgtagtgaggaactagatgggtacaacagtctcagcttcactgcaggtgtcccagtcagatccaggagtgggcgccctagcttggcttgctagtcctggtctagagctatgccactaaaatatctaatcctaattcttaggtccttgccggtgagatatgaggtcttagagtagagcgcagagctcccagcccttctcctcattacatggcat

SEQ ID NO: 229861 - DNA, 363 bp, Homo Sapiens
atgtagttaggacctcgagggctggagtgatctgtgtgcccgggagacgtgaacttgttgtactgggagtacatcaagcgggagggatatcatgtccggaagcacacgagccaaggtctcggatcccacgtctcagatgctggtattgtacaagcttagcctgagctgggatgcaggtgagcgaaggcatggcctcgtcgatattgtgtaggcagccaggtcagtgatgttgtgctgggacatactataagtcccagtggtttgggaagctgagttgatgagattccttgaggccaggaggtcagggcggcagaggtattatcatagcattatattctagctttgtgtgacacaagcgatccc

SEQ ID NO: 229862 - DNA, 419 bp, Homo Sapiens
  misc_feature (77)..(162): n is a, c, g, or t
tgatcttggtgcactgtaagctctgccgtccagggctcaagcgattctcatgcctcattgctcttgattaactcacnnnnnnnnnnnnnnnnnnnnnnnnnnnnnnnnnnnnnnnnnnnnnnnnnnnnnnnnnnnnnnnnnnnnnnnnnnnnnnnnnnnnnntgacgtctcggctcggcatcgcaaagggctgggagtgacaggcatgaggtactggtgccagatcagaattgtaatgtatggtatggcatttcatttcctttccatatgattacacaattatcccagtatcatatgttaactctttccttactgcattggattgctgcgatgcctgaatagcaaatcagatgttggagtaaaggaaaggttactgcagagctctgtattgcagtgatctgtgtctggtccacattacg

SEQ ID NO: 229863 - DNA, 300 bp, Homo Sapiens
atagctggaatcctcaggcagtggagctgcattctgaacccaggatgacttggggctaagtaggagaggagtagcttcgtgtccggtttggattcttcataatagcaacccagacctgtatctcaatcaaaaaataatctcagctccaaccacatttcgggtcagcaccatatttaacttcagctctggtcctgagacatagcactgacataagaatctccctcccttatctccaccgaccagagtcatgtcctcatgacgtgctgtcatgtagtgaggaccgatccgggcgggggggtg

SEQ ID NO: 229864 - DNA, 359 bp, Homo Sapiens
  misc_feature (41)..(219): n is a, c, g, or t
aggctggctctgggtggcgtggagataagaatggcatgtannnnnnnnnnnnnnnnnnnnnnnnnnnnnnnnnnnnnnnnnnnnnnnnnnnnnnnnnnnnnnnnnnnnnnnnnnnnnnnnnnnnnnnnnnnnnnnnnnnnnnnnnnnnnnnnnnnnnnnnnnnnnnnnnnnnnnnnnnnnnnnnnnnnnnnnnnnnnnnnnnnnnnnnnnnnnnnnnnntaacatacagttagtactctatgactgcagtggatttggtatgtaaggatgaggggtgatatccttgggctttcaaatggctaaattctaccactgattttttggtttggatatgttgtcctcattacaggccaggggta

SEQ ID NO: 229865 - DNA, 206 bp, Homo Sapiens
ccactgctccgtcccagggcattgtcttcagggagtaggagggaaaagaaacggaaataactaggaagaacaagaaatggatttccaggggacaggacaggagcggggccagtagacttacacgaggtcgtgaagttgacagacgactcaggtagtgtgttgagtcagggaatggttgtcctcatgtacatggcatgggtaccgag

SEQ ID NO: 229866 - DNA, 485 bp, Homo Sapiens
tagtagagacaggtcaccatcatcatctccatggctacaaactttcatttaaggctacttgtcatcactcatttgatgtcactgtaatagccacataacatcttcccagatccgttcttgccttactccaaagtattttgcattgtgtatcccaagttatctctaaaaagcacaatcttatgtcactcctaggtggtgagagcaggactgggttgacgtgcagaggagcagcttggctgtgtagggccggggtggggatgcagtgtccagtggggagtctaagcccaatttcctggtcggggaccgtctgggagcagcccttcttctctctgcgaccggacttcgatgggcagtctcctttcctagctgggctctatcgctgggatggagattctacttccagcttggtatcttccttacctcatttgcccagtactcggagtgcggccatgcctttcagattggccaagcacatgtcctcatga

SEQ ID NO: 229867 - DNA, 406 bp, Homo Sapiens
  misc_feature (193)..(357): n is a, c, g, or t
tgtcgcacagccctccacacgcacatgtgcatcattcgccagatggcagcataaggggcagggaattcaggtcagcatgtggtcatgcagggtggggccaccatgcatgggattagagcctttataagcaagcacaactcgggatgcttgcatgccctctgccctctctccactcacatgcatgtggaaaggnnnnnnnnnnnnnnnnnnnnnnnnnnnnnnnnnnnnnnnnnnnnnnnnnnnnnnnnnnnnnnnnnnnnnnnnnnnnnnnnnnnnnnnnnnnnnnnnnnnnnnnnnnnnnnnnnnnnnnnnnnnnnnnnnnnnnnnnnnnnnnnnnnnnnnnnnnnnnnnnnnnnnacgctatgacaatacttaaattttgtcatcgtcttaggcctaccactcc

SEQ ID NO: 229868 - DNA, 270 bp, Homo Sapiens
gttgaatgcatacatcataaagaagtatctcagaatgctttggtgaagttttacgtgaagatatttccttttccacaacagtcctgaaggccctccaagtatccacttgcagattctacaaagagagtgtttcaaatgtactcaatcataagatatgttcaaatctatgagatgaatgcacacatcacaaagaagtttctcagaatgcttctgtctggtttgcatgggaacatatttcccttttcaccatagttcagaaagccctccaaa

SEQ ID NO: 229869 - DNA, 175 bp, Homo Sapiens
actcaaagttatagctcatcatccccaccatcatagccaccatcaccctccttacctcatacttctacctacgcctattttacaccaaccccagtagaggcaaccggcagtagaggcaaccggcagtagaggcaaccggcagtagaggcaaccggcagtagaggcaacggcagta

SEQ ID NO: 229870 - DNA, 289 bp, Homo Sapiens
  misc_feature (70)..(211): n is a, c, g, or t
aactaagcacctccttgtccgtcagcacctccattaattttcactgactaaaataaatagacttttcacnnnnnnnnnnnnnnnnnnnnnnnnnnnnnnnnnnnnnnnnnnnnnnnnnnnnnnnnnnnnnnnnnnnnnnnnnnnnnnnnnnnnnnnnnnnnnnnnnnnnnnnnnnnnnnnnnnnnnnnnnnnnnnnnnnnnnnnnnnnnnntcagtaggatcatgttctgtatagattatgaatgaatgagtagatggctacgaaggatgaataaaaagatttcagggt

SEQ ID NO: 229871 - DNA, 301 bp, Homo Sapiens
  misc_feature (71)..(139): n is a, c, g, or t
  misc_feature (158)..(189): n is a, c, g, or t
  misc_feature (210)..(258): n is a, c, g, or t
gtggttagagtagcaggaaggaggacggaatattgatatggaatatagatattaggagattataagataannnnnnnnnnnnnnnnnnnnnnnnnnnnnnnnnnnnnnnnnnnnnnnnnnnnnnnnnnnnnnnnnnnnntaagccaccgtgccccacnnnnnnnnnnnnnnnnnnnnnnnnnnnnnnnnaaagagagagcatctcactcnnnnnnnnnnnnnnnnnnnnnnnnnnnnnnnnnnnnnnnnnnnnnnnnntgaaccatggggttcaagccatcccaccttaatctccctagta

SEQ ID NO: 229872 - DNA, 140 bp, Homo Sapiens
cttgtctggctggatgatccactttaatactgctagtctggctggatatatcctactattgaatactccaaggaatgcaaacagatgtgtgcaggctgaccttcttccagccagacaagcagtattaagagtggatcata

SEQ ID NO: 229873 - DNA, 334 bp, Homo Sapiens
acggatggtcacgctgtacgcgggtatcgcccggggagggctcgtgctccgtgggtcggctcggtcacgggcgcgtcgagctggaggcccaccaggatcgggttgtggtccgaggaccgccactggtccgcggagtacaggtcctcggccacgtagttgtggcgcgagtactccagtgccacggattcgttcgcgttgatcatccagatgtcctggccggtgatcgccgtcgccgccgacggcaaggcgtagatcccgtccaggctgccgacggcgccgccgaacgcgtacaagtactcgcccgtgagcgcgccctgcgagaggtacccggccg

SEQ ID NO: 229874 - DNA, 124 bp, Homo Sapiens
ggaccttacgcgctcagctcactatatttttactttattaactatattctgtatcagccatctgaattgacccacacagttcccgctcatcctctggcatccttatgcgcgtaagggccagcag

SEQ ID NO: 229875 - DNA, 258 bp, Homo Sapiens
  misc_feature (70)..(111): n is a, c, g, or t
  misc_feature (150)..(177): n is a, c, g, or t
tttatattatagctcaagctgcagaggagtgatctcgagatcacatgcaacctactccctcccgggattnnnnnnnnnnnnnnnnnnnnnnnnnnnnnnnnnnnnnnnnnntgggcacgtgctaccatgacagactaatctttgtatttnnnnnnnnnnnnnnnnnnnnnnnnnnnngtgccagccattgcacccagcctccgcactcttgaagaaccagaaagccaatggtcctcccttctcacgaaaacaagagtt

SEQ ID NO: 229876 - DNA, 195 bp, Homo Sapiens
gttagggaaggctggtgcaatgacacgcgagctgtcattatatcgagagctagcgtcgacaagtgaagtacgggttgtcttgaaggttgatattctagttgatgtaaattccgtttcaatataggtagctgctatctatgggggaacctactaaactattagttaggcctacatattattgccgaagcttgatca

SEQ ID NO: 229877 - DNA, 190 bp, Homo Sapiens
cgaggggatcatgatcgtcattcgaacctccgactttcgatctggattaatgaaaacattctgggcaaatgctttcgctcatggtccgtctagccccctcaggaagcatgtcaatagacctaagtcagcagagtcagcccggctcttttgcccccaaattccagggttccaggtcagtacagttgcttag

SEQ ID NO: 229878 - DNA, 180 bp, Homo Sapiens
acagtggacgggaaacgggcgagttccttgcgtgggcaaggagacacagtgggacaccggtgactggggaataacatggtagaacccaggtccggggatatcatgcttctatgaggaaatctctgggctggaatatggaatccttttttttctgattctgggatggccgaagcttgagca

SEQ ID NO: 229879 - DNA, 399 bp, Homo Sapiens
  misc_feature (56)..(231): n is a, c, g, or t
agtgcggacacacgatcggcatagcgcactacagaccagaactccgtgggctcacnnnnnnnnnnnnnnnnnnnnnnnnnnnnnnnnnnnnnnnnnnnnnnnnnnnnnnnnnnnnnnnnnnnnnnnnnnnnnnnnnnnnnnnnnnnnnnnnnnnnnnnnnnnnnnnnnnnnnnnnnnnnnnnnnnnnnnnnnnnnnnnnnnnnnnnnnnnnnnnnnnnnnnnnnnnnnnnnatcggcatgcgccaccacgcccggtctcagactgttcatcctacagtcgctttcacgtgacacccgtgtctgtcacagctcctggactttatctcaaacattgacttcttctacgctccagtcactgacaacgggctcaccttgatttccttgcccaccgctcgatca

SEQ ID NO: 229880 - DNA, 249 bp, Homo Sapiens
tgtctatattggggaaatgtgaaggactgggtacgtgatagtaatcaggatcaatgagtattagcaagttaatgttatgataggactttgacgttcagatatatttttaaatccgtggaggactagcattaagttgacatgctgatccagagtgctacacacgaagtggattcagtgaatctagagaagacagcagcagacacggattccacggaaccacgtgttctgatgaccgctacggactgacgg

SEQ ID NO: 229881 - DNA, 485 bp, Homo Sapiens
  misc_feature (100)..(204): n is a, c, g, or t
  misc_feature (220)..(341): n is a, c, g, or t
ggacgttcagagggtccccgtcggatgcaagtgtcacataagtggagagctcaggaacagggactgtagcttatattttaatttttttgagacagagtcnnnnnnnnnnnnnnnnnnnnnnnnnnnnnnnnnnnnnnnnnnnnnnnnnnnnnnnnnnnnnnnnnnnnnnnnnnnnnnnnnnnnnnnnnnnnnnnnnnnnnnnnngtgtgtgccaccacannnnnnnnnnnnnnnnnnnnnnnnnnnnnnnnnnnnnnnnnnnnnnnnnnnnnnnnnnnnnnnnnnnnnnnnnnnnnnnnnnnnnnnnnnnnnnnnnnnnnnnnnnnnnnnnnnnnnnnnnntgagccaccgtgcccggccggcgatttccactttctagcaacagttggcgtagaaaccctggcccagccagcgacagttagccagcgacagttggggaatatctgtttatcgttatttctactttgattcctcaaaaggtgatt

SEQ ID NO: 229882 - DNA, 256 bp, Homo Sapiens
  misc_feature (50)..(128): n is a, c, g, or t
ggtggcgtctagaggatcccggctcggatgcaagtgtctctggatgcaannnnnnnnnnnnnnnnnnnnnnnnnnnnnnnnnnnnnnnnnnnnnnnnnnnnnnnnnnnnnnnnnnnnnnnnnnnnnnntatgcaaagtgtaatatcccagagcttctcttgcattttaggctgcaatgggtgaagaaagttatatcttcattcctttgtcaaaaatttactgagtgcctgggcactcaagtgctgtaatcccagca

SEQ ID NO: 229883 - DNA, 305 bp, Homo Sapiens
  misc_feature (129)..(179): n is a, c, g, or t
cacgaaggggtaggattatgagaagggataaaaaaggagattggagaaaacacgtgtgctggaattttcagaaaaaaatcgtagactatggcttgagagttagaaataaaagattatcaatttcgagtnnnnnnnnnnnnnnnnnnnnnnnnnnnnnnnnnnnnnnnnnnnnnnnnnnntgttctggtaaaacaagtataaaatgaatgtcaggatgttctccctcagggtgggcatcttctctgtccttaataccacccagttcttcatctttgacctgaaccagaagacacttggcatccaga

SEQ ID NO: 229884 - DNA, 210 bp, Homo Sapiens
  misc_feature (74)..(74): n is a, c, g, or t
tatgcaaagtgtaatatcccagaagcttctctgtgcagttttaggctgcaagtgggtgaaggaaagttatatcnttcattccgttggtcaagaaatttactggagtgcctggggcactcgacagtgctgtaatccctagcactgtggggaggctagaggcgaggaggatggctctgaacccatggagttcaaggaccagcctgggacagg

SEQ ID NO: 229885 - DNA, 269 bp, Homo Sapiens
cgttctagaggtccctggggcacgggtgatgggattggtcccacccgccaggccccctagtctatgtgcttgtggtaccccaaatatcatgaatgtctgttgcctcctcgtttccagctggcagcatgcaggatgcatgctcctgaatgcagcatgcagcagcaccatgtggcagcatgcatcaacatgggctctgccccttcctaccccatgtgcccctgtggtcccaccgtctcgttgtacctatgctctaacttcagtaatcattg

SEQ ID NO: 229886 - DNA, 182 bp, Homo Sapiens
gaggtgggacactgggtggcggttggcagtggttcatctctgggaggagaagccggtcagcctcaccatccatgcagcatgtgagaatgcaccccacccaccacagagagggtgccatgaagaagatgtcgaaacggacaaatgaactgcctttaatgcatgaatgcacaatgaatgctggc

SEQ ID NO: 229887 - DNA, 367 bp, Homo Sapiens
cagcaggtgggaccacgggtgacgacaagaaagcgcatcattgactcagcccggtcagcctaccaagaggacatgcacatcaggaaaaaggacactagccgcccaccaataccatgcgcatgctcataacacttaacttagtcttactgctcttggcaccgataatcccaagtcttcctttgcctctccatcatggacattcacattggatctcgtcgcctgctggtgtctccacttttactgtcagcccctgggattcattcactgttcctcggaagggagagtgcggcttacggccatctgcgattggctacgtgtctgtgctttccgggcgcctggatctcaaggctggcagagcgctcatcct

SEQ ID NO: 229888 - DNA, 100 bp, Homo Sapiens
agggtaaacggagggccagggaatccgtattctgggtcatagcggttcccggagggaaacgggagggccagggatccggaaccctggggaaaagaggtac

SEQ ID NO: 229889 - DNA, 203 bp, Homo Sapiens
  misc_feature (60)..(76): n is a, c, g, or t
ttatgttctgacccaccaaaaaaaggtgatgactgctgaatgacgagtttcgtcatttannnnnnnnnnnnnnnnnatgtgaaaagggatttgggccctgtagttgcccaagtaaaaacctccattggcacattctggttcacatgaaccctcatttccggggttcaatgaatttctctggctcaagctcccaaaatacggga

SEQ ID NO: 229890 - DNA, 107 bp, Homo Sapiens
ttatgttctgacccactcttatgttctgacccacgcttatgttctgacccacccttgatttactcgtaacaagcggtgtgaggatatttatgtagcatatttccgca

SEQ ID NO: 229891 - DNA, 497 bp, Homo Sapiens
  misc_feature (167)..(274): n is a, c, g, or t
ggcggcgacctagaggatccccttatgtctgacccaccacatcaagctgaataccatttagagtgtatttgtactacttactcttttataaaccatctaattataaggtaatgcccctggatttgtccctcaactgatggaagaacactacaacagagccacaagtnnnnnnnnnnnnnnnnnnnnnnnnnnnnnnnnnnnnnnnnnnnnnnnnnnnnnnnnnnnnnnnnnnnnnnnnnnnnnnnnnnnnnnnnnnnnnnnnnnnnnnnnnnnncccatctgctgaaacctcctggagggtggccagtggcctgtggggttgccagggggccgtgtgtgggaccgggccaggaagggatttcctcaggtgtggagactcggccccggacctgcatgcccctccagtgggaccagggaggaggaggcgggagtgggaagggacccagcacctcgcggggacacagagccagactggaggaggtgggtcagaacataag

SEQ ID NO: 229892 - DNA, 255 bp, Homo Sapiens
  misc_feature (56)..(203): n is a, c, g, or t
tgtactgacccacctgtgcagaggaagaaaagtggatagatttaagagctattcannnnnnnnnnnnnnnnnnnnnnnnnnnnnnnnnnnnnnnnnnnnnnnnnnnnnnnnnnnnnnnnnnnnnnnnnnnnnnnnnnnnnnnnnnnnnnnnnnnnnnnnnnnnnnnnnnnnnnnnnnnnnnnnnnnnnnnnnnnnnnnnnnnngccgaacaagagctattaagaagcaggccttagtggtgggtcagaacataag

SEQ ID NO: 229893 - DNA, 377 bp, Homo Sapiens
  misc_feature (174)..(254): n is a, c, g, or t
ttatgtcgaccacatgaattactgttacacatagttttgacttgaattaaaatactagacaaagcagaaatgtacaatttctggtctgtgttttccaggaaattcatagagaagagaatagagtggatgatgtgacttgaagtttttgcagcttattttttcccccactgtcannnnnnnnnnnnnnnnnnnnnnnnnnnnnnnnnnnnnnnnnnnnnnnnnnnnnnnnnnnnnnnnnnnnnnnnnnnnnnnnntgtcagcagtgctgagctgaggatctctgtccaggaggcacagacgctgtcctggatgctgtccagacagcatctgctctgccctccagggggacagacagacagtggacacagcccagatgc

SEQ ID NO: 229894 - DNA, 224 bp, Homo Sapiens
ttatgttctgacccacctctgagacggagcacaggtgctgggtagactcatactggatgtagtagtctagacagggtgcgcacatctaccagcttgttagccagcaaatgatcagactctgctggtcaggagggatgccgttgcttatcttggatcattgcctgaacattctcgatggtgtcactgggctcagcctcgagggggggtgggtcagaacgatagtg

SEQ ID NO: 229895 - DNA, 357 bp, Homo Sapiens
  misc_feature (48)..(99): n is a, c, g, or t
  misc_feature (153)..(291): n is a, c, g, or t
agttggggattttatttctgttagcagaaaaatagaattttgtgtgtnnnnnnnnnnnnnnnnnnnnnnnnnnnnnnnnnnnnnnnnnnnnnnnnnnnnctctttgctctgtgcttctccttgtagctgccatgtgaagaaggaaatgtttgnnnnnnnnnnnnnnnnnnnnnnnnnnnnnnnnnnnnnnnnnnnnnnnnnnnnnnnnnnnnnnnnnnnnnnnnnnnnnnnnnnnnnnnnnnnnnnnnnnnnnnnnnnnnnnnnnnnnnnnnnnnnnnnnnnnnnnnnnnntgtgtgtcctttaatttctcccagcagtgttttgtatagtcttatgctgtttggtgggtcagaaca

SEQ ID NO: 229896 - DNA, 265 bp, Homo Sapiens
gttctagaggatcctgcactgttgtcatacctacattgttccacatgccagaggctgtcaccttggtgaactgctgcggatatgggtacggccctggtgcgagatttacaccctctcccccgtgattttcaatggtgccagctgagatgctcacctggactgccgcctggaacctgctgacgcttttccaatggcacgtggccccttctctctggggcgacaccctttccatgggcgccctggcccctctcacaaatgaaaatga

SEQ ID NO: 229897 - DNA, 195 bp, Homo Sapiens
tatgtatgttggtaggtgggggtggtgttgtaatagtcgctatactgcttgtatgtattataccttcgataatcaggtccctcttctatagggctcctgcagtttgctgggggttcacttacaggccctattcatactgatattgaaccaattgcctggaagatgtcattcaaggagtgctggagacacagcaaa

SEQ ID NO: 229898 - DNA, 202 bp, Homo Sapiens
tcggtcgcgaatcaggttaccacagcacagcaacacctggtagaccacgttcacctctcgagccagtggagacccagaataccatggagcaccaatgaatgaccctgatggacctgtgattcgctggcggtacccgagcatcgaaattccgtaactcattggtcactagcttgtttccgtgatattacggggcacccccctg

SEQ ID NO: 229899 - DNA, 110 bp, Homo Sapiens
tcttgaggatcccgcgaatccaggtagacggcatgcacaccacccacggaatcgagacctggattcgcgaccgaacctggattcgcgaccgaacctggattcgcgaccga

SEQ ID NO: 229900 - DNA, 144 bp, Homo Sapiens
  misc_feature (66)..(90): n is a, c, g, or t
gtgggcgtctagaggatccctataagtagtaccaacactagcattagtacacgactattacttaannnnnnnnnnnnnnnnnnnnnnnnnttcagtgattctggtgctataagtgagaagcacgaatgtgtgtatgtgtgtatg

SEQ ID NO: 229901 - DNA, 222 bp, Homo Sapiens
atcgtcgaagatcagtcgatatatcatgcttcgcggagacggacgcagccgcggcagcacgcgcaggtgcccgtcatgccgaggtgcacgatgaaccagcccgcgtcgacctcgaacagcagatacttgccgagacgctcgacggcgagcacctcgcgcgcacgcaactgctcggagaagcccggccggcacgggccagcgcagcatctcggtacggagggt

SEQ ID NO: 229902 - DNA, 151 bp, Homo Sapiens
taccccctttctaccacaaaccccgctcgtcacccacaaaccccctcgtcacccacaaaccccctctccaccgcggcggtgcgccgcgaccggctgcgggacggctgggaaggcccggcggggaaggtggctcgagggggtttgtgggtga

SEQ ID NO: 229903 - DNA, 131 bp, Homo Sapiens
cgactcttgggatcccctcacgcacaaaccacctctcacccacaaacccctctcacccacaaaccccctctctaggctggcacggggaacagacgggagagggggtttgtgggtgagaggggccttgtggg

SEQ ID NO: 229904 - DNA, 115 bp, Homo Sapiens
caagaggccgggtgccgctagaggccgggtgccgctagaggccgggtgccgctagaggcccgggtgccgctagaggccccgggggagggggtttgtgggtgggggtaccgagctc

SEQ ID NO: 229905 - DNA, 328 bp, Homo Sapiens
  misc_feature (265)..(280): n is a, c, g, or t
tggcgtagcggttcagagggtacagggggtcggatgatcggatacagggatattatggggtatggatgggaagaagggaagatgtgtagatgtgggctggagggtggtgaggaggctgggtttttagccgagtgctatacatgcgggcaatggatttaatgacttgaaaggttgaaagtcgagtggaattatttccctcctaaaagatttatatacagtactcctctctacccctaaggttgggctctgcctcagaggagtgagnnnnnnnnnnnnnnnnccatataaagttacaattggcctcccatatgactggagtgaattaccg

SEQ ID NO: 229906 - DNA, 200 bp, Homo Sapiens
ctagaggatcccggagtcgtgtcgccaatacggacgctcaggcgctgaccatgtgaaggcgcaggcagtgtgcagatgggcactcaggtgacccagggcctcggcgccggttcgcagcctgaatgtcggtgccgaagccgcgcaggaagtcatcgacgaaatccggggcttcagctcgctgatatcaggaacgttgagat

SEQ ID NO: 229907 - DNA, 111 bp, Homo Sapiens
atagaaggtcgacgtgtattcaccactgcgtgggcatgcctccctgtacaagttccagtcgacacagtgagcacctgtgctgacctccaaatatctgttaagctggagcct

SEQ ID NO: 229908 - DNA, 265 bp, Homo Sapiens
ggggctctaaagggggtaaagggggtgctatagggtaaatcggggccctatttcaaagattttaagggggactaaattctaggaggaggggcatgaaccgggtggttggctccacagatttcagagcatggaccgtagtataccccgcggtcgtgtagcggtgaaaggggttgggttaaaacgtcggggaaatgcattgtgttttaaagccttaagggggggcacagctcagtcagttgccaacacgttctggtgacgtgtaatt

SEQ ID NO: 229909 - DNA, 237 bp, Homo Sapiens
  misc_feature (50)..(175): n is a, c, g, or t
ggtgtagacaaataccagttcccatgggtggtgtgcctataataaacacnnnnnnnnnnnnnnnnnnnnnnnnnnnnnnnnnnnnnnnnnnnnnnnnnnnnnnnnnnnnnnnnnnnnnnnnnnnnnnnnnnnnnnnnnnnnnnnnnnnnnnnnnnnnnnnnnnnnnnnnnnnnnncccccctccacgggggggagaagaggggagcccccacacagaggggcgagaggggggggcgc

SEQ ID NO: 229910 - DNA, 151 bp, Homo Sapiens
acacaggcaagtgttaatggatggcagagagggatggtcaataaatgctcacacccatactcccagtggggacccagccttccttgatggcttgccatccaagtctatcagggggaacacaggagagcgggttttccacaaggcaggtgcg

SEQ ID NO: 229911 - DNA, 100 bp, Homo Sapiens
tgagcagaggacccaaccgtcagcactcctgggattcctccaggagaagggaccaattatgacaaatacgtagagctcaggtatcacttctagtttactt

SEQ ID NO: 229912 - DNA, 104 bp, Homo Sapiens
ttttttcttgtttttataaaaggttaaaattacgattttatgggtaacaaggggggaccccaccaaggcagggtcagggacccccaaggaggggcggagggggg

SEQ ID NO: 229913 - DNA, 109 bp, Homo Sapiens
aaggaaaaagggcacaagaaagtttaatgggtcaaaaacattttatttctacaagttacaattagtaagtataacccattcgggagggatggcaggtgctcggttttca

SEQ ID NO: 229914 - DNA, 235 bp, Homo Sapiens
  misc_feature (100)..(158): n is a, c, g, or t
gcactcctgtgaaatccttcccgtcgagtcaatcatccgtgcactctctgtcacatcattagtttaactcttcgattgtcactagctgatatttttgtcnnnnnnnnnnnnnnnnnnnnnnnnnnnnnnnnnnnnnnnnnnnnnnnnnnnnnnnnnnnaacatttagagaaggggaaattttatctatgacaaaacacgaagggggcacaaccggggaccacaaagggggcccac

SEQ ID NO: 229915 - DNA, 155 bp, Homo Sapiens
tctgagaggctatgtgaaagtgctgaggcaggttgtggccgactgcagtgaaggcgggcgggttaggtgcccggtgattgatgagctgggctcgagctagcgtcgaagctacgaccctgtgccgatgacagcggtcagcctcagtgccgtgaagg

SEQ ID NO: 229916 - DNA, 250 bp, Homo Sapiens
  misc_feature (99)..(201): n is a, c, g, or t
tgctggtcgtctgaggtcccacgtcagcctccttgtcagggatcctccacctcgccttccatgtctgggactacaggttgcccaccacgctcgtgtaannnnnnnnnnnnnnnnnnnnnnnnnnnnnnnnnnnnnnnnnnnnnnnnnnnnnnnnnnnnnnnnnnnnnnnnnnnnnnnnnnnnnnnnnnnnnnnnnnnnnnngtgtgtggggtttttcttgttttgccaccccatcaccaacaagccacca

SEQ ID NO: 229917 - DNA, 252 bp, Homo Sapiens
cttttggctggtaaacccaaccaggaacatttatttaaaaaacataagcaagtttttccccaagaaggttaagcaccgcgggcgtggttcatgacatttcgatttcaggctagaaggcacggaaactctccttccagccctttgcgggaaaagtgctcctacccagaaccagcgggcattgccccagttgcagtgtgggccccctataaaagccccacaaacacttttattcccaccacaaagggctttgaa

SEQ ID NO: 229918 - DNA, 309 bp, Homo Sapiens
caaaaaccaaaacattttaactcttggggctcggggaaagggccaggcagagttgcaaggtgtgctccacaggaaggggttaagcagaaggaggagctacgagggggctacagctcctagttacctgtgttgggggaaggactgagggaatggtgaagttggtgtctcgcggaggggtgctccagttccgtgggtgcccagtttcgtgacaccgtgccccttctgggagtttcacagtgggaagttcctttgcaagctccgtgaaaaccaacagaggccgtgccttgaaaccctgtgggttcaggaaga

SEQ ID NO: 229919 - DNA, 148 bp, Homo Sapiens
ggtcagtatccctcgggagccgttgacacaacccaaccagaaactgacatctcctcgaccgaggacttctgtgtaaacacgcgcaccagccacccgtgcggtccatactccttaccattctttgcttggctggccaaacaaaaacaat

SEQ ID NO: 229920 - DNA, 193 bp, Homo Sapiens
aatctaacacatttaattggggaacaagggagcaactcctttaaaagttggagagtcgcataaattattctcatatacagctaaaccctaagctgggtcacacgatctattttggagcagcaaaaaaggagggctagagaaaggctagagagtgtcttactcgtacacaggggaaccctcaaaagtcgcccgg

SEQ ID NO: 229921 - DNA, 117 bp, Homo Sapiens
gtccgagaaggggtgggcggctcggtcaggctggcctcggtagggcttgcggccctgaagctcttgtccaccttgacgaagcccgcctcctccagcttgcgcaggtggacggacaga

SEQ ID NO: 229922 - DNA, 189 bp, Homo Sapiens
aaaagggtcttaaaaggtatttaaataggtggaggcgggacgaaaatagggcaccatcagaataaaggcaggcaatatatttacggtcagatgaaacaggggtgtccataaatcaacaaaaagaccatctcctcctttgagggaaatacatggtatggcttacgccagtcaccaataaggtaaacggtc

SEQ ID NO: 229923 - DNA, 267 bp, Homo Sapiens
  misc_feature (129)..(179): n is a, c, g, or t
ctattcctgttacagcaataacactggtctacgtgggatagcttttaggctgataagtcaaagaaaccaaatcccatatctcgtccgactcctccgacctcttccttggcttcaaccttagctggggcnnnnnnnnnnnnnnnnnnnnnnnnnnnnnnnnnnnnnnnnnnnnnnnnnnncacaaaggcagatggatcagcccaaaaaggccttgcaccttttccagcaagtgggcaaggtagtaatccagtctcccacagcacacag

SEQ ID NO: 229924 - DNA, 187 bp, Homo Sapiens
gaactgttgtctgtcctatagcgctatgtgctgtgctgggtgtacactgtaccccacttggtccctatgctgacccagtgaaattgcagacctgcccctccaaactccacagtattggacccttgtgggctagtgccatggccttctacatgcctaccacctaatgaagcttgaatatgttgactgc

SEQ ID NO: 229925 - DNA, 123 bp, Homo Sapiens
tttggagatggggcctcattaatttcgcccaggtgggtctcaacctcctaaggttcaaaggtatcttctaaccctcagtcccctggagtagctgggaactaacagtggcgtgccaccatggcc

SEQ ID NO: 229926 - DNA, 333 bp, Homo Sapiens
gagagagcagtcatcgcgagccgcaccacacaggggccagtcgcaaacagtgagcgggacttcctcccgggcgcgtcctctcccacagatgcaaccgcggctgggggtcacgacccaagtgaagccaccgctaggggcaagcccataaccagagacagaagcatcaacacagttcacttgcctccacgaaggcccatctccccgagctgcccatcatgagtgcttgtcacccactcactgcaacgccacaagaagcagaatgtgccctcagcccctctaatccagcctattccaaaagggacattggcagaatgacaccaagcttggttcacc

SEQ ID NO: 229927 - DNA, 138 bp, Homo Sapiens
actgtgcaagtctaggagtacctgataacgctaacgctcatgcgggtctgcttggaaattgctggcggcttcaatgacgttctatcttcatacaatttccaagcagacccgcatgaacgttagcgcaatcagggactc

SEQ ID NO: 229928 - DNA, 156 bp, Homo Sapiens
ctcaggatcttaaccactgattgaggcaggatcaaacccacatcctcaggtgtactacctcaggtcttaacccactgagccacaataggaactccctggtataatgtttttacttttactttgtcttcatcttaaacatggtaaaattttgactgg

SEQ ID NO: 229929 - DNA, 421 bp, Homo Sapiens
  misc_feature (67)..(67): n is a, c, g, or t
  misc_feature (320)..(320): n is a, c, g, or t
  misc_feature (355)..(355): n is a, c, g, or t
gccaaggcgttgaacgtcgaagatttccctgaccccgtcgcaccagcaagcgcaatgacggtatggncgccaccgattcggcagcgccggtcggcccgttccacaacggcacgggccagagccacgacgtcgtcaggaatatacccttccgacaggtccaccgctcgggtcagcaggtcgatacgctcggcaagatcgacgcgatgtcgcctcatcgttccccctgacgaggctcgggatccagaacgaccgccggttcaacgacctcagcgtcaaggcccggcatgttcgcttgtaactgccctattttggcaggctgnggtgcctcggcttcgggatcctgacaacgggttcngatcgtcacctgatcactgtgagaccctggcgcatcttgagcttaagtcgtggcttggagaagtcg

SEQ ID NO: 229930 - DNA, 268 bp, Homo Sapiens
  misc_feature (11)..(11): n is a, c, g, or t
  misc_feature (25)..(25): n is a, c, g, or t
  misc_feature (46)..(176): n is a, c, g, or t
tttgagtagcnggaactacaggcgngtgccaccrsgcccggytaannnnnnnnnnnnnnnnnnnnnnnnnnnnnnnnnnnnnnnnnnnnnnnnnnnnnnnnnnnnnnnnnnnnnnnnnnnnnnnnnnnnnnnnnnnnnnnnnnnnnnnnnnnnnnnnnnnnnnnnnnnnnnnnnnncytaattctatwcwyaacactaaaagcatcttgccwtcagacaggttttggccatgcccaaatgacacagacwgcctatttcaagttaagac

SEQ ID NO: 229931 - DNA, 179 bp, Homo Sapiens
wttatgcagcagcgcgcatggccatygcggatctcaccgcttccaaggcagaccgtgtggtccttggcccatccctgcccgtgctgtaccaawccctgtcgcgtgcggcacgcccactattgggcagcaatkcctcggtggtgctgtccaagcyggatcckcccacgcaggwcgwggcw

SEQ ID NO: 229932 - DNA, 355 bp, Homo Sapiens
  misc_feature (44)..(44): n is a, c, g, or t
  misc_feature (210)..(210): n is a, c, g, or t
  misc_feature (324)..(324): n is a, c, g, or t
  misc_feature (333)..(333): n is a, c, g, or t
gaggctcgattctcatcggtgtcatcgggccccttgctttcctnttggcaggccgtcgcagggagcagccgcccgtgacaacggcaggcgcaagcaaggccaccgcagccaccgcgattgacgagctctacaaatgaccgcacccgctattcgcatcgagcatctcgtcaagacctatccggctggatcgggacagacaaagcgtgccgncaacgacgccacgttcgacattcccgcaggtcagatcgtgagtttcttgggccccaacggcgcaggcaagacgactacgctgcgcatgatcctgggactggctcggcccacgtncggctcggnccagaatcttggccacgatagg

SEQ ID NO: 229933 - DNA, 173 bp, Homo Sapiens
agcaggaacgtgaaccgattgactgaatgacggtagcatatcgcggctaaaagaggtaacccatactacctgtctatcggaccctgtgacctcaaccactgtatgtcaatcatgctggtgatgtccaacaatacacggcttaacgactaggccaccgcgcaaatggttcgcaa

SEQ ID NO: 229934 - DNA, 336 bp, Homo Sapiens
  misc_feature (73)..(290): n is a, c, g, or t
catatcatccccattgtgcagaaggcagtgtcgtgcaacttaactaccccatcctcacgtgggaagtggcatnnnnnnnnnnnnnnnnnnnnnnnnnnnnnnnnnnnnnnnnnnnnnnnnnnnnnnnnnnnnnnnnnnnnnnnnnnnnnnnnnnnnnnnnnnnnnnnnnnnnnnnnnnnnnnnnnnnnnnnnnnnnnnnnnnnnnnnnnnnnnnnnnnnnnnnnnnnnnnnnnnnnnnnnnnnnnnnnnnnnnnnnnnnnnnnnnnnnnnnnnnnnnnnnnnnnnnnnnntgagccaccatacttggcctcatctggcttttcttagatttccctt

SEQ ID NO: 229935 - DNA, 127 bp, Homo Sapiens
  misc_feature (14)..(14): n is a, c, g, or t
  misc_feature (31)..(31): n is a, c, g, or t
  misc_feature (60)..(61): n is a, c, g, or t
  misc_feature (82)..(82): n is a, c, g, or t
  misc_feature (94)..(94): n is a, c, g, or t
  misc_feature (97)..(97): n is a, c, g, or t
  misc_feature (114)..(114): n is a, c, g, or t
aatgtatctcattncccacatatttaagggncttcgttcactccgcccaagctaaaagtnnaaaagtgattcaatttctctntagatgccttgnctntgagaaatggttggacncacaccctttaaa

SEQ ID NO: 229936 - DNA, 541 bp, Homo Sapiens
  misc_feature (98)..(114): n is a, c, g, or t
  misc_feature (137)..(186): n is a, c, g, or t
  misc_feature (263)..(274): n is a, c, g, or t
  misc_feature (356)..(377): n is a, c, g, or t
  misc_feature (380)..(388): n is a, c, g, or t
  misc_feature (396)..(416): n is a, c, g, or t
atagttcccttgatagcagacttgagcagtctaattactggaaaggcctggtccctttgtaaagaaacaaactggcatcattcagcttcacgacctcnnnnnnnnnnnnnnnnngagacggagtctcgccctgtcannnnnnnnnnnnnnnnnnnnnnnnnnnnnnnnnnnnnnnnnnnnnnnnnngggggttaaaacaattttccggcctaagcctcccgggcagttgggattacaggccccccccataatgcccagctaannnnnnnnnnnnagtagaaacggggttttcccctgttgccagctgggttccaacccctggcctcagggaaatttgcccacctaaccttccaaannnnnnnnnnnnnnnnnnnnnncgnnnnnnnnngggcgagnnnnnnnnnnnnnnnnnnnnnggaaaaagatttattttttcccccagcctggggggcaggggcaaaacttgggttacgggaagcctttgccccccaggttaaaactattttttggctaagcctccggggtagctgggacttcgagg

SEQ ID NO: 229937 - DNA, 271 bp, Homo Sapiens
  misc_feature (49)..(172): n is a, c, g, or t
cttatccagggggagtttgtggcatataaatcgtatcttaactttttannnnnnnnnnnnnnnnnnnnnnnnnnnnnnnnnnnnnnnnnnnnnnnnnnnnnnnnnnnnnnnnnnnnnnnnnnnnnnnnnnnnnnnnnnnnnnnnnnnnnnnnnnnnnnnnnnnnnnnnnnnnccgggtccacatatattgtggatatactgaaaaaccactaaattgacaaggtagagactcaactgtttacgcttttcatagctatagattttgttactc

SEQ ID NO: 229938 - DNA, 356 bp, Homo Sapiens
actctcactactattatattatccgtgctagcttatgcacctttcctgcccatctatcaacacagatggcattagctagcgttcttcaagtccggaataattgactaagtgtgtgacacatccaggccttgtaggaatgagtcactggggcaggtgggcagcccgggtgcaatctcaccaggagccccaaagcctgttctgtaagaaacactgtcacatccaataccggaaggatttggactgacagccttatggagatacatctgttcttatcgaaactcgaatttcttttttaattaaaaagaaaccgctgctttcttattaacatggggtgcaaaaaaggcaggccaaggagg

SEQ ID NO: 229939 - DNA, 155 bp, Homo Sapiens
gtccttcaaggatttttaataggttagggccctaaattaaggatttacctccggttcgagttactttttgtattggtgaaagaatgggaaccccacaaattctatggggtccggcctaaaatccaaaaaattggcaaaccccttcttcgtggaaa

SEQ ID NO: 229940 - DNA, 246 bp, Homo Sapiens
tgaggatatttaacagttaattctgactgacacccatatggcggggaccttgaaaggtcattggctccacgaaggctgagcccattcctttttatatagtatagagacgcataccctccagactgacttaagactcagtttcctttccagtgaccggaccagattaactttgatatgtctcacggcgattcatattattagatataatcatcctctgatacgttgctatgcctgaatatcctcaca

SEQ ID NO: 229941 - DNA, 655 bp, Homo Sapiens
gcgaagcggtatacagtacagagggtggggttgcgggcctgacagctctatgacagaggcgaggctctcacgagacaggctattagagccagccttctgaggggacatacactgctttctatttgcgaccgcccatcttctagagacgactggactaggatagcctggcgtgagttatgaaggagagcgtctatatgactgcgcaaagagactcgagtctagtggcacgtactttcagagcaccggtcctatggctctacgatgagagaggccatttattccctcgcagatgccactagcgacgcgcgctagagatatgtaatgagtgtctaccattccccaccttgcttaacagggggagggcaggttttttagaaaaggacaagcacccccaaccgaacccagtgggtgatggcaccttctcaaaatactggccaaagactcacaggtccaaaagaaggaatgttcttaaaccgattagaagagattttagatggtctttgacccatcacgaatttgtgaagatcatggaaccctctttccggcggtgggcaaatgtgttccggccaccctttcagtgggggaccgggctcttttactggatagggatcctccggggttaatcagggcaacccacgagattttgccctttttt

SEQ ID NO: 229942 - DNA, 401 bp, Homo Sapiens
acgaaatgcctttggtgagatcgacgtgctcccagcgtgcgttgagcagttcaccaatgcgacagcaggtggagagggcaatccaaattgcagcttcggtggacggaagtaggccggcttcaggagtgagctgggccagggcgcggatctcatcatcgctcagcacgcggtcgcgttcgacatccttgccaccaatcttggcctggcggatgctgggcagtcggatcgtgctcaatcagatctcgatccaactgcgaaccggaacatttgtcgcatcaggctaaagatcagtttggccatacggttgacgccacgagcgaggaagggcatcggtcacttcggtgacgtgccctttttttacgtcagccacggctattttgcctaacaatggcaaaacgtcc

SEQ ID NO: 229943 - DNA, 228 bp, Homo Sapiens
ctcatttttatcgctgaagcatcattatgcgccctcgcggacaaacacactcgatgcagtagcccacagcagtgcggcagtgcagggacctcctacaggcaagcaacgcctcgccgtatccgccgctgcctgacgcgcacacgcgcgacaccgttcctcatgctcgcagacaccgttccctgtcttatcagaacaaataacatcggaattcgatatcaatgcttatct

SEQ ID NO: 229944 - DNA, 401 bp, Homo Sapiens
  misc_feature (93)..(342): n is a, c, g, or t
cttccaaccccaccgagtagctgggactacatgcgtgcacgacctttttattttatttcatatatggtttatttctattattttgagacaaannnnnnnnnnnnnnnnnnnnnnnnnnnnnnnnnnnnnnnnnnnnnnnnnnnnnnnnnnnnnnnnnnnnnnnnnnnnnnnnnnnnnnnnnnnnnnnnnnnnnnnnnnnnnnnnnnnnnnnnnnnnnnnnnnnnnnnnnnnnnnnnnnnnnnnnnnnnnnnnnnnnnnnnnnnnnnnnnnnnnnnnnnnnnnnnnnnnnnnnnnnnnnnnnnnnnnnnnnnnnnnnnnnnnnnnnnnnnnnnnnnnnnnnnnatgagccactgtacctacccccattttttttaagagatgtcttgctatgttgcccaggc

SEQ ID NO: 229945 - DNA, 251 bp, Homo Sapiens
  misc_feature (62)..(81): n is a, c, g, or t
gctggaccggacttctgtgtgtgtgaaactcctcctacttctcattacaacactttactggnnnnnnnnnnnnnnnnnnnnaaataaagatgaggtctctttattttgcccgggtgggtctcaatttccgggcctcatggtattcttctgcgcctaggcccattatttatggggattagggggcttgacccattgggccccaggtctttactagttttcccactctattcttttagggccctccctcagat

SEQ ID NO: 229946 - DNA, 249 bp, Homo Sapiens
cttggatggttgctatacaaggcatgctgcagctgtggtcattgataaagaacacgggttcgttaatcgtcacaaatatctgcaggctgtacagtgaagcaagggcatcgtagcatgtgctcagttctggtgagggttgtagtcgctgcatcaaggacatgggcggaggaacgtcaggaaaagtgtctgtgtccatgccacgagaaatcacacccgaggtgagtcctggtctttacaaacaaccaagat

SEQ ID NO: 229947 - DNA, 186 bp, Homo Sapiens
attgttgtgagtgtgcagaacctgccggtgcgacgtccagtccgtggcgttgaaagacaggatcttcgctcgttatgaaagacactaaagtggatgatacaagaactagaaaacaaaaacacagaagtatcctgctaaagtggaagtgaaataaaggcattttcacataaattaaaactgaatttg

SEQ ID NO: 229948 - DNA, 748 bp, Homo Sapiens
aacttggtatatagtttgttatcctagtccgcgcctgattgaaacttccacagactgctggttttctcgccgtggccgaggggggtactcatacctaggtgatgttgcgatgtgccgtcatgggttccaccaaccccgcctggtaggttgacgctactgacgccgccataagcgcgggcagaacaacccagagaacagccgcccgcagtcgctaacgcagcccacagaggcaaaacagcaggcacgttgtacggccaggtgctaagtcgcctccgcagggcttggccgtgtcacagatggcaaccaccgttacccgacgtccacctgccgcagtgcgccgcggcccatccagtgtgtcagacttgtttttggtgtaggtgccggggtctggcggtacgcggtttcggcaaggccacgggcgggcaaccggaacaggcctcccaaaaacccacggcgtacgcttgctggcacaacattgaacccgtcgccacaaggcccggttttcaccgggttccctctcagcaaaccacatccctgcctgtgtacgggactgattaggtcgtttcagaacaccctgcacaagcgccgaacccggtaagcacctgagtgtatatactgcaagagatacactaggggcatccagatattagtaatttcatagtaccatttagggtctcacaattaactcttcaattcaatcccccttttccactttaataccctatacttggtcgcttattatttcttc

SEQ ID NO: 229949 - DNA, 222 bp, Homo Sapiens
gggaggaatttcacctcaggtggcggcagatgtgtcctggtcggtggcatctctgctgcacttgagaagggttgttagtgcgggtggtttagagctggtgggcaatgtaggactacctaacctagtaggtgttctgtgggctgggtgagggcgcagttgtcggccacctgatgtgtatactacttggccacctgaggtgtatactacttggggatccgtgcg

SEQ ID NO: 229950 - DNA, 701 bp, Homo Sapiens
acccttgaggattaaaacgacaataacttagaggttttcaaccctgaaattaccttaggagtgtggtgtattacaggggctacacatgatttagttaagatcatgtattaagttttgtttgtataaaatgctgggttgcacctgaggtgtatactacttgcacctcaggtggcagtccttcagaatccacacccacccagcacaaacatacattatttatcgttgggcggatgttgcactgggcagccaaagcactcaagttgcttggccacctgaggtgtatactacttgcaagtagtatacacctcaggtggcaacctggcatttggatcaaatgttattattgtactaacattgtttaggttagacactcaggtctcccgttctggaacacagactaaggttaaggagagatcagatcaacttcctgatcacaagagaggtgggtggcgtccctgacatggtttgacgtcatctgtttgtggagtccaccgtttgtaaggcacctgaggtgtaaacattgggatcgggcacgtacaataataggacatcaaaacaagagaagaaacccttttttctcttaattctattttcttactttattttcttaacaaccctcattccatcccccacctccccttcatcattctcactatcatgattctatcttctcctccccaccttcctacctctaatcccca

SEQ ID NO: 229951 - DNA, 403 bp, Homo Sapiens
attggaaattatgagacactcttggcagggggactgggggctcaggagagtactacccaccagggggagcttctggggaccttggatgcgcactgtttcaggcagttgcctcggtttgggccgccgagggaacaggccttcgctgaatttttctacagtcagcttcctctttttagcaggctatcgtgccagcagctttttctaaaactagactttggcttgcgctcagaagcccgagtgggtggcaagcgccgaattcccaagtttggttcgagcgctttgaaggccagaggtgctgttccggggatgctggcaggcgcctctggccagggactagggacgtggccacctgaggtgtatactacttgacacctcaggtgtatactacttggggatccgttca

SEQ ID NO: 229952 - DNA, 312 bp, Homo Sapiens
cgaccctgcagaccccttgactgaacggcagggggagggtgggggtgaggccaccaatcgcaactcacaccaattctttggctcaagaggccccctgccaagcacaccctgggcaaagattggaccccacattaaaaaccgaggaaatagccctacttgctggaacaaaggaagaacccctccccactatacctggctcatcctcaaaccctgacctgggcctgagggactgcaggggctgttcagcatggccctgaagctgcgcagaattgttggcaaatagggaggggggtcccagggaggaggggtacc

SEQ ID NO: 229953 - DNA, 314 bp, Homo Sapiens
  misc_feature (136)..(176): n is a, c, g, or t
  misc_feature (212)..(240): n is a, c, g, or t
ttaactctcatacgtagtcttggtgatagctgactcttgaggatcccccctccttccctgccttcagtaggatctggctccgtggctggaggaccaacccctatagtgggaatgcagagcttaacgtgtactgctnnnnnnnnnnnnnnnnnnnnnnnnnnnnnnnnnnnnnnnnntccgcctcccaccctctccccatctgctctgggtannnnnnnnnnnnnnnnnnnnnnnnnnnnnacaacagtggaagggaggcttttgcccattctttcaggggaaagggagggcttttgccgggttacccgaagcta

SEQ ID NO: 229954 - DNA, 101 bp, Homo Sapiens
tgttgcatatggattatataaactgaagagcagggaaggaggctttgccatcttcagggaaggaggctttgccatctcagggaaggaggctttgccatctt

SEQ ID NO: 229955 - DNA, 190 bp, Homo Sapiens
taggatataaagcagacccccacccccgccagcccacgcagtcagtgagcacagcaggacactaactagtagccttagctgtactagccggacctgtgacctactacagggaaatgaggctatatgccgcgggatcctactaaaagtacgacctagcagtgcatagcaaagctataggcacttgtgccgt

SEQ ID NO: 229956 - DNA, 273 bp, Homo Sapiens
gggcgcccccgtggcccgtgccgtgggaaaccgagcgagggacacttgtgccttccagcccacattcttggtgctcttccacagaagccagactgtggacactggtgtccccggtgcgccacagggggttccggaaatgctcccgtggacctgtttgagacttcacagccttgagctgaacgccaggttctgaaacttctcgaagtggggtgtcttgacaatatgtccgctgcgtgtgcttacacatgacgagggttctctatagaggcaacg

SEQ ID NO: 229957 - DNA, 336 bp, Homo Sapiens
  misc_feature (46)..(128): n is a, c, g, or t
ctggcctccttccctgtagtcctgccgcctcacctgggcctccaannnnnnnnnnnnnnnnnnnnnnnnnnnnnnnnnnnnnnnnnnnnnnnnnnnnnnnnnnnnnnnnnnnnnnnnnnnnnnnnnnnctctccagcaatatcatctgttgttacctctgagtgataatcttggaggcttctctcccccatgatatcttacaaaccagtgcaggcaattcacagcacatgaatgtcttgaaaccccagggcacagcagcccccagtctgcttgctgcacaccaggcatgttgtttgttccagggcacagtgcaggcggggcatcctctcacagtct

SEQ ID NO: 229958 - DNA, 196 bp, Homo Sapiens
  misc_feature (20)..(20): n is a, c, g, or t
  misc_feature (23)..(23): n is a, c, g, or t
  misc_feature (39)..(39): n is a, c, g, or t
  misc_feature (77)..(77): n is a, c, g, or t
  misc_feature (133)..(133): n is a, c, g, or t
  misc_feature (154)..(154): n is a, c, g, or t
  misc_feature (180)..(180): n is a, c, g, or t
ccccgcgggccagaaaaatncgntcaattgaccgctcgntttacccggacgacggaacttatcgtataaggcaatanttgcccggaaataatggccggacgcaccggttagccggggccgtaccaatgccgcncgccaagtagggttttcttangtaaccgccgggcgacatgttgaacnagccgaagacattatt

SEQ ID NO: 229959 - DNA, 186 bp, Homo Sapiens
caagtcgttcactagtatcacagtcgtttgaacattcgtttcaccaatccactataccaacatgaagttcctttccgtcctcgctttgggtggtgccgtctccgccgttgcgctccctggcgacgattggaagacatggcagtcctgcgcaaaagagacacaatatgtcaccgtcaccgtcacccc

SEQ ID NO: 229960 - DNA, 245 bp, Homo Sapiens
ccacgtgatatgaaaagggaagcgcttgcaaccagactgtcgacggtgttcagccggtcttctgaccggttcactcgtcgtcggcaggccagcatcgtctgaggccgccggataaaggcttggggaatgtggctcctccgggagtgttatagcccctcgcacaatacggcgcgcctcgggcgaggtccgcacttcggtaaggatgctggcgtaatggtcgtaagcggcccgtcttgtaacacgga

SEQ ID NO: 229961 - DNA, 125 bp, Homo Sapiens
  misc_feature (29)..(29): n is a, c, g, or t
  misc_feature (49)..(49): n is a, c, g, or t
  misc_feature (55)..(55): n is a, c, g, or t
  misc_feature (83)..(83): n is a, c, g, or t
ggaacctaaaaaccaacaaaataaaaccncagctcctattcaattatanccatgnctaatgtatccaagcaaaggcctgcttngaacactctaatttttcaaagtaaaagtcctggaacccccag

SEQ ID NO: 229962 - DNA, 176 bp, Homo Sapiens
  misc_feature (21)..(21): n is a, c, g, or t
  misc_feature (58)..(58): n is a, c, g, or t
  misc_feature (69)..(69): n is a, c, g, or t
  misc_feature (72)..(72): n is a, c, g, or t
  misc_feature (79)..(79): n is a, c, g, or t
  misc_feature (97)..(97): n is a, c, g, or t
  misc_feature (142)..(142): n is a, c, g, or t
  misc_feature (146)..(146): n is a, c, g, or t
  misc_feature (159)..(159): n is a, c, g, or t
gtgcgctttaggaggctaagngtggcggaggccataggaagcaaagggtatggctggngcctgggaggnggngagggcnggcccccctgggctggangagagcggcgggggcacactagcatcaccaccaacaccactgggnaccnagcctcgaatcgnaaacatgggcatagctg

SEQ ID NO: 229963 - DNA, 179 bp, Homo Sapiens
  misc_feature (15)..(15): n is a, c, g, or t
  misc_feature (52)..(53): n is a, c, g, or t
  misc_feature (56)..(56): n is a, c, g, or t
  misc_feature (78)..(78): n is a, c, g, or t
  misc_feature (85)..(85): n is a, c, g, or t
  misc_feature (96)..(96): n is a, c, g, or t
  misc_feature (98)..(98): n is a, c, g, or t
  misc_feature (108)..(108): n is a, c, g, or t
  misc_feature (119)..(119): n is a, c, g, or t
  misc_feature (126)..(126): n is a, c, g, or t
  misc_feature (136)..(136): n is a, c, g, or t
  misc_feature (139)..(140): n is a, c, g, or t
  misc_feature (156)..(156): n is a, c, g, or t
ctctacaagcctcanagacttcgagctccatcaccaccaacaccactagtgnnggngtgatgatgcaggcctctgccngtaccangaagaactgantnacaaactggntgaaactgcgnagacaanaataagctgnggnncaatgagaagaacgcnaagcgaccatggaattgatgacg

SEQ ID NO: 229964 - DNA, 123 bp, Homo Sapiens
  misc_feature (31)..(31): n is a, c, g, or t
  misc_feature (48)..(48): n is a, c, g, or t
  misc_feature (55)..(55): n is a, c, g, or t
  misc_feature (72)..(72): n is a, c, g, or t
  misc_feature (76)..(76): n is a, c, g, or t
  misc_feature (82)..(82): n is a, c, g, or t
  misc_feature (99)..(99): n is a, c, g, or t
  misc_feature (103)..(103): n is a, c, g, or t
ggggaaactcgtggaagccatcaacaacaanaaccaactagggggggngggaggngaaggccaaaggattgnattntaaagncccagaagaagcctaangggnaaggccaataagaaaggagg

SEQ ID NO: 229965 - DNA, 445 bp, Homo Sapiens
  misc_feature (26)..(26): n is a, c, g, or t
  misc_feature (189)..(189): n is a, c, g, or t
  misc_feature (210)..(210): n is a, c, g, or t
  misc_feature (260)..(260): n is a, c, g, or t
catgcctgbhggtcgactctagagbnahccccagtggtgttggkggtgatggaadagrgagcgaggaggaatgdgacwrgggcggcgggaraaacgrgcccggggcaamagtgagagtthgcgcrgagtggggtgggtagrgggarhtgkgkgrrwkyssaagagtrttccvcgsgawrtrhrtgdagnhtaggkagagttbraatmawngtagatmggbggtgttgygaggattatgcgtkttatgtgctttawrgwanwstgwgtacgthhgtgkcgwwtkygysckykttsctkgccaccccagarttckygtcttsckmggtgytgctgcsyctgccgcgattragagatsasmgkgtgagcgtgtgcrrcgtctccgccvsychtsssmagkwtgcyycgtkttgtkccgtcstcgtgcgtctcccccgtgamtggtgmm

SEQ ID NO: 229966 - DNA, 300 bp, Homo Sapiens
  misc_feature (25)..(25): n is a, c, g, or t
  misc_feature (34)..(34): n is a, c, g, or t
  misc_feature (39)..(39): n is a, c, g, or t
  misc_feature (57)..(57): n is a, c, g, or t
  misc_feature (60)..(60): n is a, c, g, or t
  misc_feature (62)..(62): n is a, c, g, or t
  misc_feature (70)..(70): n is a, c, g, or t
  misc_feature (85)..(85): n is a, c, g, or t
  misc_feature (106)..(106): n is a, c, g, or t
  misc_feature (133)..(133): n is a, c, g, or t
  misc_feature (150)..(150): n is a, c, g, or t
  misc_feature (190)..(190): n is a, c, g, or t
  misc_feature (213)..(214): n is a, c, g, or t
  misc_feature (229)..(229): n is a, c, g, or t
  misc_feature (250)..(251): n is a, c, g, or t
  misc_feature (256)..(257): n is a, c, g, or t
  misc_feature (271)..(271): n is a, c, g, or t
  misc_feature (286)..(286): n is a, c, g, or t
gtgtggaaggggtgttggcccacantggctggtncagcnaggataagaatggaaacnggngnatgtgacnggagggagacaggtnggtagatgccataccccaggnggatagacacctgcaggagaggagagnatacagtgtcccctggncataagccctaaaggctgaggtgctcaagcctgctcaagncatggccatactgcagatcctgnnacccaggccaacagntactcaggaagggaggggcgnntatcnnctgatgaatgtatntgcaaatcacagctntcccatctctgagg

SEQ ID NO: 229967 - DNA, 165 bp, Homo Sapiens
  misc_feature (38)..(38): n is a, c, g, or t
  misc_feature (42)..(42): n is a, c, g, or t
  misc_feature (102)..(102): n is a, c, g, or t
  misc_feature (110)..(110): n is a, c, g, or t
  misc_feature (117)..(117): n is a, c, g, or t
  misc_feature (126)..(126): n is a, c, g, or t
aggcaatattcttcctcatcaccaccaacaccactagngggngtaggtaggagatggcaggcgggatgaccaggagggcagcagccggacctggtgcagaanctaggacnagtgggngagcatgangatgaggccacgcgctatggcttagcagctgggccagat

SEQ ID NO: 229968 - DNA, 389 bp, Homo Sapiens
  misc_feature (79)..(79): n is a, c, g, or t
  misc_feature (82)..(82): n is a, c, g, or t
  misc_feature (101)..(102): n is a, c, g, or t
  misc_feature (273)..(273): n is a, c, g, or t
  misc_feature (283)..(283): n is a, c, g, or t
  misc_feature (295)..(295): n is a, c, g, or t
  misc_feature (324)..(324): n is a, c, g, or t
cttggtggctccccaaggaaacccctttgaaaccaatggatgcattcacgggctcgggtctcaagaggaagtttgatgnggnggatgtgggctcatcaggnnccaactcagatgatgagatctccagcagtgatagtgctgacagctgcgacagcctcaatcctcctaccactgcagcttcacacgtgagtaagctgctccatcaccaccaacaccactagtggtgttggtggtgatggatcctactcctggccgctgaatcctaatcctgtntctctgccangtcgttcctatntccagggtgggtttatgtcccccgcaganataacctcaagccagtaattctgttactgcttcggtcactgcaaaaggtcacgaagttcccttat

SEQ ID NO: 229969 - DNA, 710 bp, Homo Sapiens
  misc_feature (40)..(40): n is a, c, g, or t
  misc_feature (42)..(43): n is a, c, g, or t
  misc_feature (53)..(53): n is a, c, g, or t
  misc_feature (60)..(60): n is a, c, g, or t
  misc_feature (68)..(68): n is a, c, g, or t
  misc_feature (72)..(72): n is a, c, g, or t
  misc_feature (75)..(75): n is a, c, g, or t
  misc_feature (81)..(81): n is a, c, g, or t
  misc_feature (89)..(89): n is a, c, g, or t
  misc_feature (96)..(96): n is a, c, g, or t
  misc_feature (108)..(108): n is a, c, g, or t
  misc_feature (121)..(121): n is a, c, g, or t
  misc_feature (124)..(124): n is a, c, g, or t
  misc_feature (128)..(128): n is a, c, g, or t
  misc_feature (133)..(133): n is a, c, g, or t
  misc_feature (146)..(146): n is a, c, g, or t
  misc_feature (165)..(165): n is a, c, g, or t
  misc_feature (186)..(186): n is a, c, g, or t
  misc_feature (188)..(188): n is a, c, g, or t
  misc_feature (194)..(194): n is a, c, g, or t
  misc_feature (229)..(229): n is a, c, g, or t
  misc_feature (269)..(269): n is a, c, g, or t
  misc_feature (279)..(279): n is a, c, g, or t
  misc_feature (288)..(288): n is a, c, g, or t
  misc_feature (294)..(294): n is a, c, g, or t
  misc_feature (315)..(315): n is a, c, g, or t
  misc_feature (324)..(324): n is a, c, g, or t
  misc_feature (339)..(339): n is a, c, g, or t
  misc_feature (358)..(358): n is a, c, g, or t
  misc_feature (378)..(378): n is a, c, g, or t
  misc_feature (383)..(383): n is a, c, g, or t
  misc_feature (387)..(387): n is a, c, g, or t
  misc_feature (397)..(397): n is a, c, g, or t
  misc_feature (401)..(401): n is a, c, g, or t
  misc_feature (403)..(403): n is a, c, g, or t
  misc_feature (414)..(414): n is a, c, g, or t
  misc_feature (416)..(416): n is a, c, g, or t
  misc_feature (418)..(418): n is a, c, g, or t
  misc_feature (427)..(427): n is a, c, g, or t
  misc_feature (438)..(438): n is a, c, g, or t
  misc_feature (454)..(454): n is a, c, g, or t
  misc_feature (459)..(460): n is a, c, g, or t
  misc_feature (462)..(463): n is a, c, g, or t
  misc_feature (465)..(465): n is a, c, g, or t
  misc_feature (470)..(470): n is a, c, g, or t
  misc_feature (473)..(473): n is a, c, g, or t
  misc_feature (485)..(485): n is a, c, g, or t
  misc_feature (488)..(488): n is a, c, g, or t
  misc_feature (492)..(492): n is a, c, g, or t
  misc_feature (500)..(500): n is a, c, g, or t
  misc_feature (512)..(512): n is a, c, g, or t
  misc_feature (516)..(516): n is a, c, g, or t
  misc_feature (520)..(520): n is a, c, g, or t
  misc_feature (526)..(526): n is a, c, g, or t
  misc_feature (533)..(533): n is a, c, g, or t
  misc_feature (549)..(549): n is a, c, g, or t
  misc_feature (551)..(551): n is a, c, g, or t
  misc_feature (561)..(562): n is a, c, g, or t
  misc_feature (591)..(591): n is a, c, g, or t
  misc_feature (606)..(606): n is a, c, g, or t
  misc_feature (613)..(614): n is a, c, g, or t
  misc_feature (619)..(619): n is a, c, g, or t
  misc_feature (629)..(629): n is a, c, g, or t
  misc_feature (631)..(631): n is a, c, g, or t
  misc_feature (649)..(649): n is a, c, g, or t
  misc_feature (672)..(672): n is a, c, g, or t
  misc_feature (688)..(688): n is a, c, g, or t
tttaagggaaagtccttcctagaggtttcccagtggtgtncnnggtgatgtgntgatgangggaactncatngangacagnctatcacnttgtcantcttgacaggtncccatgtgacatntgngggnggatnggaatcatatgangaacatgtcgaccatgtantttaggtcaatgaaggcgtgntntgatgncaacaatatccactttaccacaagttaaaagcagncctgtgcgaccaggcgcccatcaccaccatcaccaactantggttgcgtnaggtcgatnggctgnattgcatacctttgtgctctntaacaagtnggatgactaaccacncacaaattattgcttgcanggaccatgaacatcctttgnatgtntaanctctcacgtngaantnctttcaactcntntntacgaaggngataccatganatacctacagaagctncccanntnnantaccnganaatcatcaaagnctncgtntacacagnatcccaaaaccnaaangtcncagccnaatgggntgacaccctataactntngactacacannatcgaatggcagtgtaaaatcatcaccancaacaccactagtgntgatggnngtganccatgtcctnangaacacatggaaggttanattttcttttaggctcaagtagnggtaagagaaaatctngagtttgatttcccaactaaag

SEQ ID NO: 229970 - DNA, 120 bp, Homo Sapiens
  misc_feature (26)..(26): n is a, c, g, or t
  misc_feature (48)..(48): n is a, c, g, or t
  misc_feature (64)..(64): n is a, c, g, or t
  misc_feature (73)..(73): n is a, c, g, or t
  misc_feature (78)..(78): n is a, c, g, or t
  misc_feature (87)..(87): n is a, c, g, or t
ggttccccgctgaccaacattttctnggcagctttttgactttgctgngctatttttcagagcnccggggggngcatncagactttnggggggggatttttctgtacttgagctggggac

SEQ ID NO: 229971 - DNA, 395 bp, Homo Sapiens
  misc_feature (75)..(75): n is a, c, g, or t
  misc_feature (86)..(86): n is a, c, g, or t
  misc_feature (89)..(89): n is a, c, g, or t
gcccgcctgcattcgactctagaggatccccagtggtgttggtggtgatgaccgaagaaaaactgcaccagctgnaacaggacatnggngcaaaccgaagcgcaacttgacgaactgatgcagcaactgagtgccacaatgcggcagttcgaacaacccttcagtgaagcccagagcgcactcgaccaagctgatgcccgatccagcgaattgcatcaacaacttgggacggagttcgaacaacacgagcaggcgcataaggatgccctcgcggcgttaccaggctgcatgcgcttctcgccacacgcaaaagcaccgctctctctggcagaagctcttgagtctgttcaggaagatgcccgaagaaatcgagctgaacaaggtcaccgcatcaa

SEQ ID NO: 229972 - DNA, 582 bp, Homo Sapiens
  misc_feature (30)..(30): n is a, c, g, or t
  misc_feature (33)..(33): n is a, c, g, or t
  misc_feature (47)..(47): n is a, c, g, or t
  misc_feature (52)..(52): n is a, c, g, or t
  misc_feature (59)..(59): n is a, c, g, or t
  misc_feature (72)..(73): n is a, c, g, or t
  misc_feature (77)..(77): n is a, c, g, or t
  misc_feature (80)..(80): n is a, c, g, or t
  misc_feature (82)..(82): n is a, c, g, or t
  misc_feature (88)..(88): n is a, c, g, or t
  misc_feature (108)..(108): n is a, c, g, or t
  misc_feature (121)..(121): n is a, c, g, or t
  misc_feature (133)..(133): n is a, c, g, or t
  misc_feature (140)..(140): n is a, c, g, or t
  misc_feature (149)..(149): n is a, c, g, or t
  misc_feature (156)..(156): n is a, c, g, or t
  misc_feature (160)..(160): n is a, c, g, or t
  misc_feature (169)..(169): n is a, c, g, or t
  misc_feature (176)..(176): n is a, c, g, or t
  misc_feature (180)..(180): n is a, c, g, or t
  misc_feature (188)..(188): n is a, c, g, or t
  misc_feature (201)..(201): n is a, c, g, or t
  misc_feature (203)..(203): n is a, c, g, or t
  misc_feature (206)..(206): n is a, c, g, or t
  misc_feature (208)..(208): n is a, c, g, or t
  misc_feature (211)..(211): n is a, c, g, or t
  misc_feature (217)..(217): n is a, c, g, or t
  misc_feature (220)..(220): n is a, c, g, or t
  misc_feature (229)..(229): n is a, c, g, or t
  misc_feature (236)..(236): n is a, c, g, or t
  misc_feature (238)..(238): n is a, c, g, or t
  misc_feature (259)..(259): n is a, c, g, or t
  misc_feature (264)..(265): n is a, c, g, or t
  misc_feature (278)..(278): n is a, c, g, or t
  misc_feature (283)..(283): n is a, c, g, or t
  misc_feature (287)..(287): n is a, c, g, or t
  misc_feature (295)..(295): n is a, c, g, or t
  misc_feature (307)..(307): n is a, c, g, or t
  misc_feature (319)..(319): n is a, c, g, or t
  misc_feature (325)..(325): n is a, c, g, or t
  misc_feature (329)..(329): n is a, c, g, or t
  misc_feature (332)..(333): n is a, c, g, or t
  misc_feature (346)..(346): n is a, c, g, or t
  misc_feature (352)..(352): n is a, c, g, or t
  misc_feature (389)..(389): n is a, c, g, or t
  misc_feature (396)..(396): n is a, c, g, or t
  misc_feature (400)..(400): n is a, c, g, or t
  misc_feature (407)..(407): n is a, c, g, or t
  misc_feature (441)..(441): n is a, c, g, or t
  misc_feature (447)..(448): n is a, c, g, or t
  misc_feature (450)..(450): n is a, c, g, or t
  misc_feature (455)..(455): n is a, c, g, or t
  misc_feature (457)..(457): n is a, c, g, or t
  misc_feature (460)..(460): n is a, c, g, or t
  misc_feature (470)..(471): n is a, c, g, or t
  misc_feature (476)..(476): n is a, c, g, or t
  misc_feature (478)..(478): n is a, c, g, or t
  misc_feature (490)..(490): n is a, c, g, or t
  misc_feature (493)..(493): n is a, c, g, or t
  misc_feature (497)..(497): n is a, c, g, or t
  misc_feature (502)..(502): n is a, c, g, or t
  misc_feature (506)..(506): n is a, c, g, or t
  misc_feature (508)..(508): n is a, c, g, or t
  misc_feature (515)..(515): n is a, c, g, or t
  misc_feature (529)..(529): n is a, c, g, or t
  misc_feature (542)..(542): n is a, c, g, or t
  misc_feature (545)..(545): n is a, c, g, or t
  misc_feature (549)..(549): n is a, c, g, or t
  misc_feature (558)..(558): n is a, c, g, or t
ccgtgaaagtgttcgggaggcatcggtgantantcaccaggttgagnttgtntggattngagtttggatggnntagngangncgaatnggaactttggctatctagangggggaagcgtanttactcttatgngtacaangggtaaacnttaaganctanggcaaattnctcatcngtantgcaaacntagtacatagganantgngncanactttnaanccgtaatgnataaatnantgggtgttgcttggacggaantgttnnaagcgacattggnaaatnaggnaattggcnagctacgaaagngtaggaacgatnattttngacngannttgccatgcaccnccaggngggctaatgaccgaaatccaagcaggaccttctattngacccanttgnaaactangcctaccaaattaagtaagcctcaatgggatagnaaagtnngnaaagnangtnttagaaaatnnttcananagtggaagggtntanaaanggccnaaangnttttggnaaacgggtttaaancaaagggcaggancanaaanggaaggaancattttcctaaaggggttttttaa

SEQ ID NO: 229973 - DNA, 246 bp, Homo Sapiens
  misc_feature (32)..(32): n is a, c, g, or t
  misc_feature (39)..(39): n is a, c, g, or t
  misc_feature (44)..(44): n is a, c, g, or t
  misc_feature (50)..(50): n is a, c, g, or t
  misc_feature (68)..(68): n is a, c, g, or t
  misc_feature (78)..(78): n is a, c, g, or t
  misc_feature (83)..(83): n is a, c, g, or t
  misc_feature (96)..(96): n is a, c, g, or t
  misc_feature (104)..(104): n is a, c, g, or t
  misc_feature (106)..(106): n is a, c, g, or t
  misc_feature (109)..(109): n is a, c, g, or t
  misc_feature (116)..(116): n is a, c, g, or t
  misc_feature (121)..(121): n is a, c, g, or t
  misc_feature (137)..(137): n is a, c, g, or t
  misc_feature (147)..(147): n is a, c, g, or t
  misc_feature (160)..(160): n is a, c, g, or t
  misc_feature (174)..(174): n is a, c, g, or t
  misc_feature (176)..(176): n is a, c, g, or t
  misc_feature (221)..(221): n is a, c, g, or t
tagttgatcggactttagagaccccccaatgngagtacnagggntcgagngagcctaagaggagagcnataaggcagnttggngcccacaacagantgatcacngntgntaagganctggnccttctcctctggcanagaccttgtnccaactcgatgcnataagccagccaantntaacgactatctggagacttgaacttacagtgccccatagacatncatcctaaagcatttgcagatacat

SEQ ID NO: 229974 - DNA, 280 bp, Homo Sapiens
  misc_feature (32)..(32): n is a, c, g, or t
  misc_feature (61)..(61): n is a, c, g, or t
  misc_feature (65)..(70): n is a, c, g, or t
  misc_feature (84)..(84): n is a, c, g, or t
  misc_feature (87)..(89): n is a, c, g, or t
  misc_feature (93)..(94): n is a, c, g, or t
  misc_feature (104)..(104): n is a, c, g, or t
  misc_feature (112)..(112): n is a, c, g, or t
  misc_feature (115)..(115): n is a, c, g, or t
  misc_feature (117)..(117): n is a, c, g, or t
  misc_feature (124)..(124): n is a, c, g, or t
  misc_feature (134)..(136): n is a, c, g, or t
  misc_feature (138)..(138): n is a, c, g, or t
  misc_feature (153)..(153): n is a, c, g, or t
  misc_feature (164)..(164): n is a, c, g, or t
  misc_feature (171)..(171): n is a, c, g, or t
  misc_feature (173)..(173): n is a, c, g, or t
  misc_feature (178)..(178): n is a, c, g, or t
  misc_feature (186)..(186): n is a, c, g, or t
  misc_feature (194)..(194): n is a, c, g, or t
  misc_feature (203)..(204): n is a, c, g, or t
  misc_feature (213)..(213): n is a, c, g, or t
  misc_feature (218)..(218): n is a, c, g, or t
  misc_feature (224)..(224): n is a, c, g, or t
  misc_feature (233)..(233): n is a, c, g, or t
  misc_feature (237)..(238): n is a, c, g, or t
  misc_feature (249)..(249): n is a, c, g, or t
  misc_feature (254)..(254): n is a, c, g, or t
tttttaccaagagcccgaattcgagctcgggnacccagtggttgttaggtcggtgaaggcncgcnnnnnnctgtaaacgggganagnnnacanntacctgaaantcagctgnatnanaaggatnttagactctnnngnaattatcaaattcanggttattagcnaagtcanantttcntgcttagncacagganctaatctgnngctgatgangctgnctcttncaaaatgcngccnnagctaggcatngaatncggcttactatgctgtgcaatcaaca

SEQ ID NO: 229975 - DNA, 228 bp, Homo Sapiens
  misc_feature (27)..(27): n is a, c, g, or t
  misc_feature (34)..(34): n is a, c, g, or t
  misc_feature (61)..(61): n is a, c, g, or t
  misc_feature (63)..(63): n is a, c, g, or t
  misc_feature (72)..(72): n is a, c, g, or t
  misc_feature (75)..(75): n is a, c, g, or t
  misc_feature (99)..(99): n is a, c, g, or t
  misc_feature (106)..(106): n is a, c, g, or t
  misc_feature (125)..(125): n is a, c, g, or t
  misc_feature (182)..(182): n is a, c, g, or t
  misc_feature (184)..(184): n is a, c, g, or t
  misc_feature (193)..(193): n is a, c, g, or t
  misc_feature (201)..(201): n is a, c, g, or t
gagggccggaagatggggcagacgacngaagcanggccagggtcacaccccccaaggtcancntcagcagcnagncagggcgcatggcgtccaggaggnggatggnggccatcttgccagctgantggactgggcagagagccggcgggaggccaatgcgctgcgcacagaggaggccaggncnacatcgganagggaganctcagagaggggttgaagcacactgga

SEQ ID NO: 229976 - DNA, 623 bp, Homo Sapiens
  misc_feature (80)..(160): n is a, c, g, or t
  misc_feature (225)..(288): n is a, c, g, or t
  misc_feature (290)..(403): n is a, c, g, or t
  misc_feature (449)..(512): n is a, c, g, or t
caataaattccaaccgagactgttcctttcgtgtccattctatttgactgcattccatttgagtccattaaatttctgcnnnnnnnnnnnnnnnnnnnnnnnnnnnnnnnnnnnnnnnnnnnnnnnnnnnnnnnnnnnnnnnnnnnnnnnnnnnnnnnnncatttgagtccattccattgattcgatgccattacattcaattctattccattcgactccattgnnnnnnnnnnnnnnnnnnnnnnnnnnnnnnnnnnnnnnnnnnnnnnnnnnnnnnnnnnnnnnnncnnnnnnnnnnnnnnnnnnnnnnnnnnnnnnnnnnnnnnnnnnnnnnnnnnnnnnnnnnnnnnnnnnnnnnnnnnnnnnnnnnnnnnnnnnnnnnnnnnnnnnnnnnnnnnnnnncgatatctttcgataacaccccattccattctgctccttagtattnnnnnnnnnnnnnnnnnnnnnnnnnnnnnnnnnnnnnnnnnnnnnnnnnnnnnnnnnnnnnnnntcgactttattccattcgagtccatttcattccattccattgcattccggtcgaaatcctatttcattccattttgttactgtccattccatttgagttcattccacgccc

SEQ ID NO: 229977 - DNA, 554 bp, Homo Sapiens
ggacagcaacccggaccacaccgcaaagttcggcctcacccaagaattcaacacgactcctcgtttacaacctgagctgcccggctatcgtagacaccccgactcctaccaacaacaacaccaactccagccccagcggttctcccaccagcctccccagcaacggcaccacgaacggcaacggaacaagccccagcggcactcccagcagcaccccggctggagaaggcgctggaagcatcacctcggtctcgatggttaacgcttgcgccattgctctgtccatggtcttcgctgtggcaacctgggcggtctaagtcattgaaacattcgagctcgacggctgtgcacctttatctggatagacttgttgattcagtacaatcctgtattaatagtggcgtcttttagaaaaacctgacaccaaattgaatttacatgaaaagtgaagaagatatagtctgagcatgatgcgtattcatgagccatctgattatcccatttaatgttctcactgaagtccaagtcacctgatcctcttcgtggatcgattt

SEQ ID NO: 229978 - DNA, 427 bp, Homo Sapiens
agacggcagtgcgggtgactctgcagcgttgcaggccctcctaccttgtggtcctgtgtcctgcggtgttggatcaggtcccccatgtagtagagctggcaggtgttgcaccagcgccttggtggaggctcctcatcctctgtctccaggacgtcccggggcacgggcagcagggacaggaggcaggcttggctcgtgtgctggatctcctcttgccgccgttcctaggaacggcggcaagaggcatttacagcaacagcagttccttcagaggcaactgcaaccttctcgcggaacaggagaagcaacagtttcagcgccatctgaccccgcccaccaccccagtaccaagaaccgacacaaggcagcttcccacagcaggttggacagttcacagggtcctctgctgccgtgcccggcattaaca

SEQ ID NO: 229979 - DNA, 237 bp, Homo Sapiens
ggtcccatgggtgcctgtggcgactggacgttcccccaagccacaggggtaaaaagattcatcccttgagaaactagcttgcgatcactggcaggacagggggtcattttgaagtcttaacagttgggcttgggaaatacaggggcttgacccccgggcttgtaaggttggctgttcccagatgcttggtattgaacgcagactccgtttccgcagacttgtaccgggcctcattta

SEQ ID NO: 229980 - DNA, 107 bp, Homo Sapiens
aagtgcgtgttgcatcgtaagtattggtgccgtcagcacctatcacgcctggagcgccatgggcgctgatatacagggtgggtaattttccgtccggtcgttcttgc

SEQ ID NO: 229981 - DNA, 864 bp, Homo Sapiens
atcctagggttgatacactgtcgactgcgaggaatgtcctagttgcaatttcgaggatgcccctggactgtccccgagactgacggatgacccttctggaacctgcaaagccaagatacagccagcatagccttcactggatacctagccctgggagtccattgacactgcgactgcacacccgaactgcattagccaactctatatctacgaactactgcggtgattactgccaacaacacagtcttgtgagcaagcaacgaacggcttgctataacgcggcctcagcttaggagaccgcagattctttgaacgcgaccggtcttagtgctcctaccataaccaatggcactccgccagatgggagacacacgatgcagcccggacaggaacccttgtcagacaggctcacccactgtgcacagagatggctagttcaaaaacgacaccctctcgtttgttagcacttacaagttaccttttgatgtccagggtggacacggtttaaacattcctgatcccgggtttcttttccacgcggaaaatcttttactgcccccacagggaaggggcgtaattcctcccgaattgggaaccagccttcaataggactgcgtggcaacccgaaaccagcttttagacccgggccccgctttccgccggcttcgatccgggggaagacggatcccattttgttccttgtttaacaacccggctgaattcaatccgagggcgccggaattgcattactaaggcttggccccggaattttttcttgggggccgggcaacccgctgacctggccacgggtgtataattgccaatttccttccaaagtgtcattacgcccctttggcatttttg

SEQ ID NO: 229982 - DNA, 194 bp, Homo Sapiens
aattccgtcgaactccgccacgataggtccgcgataggtcttgttgacgaatagcttacgaatgaactcgaaagcgtgccccgtcggatcacggcggttgatcgggtcgcaaagagcaaatgagtaggtattcaaccctccttttgcgaatgggctgtcgctgtctggactgttgaaaccccagaagaagaggg

SEQ ID NO: 229983 - DNA, 531 bp, Homo Sapiens
ggagcccgttgacgatcgttggcgaagttaccgccagaggccttgccgcccttttggccagcgcgcgaagcccgttcccggtcattggcgaagttgcctgggttggtttccttggtgccgccgcgctggcggtttcgctcttggtcttgcgccatgtcgtttctccttgcgatggggtcgctggtcgcatgaatctttgccatgcctagcttccgagcctctgaatgatgagtctgctcaatggctttgccggcagctgaccaatggcacgaaactcaggcatgcacactccactgaacggcctccaccccgatcggcatttcgtcaatggcatcaatcagcccgttctccattgcctcgcgtggccctagaatccgcggataggccatcaggtagcgtggcacatccagcacctcggctgccccctcggtccgctcggtgacgatctgcgcatagagccgcaaatcgaaatccaggctcatcgcatactcgggcatccgtgaatggtccaccgaaccatgcgaaggccag

SEQ ID NO: 229984 - DNA, 120 bp, Homo Sapiens
caccgcccgcggcaccggtttgccggctttggcatccgccagggcaaataccccgctgcatagcttgctgtcctcaaatgcctggctgtcgccctcttccagctggctgcgaatctgcgg

SEQ ID NO: 229985 - DNA, 160 bp, Homo Sapiens
agcccaacttcaccccgagcttgcgcgccgcgagctcagtggtgcctggcatgatcgaactcggcgcgatcaagtcaccgtccagcgccagcggcgcactcgtcaccctgctcaacgccgcctggaacgccgcattgcggctggcgtaccagcccgcgtt

SEQ ID NO: 229986 - DNA, 505 bp, Homo Sapiens
  misc_feature (119)..(336): n is a, c, g, or t
cctgtgtctggactttttagaatttccaagagctgctgtttctggaaccagattaatacaagtcagtcttccatttatttatttatgtatttatttgagacagggtctcactctgtcannnnnnnnnnnnnnnnnnnnnnnnnnnnnnnnnnnnnnnnnnnnnnnnnnnnnnnnnnnnnnnnnnnnnnnnnnnnnnnnnnnnnnnnnnnnnnnnnnnnnnnnnnnnnnnnnnnnnnnnnnnnnnnnnnnnnnnnnnnnnnnnnnnnnnnnnnnnnnnnnnnnnnnnnnnnnnnnnnnnnnnnnnnnnnnnnnnnnnnnnnnnnnnnnnnnnnnnnncactctttccatttaacatgctaacttcaacattcaaaataaaactttaaaaatcttttagaataatgaggctggcatttttacttaaaaacgaatctttttacttttttcaggaaccggccctattccttattaaatatggtggggtccttccaaacctggaagaagt

SEQ ID NO: 229987 - DNA, 210 bp, Homo Sapiens
tttaccggcgccatgcggacgagttcaccccgaccatgacggccctggtcaagatgaaaacccgggggggcgagcaggaggtgcgggtattcagtcttcgtggcgccatttgcttggcatgtttgcgcgcacggaacgggccaaagctttccggcgaaaagtcctcgatgtgctggatgagcaagcgcgccagggacagtcgcttggcgt

SEQ ID NO: 229988 - DNA, 223 bp, Homo Sapiens
taggctcaacggggtaggcgtgactagaagacaaggagacgggcatggccgggttgatggattcggttaaccagcgcacgcagctggtggggcaaaaccgcttggagctgttgctgtttcgcctggaaggcccgcagctatacggtatcaacgtattcaaggttgaaagaaggtgctgcagtgcccgaatctcaccatcatgcccaagtccagccaggtggtg

SEQ ID NO: 229989 - DNA, 185 bp, Homo Sapiens
ccacttcggactgcggcgcaacgctgccgagaaagcgcgaacgaacggagcgaggtcgtgattgaggatcgcctcggccatttgcgatcggcacgagttaccggtgcagagtaccaaaacccgtttcatgcggtgtatagaaccgctgagctgggtgcccggcgcgattgtattgaagacggtac

SEQ ID NO: 229990 - DNA, 162 bp, Homo Sapiens
ccggccgtttcgttgacctcttcaccaccatcaaggccgcacttcttcggggtcaacgggattggtctgaaggtcgttgccaacgccggcgccgggttctcctggcgtgacccggacccgggtggcctcaactcccagacctggtgggacctcgccgtccat

SEQ ID NO: 229991 - DNA, 233 bp, Homo Sapiens
  misc_feature (54)..(54): n is a, c, g, or t
  misc_feature (82)..(83): n is a, c, g, or t
tggtgccgctctacgagacctgcggcaagaagtacgtgtcgccgacactggcgntggagctggccaacgccatcaccgacgnnagcgagcgcccgccgcacgaaaagctgtctgaccgcgagtaccagacgctggtgatgatcgcgtcgggcaagacgctgacgcagatcggcgaagaactgaatctgagcgtcaagacggtcagcgtctatcgcgcccggttgctggagaag

SEQ ID NO: 229992 - DNA, 440 bp, Homo Sapiens
caaggtccaggcgctgttggttcatccggtcggtgatgccgttctgctggtcctgcaggctacgctgacgatcgccgagaccaaggccgtcagcggaacgcttcccctgcagccttagcgccaggacctgctggtcgagggcatcggtgtaggtctgcacggccctggcctgtttggccagccggccctgctcattggtcgccagcaccgagagctcggtatcagcgtccttctgcgccttgaccatggcagcgcgggcatccgcgattttctggtcaagctggatgcgctgctgggcgctggtactgctgcgccccttggcctcctccagtgccgtgatctcggcctcgtaggcgttcgtgacctcggccttctgctgctcgatgattgcggcgcgctgggcggcgtacgactcctgtgagatcaagccggccttctgc

SEQ ID NO: 229993 - DNA, 207 bp, Homo Sapiens
gtctctctcgagcatttcttaatgtcctcgataatgctgctaagtggagtccagagaacggcacagtaacaatgacgatgcagcaaattgatgatgatcgagttgagattaccgtcgacgatgaaggaccaggtattccagctgatgaacgcgaactcgtttttgaacgtttctgtaggtctgtagagtcgcgcgcaatgccaggat

SEQ ID NO: 229994 - DNA, 293 bp, Homo Sapiens
gtgtactgagatgaatcaggagtgcccataaattgatggcatagaaatacccaaacagttctgcgggtacaagtaagctggtcttcgccagaccttgctgatgtgcagagcttgcgagtaaagcattggttggtcccggaatcatcaagacagcaatcattgccaatacaaacagccaactctcaatcattgacatccaacaacagcattaaagatgcgcaatttagccgaaaaagagtggcttcctcaagtcaaagcggaaaaaaacacagaacccatgaggtagaaaagcg

SEQ ID NO: 229995 - DNA, 395 bp, Homo Sapiens
ccctgtggttggacccagggatggccccttttttcatgggaccaaaccagagatcccaaaattggccccacacatttatgatccagtggaatttagaacacaggtccaaaggcaacccaatagagaaggcttagtctctcatcgaatggtttagaaaccaatgggcttatactatttgcaaaaaacgattattaataccttcataaagaaaataccccaaaagtgggtcatagtctaaaattgtaacttgtaaactaataacgcttctggaagacaccataagagacactcttggtgaccctgggtaagataaatattcctaaattaataccatataaggcataacccaggaattaaaactttgataaccttggttaacattcaaaaccttctgc

SEQ ID NO: 229996 - DNA, 303 bp, Homo Sapiens
atgaagttgtggggagcttagtgtctgtacagggtccgatgcagaaaaggggaaggaggaaatcagagttccccaaatggggttttatcagatctcagggaagttggtatcatgcttcttatcaaggccaacccataggattacggtagggaggcaaaatcccaggcttttcagaagtggatccttaggaaaggaaagtagggggaaggtgcctaagtcactcagggtaaatggaggaaatggggcatcactgcacattcagacagcacctgcatggaaagtacaggcaggtaaaccttgggg

SEQ ID NO: 229997 - DNA, 217 bp, Homo Sapiens
  misc_feature (58)..(154): n is a, c, g, or t
gccgttatatacaacagaggggtgaaaatgaatgtatgacaacgtatctggtccagcnnnnnnnnnnnnnnnnnnnnnnnnnnnnnnnnnnnnnnnnnnnnnnnnnnnnnnnnnnnnnnnnnnnnnnnnnnnnnnnnnnnnnnnnnnnnnnnnntgggtgcctcgacctgttcaccgaacactttaaggaaacctgccttaaaagatagacttctag

SEQ ID NO: 229998 - DNA, 637 bp, Homo Sapiens
caccacccaacccctagcgaggcgcacaggataaccgatgtatatgtaatgtacctaagcacagtatctacttctcctatatccatcctgcaagcaactcaaaatataaaaaataaagtatacatggtagtaatatacaaatctttgcttgataagtattaagaaatatagggacttgctagccgtaatttaaacgctctagttgatttatgcttcccgttatggatataatggaggggagcgggagcactagtagatttatgcctggaaataatgaacagtctaagaaccattccgatgactgggaaacaccacaagaagttgcttgaaacgctatgaacaagccaggactgacgccatgatcctctgaatgcctattggtataccatatcctttgacgccaatcagctacgagtcccgtagagacaaatcaaaccaagtattataaccaaaagaacgacgcaactcccctagggggaatccttctaagaagtcggaccctgcatgcgcatagccacgctttgcgcaacttgggccggccgttataaccaactatacatagactgagggaaaaccgctgaagagggacccccccatgaccaggtccccccaccaccaccctgccgcaccagcaccg

SEQ ID NO: 229999 - DNA, 491 bp, Homo Sapiens
gtagatgaccatatgaggggacaacaacacatgggctatgcgaaaatgaaagctagtgtagaagatttcgaggaaaagttaaggaaaagccccgaagaagcggatcgggatgagcgtctacaaagggagaagcaagaaagagcagagagagaaaacgaaggggagaggaaaagggaagacagacaagggaacaggcgaggggacgacggccgaccgagaacgagaacgggctcgtgacagagaccgcagacagagaagtcgtccggaagtacacgtccggcgaacctcggcaaagacgcgcagtctcgggcccacaaggtccgaggtgagacgcggggaccgtaggatggcgagagcgaagccgatcgtcgaaggaaacgttcagtgggtcagaaataagacgatgagtcatgacggaaaagggccctgggggcgtgcaacaaggggaaccggggaggggccatgagagggggaatgacatagggatgtga

SEQ ID NO: 230000 - DNA, 377 bp, Homo Sapiens
cctaccggacccccacataaattcttctccttctaatcctgacaattattgacctggacaaacctaattaactcttaggtgctggaactcaagtgaatgctactgcccaagtgaggctgactgggtctcactttaaatggatcacaaatattgagccctcagcaagtctatcaatccttttacatttttcctaagttagctctcctatacctacctcatctctgaaggttctccctcactcttgaggtgatgaccttcagaaatgagatgttgccaggaacatctcatttcttgtggagttatatcacaagtatccattccgtgttacctattgcaagagatgagatgttgggaggcgaaatgagatgttggacggc

SEQ ID NO: 230001 - DNA, 372 bp, Homo Sapiens
ataccgtatccttagatcatatctttatatgtatagcagactctattcatgtgctcagagatggcggggatactgtatactgttaatctatctgtcagagacttactataacacgaagtcatctgatcggaatcctgctacctgctaaccatatgattgtatattgtataatgtcttacatcagataatgctaataatgtttgctgatttcatatgttaaagagctataaattccaacaaccaactggtgtgtaaaactaatttaaaatttcctttactgaaaggtatattcccattattgtggggaaaagaagccaaatatattactatgtgtaagagtaattaaaatattaagaaatgagatgtaggaag

SEQ ID NO: 230002 - DNA, 239 bp, Homo Sapiens
  misc_feature (137)..(159): n is a, c, g, or t
tcccgtacgggaagctctaacaggcttcatcagatcttcggggctgaacccatcatacaccatagtgtggttgaagatagggatggagggctaccctacggctcaggtcatctggcgagttatcctacttgtatctnnnnnnnnnnnnnnnnnnnnnnnacagaatatatcttgactaccccttaagcagtgatatatcctttcatacccttcacccagatatgcactactccagtaat

SEQ ID NO: 230003 - DNA, 583 bp, Homo Sapiens
  misc_feature (135)..(372): n is a, c, g, or t
  misc_feature (379)..(409): n is a, c, g, or t
cctttcaacatctcatttctgaaacttcaaaaagtgtaaactctgctcagtataaagtgtaaactctgctcagtatagttagattaagaaagcaatgtaacatgcatttagaacactttaaaaagtgatcagtannnnnnnnnnnnnnnnnnnnnnnnnnnnnnnnnnnnnnnnnnnnnnnnnnnnnnnnnnnnnnnnnnnnnnnnnnnnnnnnnnnnnnnnnnnnnnnnnnnnnnnnnnnnnnnnnnnnnnnnnnnnnnnnnnnnnnnnnnnnnnnnnnnnnnnnnnnnnnnnnnnnnnnnnnnnnnnnnnnnnnnnnnnnnnnnnnnnnnnnnnnnnnnnnnnnnnnnnnnnnnnnnnnnnnnnnnnnnnaagtctnnnnnnnnnnnnnnnnnnnnnnnnnnnnnnncaatagcttacacttattgagcacttaacatgtttgatcacagtaataaatactttaaataattataaaagctaacatttattgcgtactcactatgtgcagagaattaccttttttaatcctcccaattctatgaaactatccacattttacagatgaggaatccgagggtta

SEQ ID NO: 230004 - DNA, 130 bp, Homo Sapiens
  misc_feature (45)..(66): n is a, c, g, or t
aagttagggactacatacaggtgctcgccactgtgcctggctaannnnnnnnnnnnnnnnnnnnnnggaaaaattggagtccccgctatgtgttcacagggacgtgctctcaaactcttgcccccagggt

SEQ ID NO: 230005 - DNA, 257 bp, Homo Sapiens
  misc_feature (158)..(170): n is a, c, g, or t
cccttcaacatctcatttctcgtccgggtgtctctgggtcctgctgcaggctgacttcatgtccaggcccctctctgttccagttctgtgggctgcccactgtgtctttgaccccaaagtgttttccaactttcttccatttccagatcttcatgtannnnnnnnnnnnnggaaacgaattctcattcagtcgcccaggttggatttaaggggtgcactcttggtccatggcaagccccgctcctggggtccaccgc

SEQ ID NO: 230006 - DNA, 148 bp, Homo Sapiens
tatatcatttctcacctaatgttcttcacatccatagctatcaccacagcaaatccatagattttggtaaacattaaagcagcgctaggttttcaaattactatcattcattatgatctttgttttgtatgaaatgttgaaatgtttg

SEQ ID NO: 230007 - DNA, 570 bp, Homo Sapiens
aatatcatttctgttctcagagaatgttgcttggaggaagtgacattaactctgagaacagaatgaaggagaaggaaccaaacatatcaagaactctctaaacagagggagaggcctgaagtggaaataatttaaaatattgctctggctgctgtttggtgaaatgattgaaaggaggtcaagcatggaaatcctggaaccagtttggaggctactacaacaggctttctagtgcagataagaactttgaatcagatggcagcagtacaaatggagagaaatgagatgtaggaaggccttccaacatctcattactatttataactttcttaagaagcagaaagttataaatggaaatgagtgtatcctatttcaaaagcggaatatcaggagcagaggggacactaaggtatgtaacccaactgagtaagtgagtgctgtatatgaaagttcatttctaaggtaccagtagcacataccaggaagtagtagcaggaaaggtaagttggaggatatgacatctgctgagacctgaagcacgaaagccagtgtgtaaagcaagaaaatgag

SEQ ID NO: 230008 - DNA, 165 bp, Homo Sapiens
ggtccatgtaagcagaggccaccagcgacaccctcaggccacaaaacgcactgaagaatcaacaggaaactcctgaacacaccacttccccatccttccgcctcgcaccgcccctcagaccagctcctggccgcaggcctcccccagcccccaacccttgtcctg

SEQ ID NO: 230009 - DNA, 177 bp, Homo Sapiens
  misc_feature (75)..(117): n is a, c, g, or t
  misc_feature (127)..(127): n is a, c, g, or t
gtcagctcggtcccagtggttacagaggcccaggaatttgaggctataagtgtgtatgattgtgccagtgaatannnnnnnnnnnnnnnnnnnnnnnnnnnnnnnnnnnnnnnnnnnccttaaagangcgtatctgctgtcgtctgaagtttgcgtattttaatcaccaacttaact

SEQ ID NO: 230010 - DNA, 257 bp, Homo Sapiens
ggatataatttattaggtgttttactggggctaactatattttcgatacgtgatccagaagtttttcaaaacttggtactttatttacaacaaccgcaatttatcagcatcattttaatcatgtttttggtgctggcgattcctttgtatctgagtacttattgcttttatgcaaacaagcccagcgattggaggcaaaatggttggatctaaataatcctggagcttcccttttttggcggttaagccatggacaa

SEQ ID NO: 230011 - DNA, 127 bp, Homo Sapiens
  misc_feature (60)..(60): n is a, c, g, or t
tgtttcgactccagttgccaaaactcaacagaatattgtcgatgcctgtctggaaatggngcctgaactggctcaatttcccatcgtcaaacaatgggcgggactacgaccaagctctccaacaggt

SEQ ID NO: 230012 - DNA, 272 bp, Homo Sapiens
ggtgctgttcctgatgtagacaatctatggatgaatgttgggcatttccgtaatggtttatgtatgggacctgcttctgcacagttgtttagctcagttaatgctagagcaacccacattaaccgacccagcaccatactcccctgaacgcctaaagacagaacagttggtcatgggctaaacgacaaaaaggcaagcttcaagatttatttagattcaaacattttggctgccatacgctgggcttgtttgccatataaccaataggtaat

SEQ ID NO: 230013 - DNA, 357 bp, Homo Sapiens
tatttcctgggcatctaaatagaattccaagtctttcaatcgattaggatttgaatggtcaatcaataccaccgtccccattgcacctttacaaacgattgtccacataaagtcaaaacggtcttgaccaggtgtactgtaaagaccaatcttggtaccatcttctaaactgatttcaccgtaatcaattccgacagtggttaaatatttactatgtgcatctaaatctgtatttacagcttcagtgctaacaactggaatatctgatagggatttaattgccgcagttttacctgcccccatcgttccaccaaaaacaattttgtattgttgaagaatcataaaaatgccacataa

SEQ ID NO: 230014 - DNA, 106 bp, Homo Sapiens
ctcagcaccggtccgttccagactttccggccaactgatcggttgccgcaatttacgttgcagttcgtcgagccgcttgacggcccgacggtaggcgccgggcacc

SEQ ID NO: 230015 - DNA, 387 bp, Homo Sapiens
  misc_feature (104)..(104): n is a, c, g, or t
  misc_feature (369)..(369): n is a, c, g, or t
ttactgccaaaacttgatctgcatgaacttgagccacagcgcggaaaccgtcatctggtttggtggcgctgaaagtaatcttgcacggctcgcgaacgctctantggaaagagtaacccacgatttccgctgaaatgctctgaaatgcgattgtgacggaatttttttcaaaaattttttcggcaggtttgacggaaatgatggcgtaaaattacgctccggcgatgaaccggtcatcggctccgagggcgaccatcgcagcccgcgccgattccgccatcaaccgcttcgccttaagcacattccgacctcgaccggtcggctgccagggtccctctcgccgcaccttcggtgccggagccggtgcanccttgatgttgatcggag

SEQ ID NO: 230016 - DNA, 122 bp, Homo Sapiens
tctgcccatcgcgggaaccactggcaggcctctatctcgaaggaggcctcttcccgataggtgccacacagtccggcacaggcgcgtgggcagcgatccaaagccaacccggtgtagaaggg

SEQ ID NO: 230017 - DNA, 484 bp, Homo Sapiens
tggagggcccgcccggcgccgatcaccggatggccatggaacggtaagctgacggagctgatccgccaggccggtggggtcatacccgaggagcggggcggcgacccgactccgtcgcccttcgtcccgcaccatgacgccacggctcagccgactccgtctcagcccactgtcatcaacgatgacacggttcccatcgatgacatcgaggatccgctggggagcatcgatgtctagggatgagatagaccagcaggtggccgccgagggccatttcatgcagtcggtgtattccctcctggtccgaatgggggtggatccccacggtctggtgggcggctacgatgatgaggagacgggcgggcacgtgtccctcgccatcccctcatctcaggtggggatatccgtggagggtgatcgtccccagcccctcatcgatgccggatggtacatcgtgccgatgcagataggccaactggaggca

SEQ ID NO: 230018 - DNA, 409 bp, Homo Sapiens
gaccacggcgatccacggcggcgacgaagttgttcggagcatcatcgacggcgaccgggatcaggatgaaaatgggggaggcgatgaagggctgaccatgcttcgctgagattgcggcgagacgtatgctgccgtagaatcgttgctcatccgatgtgagcagcgtccgattcttcattgggactccttcgctaactgactaatagtagtctatacgcaggaagccggcctgtctaccgatgcgctgagccaattggaaaccggatcatgtctccttcttaggcggtggctcctgttccctgatgatgccctgcaccttgcccagtctcatgatccagtccagatccgcgaatcggtcccaccagccacggcagatcgcgttctgttgcggctcggggtaccgagctcg

SEQ ID NO: 230019 - DNA, 216 bp, Homo Sapiens
cgtgtcatgaagatgtgcacgacgtacgagcttcctcgtcgtcgactcatgaaatttgtgaacaagctgctggcaaacctcactgatgctaggagtggagatcttgatgaccgtattatcaacaccctgacgaggattgtcccgtcgttgtgagttcgtggcctgcggcagcattttcgtgccgccaagcctgaagttaggtaacccaaagtacca

SEQ ID NO: 230020 - DNA, 325 bp, Homo Sapiens
tcgggcggtaaccaagcggcgacgaaatagtgctggatcatcgcgagccacccatcctgcgcttggctcagatggtccgctttgccttccgggatcgctttgaaatcgatcttccggtacttcgtcgcttccgtatagatcgcgggacccgtatacgtatgtacgccgaaaacttgctgctcttcggcgggtttatcgtcacgcaagaagtgatagtacgtggtcagagggccgccaccgtcgatcccgtgacggacgtctatcaaataggagccacgcgcgaagcgcaaagtcttccgaaccgtgcgcccgtctgcagtcgaag

SEQ ID NO: 230021 - DNA, 476 bp, Homo Sapiens
cgaataacgaagcgcatcatttctgatcaagtccggcaatttatctgtcgttgtgtatccttgctgaattccccactcgagaactagggcagcaaagatattcaaaagctcaaagcccctttcaatgaaagaccagagatatttgcaggatgcggaggtgccttcgcctgagcttaaatcccagcaactaacccttgacaagtcatgaacgatatcatttctcatatctagataagtattaagtttttcggacagatcaggatctaacttcgcccgccggcggacttggtcaagaaagtaccctaaaggtttctttcgctctgactgattcaagctatgaagcttttcaagagtcaagggaccctctttttgcagaacatatgtcgtgcagaagcgcatcatactctcgacagactgagcatggatgagcgcacggccaaggaggtgataaggatcttcgtccggaaagtctctct

SEQ ID NO: 230022 - DNA, 140 bp, Homo Sapiens
gggggttaaagacttacctgcaccagcgacagaaatcgaagctgcattcgaacaattctggaagctgtatccgaagaagaagagccgcaaggatgcccaaaaggcctgggtcaagctcagccctgatgctgatctgcagg

SEQ ID NO: 230023 - DNA, 124 bp, Homo Sapiens
tgcaaggaaattgtcgacagattcgatcatggcagacatctcaccgaagagtttggacttattggtttttcaagaatgttcaaggaaccaatcgccccgaatagggcgagatgtcgtttttcga

SEQ ID NO: 230024 - DNA, 154 bp, Homo Sapiens
gccagctacttgaatgcctgacgcggccagtgtagaagcggccttgcgtcgcgaaaggggtgcgaagcgcccccaggatctcagcttcgccgcgtacattgcaggggccgctttgcggccctatcgcgacgcaaggccgctcctacactgagcg

SEQ ID NO: 230025 - DNA, 418 bp, Homo Sapiens
cgcctttgctgaacacgagctcgccagcagcatcgttgcgagcagggttagcggcgcgtatctccttgggaaggttgtcatacgcatatttgaccttctctcgaaacaggcgcttggcgtcgttcagggtgtgggcgatcagggcgcacttggcagcctcgaacagcgcggcatccagctgaacaatgcagaccaaggtggtgaagcccagctgacgggccttgaggatgatgttccgggtgtgcatcccctggaagtagtcgatctgctcctgcgtcatccggaagcggaccttcttgccctgcttgtccgtgatgaagtacaggttgttcagtcgccagaacccgtcccgggagcagttcatgtgctcgggcttcatggtcaggcatcctttcgataggtcattcaataggctggg

SEQ ID NO: 230026 - DNA, 456 bp, Homo Sapiens
ctcctaacgagtttcgttctgtggtacataccatgtagatacatagcactttatcaagaatttcccttattttctaccaataatctagaattgggtaatcgtgaattatccaaggtgatgcggtgtttttgtcgtttggcagtcgctcaccggtacaccaaggggatgcgctcagatgagccaggagatcgagcggtacctgcaggccggcactcgtgccaacacccggcggagctatcagcaggcgcttgagcacttcgaggtgacgtggggtggctttctgccggcgactagcgatacagtcgtgcgctatctggtcgatcacgccgccaccctgtccagcaatacctttgaagatgcgcctcgcggcggtggcgcagtggcattgcaagcaaaggctttcccgattcggaccaagattcggcttgtcgccagattctcaagggcattcgtact

SEQ ID NO: 230027 - DNA, 445 bp, Homo Sapiens
  misc_feature (335)..(335): n is a, c, g, or t
ctaccttccttggccagcacatcctcggggttacgcagcgggcagtcctccagtgacaggcaaccgcaaccaatgcagttgtccaggctgtcgcgcaacgcctccagcgtgcggatgcgggcattgaggtcttcgcgccaggccgtggtcatctcgccccactgcgccgccgtaagcttgctgttgggcgcataacggctgaatgcctgcttgatgttctccagcggaataccggtgcgctgtgccactttgataatcgccagtgtacgcagcaccagtgaggggtagcggcgctggttgcccgccgtacggacgctggcgatcagccccttggnttcgtagaaatgcagcgcagacaccgccacgccactgcgtttgcccactcagccactgggagcttccgcgggtggtcaacgccatgcgtgttgacctcatgtcaagtgga

SEQ ID NO: 230028 - DNA, 339 bp, Homo Sapiens
gctgatgcgattttgacccaggctgctaatttagcttgggccacatgcggcattcgaactcaccccaatgaatagccctagttttcccaaacacgtcgaaggtctgcttctggccgtagtgagccattcgcctccgggtcaagatcagcccagtgaaagcaacttcaggccatctggacgcaactcgccctttggcgagacgtgccggtacaacgtctgtcgagtgacgccgaattcctcacacagatcgccaaccacgggttccggctgccccatcgccgccatggcaatcgcagtttcgctgcggcatcttgaacggccgcccgccgtttctgccgc

SEQ ID NO: 230029 - DNA, 430 bp, Homo Sapiens
cgcaccaggttatcgcctgtcatgttctgcagatcagcctggtactctgtgttcgcgtatcgacgccccacctcgaaatactcgaattcgcgggccgacatggttcccgtgcgcttagcttctgccgaggcaatcttttggtagtaagactcagccgattttgaggaccgtgcctctttaagcagatctttagttgagtccagcggttggcttgcggcgatcatttgatcttgaggatccgtcgcagcggagatgatcgagttgtactggttcatcaggccgatgtactggacaccagcgtcagattcggcctgccccttcttgagctgtggagccactgaacgccgcgcggagttctgcgtgtacatccctggctgcgtccgtttgcgcctgagtaaaggtgaggtcctggtccttgccatccttgccg

SEQ ID NO: 230030 - DNA, 394 bp, Homo Sapiens
gaggagcactctggttggtgatggtgctgaaaggactgtgaccagccggtatccgtgggctgcggcacgctgacctggcattgagccgagcgcgagctgtcgtactgaatggtgttgaggtccacgtcgatgaaggggatgccggcgaacatcacgaccacgatggcgacgaacacccggttctcaatgcgtgcggccgagagcacgcccttattgccttcgtctgcaccctccccacgggccttgagccattcctgcgcgatgatcgccacgaagggcagtgcgaataccccgctggataccagtaccgcccagatgccgttgttgacgatccaggaaaccagggtcaggtagtactccaggtagtcggtcgcgaaaagcgtcatggctcgga

SEQ ID NO: 230031 - DNA, 271 bp, Homo Sapiens
acgcgctcatctatcaagcatctctatggcaacctacagaatcttctcgactgtaaggacattggcgagccaggtatcatacgcgtcaacagggatctcaagcgttacgccgcagtgcttggtgatcttggtatcaatgtggagactaaccttggacaagccacgtaagccgcatcaagaccgagaaaaagaaatcttgctggctgcggccgccatcgagaagggccgatccaagattggtgaaactaaggtcagcatctcggccgtagct

SEQ ID NO: 230032 - DNA, 404 bp, Homo Sapiens
  misc_feature (384)..(384): n is a, c, g, or t
aggcaatgcccaagagagtgctgcccgccaggacgtagacctcatcaagcgagaactggaagctgcgattgccagtgatgtggagatggcctcaggcgcctatgaaaacttccgcattgctacagagggggctgaggccatggctcagaacgaggcacaaatgcaacgcgcctacgaattgggtgaggctgacctgcagtccctgctgctatctcgacgtcaagcagtgacatcggcatcgaatgcactgcaggcgcatgtcgatactttgcggactcacttgtcactgctgatcgatgcccattggatatgggggttggacgaaagctgagcacgctcgtttagcctgaagtgcccggcagggagtgccgtgccatctgtcanaatcgtaatgaacttatcat

SEQ ID NO: 230033 - DNA, 130 bp, Homo Sapiens
  misc_feature (77)..(77): n is a, c, g, or t
gacagtcctagagagcccgtagcttcttcgctgaactcaacggaatgagcattttcccccgcaatgaagagcatcgngcgtggcgagattgtctcgatgtcattgaacggatagaagttcatgaacctga

SEQ ID NO: 230034 - DNA, 182 bp, Homo Sapiens
gatcagcgatacaccgagcacgctggacaccaccattgtcgccgaccactggcgcaggaacagcgccatgaccccgatcaccagggccactgcgatcatcagggtcagttccacttcgtgcagcgaggcgcggatggtctgggtgcggtcctgcagcaccgacacctcgaccgaggccggca

SEQ ID NO: 230035 - DNA, 122 bp, Homo Sapiens
tagaggagccgatggatgttctccaccaccacgatggcatcatccaccacgaagcccaccgagatgacgatggccaccagggtgaggttgttcaggctgaaacccagtacgtacatcagcgc

SEQ ID NO: 230036 - DNA, 384 bp, Homo Sapiens
ggagcattaaggttaagctgagaagaaagattgtatacaatccactgcatggataagaacagttggttctagaccatggtcttgtttagaggaaacatcccaccaatgaactactctgttgcggcgacgttcgaaatatcaggcgtcgtagtcaattagggataggagggttgttcatgcttgctcaacttccaccggcattgcagagcctgcatctgccgctgcggctgaaactgtgggacggcaaccagttcgatctggggcctagcccgcaggtcaccatcctggtcaaggaaccacagctcatcagccagttgacccatccaagcatggatcagctaggcaccgcatttgttgaaggcaagctggagctggagggcgata

SEQ ID NO: 230037 - DNA, 224 bp, Homo Sapiens
taagggtcgaaagcagccgctcgcgagtgactgatttcgacttgtagccatcgttcgagatgggtggaaatcggcgaaaagtggcctactctctcaagtcgttttgaagcggatacgactaatttcaactggcctctgctaatgtagatgcgaaaggaaaattatatgaatctcgtagatttacagccggcaattgaatccgtctctgcaagtcttgtggtgac

SEQ ID NO: 230038 - DNA, 349 bp, Homo Sapiens
caagggctcgaggagcatttatgaataacagaaccctgtttggactttctctgctcactctgagcgtcagtaccgggcaagctgcgatggccgccggcgagaaaggctagggatttatcgaaggcagcagcctgaccattctcaatcgaaatctctacttcaaccgcgatttccgtaaagcgccagtccagcagctcgcgtagaggctattcggaagagagggcgcatggcgcgataggcagattcgagtctgggttcaccgagggcaccataggctttggtgccgacgcctttgccatgctagggctcaagcttgacaccggcgacggccgtactgcagcaggcggct

SEQ ID NO: 230039 - DNA, 137 bp, Homo Sapiens
cgaacctgaaaaatctcacacactgtctcgagaatgcatcaacctgtggattcttccccgttaatgggtcttaagtcgggcatggggcctaatacgcggtaatcgcgcgtacggaacacgagagaccgtgtgcccaa

SEQ ID NO: 230040 - DNA, 754 bp, Homo Sapiens
  misc_feature (126)..(227): n is a, c, g, or t
  misc_feature (358)..(503): n is a, c, g, or t
  misc_feature (661)..(714): n is a, c, g, or t
tgtatggaccgcagttttcatgccgctataattgaaacacactagacggaaggaacaggatagaaaagcccagaaagaaacctaaacatttatggtcaattttaaacaaaggtattaagaatgcannnnnnnnnnnnnnnnnnnnnnnnnnnnnnnnnnnnnnnnnnnnnnnnnnnnnnnnnnnnnnnnnnnnnnnnnnnnnnnnnnnnnnnnnnnnnnnnnnnnnnatcaactcaaaatggattgaaaacttaaatataaaacctgaaactgcaaaactactagaagaaaacataggggaaaagctccacacttctttgggcaatgattctttggattattgaccctgtaagcacannnnnnnnnnnnnnnnnnnnnnnnnnnnnnnnnnnnnnnnnnnnnnnnnnnnnnnnnnnnnnnnnnnnnnnnnnnnnnnnnnnnnnnnnnnnnnnnnnnnnnnnnnnnnnnnnnnnnnnnnnnnnnnnnnnnnnnnnnnnnnnnnnttgataacaatgcctcgtaaaaccttcccaacgaacggagaatgttccgtgaacactttggtttcctttttgcgtgtggcagttcaagtatagttttaaatccgtcttctattgaacactgaccaaattgcccgaattgagaccttaaaagttatcgnnnnnnnnnnnnnnnnnnnnnnnnnnnnnnnnnnnnnnnnnnnnnnnnnnnnnnggggggccgtgctaccgcaggctacaaccaccagtcaaag

SEQ ID NO: 230041 - DNA, 800 bp, Homo Sapiens
  misc_feature (456)..(490): n is a, c, g, or t
aaggataacactccaaactcacgttataatcgtgctactgtgggtaccgctatgtagaagggctgagaagcgattcagggtactagaagcagggcgagcagctcctgatgctgcgtctagagggcttaggtcctgagcctccgctgctgccctatagcccaagctcagtcgccctccaaggtgcaaaagagctgggttggttagaatcggataggagcccaggctagggagatctatggtgatgtccgttgagtctaggagagtgcagtaaacccttaagcaagggaaatcctactaagatgtcagacctggcagggcattgcaaggcttgggcactgaggccagtcggtattatacaaccattcatgggactggggaaaaaccccttggggagagaaggacgaaaaagaaaaaccaataccacacaaaggaaacgcccaccgaaagcataagagnnnnnnnnnnnnnnnnnnnnnnnnnnnnnnnnnnncaataagaccaagagcaaagccaacaaaatgagcagagaaccaagaagcgagtgtgcggcgtcacggaggcgtccgtagagaagggaatgcacaaagaggaaaaacaaaggaagtagaagaggaaaaggaagcgagtccgaaagaggaggtgagaaagagggcagacaccctacccgccacaaccaagagaggagaaagagaacgaggagggaaaaggtaagcaccgcccccagaaagatagcaagtaaagacgacactacgaataggaggagaaaggggtagaaggggacgtaagtcaggaatcgcacg

SEQ ID NO: 230042 - DNA, 261 bp, Homo Sapiens
gctcaatgttacacactccaaactcacgactcaccaatacaccaagacctgtgctccatcgattctaacaaccagctctttgcacctgtgagtgtgcgacttgagctgggtgcaaaggtgcacgcagcgtgacgtgctcagtgagccaatgcccttcagcacgcaagcatacagaaagcttgctgcgccccagctaactagatacttttgaatctgctatctcacgccctatcacacaatactgtgtacccaccagaaatg

SEQ ID NO: 230043 - DNA, 129 bp, Homo Sapiens
tctatcatactatacaactcgtgggttcagctagttcgaagggcctagagaatcgatatcatagtacgtagtatgtgggggagcagcttctgatgctgcgtctgagggcttggctcctgagaccgtccg

SEQ ID NO: 230044 - DNA, 172 bp, Homo Sapiens
gggctacaatacgactagagtttacgatagtaaggatagaaagcttgttaatctaggccgtcgtataactaaatatacgagagtgacgaaaaatccagtgcgtgagtacaaaatattgaagaaaaggcacagattagcaagtaggaagcgcagacttgagaaagataggcgt

SEQ ID NO: 230045 - DNA, 147 bp, Homo Sapiens
ctcctcgaaaggttgtcagctccatcttgccgatcaccgagcgcaacgtggtctgcgcgagctgcgtgatcgcgatgatgtagttggagtgagtcatagctcgtctcgtagttgataggtcacctggaagtacaagatgccgtccac

SEQ ID NO: 230046 - DNA, 239 bp, Homo Sapiens
tatattatactgtgctttctagtagggtaccagcttgattgaagcggcttgagaatgacgattcaaagtactaagtagctggcgcgagacagcttgctgatgctgcgtctgagtggcttgagttcctgcagcctccggctgctgtgccttgaccccagactacagtcgcccatccaggctgcaacagacgctggattgttatgaatctgatgtgagccaaggcgttgtgtgagtcttgg

SEQ ID NO: 230047 - DNA, 293 bp, Homo Sapiens
tgaaaaatatagcggcgacaattttattgaaattaaaaaatcacaataaatctgctcgttagtctcgcattaaatcctaattccaacaagctgaaaacttcttgctggatggttaataaaataaaccctcagggccgaattttacgccagagacaacacgattaataaacttaatcctgattattatttgacaggatttttatattttgccccctaagctgtactcgtccatacatcgagctatagcttgaacgttgcactcacaacctatactggtcgtctctaatgataca

SEQ ID NO: 230048 - DNA, 146 bp, Homo Sapiens
ctcgcttggcgatacgctgttcgagcacaagctctggaatgagtcgctgattgctcaagtgcgatcgggcgagcttgagcctcattactactggcagcttgagcagcagttgctggtgaccggcgctgagaaggtgatcttcgggt

SEQ ID NO: 230049 - DNA, 279 bp, Homo Sapiens
caatgtagctcagggcagcgctgagtggcacgccctccgggccaagtacttcaccgcatccgaagcgccggcaatgatgggcgtctcgaagtatcaaacccgcactgagttgttgcaccagaagaagacgggtatcgctcaggaggtaacagcggcccagcaggctaccttcgaccgcggtcacgcaactgaggagcttgcccgccctatcgtcgagcgaatgatcggcggggatctcttcccggtcgtgggcaccgaagacaatctgctggcctccat

SEQ ID NO: 230050 - DNA, 135 bp, Homo Sapiens
ggtgttggcggcctgggtgtttgcccattgggggtgggtcgcagtgtgcgggcttggcatggccatcagcgcggtagcgctgggctactggctatggctgcaacgtgcgagggcggccgaagccgccctgccgtg

SEQ ID NO: 230051 - DNA, 236 bp, Homo Sapiens
cgtccgcgtttctacgaacccgacgtacacaccatggccgcgccgctgcaggcgctgttcgatgccgtcaatgtccgcttcgtgcaaggcaccgcctgccatattgatgaaggggcgcgccgagtcagctatcgcacccccagcggcacgttgtgcgccctgccctacgaccgcctgatcatggcctgtggcagcgagctgaaccggcctgacagggtcggtatcgaacatgcctt

SEQ ID NO: 230052 - DNA, 501 bp, Homo Sapiens
tatgcagccagaaatgccaaaaccaagaatctcactgcgaacatattgtcatccctgtagaaacgtatggctggatgctatcacttcagggctgcgcggaccaacgggtctacagtttgacaaggctacttcttgggcctggtcttaacgctctctttctcctgctgctcatcccaccgcttacggaactcgtcgtccagggcaaagatagcggcgtcaaactcttcgcggcatatcaccgatgggtagcggtcgaggtattcggtgatcgctgatggtgcgatcggggccggcgcgcccatcatgccgacatactgccgtgaccgaccgatatgcccgtaggcctccaggatctccgcgaccacatcgtcgatctcaggcggatcctgggcacccagcccgaggcgctcatgcttccagcgctttttctcgttctctggcccggcccaatccctaccccagcgatatgccgctactgcttttccgcggtggcctgggcct

SEQ ID NO: 230053 - DNA, 510 bp, Homo Sapiens
gtcatagtgctcatctgggtactcggcaaggttgtaactgcggagccgaaggccgcctcctggcaggcggtaaagcagtttcacgcgaagtaggccgtcgtggtcaagtgcgtacatttttccgtcgatgatgctcttggcgtcagtgttcacgccaacagtgctgccgtcaggtagcaccggttccatgctgttgccctttactggtacgcagccggctgcttcggggttcacgttcttcttctgcagggttcgcttgccaaagcgcagcttcctgccattcgtttcgagcatcactgcagatccgttgcctgcggagatttccgtttctttgaaaaacggcagctccacttcgtcaggcccaagcggggtgtggtcatcccagacttcaatcggatcgagcactacatctgcagatctggatcgttggggagttggggagagtggcaaatccttcatcagcctggggctgacgtccgtcgggtcgaaggagagaaccgatgcgaactt

SEQ ID NO: 230054 - DNA, 183 bp, Homo Sapiens
ggaccaaccagacagacaacagaaaacagaacgaaggagggacaggagacaacacggaccaacaaaccaaaccaaagagcagtgaagagggcaaagcggggagaagagggcgctgcgagagcaaagggcatggagcggagggggggcccgcgccccgaggagggcaggcccggggcgccgggc

SEQ ID NO: 230055 - DNA, 236 bp, Homo Sapiens
  misc_feature (82)..(90): n is a, c, g, or t
  misc_feature (110)..(194): n is a, c, g, or t
ttgcaaagcgtagtacccaatgcgccccacacctactgcccgtcgttttgcttccccacccctcttttatttatttatgcannnnnnnnngagagacagaatttcgcttnnnnnnnnnnnnnnnnnnnnnnnnnnnnnnnnnnnnnnnnnnnnnnnnnnnnnnnnnnnnnnnnnnnnnnnnnnnnnnnnnnnnngtagtacccaagtatctgggaccacaggtgcacaccaccatg

SEQ ID NO: 230056 - DNA, 362 bp, Homo Sapiens
gtcctgatgaagtctccgaccaacgccggctagctgccgaacaggcttgcgagaagggcgctgcgcatttcctgcaggccatgcaacgcagcgcgcaaccggttgccgctgtgatcggcatgctgcacatcagcgcgtacttgcgcgagcccggctggttggtcgaattgttcgctggccaagtggcgcgctatcggcccagcgcgcatgccgatgtggaagtgcaggaggccgctgcgccgttgttggtcaaatacggcctgacgccgttgctggagctgccgcaatcattgcctgcaggtttaggcgcgcgtttgcatgagcaaggcgaaagtgcccgggattactggctgcgccatgca

SEQ ID NO: 230057 - DNA, 139 bp, Homo Sapiens
tgcgaagagtgtgcggagcaatgatgtgggcttaggatgttcaaactgtcattttatttgtacgatgatagataccaggagtagcgcgactgaagagcagtagattaggcgtaggtagaaggagagcctaaagagcggg

SEQ ID NO: 230058 - DNA, 220 bp, Homo Sapiens
actaaagaagtaggcggaaatgagcagatcgctcctccctggtatgagcagaccgaaatttcgcttaagcggatctgccacacagcttgccccatagatgaatttcatgagctgatcaggacactgagcaaaggtaaaaataaaatctaactgtgcattggacacgcagagaaggaaatggctaattcctgataagcttttgatttttgtattgtttgca

SEQ ID NO: 230059 - DNA, 163 bp, Homo Sapiens
atcgctcgagcacggttgcatcctcgaatgagaccatgatggtttcaagctttagatctaagcagccacttgggctcagtattgctgaggagaatcaaagccgaagataaacttacctgtataaactgtcctgcataccttgtgcagatagggtaccgagctc

SEQ ID NO: 230060 - DNA, 117 bp, Homo Sapiens
aagaacggaccaccttcgcatcgacaagccttccttcgcgatcgatcgctacttgcaaaatgagcgaaccgtagattttgcccttagcttcgctcgaatagttgagcgttccgatct

SEQ ID NO: 230061 - DNA, 100 bp, Homo Sapiens
ttcggacaattgtcgaacgcgctgctgcgcgattgccgctatctttctgcgatcgggatgcacacccagggcatgacacaggagcaatcgcgcaaaatgt

SEQ ID NO: 230062 - DNA, 193 bp, Homo Sapiens
atgtgtcgggaacatcgcggtagggtgggatccttctcgatcgagccgatgatctcggtactcgaggacggccaccgttgctggaatgccttcgggggcagcggactcctcagaggcataggtacagccgctcaccgctacagcgacgacggccagagaagcgccggcggcgtgacgcagagatttcatgtga

SEQ ID NO: 230063 - DNA, 203 bp, Homo Sapiens
  misc_feature (114)..(114): n is a, c, g, or t
  misc_feature (157)..(157): n is a, c, g, or t
tatttaggccattaacattgtttgtaatctattgatatatttcgggtttgtaacaactcatcttgctcttttattcgtgtttctctctatctatcctttaattctttattctanattttctcgcctcattttgtgtatttctttaaacttatattcntattttacttgctactaactggctaagatattacgcgcacttcttt

SEQ ID NO: 230064 - DNA, 461 bp, Homo Sapiens
gctgcatgtctgatctcttgaggatcccccatgctgcaccgagggtcaaacacccagcctgagtcgacgcaagctttctcgcggtagcggcaagctttgcgttggcgggcgtgtcggctgatcgactgttcatgacctggccccgaccagagcccggttcgggctgcgtcctcggtcgctgaatacatggggctctacacgccccagaccctggaaaatctcagcactgacgccgactcccatatcgcccaactcagttcggtcgggagccaagtcgggctgccgttgagcccggatgcagtgcacctgcccggtgccgaatttcgccgggcacaaatccttgattatgacggggtaatgatcggccaactgacttatctcgacgcgcggaacggccccgtggcgctgtgcattacggcggcgaaaaaaggtgcggtgcgcatggccaccagaacagggcc

SEQ ID NO: 230065 - DNA, 205 bp, Homo Sapiens
ttagcgaaaaacgcgcggacatcgccgatctcgccactgaactcgtgtatgacatcctgaactccttatccgccctgccgctttgcgtgcagcggtatgggcgaagggtaggtgtgcgcgccgataagcgccaccgcggagctgattctgtcgccggcgccatccggcagccaggcaacgtcgctgccttccaccgcgcggaggg

SEQ ID NO: 230066 - DNA, 206 bp, Homo Sapiens
tgagagtctctgtggtctctttgttacacctcgtataggaaatttgcgctttcttcttgtggagagggggcttttctatacacctgtgtatcattttgggaggtggttctaacgggggggtgaacccccttaccccgcctgttctctttattatttttatctctgagagacattattctgcggcccgtaatatatagaagtgtggg

SEQ ID NO: 230067 - DNA, 334 bp, Homo Sapiens
taaattggggcttttaccgtttacctttttattaatcttttagttcgtaattaattgttgagaggggtttattctttctaagggtggtattgtttttcacaaatcggtgtgtacccgatatatagtgtcacagagcttctaagtccgctccttataggccgtttggggttttccttatgttccccctgaatctcaaaatatccttactagtggggaaccctgtcttttaaaagggtctcctggacattagcctgttcatctcattcggaacatcgttttttggaggggctttaattactgttctttggaggggctacgggtgtcaccctacgcg

SEQ ID NO: 230068 - DNA, 136 bp, Homo Sapiens
gtctatctgtctagtgtatgtcatccacgtactttgataaatgacagctactctcattctctatagcactatcattatatctatctgtctgtctctctaacttcattgatttacttggagcgtcagttgatctact

SEQ ID NO: 230069 - DNA, 263 bp, Homo Sapiens
  misc_feature (121)..(188): n is a, c, g, or t
  misc_feature (199)..(199): n is a, c, g, or t
  misc_feature (208)..(208): n is a, c, g, or t
  misc_feature (225)..(225): n is a, c, g, or t
ggcggacccaaccgtagcacttaaaactttaaaaagatttagttcgcaacatagagcttacaacaactttattgagtattccgaagcatatttaaattacgagttatgcacggattaaaannnnnnnnnnnnnnnnnnnnnnnnnnnnnnnnnnnnnnnnnnnnnnnnnnnnnnnnnnnnnnnnnnnnagcacgatcanaagaatcanagaataatgcgggtganttttagatgtgtcgcgcttccacgtaatggtggggatc

SEQ ID NO: 230070 - DNA, 518 bp, Homo Sapiens
  misc_feature (80)..(111): n is a, c, g, or t
  misc_feature (215)..(470): n is a, c, g, or t
aaccaaaattcatggatgctcctcaagttcggcagtctgccctgaagataggaaaacgtcctatacacacatacaaaagnnnnnnnnnnnnnnnnnnnnnnnnnnnnnnnntacacatgctattatcttccatcccagttggttgaatctgcaggtgcaaaacccgtggatacagaagcccgactgtatttcctttttttctgagacagagtctnnnnnnnnnnnnnnnnnnnnnnnnnnnnnnnnnnnnnnnnnnnnnnnnnnnnnnnnnnnnnnnnnnnnnnnnnnnnnnnnnnnnnnnnnnnnnnnnnnnnnnnnnnnnnnnnnnnnnnnnnnnnnnnnnnnnnnnnnnnnnnnnnnnnnnnnnnnnnnnnnnnnnnnnnnnnnnnnnnnnnnnnnnnnnnnnnnnnnnnnnnnnnnnnnnnnnnnnnnnnnnnnnnnnnnnnnnnnnnnnnnnnnnnnnnnnnnnnatataattttcctacctccctgaggtttatctaatattaataccctgt

SEQ ID NO: 230071 - DNA, 453 bp, Homo Sapiens
agtgtcaaattgctgtcaacgttcctaaatgctttctctaggttgctatatttatttcatttcaaaccattagcaaaagtttttggaccagtgtcagtgcccaggtcacaatttgaataccgttcagattagctgttacaataatgtagtcaagagttggtgcaaccttggttcaggatggcagtgatagagataaactatcctgatttgacaaataaatttcgcgaggaaaacttgtgtgtatttgtatctttctccctctgtagtgagttacctgagagagaagaaggcgaaggagaagaaactccaaattttagcccctggggtccaccgagaatggttgtggatgacattattgtggctttctcaataggagcacaccagttgctcttttctttaacttaacagaaccttattagtcctactctaatgattgagaaatgcgatattcac

SEQ ID NO: 230072 - DNA, 364 bp, Homo Sapiens
  misc_feature (123)..(303): n is a, c, g, or t
gccacgtcacctgtggtcctgaccccagtcttacaacttctccttccctcaggagcttctacattccacccaacacacactgctgcagcagatccagaccctggtcaatgagtgagatgggtnnnnnnnnnnnnnnnnnnnnnnnnnnnnnnnnnnnnnnnnnnnnnnnnnnnnnnnnnnnnnnnnnnnnnnnnnnnnnnnnnnnnnnnnnnnnnnnnnnnnnnnnnnnnnnnnnnnnnnnnnnnnnnnnnnnnnnnnnnnnnnnnnnnnnnnnnnnnnnnnnnnnnnnnnnnnnnnnnnnnncaacacaacaacgacacaaaactgtggcccttgatgttcaagtcgaccattccagcctctg

SEQ ID NO: 230073 - DNA, 167 bp, Homo Sapiens
atttccaagtcaattttcttttacactaaaacccaagaatctatctttctaggtctcatactcagttcttaatgtagtcacttagtaaataacctgaatatgcttgtataatccacactaatttaagggtgaattcctcattccgcttttcagatcatggggtacgg

SEQ ID NO: 230074 - DNA, 444 bp, Homo Sapiens
  misc_feature (99)..(387): n is a, c, g, or t
ttaagtcctggaaagtaaagaatgatgtattttcttaactattattgtatagctttaaaaagcactacaagcagtatcaggcagtcagtaatgtgatgnnnnnnnnnnnnnnnnnnnnnnnnnnnnnnnnnnnnnnnnnnnnnnnnnnnnnnnnnnnnnnnnnnnnnnnnnnnnnnnnnnnnnnnnnnnnnnnnnnnnnnnnnnnnnnnnnnnnnnnnnnnnnnnnnnnnnnnnnnnnnnnnnnnnnnnnnnnnnnnnnnnnnnnnnnnnnnnnnnnnnnnnnnnnnnnnnnnnnnnnnnnnnnnnnnnnnnnnnnnnnnnnnnnnnnnnnnnnnnnnnnnnnnnnnnnnnnnnnnnnnnnnnnnnnnnnnnnnnnnnnnnnnnnnnatatattataccctgattttaaaagcccagacaaagggaaacaccggggatcctcta

SEQ ID NO: 230075 - DNA, 244 bp, Homo Sapiens
  misc_feature (80)..(139): n is a, c, g, or t
ttaatgtagtacagtacgtctttttaaaaacttcatgggtttaaattttgtgttcttttaaagatacttctatagtaacnnnnnnnnnnnnnnnnnnnnnnnnnnnnnnnnnnnnnnnnnnnnnnnnnnnnnnnnnnnntctgaacccattcaaacccattcttcctctcttgagatggaaggagaacaataagaatgaaaataaaaatgacaatgaacataatattaatgatgagagtggtta

SEQ ID NO: 230076 - DNA, 230 bp, Homo Sapiens
tactggcggaccggacaggtaagcgttactgaaggcactttctttataatatagcccgagtggaatgaggcgttcatccttgtccatattcttactctttacaggagttcaacatgcaaataagctccacctcccaggcacttgttagtctcaaaaagtcacaaaggggcgatccaggtcccatctctcaaaggtccacacgtcaatagccttcccgtgtggctagatcc

SEQ ID NO: 230077 - DNA, 209 bp, Homo Sapiens
tctccaagtcgcaggagctgttgctcttcaggaagaaggatactagtatggtggtgtaccatttaatggccatggcacatatgtatgtgtctatcgtgctactcatgcgctcaactcctgtatctcaatattgatcacatgtcattccacggaaatggtggaggaagtgaatccagactccgctccaaccagataacagctataccttt

SEQ ID NO: 230078 - DNA, 390 bp, Homo Sapiens
tagctgttatggcagcgagccgatctagcgtctgatgtggggggtgaaccacacgatcaatgagctgagcaatgttcctgttcctgtcatgctaatgccagatgacttcaaatgcctacagcaatgatcacgtgtggacaatcatctcttcaataatgtgataacctgcccagcctgctttaacgtttaatgtgagtatttgccccatgctgttcctgaaacccttctgtgtgatgatgtgttttggaatttgattgatcatgtgcttaccagcacacttcacgtgactgctgcagcgccccacatcaactatgtaacatgcattaccctttccttgtggtgatccctcctagatgtcgaccctgcagtgcactgcaataccttgagcac

SEQ ID NO: 230079 - DNA, 171 bp, Homo Sapiens
accggacaggtaacctgttactgcataacgtatcgagattacttcattggccttaactccagagttcactgccagtcccccgcgaatcgcttcaaatgcctcagcaaacttcttaacagcatactgttcaactccacgacctgtctctccctatgctctgatctgtttggc

SEQ ID NO: 230080 - DNA, 366 bp, Homo Sapiens
gcatccctcggtttctaaaaacgcaccacaacgtcaactgatgagtcatgggtcacactccaagttcttatgtaccaaagaaatcagggcactaaagtcttacacaccaattttaaagcattgctcaataagctctggttccaaacccaagcagttcttctcatcacggtcacaccagcatgcaccagtttttcaaacaaggctgtgcacaacaacttccaaaatcaaaacttgcaaattcccagacacagcagtgcatacaattcatttcactcatattttccagcactccatacatacactggtcagtggtttttgttctttcattcaatttgagcaccatcaccaaaccatcaaagccactgt

SEQ ID NO: 230081 - DNA, 289 bp, Homo Sapiens
cccgaaaggtagctgttactggtgcagacactgtaacatataaaatggcctccacctgtaaaataaagctcacagatcagtgagaaagacataagtataaacaaataatcacaatctacctgtgctgagttgtgaaactgctatgggcgactgctggaccacacgacagtgcctaacttcttcctaaactgaaacgacggaaacgtgcactaccacgggctaggacaccagggcggttggacggttactatctcgacacgctggttgcttgacactgactgacctgacc

SEQ ID NO: 230082 - DNA, 323 bp, Homo Sapiens
aagctgttactgcatatgaccaggtcttgggctaaagtggggaaccaaaggggcatctaatataaacggaaaattagtcaaataacaaacaaaaccaaagactgactctacattccttcttcccaccgtgcccagtccccacacacttgtcacaagcacattcaatctttgtgtgcccagagtgccagttggctccatgcctttgtccatccccagccagttttggtgcaccactgcagtgatgccatgcaatccacttccaggtccagtgcagttccaagcactcagccattggcccacaccatgcgcagcacaacccccat

SEQ ID NO: 230083 - DNA, 396 bp, Homo Sapiens
  misc_feature (82)..(278): n is a, c, g, or t
ctgtactgacattttgagcaaggtgctgcagtaggctgaatgatgccccctcactccccacatcctaccaaagagaatatgnnnnnnnnnnnnnnnnnnnnnnnnnnnnnnnnnnnnnnnnnnnnnnnnnnnnnnnnnnnnnnnnnnnnnnnnnnnnnnnnnnnnnnnnnnnnnnnnnnnnnnnnnnnnnnnnnnnnnnnnnnnnnnnnnnnnnnnnnnnnnnnnnnnnnnnnnnnnnnnnnnnnnnnnnnnnnnnnnnnnnnnnnnnnnnnnnnnnnaaacggagcacgggccagagccaaagatgcaggtggtcacggacgctggaaacagcaagaaacaaattctcttctcagagtcttcagaaggaactagccccagtaacagctaacctta

SEQ ID NO: 230084 - DNA, 120 bp, Homo Sapiens
tgtgatggcagtgcatggaggagctggtgagcctcatcacacagtgatcctgcccctgtgacatggagacagaagtgtcctgctatcaaatatccgaaacacatgccttgtgatgcttct

SEQ ID NO: 230085 - DNA, 101 bp, Homo Sapiens
ctgtgtaagtgctagctaggcatagcaggagtgagaacatcacacgggctctcatcgtggtgcagcagtggcatagacaccctaccggccaagcagtaccc

SEQ ID NO: 230086 - DNA, 246 bp, Homo Sapiens
acacacacacaaacaacagaatatggtaggttctctagtaccaaagtcagaggtggagggtagtacttactttcgtaagacttgttgtacttttttcattagttacctctctattctcatgtccaattaggatcaagaaaagaattgcttgagccaagttcatcatgaaagtccagatatgcaagtcaggtgctctgtatctagttagatctacatagatgacaccactaccttattcatactagt

SEQ ID NO: 230087 - DNA, 168 bp, Homo Sapiens
gtccgtcttagggtatgcgagtagagtcagcatataagtagagtacggtatacgcaacgagcttgggaacccgaagagccggcccgagcgcctctacgaggtcgcaactacgacgggcggataggggaagacgctcggcggagtcggcaactcgacgggggctatgct

SEQ ID NO: 230088 - DNA, 158 bp, Homo Sapiens
cggttgcagatatggtgcatttgccgcacgttgtagtgccggaatgggcgtattataaccgactatagaagtcaactattgagctaatgctatgatccgtataacagatactgcacaggaacactttgccaaactgctggcaaatcaagaagaaggca

SEQ ID NO: 230089 - DNA, 120 bp, Homo Sapiens
  misc_feature (49)..(59): n is a, c, g, or t
attgagacatcatctcactacaaagttgagatgactgacagatataccnnnnnnnnnnnatttggaaagggattttcactcttgttggcccaggcgggagtgcacgggcagccccccggg

SEQ ID NO: 230090 - DNA, 151 bp, Homo Sapiens
ggggcggtcaatcggcaggctgcgtgccgatatgccgtttcaccgcgtcagccgcacgccggtgtggttggcggcgtagcggccgtgcacgttgaccgtcaccgttttgccgctgcggcggaatttccattgcgcgtcgctcggcgtttct

SEQ ID NO: 230091 - DNA, 103 bp, Homo Sapiens
ggaactccgtgacctcagtgtgatccacccgacctctggcctcccaagagtacttgggattacatggcgtagagccacgtgcactcggcagccctcccagggt

SEQ ID NO: 230092 - DNA, 261 bp, Homo Sapiens
atgtcaaacaatccaaagagatgaggcttggtgacctcgtcgaagcagcactcctgcggcaatagttgtcgcacctttggtgaagtatgatgatctcagtatctgattcgcagtacaccttcatccgatcagatggcctgcaaactatgaccgaggggagtaactgacgaacgtcttggattggataagaacgaccgcctgcacaaacatcgtcaccaccagcacaggcgtcccgggacttactaaaagctaaacagaccg

SEQ ID NO: 230093 - DNA, 220 bp, Homo Sapiens
tccttgtccaatctcagaaggcatgagtggttagctctgagaaacccatgaaatacctaccccagctttcagctgtgaggctcactaagcaagatggtcggtcctgcatccaccttggcacagttttggggcaacctgacccagatctccaagcccagccagccacgggtgccctggggcagagctcaaggctgaccccagcggaccctgttctcccgac

SEQ ID NO: 230094 - DNA, 616 bp, Homo Sapiens
tgatctccaacgtcggagaacagaactaagagacatattgttttttggctgccggtagtcaagggttactagacctaaggtgtttattggcagctctgaggacagagatacgctaccaaaggtgttggtgccctccagactgtgctggtagctacagatatgggggctgggcactctgagctgcccctaagctgcctgtgggatggtgcagattgggtggggatgctgcacccaggaccactaggactggcataaacaagacctactacaacaaagcagactgtgagaaactgtggcagctgggccagacatggtgccaacacccacccctaccaggaccactgcaccagctaacaccaccactctgcacagaaagtacaaacacctgctctcgtttgcctgggcctcctgctgagcttagtgtctgtctgtctgcccctcggactccctctgagccacaggggggttagactatggcagcccagagtaggagtctgtgccagagcgctaacagcagctgctcggggaagcgctcctggctgcagatggacctaacgctcctgctcctccgctggcgcaaagccacttcttgccagacgaaggctacaggtgagac

SEQ ID NO: 230095 - DNA, 162 bp, Homo Sapiens
  misc_feature (28)..(28): n is a, c, g, or t
  misc_feature (81)..(81): n is a, c, g, or t
  misc_feature (117)..(117): n is a, c, g, or t
  misc_feature (126)..(126): n is a, c, g, or t
atggagctgctgacgctgacgtttggcngcgacggagctctgacgcgcatgatgacgcatcttcaccaaggccgccctgangacgtttgcggggcatactgctgtgctgccctaagnctaccaggncgctgtcgggcactacgggtggttgacacccaccca

SEQ ID NO: 230096 - DNA, 288 bp, Homo Sapiens
  misc_feature (119)..(119): n is a, c, g, or t
  misc_feature (247)..(247): n is a, c, g, or t
caggcatgtgcttgccagccccacacagcccacagcacgttgcttgcgatgaaacagcagaatcctatcttccttctacccggacggcgcgaaccgatgcaccaggctgccagcacggncatcaccatggcgggccattcaagtaacccaatccaatattccatgaaaccttccaactgataatggggtatctgaagctgatcacctgccagcgtcctgagcgctggcaggtgatcgcttgactaanccgctcgcttctcgcccttgagcatctttttctgcatttcc

SEQ ID NO: 230097 - DNA, 214 bp, Homo Sapiens
  misc_feature (71)..(71): n is a, c, g, or t
  misc_feature (89)..(89): n is a, c, g, or t
  misc_feature (114)..(114): n is a, c, g, or t
  misc_feature (163)..(163): n is a, c, g, or t
  misc_feature (178)..(178): n is a, c, g, or t
  misc_feature (184)..(184): n is a, c, g, or t
  misc_feature (196)..(196): n is a, c, g, or t
aaccaactgccgaaggcatacggaccaccagtgcggaaactacagtaccggccagggtgtaaccgataganggtgccgacgaacagcanaacgtctgaaccttcgacacggaancttctcagccatggacaggcccggtcagcactaccgcgcagacgggatncctggtggctcggancatcancccgggggagangatcccttaaagggtagc

SEQ ID NO: 230098 - DNA, 213 bp, Homo Sapiens
  misc_feature (45)..(45): n is a, c, g, or t
  misc_feature (74)..(74): n is a, c, g, or t
  misc_feature (76)..(76): n is a, c, g, or t
  misc_feature (112)..(112): n is a, c, g, or t
  misc_feature (117)..(117): n is a, c, g, or t
  misc_feature (133)..(133): n is a, c, g, or t
  misc_feature (161)..(161): n is a, c, g, or t
  misc_feature (178)..(178): n is a, c, g, or t
  misc_feature (184)..(184): n is a, c, g, or t
  misc_feature (192)..(192): n is a, c, g, or t
tacggcgacaacatcctggccatcatggcaatagcggcagaaggngaagaccatcatggaacaggtgatgccgnanagcctggccatcacgatgccgcggctactgatagcngaggntggctccgtacctgangcaggtcaccattcggacatgagtggcnatgatcaccatgccgtngatgangccgcccnaagcggcggagaccatcattc

SEQ ID NO: 230099 - DNA, 265 bp, Homo Sapiens
  misc_feature (60)..(60): n is a, c, g, or t
  misc_feature (136)..(136): n is a, c, g, or t
  misc_feature (143)..(143): n is a, c, g, or t
  misc_feature (182)..(182): n is a, c, g, or t
  misc_feature (220)..(220): n is a, c, g, or t
  misc_feature (239)..(239): n is a, c, g, or t
gtgctggccgagctgcccaaggactatcgggtaccgtagaccaccatggtcttgcctttnacctgtaccaggctgcgctcttcgaggtccttgaggacgcggccgaccatttcccgcgagcaaccgacgatacggncgatttnctgcgggtaatcttgatctgcatgccatcgggaatggtnatggggtcaggatgcttgccagtttccagcaggcaacnggtacttgaacggcacttnaaaaatgccagttgcccaacttttcc

SEQ ID NO: 230100 - DNA, 489 bp, Homo Sapiens
  misc_feature (342)..(342): n is a, c, g, or t
  misc_feature (363)..(363): n is a, c, g, or t
  misc_feature (444)..(444): n is a, c, g, or t
  misc_feature (454)..(454): n is a, c, g, or t
gctgctcgggtacagataaaaacatcattgcaggtggtacttgaaccatgaatgctctcaactatgaagttttacgcaacaccgagaaattgtattacaaagaccaataccaggccggtgcaaacacgcaagtaacgcgggtgcacagtgacggtatcgagttgcaaagtaccgtggcctacccggaaggcggtggccaggaggcagacatgggtaccattgaacttcccatcggtaccgtacgcttcatctgggttaaaaaactttacggtagccccattcgccttgaaggtttcaaaggtggaaagctgggcggcatcattattcacagcctgcaccccnatgacctgcacttgctcgatnaagtcaccgcaggtatgcccggcccgcgtcaccatcgatattgaacggtgcgaacggctgacgctgtctcacagtgccagncacttcttgnatgccgccggcatcgggcttgcaagaagagttgaa

SEQ ID NO: 230101 - DNA, 188 bp, Homo Sapiens
ccatatatctcagacactcttctaacagcatttcgggcatgaaaaagatgtactctctgatgatgagttatggaaggaaatgatgtactctctgagatgaacattcgatatgctagatgcccaaaacggatctacggatgatgagttatggcatgatgaacaagggcatatggatctgggaatttcag

SEQ ID NO: 230102 - DNA, 211 bp, Homo Sapiens
agcttgatgctgcttgtctgactctagagtgatccccccttgctgtccccatgaattgacctgcacctttccctgcccacctgctgcagaacttgcctggccagcaacacctgctcgtgcagacctatgactgtcctgtgagcatgaaattctttgcctggtgttcaactgtgggtacctgatgctctgaattctgtaatcatttgtcata

SEQ ID NO: 230103 - DNA, 113 bp, Homo Sapiens
ctctagaggaccccgttttgtattggagttaccacaaatggcctcgctgaaaaaatgcagtataaaatgtattgggcctgtaagacaaatgggaaacacctgggtacctgagc

SEQ ID NO: 230104 - DNA, 169 bp, Homo Sapiens
tcagccggtaccgcaaaatactatcgttgtattcacggatactctggcaagtctacattcttcaagccgacccgaagtatgttttgatatttaacaaataaaataaaaattaatctaagccatgttattttcaaaaagcggcagacccgagccttcgagtaagctttga

SEQ ID NO: 230105 - DNA, 130 bp, Homo Sapiens
  misc_feature (74)..(89): n is a, c, g, or t
atcatcagctcggtaccggcatgtgctgtagccagcgactgatggaggaaggagcacttgagccggacaggtcnnnnnnnnnnnnnnnnggagggatttccgctcgtccaggtcgggagtgcagtagcgt

SEQ ID NO: 230106 - DNA, 128 bp, Homo Sapiens
tgagtgaagcgacattgacatgtctgaacagtgaaaacgcgtaaggcgccgctgcgggcgcgaaaccgggcgttgccgcgcgggcgggaaaacagtgctatgcccgtcgggcattaaaacaaatgggg

SEQ ID NO: 230107 - DNA, 437 bp, Homo Sapiens
  misc_feature (44)..(115): n is a, c, g, or t
  misc_feature (195)..(224): n is a, c, g, or t
  misc_feature (297)..(315): n is a, c, g, or t
  misc_feature (327)..(393): n is a, c, g, or t
caaagatacatatacaatctagctcggtaccaggccatgcgtgnnnnnnnnnnnnnnnnnnnnnnnnnnnnnnnnnnnnnnnnnnnnnnnnnnnnnnnnnnnnnnnnnnnnnnnngctacagagcatagaccctggtctcttattataaaacaaaaaatacttaaaaaatttttatagacttaaaaggccttggnnnnnnnnnnnnnnnnnnnnnnnnnnnnnngggcatcctaatttctctcattatacacacagaaaagaggaaaacataagtaaaataagtctctgtggtatcnnnnnnnnnnnnnnnnnnnggaaacaaaaannnnnnnnnnnnnnnnnnnnnnnnnnnnnnnnnnnnnnnnnnnnnnnnnnnnnnnnnnnnnnnnnnncccaggctcaagcaattctctaacgcgtgccatcagcacatgcg

SEQ ID NO: 230108 - DNA, 131 bp, Homo Sapiens
agcgcctcacgagcgcctgatccagcggcacattcggctcggtccggcagtcaccatgtaggtgccttcgaacaccgcacctttatcctcgtctgccgaatcagatgcacttccggcgtgcactgcgcgcg

SEQ ID NO: 230109 - DNA, 322 bp, Homo Sapiens
atccggaaataaaaagagcgtcaattaacgcttccttgtagacaggaaattcaaaccggaattttctgcgggccacatcgtgccctaaaaacgaaatacgtaaacgacattctgttcattaaaaggtaaggggctgcattaaatgcctgtaaaacattctcacaataactccggtacccgggttttcgcagcgctgatgccggtaatggctgcggtactggtcggctttattattatcggtgtggcacttcccgtcctgccgctgcatgtcaaaaatgacctgggcttcgggacgtttatcgtgggcctggtcgccggggca

SEQ ID NO: 230110 - DNA, 173 bp, Homo Sapiens
agcatgacgccgaagccagcgccgcgcgccgtgaacgagccgggtttgtgcgcggcatcgagtcgcacgattctcaagcgcgccatcgcgccgctggcggacgcgctgccgcggcgcagcaggaacgcgtggcgcaggcgctgtcgctggtctacggcaccgaagtgttcctg

SEQ ID NO: 230111 - DNA, 231 bp, Homo Sapiens
ccaacaccgtctcacggtggccaggttgacgtacgcattgagctcgcccgtttcacggacggcgattgcggcccctactggagtgtcgtcgatatacgccaacgacaccgcaaattgatcaggtttctccaaggcctcttcgaacaggtacttcattgtcccatcgaaagcgaagaggccattgtcgagtgcgatctttgccagtcggtccgcattgccagcgcagacgtg

SEQ ID NO: 230112 - DNA, 134 bp, Homo Sapiens
cgctgcgctgtcacggtgctgacctacgtcatcgggcgtggcgccgcgccacgtcgacctgcgcccctatgtgctgtgcggcaaggacatccgcaccgtgccgggcggcctgtgccgcgtggcgctgaccgagg

SEQ ID NO: 230113 - DNA, 107 bp, Homo Sapiens
gcctctggcggtgtgcttgatcttggagcggtacgacaggccgatgcgggtgtcttcggtgggctgcagcatgaagcccacgttccagccccacgcgtcgcccttca

SEQ ID NO: 230114 - DNA, 465 bp, Homo Sapiens
aactgctggacttcaccctgagcgccgcggcgcgcggctcggccgaagccaccgagggcatggccaccatcgacatgaacaccaccttcctgtcgccgggcaccggcgacctggtgatcgaggcgcgctgcctgcgccggggcggctccatcgccttctgtgaaggcgacatccgccgcgccgacggcgaactggtggcccgcgccaccgccacgttcaagatcatccgccgccgcccgggcggcgactgaacggcgccgcgcgccccggcaaacggggcgcgaacaggcctatttcttgaaatcgcgcgacggcggcaccgtcggccgcggatccagcggcatgtagctggcgcacgagctcatgccgtagtagatcgcgtcctgcatggcgcgcatcgccgccgcgtcccaggtgcccttgccccacatcacgatgcgggtttcggtggtcttgggaccggcc

SEQ ID NO: 230115 - DNA, 331 bp, Homo Sapiens
  misc_feature (67)..(247): n is a, c, g, or t
gcacgtcttgttgcccagcctgatgtgcatggcgcatctcggtcactggaacttcgcctcctgggtnnnnnnnnnnnnnnnnnnnnnnnnnnnnnnnnnnnnnnnnnnnnnnnnnnnnnnnnnnnnnnnnnnnnnnnnnnnnnnnnnnnnnnnnnnnnnnnnnnnnnnnnnnnnnnnnnnnnnnnnnnnnnnnnnnnnnnnnnnnnnnnnnnnnnnnnnnnnnnnnnnnnnnnnnnnnnnnnnnnnnttggccactgctccccggcccaatagaaatttgatgctgaatgggggtataaagtttctatacttcttaaaaaggttacatcgt

SEQ ID NO: 230116 - DNA, 126 bp, Homo Sapiens
cttgcttcgcaaggccaagtaggggcacaactccataggtagctttttctattttcggtggttcatctagatatcctgcaccatgtccgctgtccttacacaactcctgcgcctttccatatgcaa

SEQ ID NO: 230117 - DNA, 134 bp, Homo Sapiens
agtagggcacaactactcataggtagcttcctctatttcgtcacgtgttccatcttcgtctcttcaactccagaggggatatcctgcaccatgtccgctgcctcacacaactccttgcccctctccatatgcaa

SEQ ID NO: 230118 - DNA, 231 bp, Homo Sapiens
  misc_feature (216)..(216): n is a, c, g, or t
ttatcgcaaggtccaagagggacacgtgcagccttgctggtcccacagcctggcggcacgcctcactctcttcccaagggctcatgctctatgatgctcgattggcacacgctagttctatgccgcatagcggagctcctcctcgacatacctctgtgccctgcccatatgcaaccggtactcgagctcgaacctcgctaaatctctagtcatagnctccttccctgctgt

SEQ ID NO: 230119 - DNA, 505 bp, Homo Sapiens
  misc_feature (43)..(287): n is a, c, g, or t
agtttgcggtgttgttgttgttttgagacagagtctcactgtnnnnnnnnnnnnnnnnnnnnnnnnnnnnnnnnnnnnnnnnnnnnnnnnnnnnnnnnnnnnnnnnnnnnnnnnnnnnnnnnnnnnnnnnnnnnnnnnnnnnnnnnnnnnnnnnnnnnnnnnnnnnnnnnnnnnnnnnnnnnnnnnnnnnnnnnnnnnnnnnnnnnnnnnnnnnnnnnnnnnnnnnnnnnnnnnnnnnnnnnnnnnnnnnnnnnnnnnnnnnnnnnnnnnnnnnnnnnnnnnnnnnnatgaaccactgtgcctggactgtaattttgaatctgggatagacttatggaaaatgggtgtctgtggagtgcttcagccccaactttgagcatctagactgtaggaaacatttgggctcctggggaataaaggaaagtgggagaacaaggatggtgaaaatgaaaggagaaataagtgcctcctgtgcagcttgcctttcactagatttgcccccttt

SEQ ID NO: 230120 - DNA, 562 bp, Homo Sapiens
  misc_feature (159)..(448): n is a, c, g, or t
ataccgtgtgcatggactccagctgaccattgagtgggactggatccagaaagatgtaggtccctccattgcaaagatgatgagaatcagaacaaggctcaacagggctctgttaaacgccaacctggggatggacctcaaagctgtcatagcttcagnnnnnnnnnnnnnnnnnnnnnnnnnnnnnnnnnnnnnnnnnnnnnnnnnnnnnnnnnnnnnnnnnnnnnnnnnnnnnnnnnnnnnnnnnnnnnnnnnnnnnnnnnnnnnnnnnnnnnnnnnnnnnnnnnnnnnnnnnnnnnnnnnnnnnnnnnnnnnnnnnnnnnnnnnnnnnnnnnnnnnnnnnnnnnnnnnnnnnnnnnnnnnnnnnnnnnnnnnnnnnnnnnnnnnnnnnnnnnnnnnnnnnnnnnnnnnnnnnnnnnnnnnnnnnnnnnnnnnnnnnnnnnnnnnntcattcaggtgacggtcacacgaaaaagcccccactttactctattggaaattcccctgttaaaaacatggccttgttacccctgaatttattaccccacaaacaggttataac

SEQ ID NO: 230121 - DNA, 123 bp, Homo Sapiens
cgtcgtcgttatagaggatccccactacttggtctagggggagccgagattgcgcattgactccagccgggcacaagagcaaactcagtcttaagaaacacaatatagtgccaggcatggtgg

SEQ ID NO: 230122 - DNA, 144 bp, Homo Sapiens
  misc_feature (70)..(70): n is a, c, g, or t
caagacgagaggacgaggtaggagggctcacagatacccgaacttcaaggatttactactaatctacagntaatgagagacatgctgtggtcatcggatcaagtggaacatggatacaagagcccagcaaataccactcaactg

SEQ ID NO: 230123 - DNA, 492 bp, Homo Sapiens
  misc_feature (144)..(243): n is a, c, g, or t
aagagcatgtagtgcaagtggcgaggtacatagctcattgcagctttcaaactcctaagactctaagacgatcctcccgcctctgcctcctgagatagctgagaacacaggtgcaagacaccacgcccagctaattatatattnnnnnnnnnnnnnnnnnnnnnnnnnnnnnnnnnnnnnnnnnnnnnnnnnnnnnnnnnnnnnnnnnnnnnnnnnnnnnnnnnnnnnnnnnnnnnnnnnnnnatgagccactgcaatctggcctcattttcttgacagtggctttaacagagtagaaaattttaattttaatgaagtctagcttatcagttatttcatggatcatgtcttaaggagttgtaatctcaaaagtcatcaaactcaagatcatctaggattattcttttttgtgaatcctctaagagttttaaatacagttttgagtagtacatttaggtctgtgatccatttagagttaatatatgtgaagac

SEQ ID NO: 230124 - DNA, 336 bp, Homo Sapiens
  misc_feature (62)..(258): n is a, c, g, or t
tcgtcccagcactttggaaaggctgacgatggaggactgcttgacgcccggagttccagatnnnnnnnnnnnnnnnnnnnnnnnnnnnnnnnnnnnnnnnnnnnnnnnnnnnnnnnnnnnnnnnnnnnnnnnnnnnnnnnnnnnnnnnnnnnnnnnnnnnnnnnnnnnnnnnnnnnnnnnnnnnnnnnnnnnnnnnnnnnnnnnnnnnnnnnnnnnnnnnnnnnnnnnnnnnnnnnnnnnnnnnnnnnnnnnnnnnnncaaacaagaaaagtcaagtcccaagccccaagccccataacaaaacaaaacccaaaacccacatacttgataaaagac

SEQ ID NO: 230125 - DNA, 529 bp, Homo Sapiens
  misc_feature (56)..(428): n is a, c, g, or t
acatcgttctgtaactgattccagagttatacacgataccaaaagtctctgggacnnnnnnnnnnnnnnnnnnnnnnnnnnnnnnnnnnnnnnnnnnnnnnnnnnnnnnnnnnnnnnnnnnnnnnnnnnnnnnnnnnnnnnnnnnnnnnnnnnnnnnnnnnnnnnnnnnnnnnnnnnnnnnnnnnnnnnnnnnnnnnnnnnnnnnnnnnnnnnnnnnnnnnnnnnnnnnnnnnnnnnnnnnnnnnnnnnnnnnnnnnnnnnnnnnnnnnnnnnnnnnnnnnnnnnnnnnnnnnnnnnnnnnnnnnnnnnnnnnnnnnnnnnnnnnnnnnnnnnnnnnnnnnnnnnnnnnnnnnnnnnnnnnnnnnnnnnnnnnnnnnnnnnnnnnnnnnnnnnnnnnnnnnnnnnnnnnnnnnnnnnnnnnnnnnnnnctattatgaccccctctatgcacacaaattaaaaaccctagaaaacttagactgggccaaattctggagaacattgcacctcccaagattgccccaggagg

SEQ ID NO: 230126 - DNA, 406 bp, Homo Sapiens
  misc_feature (45)..(140): n is a, c, g, or t
  misc_feature (203)..(284): n is a, c, g, or t
  misc_feature (307)..(326): n is a, c, g, or t
gaaatcagcgacaatttaaggacattattgaggtcactggggagnnnnnnnnnnnnnnnnnnnnnnnnnnnnnnnnnnnnnnnnnnnnnnnnnnnnnnnnnnnnnnnnnnnnnnnnnnnnnnnnnnnnnnnnnnnnnnnntaaatgaggaataaagcaaactttcaaattgttcagcacaaaaataaaatatatactcataannnnnnnnnnnnnnnnnnnnnnnnnnnnnnnnnnnnnnnnnnnnnnnnnnnnnnnnnnnnnnnnnnnnnnnnnnnnnnnnnntcaactttcctatagttttgaannnnnnnnnnnnnnnnnnnnggagacagattctcgctttccccgggctgtggactgcgggggcccgactctcaactcatgtgtacccctcggcctctccg

SEQ ID NO: 230127 - DNA, 572 bp, Homo Sapiens
  misc_feature (180)..(180): n is a, c, g, or t
  misc_feature (361)..(361): n is a, c, g, or t
  misc_feature (366)..(366): n is a, c, g, or t
  misc_feature (404)..(404): n is a, c, g, or t
  misc_feature (416)..(416): n is a, c, g, or t
  misc_feature (422)..(423): n is a, c, g, or t
  misc_feature (455)..(455): n is a, c, g, or t
  misc_feature (464)..(464): n is a, c, g, or t
  misc_feature (478)..(478): n is a, c, g, or t
  misc_feature (493)..(493): n is a, c, g, or t
  misc_feature (501)..(501): n is a, c, g, or t
  misc_feature (510)..(510): n is a, c, g, or t
  misc_feature (530)..(530): n is a, c, g, or t
  misc_feature (536)..(536): n is a, c, g, or t
ctggccagtacctgctggcgcaggctggggatatcccagcgctgttgtgcttcatcgacaaatgcctgcagcagcgcctgatgctccgggctgccggtgaggttctcccgctcgtgcgggtcgcggctcaggtcatagagtaggctggggtcatcctcgctgtacacgaacttgtacggnccgcggcggatcatcatcagcgggccgacggtgccttcggccatgtattcgccgatcacttcatcgtgaccgccctgcccttgcagatggccgacaagcgagcggccgtccaggtgcaggcttttatccacagacccgccgccagttcgaccagggttgcagcaggtcgcaggtcgatacngaggngctgacccggcctgctgcaaagcgcttgggccgcatgnacaagcaacggnaaccgnnccggcatttttaaccagtgcatcttgtaccanaaggcttgnttgccaaacatgtngcctggcccccgggnaacacgantcagggggnattaaccggggggtcctttnagggcnacctggggcttgaaactttggcttggccggggttta

SEQ ID NO: 230128 - DNA, 133 bp, Homo Sapiens
atgcccccgcggctgcatgctcggcaatatgcaaggcgaaccgacgcccatcgcggtctgagtcgatcacgccacgctgccgcgcctcaccgaacagccgtgccgaaatcgcgggatcgatgccgtaagcgcg

SEQ ID NO: 230129 - DNA, 101 bp, Homo Sapiens
ctcgacaagctggctgccgccgtacagcagaaaggctatgcctgcgtctgcctgttctggtactggagcaagcacctggtcaagtgcgagatcgccctggg

SEQ ID NO: 230130 - DNA, 237 bp, Homo Sapiens
tcagaacgctgaactatgtgtttattattgatatagcacttagccttcggcctcccaacactttccctgatagcaccctttactttatctgctatacttaacatttctgatggaaattaactttgcaggatatcatgaaaaggcagtggtagattcacagtccttccattggcttagaacttcaattttgtcattactctgagaatcacatagttcagcgtctgacgggtaccgagc

SEQ ID NO: 230131 - DNA, 110 bp, Homo Sapiens
aaggcgagcacgaccatgcccacggcgtcttctactgcacggacgcctgacgacttgcctcccggcacctggcgtggcagcagctttgactgacaacctgccgcgcacct

SEQ ID NO: 230132 - DNA, 259 bp, Homo Sapiens
tgttcactacgtgcagatcgccatgcgcgccagtgtggcgcccagcgagcttggcgacggaatcgccattggagacgtcagcttgtactaaatgcgcattgccgccgggcacgcgagtggcgctggctacacgctcaccggcctccgcattcaagttgttgacgaggacgcgtgtgccttcgcgggcaaaggtgttggcgataccctcgccaaagcctgaacccgcgcccgtgacgatggcaatcttgccgggtaccga

SEQ ID NO: 230133 - DNA, 155 bp, Homo Sapiens
  misc_feature (50)..(104): n is a, c, g, or t
gcataataataataataggcctggtgcggtgtggtggctcatgcctgtannnnnnnnnnnnnnnnnnnnnnnnnnnnnnnnnnnnnnnnnnnnnnnnnnnnnnngaattccaagttgtgttaacaataccttaatagtgggcaggccaggcctta

SEQ ID NO: 230134 - DNA, 183 bp, Homo Sapiens
atacttttccccgcactaaaaaccctgttaaataggggatatgaatcacaaatggcttaatcacaaatgggtgtcccaaatatccaatggtttggaacacagacacacccacaatgacctccctttgcgaaagttggcaaaccataatttttgctttcttgcgcttccaaacaacctttatcc

SEQ ID NO: 230135 - DNA, 330 bp, Homo Sapiens
gactggtgtagaggttggatgttgcagtgatcaaagaggctgtgtctggctgttatgataggggtagagtatggtgatattgaaatccaaggatttcatttaaagtagagaatcaactgaacagccaaaatacgactatacccactttgccggactaacgacgactgtgtattacacggacgactgaattaggacgtttacttccaagaactactagggtgaccggactgggtccctagtgcacggactatttgcttggacctggcgacggaacggaaaacttatgaccacctttttagggacaacctaaccacggcttcccgtgacctt

SEQ ID NO: 230136 - DNA, 129 bp, Homo Sapiens
cggccatctatcgatattagcgaattccctatgtgtatgcttctctttgcactgggaagcatagacagagacgcttaggagttggcctgtattcatgggcagtaggaagaaagatggttaaatagtgcc

SEQ ID NO: 230137 - DNA, 128 bp, Homo Sapiens
gtcgtgctgattcaaacatgcagatctttgtgaacgaccctcactggtcaaaaccatcacccttgaggtcgagcccagatgagaccatcgaggcttccaagcgcggtaccgaagctcgcaattcagta

SEQ ID NO: 230138 - DNA, 127 bp, Homo Sapiens
  misc_feature (67)..(78): n is a, c, g, or t
ttattatactgctataatttatatcatagtcagacattacctttgactaaaatatttttgcacatcnnnnnnnnnnnnagacggggtcccgttctgtagcacaggctgaagtgcagtgacttgatat

SEQ ID NO: 230139 - DNA, 119 bp, Homo Sapiens
gatattaaaaatacattctataagccaaaatagaaatttattttgcaaaatgaatggtacaacgttacaaaatgcagttttattattgcttgtgcctcaactgtttaagtgaatatcaa

SEQ ID NO: 230140 - DNA, 228 bp, Homo Sapiens
  misc_feature (52)..(157): n is a, c, g, or t
gcgtgctctacggatcttatgggttacgccccttgatataatagaacctagnnnnnnnnnnnnnnnnnnnnnnnnnnnnnnnnnnnnnnnnnnnnnnnnnnnnnnnnnnnnnnnnnnnnnnnnnnnnnnnnnnnnnnnnnnnnnnnnnnnnnnnnnnaccagctttatgcatcagaaatgtcaaaatcaagagacagcaggaagtgttccaaattagaagtggaccaa

SEQ ID NO: 230141 - DNA, 492 bp, Homo Sapiens
  misc_feature (187)..(388): n is a, c, g, or t
ttcattggatgtctaactgacctcatgaacatatcaaaattcctgtcccccacccctatctatcccactgcagacttccccatttcgtggcaaatccacccttccagttgcttatcccaaaaaccttgaagtcatttatgacttctttttttggtaagggggtgtcgggaaggggagacagggtttnnnnnnnnnnnnnnnnnnnnnnnnnnnnnnnnnnnnnnnnnnnnnnnnnnnnnnnnnnnnnnnnnnnnnnnnnnnnnnnnnnnnnnnnnnnnnnnnnnnnnnnnnnnnnnnnnnnnnnnnnnnnnnnnnnnnnnnnnnnnnnnnnnnnnnnnnnnnnnnnnnnnnnnnnnnnnnnnnnnnnnnnnnnnnnnnnnnnnnnnnngggctcaggcaatcctcccgcctttatctcccatagtgctggaattatagttgtgagccgccatgcctggccttaaacacattttttacttttgactgagacag

SEQ ID NO: 230142 - DNA, 241 bp, Homo Sapiens
tggggctccgctcctaagtgcaggaagatggtggccgcaccgaagagaattagtcgctggaggcgatcaactctaggctccaactcgttatgaaaagtgcagaagtacgtccatggggtacaagcagcactctgcaagatgatcagcacaagtgcacagcgacaattgtgtcattctcgactaacaacatgcccagcctttgacggacatctgaaactagagtactatcgctcataatggt

SEQ ID NO: 230143 - DNA, 245 bp, Homo Sapiens
cggctgctgtggttggagggccgtcccgtgtccctacagggaggatgatggtggccgaccatggaagcacgaaaaagtcgctggagtctatcacctcgttggctccaagctcgctatgaaaagtgggaagtccgttctggggtacaagctgactctgaagatgatcagacaaggcaacacgcgaagttggtccttctcgctaacaagtgcccagcttagcggacacatctgaaatagagtactat

SEQ ID NO: 230144 - DNA, 345 bp, Homo Sapiens
  misc_feature (91)..(221): n is a, c, g, or t
tccagagtattcgaagataacgcattatagcagctccgtggctccagcagttgtggactacagacatgcagccaccatgcccagctaattnnnnnnnnnnnnnnnnnnnnnnnnnnnnnnnnnnnnnnnnnnnnnnnnnnnnnnnnnnnnnnnnnnnnnnnnnnnnnnnnnnnnnnnnnnnnnnnnnnnnnnnnnnnnnnnnnnnnnnnnnnnnnnnnnnncaggataaggaatttgtactttatagaaattgggaagtaacggaaagtttttgagcaggattgcggtagaactaacccagtagttgtgcgtagcatgtatttggagtggggaaataattaggta

SEQ ID NO: 230145 - DNA, 187 bp, Homo Sapiens
atgtggacaccggagaagaaacctgtgagggaaggtgttcctgctaatgctaggctgccaatggagaggaaaggtgaagtgagaggtatggcttcgagtagtcctactatttgtcgaatatctaggtcattgataagggagcggatgaagaacccggggcacataaataggatggctttgaagcagg

SEQ ID NO: 230146 - DNA, 161 bp, Homo Sapiens
agctgcggtgactcgacgagtgtggtgaggaatggggtgggaaacggatgttgaaactgtcatttgattgatacggtgagagatatggggagtagtgtgattgatgtggagtagatgaagcgtaggtagaagtagaggtgtggtgcggatggaagccggca

SEQ ID NO: 230147 - DNA, 358 bp, Homo Sapiens
  misc_feature (45)..(76): n is a, c, g, or t
  misc_feature (140)..(194): n is a, c, g, or t
  misc_feature (306)..(317): n is a, c, g, or t
cctgcaaggagactcttgaggatacccctgcgctgaccttgacgnnnnnnnnnnnnnnnnnnnnnnnnnnnnnnnntgagccactgtgcctggccacacctagctaatttttaatgtttttcaaatggagactctgtcannnnnnnnnnnnnnnnnnnnnnnnnnnnnnnnnnnnnnnnnnnnnnnnnnnnnnngctcaagcgaatcttccgccttagcctgccatataggtaggactacaggtgcataccacaacaccgagctaactgttgcattttttgtagcttcttccctggccaagaagcnnnnnnnnnnnncttgacacggagccttgctctgtcgcccaggctggagagca

SEQ ID NO: 230148 - DNA, 135 bp, Homo Sapiens
ggttaaacaacgccacttatccacctaaccactatcactaaaaaaactcaacctctatatacaaaactccctacaaaactccataattataacattcacaaacacaaaactaaacataatttatacattttttaa

SEQ ID NO: 230149 - DNA, 126 bp, Homo Sapiens
  misc_feature (52)..(52): n is a, c, g, or t
  misc_feature (60)..(60): n is a, c, g, or t
  misc_feature (67)..(67): n is a, c, g, or t
  misc_feature (96)..(96): n is a, c, g, or t
actggcccctaaaggcctttttacctttaataaccttttaaattggtttttnaaggacangaagttntcacttccggtcacccaagcttgcccgtngtaattgccgaatccttgggtttaactggc

SEQ ID NO: 230150 - DNA, 136 bp, Homo Sapiens
  misc_feature (14)..(14): n is a, c, g, or t
  misc_feature (37)..(37): n is a, c, g, or t
  misc_feature (44)..(44): n is a, c, g, or t
  misc_feature (54)..(54): n is a, c, g, or t
  misc_feature (69)..(69): n is a, c, g, or t
  misc_feature (76)..(76): n is a, c, g, or t
  misc_feature (90)..(90): n is a, c, g, or t
  misc_feature (92)..(92): n is a, c, g, or t
  misc_feature (96)..(96): n is a, c, g, or t
tggttaattgactngcttggcctcgggccgttccggnttcggcnaaccgggttnaagtttacttcaaanggcgggnaataccgggttttncnccanaattcaggggggatacccccgggaaaaaaacattttggac

SEQ ID NO: 230151 - DNA, 123 bp, Homo Sapiens
  misc_feature (12)..(12): n is a, c, g, or t
  misc_feature (32)..(32): n is a, c, g, or t
  misc_feature (68)..(68): n is a, c, g, or t
tgggtggggttnaaaactactgtaattaatantttttctgactgcttcagataagtttaggccggggntttttcattttgattttgaatattcagcttcagtttggattaaaagcatgggtgg

SEQ ID NO: 230152 - DNA, 190 bp, Homo Sapiens
  misc_feature (40)..(40): n is a, c, g, or t
  misc_feature (53)..(53): n is a, c, g, or t
  misc_feature (80)..(80): n is a, c, g, or t
  misc_feature (117)..(117): n is a, c, g, or t
  misc_feature (129)..(129): n is a, c, g, or t
  misc_feature (134)..(134): n is a, c, g, or t
  misc_feature (137)..(137): n is a, c, g, or t
  misc_feature (140)..(140): n is a, c, g, or t
  misc_feature (143)..(143): n is a, c, g, or t
  misc_feature (163)..(163): n is a, c, g, or t
  misc_feature (165)..(165): n is a, c, g, or t
agttcttcccctttggtggaaacctgtgggaaatattcgntagggaaaagaanatgagaaagaataagtgaaagactttnggtttaggatgctttaagattggggcataatgttctnaaagaacaatgnggacntanttnggnagaaaaccgtacattgcatncntgggggacctgatccccttcacggc

SEQ ID NO: 230153 - DNA, 155 bp, Homo Sapiens
  misc_feature (25)..(25): n is a, c, g, or t
  misc_feature (30)..(30): n is a, c, g, or t
  misc_feature (84)..(84): n is a, c, g, or t
  misc_feature (90)..(90): n is a, c, g, or t
agttctccccttggtgggagtaggnggctngtgtcctgcgggggcaactggcaccaccacccaagactgggtaagtgccatttncattgntgaagaaacatcttcccgtaacttaaggttctggaaccttggccggcccagttccagtgcacaat

SEQ ID NO: 230154 - DNA, 223 bp, Homo Sapiens
agtatacataccacataatcaggatcacccaaccgttacaacaagtatacacccccaacctggctagagttactgcctatcagcctatacctgccagctggcacaccagtccaacatgcatctcctgctttgtgaaatgtggtgatcctactagcagtctgaccctgcagtgctatgcaatgcttgtgcactaggcctgtacgttattaccaactgtacgtga

SEQ ID NO: 230155 - DNA, 163 bp, Homo Sapiens
tggagcagagagggcactaacccaggctgacgccaagaatgaaggtggcccactgcatgcccctggtctgagcaggtcttcttgagatttgacatgctgctagagcaccccctatactcccacgatgtcctctcagcctacctctcatgcttacgtctgtcac

SEQ ID NO: 230156 - DNA, 247 bp, Homo Sapiens
  misc_feature (50)..(65): n is a, c, g, or t
  misc_feature (69)..(152): n is a, c, g, or t
acatatgagcggaccatcagttgcggtgagcatcgtgctggctgactaannnnnnnnnnnnnnnnacannnnnnnnnnnnnnnnnnnnnnnnnnnnnnnnnnnnnnnnnnnnnnnnnnnnnnnnnnnnnnnnnnnnnnnnnnnnnnnnnnnncgatttataagcttgagccatggtgctcagccctaaatggttatatcttaattttcctttttataggcttttattgattttccaccatagaggat

SEQ ID NO: 230157 - DNA, 260 bp, Homo Sapiens
cggaccatttgggtgagcatcgggatcggcatgggcgatgcggtgatgccggcaacggcgagaacggtgagtgcacggaggctgaagcgaacggcttgaagcaccctgacctcgattcatcttgaaacggaaaatgcgatcttgagcgtggtagccccacgctcccggtttgagaagggggaaacagttctttgcccgcctcatacggttcaaggccattgaaatgtgtcaatccttgggcttagggatggctcaccgca

SEQ ID NO: 230158 - DNA, 371 bp, Homo Sapiens
  misc_feature (58)..(317): n is a, c, g, or t
gcagtggtcatttctttattatcgttgttattattgagacatggtctctctctgtcannnnnnnnnnnnnnnnnnnnnnnnnnnnnnnnnnnnnnnnnnnnnnnnnnnnnnnnnnnnnnnnnnnnnnnnnnnnnnnnnnnnnnnnnnnnnnnnnnnnnnnnnnnnnnnnnnnnnnnnnnnnnnnnnnnnnnnnnnnnnnnnnnnnnnnnnnnnnnnnnnnnnnnnnnnnnnnnnnnnnnnnnnnnnnnnnnnnnnnnnnnnnnnnnnnnnnnnnnnnnnnnnnnnnnnnnnnnnnnnnnnnnnnnnnnnnnnnnnnncttttgttgaggcctgcgggcttttaagaacacgatgggctcccggagacctgg

SEQ ID NO: 230159 - DNA, 130 bp, Homo Sapiens
  misc_feature (58)..(58): n is a, c, g, or t
acttcaatcccgtgagccatcatgaatgacaatgaagacacaaactggcatggtgagnaggtacccgatccctgagcctccgagcgctgccggcgttgtctcttcataattggctcaccgcagattcaat

SEQ ID NO: 230160 - DNA, 337 bp, Homo Sapiens
ctcacgcgcttgcgctactgcgcacggccaccacactgtacccaacaagcagatagcacatgaacatctagtgccaactcactgtgtatgatagctatcaatatacattcattacaggatcgattaccttccctcttacgccccacctcttaacactgttagagccacatttcaacttgatatgccgagagggacagacatccaaaccgtatcattttttttgatactttcatgcagtttgtttggctctagatctgtttagactcctgcagtctggtatctgtaactagcctctggtcctttgtgagagtccacggttcggtactacgctttggca

SEQ ID NO: 230161 - DNA, 150 bp, Homo Sapiens
tgcgaaagcgtagtacccagagcagtgtgcatatttctgtgtgtattaacatactgttaccatactatataaaacgttaccaatttaaaattcattattaatcattataagcaatatgtaagagaaaacagttttcctctgtaatggctg

SEQ ID NO: 230162 - DNA, 376 bp, Homo Sapiens
agccaaaagctgttattacagtttttctaacccttgccccctccgattcatcgcatccataatctccatcgcatgaaatagccggtctaggtgctcacttacgataacactatagtactttggttttctgattgcttgtgcatatctaggcgtaggattatagcctccagctggctccatggtgcatcacatgtcgtgactgagaaccctgtggcggcgtaatattccatgctctgtatgtaccacatgttcttcatctagtccacctttgatggagacgtattgattccatgtctttgctttgtgaatagggctgttgatgggcatgtctttttgctagaatgatttctgtgcctttgggtactacgctttggca

SEQ ID NO: 230163 - DNA, 508 bp, Homo Sapiens
  misc_feature (98)..(110): n is a, c, g, or t
  misc_feature (139)..(194): n is a, c, g, or t
  misc_feature (312)..(388): n is a, c, g, or t
cttgtcgatcaagcctgtccaaccctcagcccccatgggtatgcatgtggacccaggacagctttgaatgcagcccatcacaaatttgtaaactttcnnnnnnnnnnnnngttttggaaatggattctcgctcgtgtgnnnnnnnnnnnnnnnnnnnnnnnnnnnnnnnnnnnnnnnnnnnnnnnnnnnnnnnngtttcaaccgaatctcccgccacagtttcccaggttatctgagattacaggcaactgccaccatgcctcagctaattttgtcggtatattgggtaaagcacttgattccacaatgcgnnnnnnnnnnnnnnnnnnnnnnnnnnnnnnnnnnnnnnnnnnnnnnnnnnnnnnnnnnnnnnnnnnnnnnnnnnnnngtttgagccattggggcccagtctgttaatatcctttacttggtatctttaagcttccctggcccacttgggaagatttgtctggggccactttggaagaaaaatggtcttgggtacaac

SEQ ID NO: 230164 - DNA, 202 bp, Homo Sapiens
  misc_feature (90)..(142): n is a, c, g, or t
gtccaaagcgtactaccagttactgggactacggcatcacctcacgcccgctattttaatatttcagtagggactcgctttcatccatgnnnnnnnnnnnnnnnnnnnnnnnnnnnnnnnnnnnnnnnnnnnnnnnnnnnnnaagcttcaccacacccgacccctcactagtatctcagcatctgggtactacgctttggca

SEQ ID NO: 230165 - DNA, 237 bp, Homo Sapiens
tagccggaccaacatgcgaacggactgatcccaacaccgttttcaaggacttcgcacctctcatgttcgtcaaatattggacacgaattcatcgacaaactcaggacatttgatcagtccgttcgcatgaacatgcgaacggactgatctgggggaaaagactttctaagtgcggttgtatcttcagacctcgtctgtcacaatgacttaacagggagggggtaggaggggccctat

SEQ ID NO: 230166 - DNA, 188 bp, Homo Sapiens
ggtcggaccatgcgacggactgatcctgggctgaagcgctgacgaagggagcgagacgatgagcgaaacccaaggccaaggccctgccaagcgctggtatgtcgtgcatgcctactccggcatggagaaggcggtcgagcgcaacctgcgtgagcgcatcgagcgcaggatcagtccgttcgcatgtt

SEQ ID NO: 230167 - DNA, 157 bp, Homo Sapiens
  misc_feature (16)..(16): n is a, c, g, or t
acggactgatcacganccgggccagttcgtcgagcgaggtctgcccctccatcacgcggcgcatgccgtcctcggccagtgtcggaatctttggcacgcgcggtattccggacttcgcgaaaggttgcacggcgggcgatcagtccgttcgcatgtt

SEQ ID NO: 230168 - DNA, 161 bp, Homo Sapiens
acttagggatgagcacgcttgctttcatttccagttcgcactcttcgtgtcctcctgcgaccgatcagctggcgatggcccttcctatccaatccacagcaggtttgctaaaatgtcatcattctccagagtgtacatgacctttcttgatcatcctgttg

SEQ ID NO: 230169 - DNA, 192 bp, Homo Sapiens
tgtaccgaccgtgcacctggacggattcataatcttgcaacacccttacgccagtgatcatctattgccacagccataatcagacagtgatcatctattgtcaacagccaaacagaccagtcatcatctaattgcacacagccaagcacccattgatcatctaatgcataccagccaaacacccagtgatca

SEQ ID NO: 230170 - DNA, 128 bp, Homo Sapiens
aatcatgcgaacggactgatcccaacaccttttcaggacaagcttcgcaccctctcatgttcgctcacaatatataggactactaccatggggcactgcagaactcacgatcagtccgttcgcatctt

SEQ ID NO: 230171 - DNA, 332 bp, Homo Sapiens
cccgtgaacctttactgtactctgattttggcttctgactttccatgtgtaggataactgggagacactgaagcgggctcgttagggctcgcggagtcaccgttgaaataccagtcttggagagtcggaaatctaacgatatttcatgaaactggaaatcggacaatgtcagacgggcagtttgactggggcggtatcctcccaaaaagtaacggaggagtccaaagcttacctcatcgtggttggcaatcacgaaacgagcgtaaaggtataaggtaggttaactgcgagaccaacaagtcaagcaggtacgaaagtagggcttagtgccg

SEQ ID NO: 230172 - DNA, 214 bp, Homo Sapiens
cctagtaggagggtccgcgtggtcgaccaggctttcgggtgactcaggcccgtgcccgagggcccacggtttcaaccagcatcccgggcgactctggaccgtgctaggtgctgcggtgctgaactgctgtcccagggaactcgtacttggaccgagggcacccggggtcgaccagcggtccgcggcgacaccggtccaggtcaagcacgggtac

SEQ ID NO: 230173 - DNA, 117 bp, Homo Sapiens
gtactctgaggatcccgaatctcgacagttgtgcactgcacagtacttattattaacaaaaataaaaataaatctattctgaagcaatttattccatatgcacaacttgtcgagatt

SEQ ID NO: 230174 - DNA, 617 bp, Homo Sapiens
cgtgcagctttgtgtgttgcctgtgccgtaggctggcgcagccggtacagccggtgcggcggcagaacgtttgcccaacagattcgccagtgccttcatcgaacatctccgatgccagagcatgtgctgcagggacacgagacgccaacaggaatgagggcattttggcgctcattccttgctggtcacgcgcaggatgccggagaggaaggcagcactccatgcgacagaggatggattgggctgtggctgagcggggaacgcggattggatgcgctgatccaaatcatatcgacgcaccaacttgcagaacgggcactccgcattgctcaatgggagatcaccgatcacgctgatgtgatggctgccgcatactgggcaactggccagcgccaactgtggctgctcgatcacccagataccttcaatgtggccggccagatcaaaggcgcggtcgaagttgagccggtaatttgcgccgcatatcgagatatagcgacggtagccaccgatcagtgagtgcgctggctcgaactgcaggaaacggtggcggcgatagcttgccgcaaacaggacgcatcgatccggtccaaaagattgctctgtagtccactcgg

SEQ ID NO: 230175 - DNA, 388 bp, Homo Sapiens
  misc_feature (84)..(273): n is a, c, g, or t
  misc_feature (302)..(302): n is a, c, g, or t
ttcagaggatcccgaatctcgacaagttgtgcatattgggtgaggcagaagataggcattatgtgaaaagctgggtgggtaggnnnnnnnnnnnnnnnnnnnnnnnnnnnnnnnnnnnnnnnnnnnnnnnnnnnnnnnnnnnnnnnnnnnnnnnnnnnnnnnnnnnnnnnnnnnnnnnnnnnnnnnnnnnnnnnnnnnnnnnnnnnnnnnnnnnnnnnnnnnnnnnnnnnnnnnnnnnnnnnnnnnnnnnnnnnnnnnnnnnnnnnnnnnnnntacagagaacacatcccatatctcttccntaggttctcggtggttgacttaaaaatcttcagttgttcctgtggcttgcagtttgcacaaactggtcggagattcggggttaccg

SEQ ID NO: 230176 - DNA, 386 bp, Homo Sapiens
tatgctgtcagagttcccgaatctcgagagtgtgcaactgtagcagggaacactgaagattttaggtcaaccacgagaacctaggaagagatactggatgtgttcctgtaaggacaccagtcatatgggatggaggcacactctgtgtccagatatgacctcactttgaacgttaactaatttctacttggcaatgggccctaattttcaacaaaggtgaaccttttggcagggacagggtgttagcacttcaactatatctttctattttggggttggggggtgagacacatatttaaccacataacaccataccaacacaagcttttcacataatggcctatcttctggcctcaccctatatgcacaactgtgtcgagaattcg

SEQ ID NO: 230177 - DNA, 441 bp, Homo Sapiens
cgtcgcaactaaggacaccagcagaacgcacggcgtccgtatctgcggtatgcagatgtatgatgcgcagcatgataagttggtattccaagataagtattatggccggaatgtcaagccacatgaatttacctctgtgctagagtcctttttccacaatggctaccaagtgcttgtgcaccatataccaccgctggtggagaagctgcattgcttagcacgccatgcatgcaagctcgtcggctatcgattttacgcaagcagttggctgctcatttacgacggggatattcgccgtcaaaacacactatggcagggtttcgaagcagatgtctggcaaggggctcggcgtccatcagcgcagtcagatgcgaacacggaacattcagagtcgtttccgcaaatgacgcctggatcagaggccagcacagggtaccgagc

SEQ ID NO: 230178 - DNA, 178 bp, Homo Sapiens
ctgtgtgatttggctggatctttcccaagacattcggggcgaccggaggagggcagagcccacctttttcgtgaagtccagtccatgcctgtaccctagcaaggcttatggtggacagaagggaagggaagaggaaaggaaggggtgcatgccgccggagtactggccgtcctttcac

SEQ ID NO: 230179 - DNA, 244 bp, Homo Sapiens
cctgtgctgcggtcgctctcgacggtttcctatggacaatgcgctacgcgcacagctcatcatgccgcggctacgtggggaagccagccaggctctcatcgagggcttagtgtgaccattgacggacagactgggcagttagcctggggacagtggtttctgcattccccttcgaccaggctagacgtcacttacattccgcgttagccgcattgtgtccattagggatacccgacgcttcgaa

SEQ ID NO: 230180 - DNA, 265 bp, Homo Sapiens
  misc_feature (69)..(212): n is a, c, g, or t
taggatccctatggacaatgcgctacgcggagtctgtggaacagcccgttcttgcctgggctgtcctgnnnnnnnnnnnnnnnnnnnnnnnnnnnnnnnnnnnnnnnnnnnnnnnnnnnnnnnnnnnnnnnnnnnnnnnnnnnnnnnnnnnnnnnnnnnnnnnnnnnnnnnnnnnnnnnnnnnnnnnnnnnnnnnnnnnnnnnnnnnnnnnncggtgtccacagcggccggaggaccctgggcttgcgcgtagcgcattgtccat

SEQ ID NO: 230181 - DNA, 129 bp, Homo Sapiens
cggtgccttagctatggattatacatcagtctacacttatctacatagattacaagtgatgatataattttagtctttatcataagtacagggttttaatacatcattagttctgttaaacattaagtc

SEQ ID NO: 230182 - DNA, 437 bp, Homo Sapiens
  misc_feature (66)..(183): n is a, c, g, or t
aagcaataatactcccatctcatcccctggaatagctagaattaggcgcctgccaacatgcctggnnnnnnnnnnnnnnnnnnnnnnnnnnnnnnnnnnnnnnnnnnnnnnnnnnnnnnnnnnnnnnnnnnnnnnnnnnnnnnnnnnnnnnnnnnnnnnnnnnnnnnnnnnnnnnnnnnnnnntgagccaccgcacctggctccaagtctagacttgagatgtgctattactcaaggagaacaaatttcccagtagagtagcagaggtagctagatggccctggtttaaccctgtaagaacccgataaaattcccagcatagacgcacagtatctaaggcatgtgactaatattctcagcaaatgtccccaaattcaataattgttctgccctgagtgtctaatatgctcagaacttgggaagaggggtaggtattg

SEQ ID NO: 230183 - DNA, 613 bp, Homo Sapiens
  misc_feature (14)..(14): n is a, c, g, or t
  misc_feature (326)..(326): n is a, c, g, or t
tcaggttatcccanttcatagaggcccacggacttaaggccagttcatgcaggaagccaaagatacagatcttcaatgagagaccaggaaaggaccctgagaagccagaggccagcatggaagtgaaggggcagaagctgatcatcaccagggtgcttacagaaaagactacagaagcggatctagttgtttgagaacggacgttacctggctggtttggtgcacaacatgtggaaacaggattcattagactgggctattacaagagattactccggtggcctcgttgaattaatctaagaggccacgagaacagaattctacantaggttcatctctcgtgctttttttctagttcagattcaccccgtttggaaggccttatttaggtcaggcctgcttatggtactgtttataaattgggttcagattctgcgtggaagcatccatgtggttttaattaagtgcctcatgtgactccaaaatgaggctagaatcaagtataaaaggttcaagatacatacacaagagttaagttttacttggcactaaagggtggttacagggcctgtcctgtatgggtctggtagggacaggacagttgtggcccata

SEQ ID NO: 230184 - DNA, 217 bp, Homo Sapiens
tgcggcccgcctttagtctacgcgtcctatggctgcctcatccgctcctcacgccaatagggctcaatattctctcatctgcctcttcctacacatcgggcgcggcttctattcacggctcatttctctactcagcacacctgcaccatcggcattatcctcctgcttgcacctttagcaacagccttcatcggctctgtcctccgtgagcctctat

SEQ ID NO: 230185 - DNA, 357 bp, Homo Sapiens
cgaggaacgcactcacagtcgaatcataatcctcatctcaaggactatacacactctactaccaataatagctagtttgatagacatctagcacgcctcgatacaactcgcctataacccccaatattaaactactgggagaacactactctgagctagtaaccatgtactcctgatccaatatcactctcctacatacaggacacaacaaactagtcacagccctatactcttcttctaccatattacaccaaacccggctcaataatactggatacaaagtaagagacggaatacacaacatgtagcccaggcttgatactaccaaatcctgaaaaaaagagacaaacctcctga

SEQ ID NO: 230186 - DNA, 194 bp, Homo Sapiens
  misc_feature (105)..(152): n is a, c, g, or t
tacacgctgtggcaacatgaacggatagcttgccgagaagagcaatcccaagacacatagatttggtcttttcacatagtcccatatttctggaggcttgttcannnnnnnnnnnnnnnnnnnnnnnnnnnnnnnnnnnnnnnnnnnnnnnnattaaattgatcttcaatcactgataccttttcttctgcttg

SEQ ID NO: 230187 - DNA, 111 bp, Homo Sapiens
aaccgtatctcgtcatcatacaaatctagtaatcggcatgagagtcaggaaacgaactcttttaccgatgcgagagaagcgtatactaagctctatagctgtgctcgaata

SEQ ID NO: 230188 - DNA, 234 bp, Homo Sapiens
tgaccagggtaccctggtcgtgaccagggtatcttggccccagcagatcctcgccacgatgggcgagctgaagttgttcgggatgaaggcggccaacgacgagatcatcaaggtcgcagtcaagcgcacccacgagccgcagcagatcgtcggcgacctgctccaggccgagatcagcgagaagcaggcccgctcgatccgctaccagatgacgatcgccaagctgccctgggg

SEQ ID NO: 230189 - DNA, 215 bp, Homo Sapiens
gtgtgtgatctagcagatccttatctgaatccagtccgccatgaatgacaaaaatagacggatggccttgtacttttattgtcgtcgcagtcactggattcagataggaggatctggattcagataggaggatctggattcagataggaggatctggattcagataggaggctctggattcagataggaggatctggattcagataggagggggt

SEQ ID NO: 230190 - DNA, 207 bp, Homo Sapiens
catccagcaaagttgcacgcgcagggtaatcatatgcatggtaggttgcatgtcagcattgggctgttcaattgtccagttccagtgttttcaatctgcacgccaggcttcatgcggacaggcagcacatgtattccatgttcacttcatcactcacagattcagttctatctcatcagggatggaggtcactgcagctacgcaatt

SEQ ID NO: 230191 - DNA, 355 bp, Homo Sapiens
  misc_feature (88)..(116): n is a, c, g, or t
actcagacaagtgaccgcactgacacattcatggaacaaatcgtggtcaatctttatcaattataaatatgtgtttcataattaaacnnnnnnnnnnnnnnnnnnnnnnnnnnnnngagggccacacctgcagcatgtggaacttcctgggctaggggttgaatcggagctgcagctgctggcctataccacagccacagcaatgctatatctgagctgcgtctgtgagctgcaccacagctcatggcaatgccagatccttaatccactgagcaaggccagggatcaaatctgcatcctcatggatactggttgggttcttagcccgctgagccacaatgggacggtcaacttg

SEQ ID NO: 230192 - DNA, 237 bp, Homo Sapiens
cgacaccgttgcccggactgtccacggggtgccttgggtacccctctgggacctccgaccgtgacaacgggggctcttcctcgttttcttgctcatcagcccattcatgcattcattcaatgcatgcagtcattgcatatggtcagtcattgtgttcatgcgttccatctgctccggcagcagctcatcattgttgcacagcaggcatcagctcattcagcacaggcattcatggca

SEQ ID NO: 230193 - DNA, 230 bp, Homo Sapiens
ctactccagacaagttgaccgggaagacacctgagagaagcaacacaggaaaagctctctgccctcttcttatctatctaaaagaaagacataaatttgccttttcgaagatgtccctcattctcccccacaccagaaagatgacaccaatgtgtctgcataaacaaaccctactaactcttatcttctattagtttccttatatatttacttcggtcaacttgtctggg

SEQ ID NO: 230194 - DNA, 139 bp, Homo Sapiens
taagttgaccgcacatatcaatatactaacgaccccaatgtatgcccatgcagcatgtgacaagggccaggtgcttgtgtttacctgtacttattcaggcactccggtcaacttgtctggagtacggtcaacttgtctt

SEQ ID NO: 230195 - DNA, 204 bp, Homo Sapiens
ccttactccagacacgtgaccggatggctgattatggcatcagaaatggccatttactcttcctggcattcagctgcatgggggggtaatcgccggggacagaataccttatttccttttacttctcacttactaaccacaccctttgaaaatttcctaaagtcaatgataaagataaaaagaaagcggtcaacttgtctggag

SEQ ID NO: 230196 - DNA, 388 bp, Homo Sapiens
gtaaaaggatttttagaacaaggaatctgtaggtatggtgcccagctgtacttcagcacattcccaggaagaactagcagaatggcagaaaagatatgcttcaccggcctgataacaattgaaacagcaaaatgagaataaacagctctcaggcagctacatggaaaccttgcactagaaaagtggatgaattcattgtctcctgaagcaaagtgccttagtgaactgctatagaaccgagtaaaggtagcagcacaactccatgaccctgtcagcttacatgtcagccaccaataaaatcctcaccagcacatggaacctttgactctcaacttgctaagccctgccaagaagtgcctgtactcgctgtagcactggcctttaatga

SEQ ID NO: 230197 - DNA, 389 bp, Homo Sapiens
  misc_feature (66)..(79): n is a, c, g, or t
gtatccctcaaaccgtcatcctgctgactcccactaatcccactcctcaccctccactccatgtcnnnnnnnnnnnnnnggaaacaaagtctcactcggtcgccgaggttgaagtgcaggggcgcaacctcagctcatggcagcctcggcctccggggtccaagcaataatctcgcctaagctttccggagaagcgggaactataggtgtgacccaccatacccaagtaaattttggttttcaaaagatggagttccgccagtgttgggccagggtgtgttctcgaaactctgtgacctcaagtgtatctgcccacctgggcctcccaaagtgcgtgagattacgggcagtgagcctccacgcccgggcacagctggaggtgtgtcctg

SEQ ID NO: 230198 - DNA, 144 bp, Homo Sapiens
cgccccaacactttccccaacaggtcagcaatttgtgtgggttttcattccactgcaggtgcactcacatgccagtcatctttcatgttttcaatagcatagggcaagcaacattgcgtccagccggtggggcattcctctcag

SEQ ID NO: 230199 - DNA, 251 bp, Homo Sapiens
ggaggcgaattctcactctgtggcccatgcggaattgcagggcattaatctcagcccactgcaaccttctgtttccccatttcaagcaatttcctctgttttcagcctcctccagttagctgggatttccaggcattgtcgccacaaccccgtgcttaattttggttatttttagttaaagcacgtgtttcctccatgttgggctcaggcttggctcatcaaacctccgcgaccctcaggttgactccgcc

SEQ ID NO: 230200 - DNA, 108 bp, Homo Sapiens
gtgatttatcccaacacgtggctgagaagtgattcaggcgtcttttagtcttccgaaactccttgctgtatgtgttgggcgataacattgtatttatccccaacaccc

SEQ ID NO: 230201 - DNA, 207 bp, Homo Sapiens
  misc_feature (74)..(100): n is a, c, g, or t
  misc_feature (129)..(150): n is a, c, g, or t
ttatcgccaacacctgcctgatgatgccttaagtccaagcagaagaagtctaattcattccttttcttcttggnnnnnnnnnnnnnnnnnnnnnnnnnnngtggaaaggaattttgtgcttggcccccnnnnnnnnnnnnnnnnnnnnnntccccggtggagggaacccccggcctcgggggtcgaaaatccttgtgcctaggcccc

SEQ ID NO: 230202 - DNA, 152 bp, Homo Sapiens
ggaagagtcttgccaggaacctgtggcaggatcggagaacagtcgtctgtcaaacgggcaagacacacagaaagtccagtggtgctccacggtattccaatgggactgcacactcatgtattgcacccggttgtagaggggggatcctctag

SEQ ID NO: 230203 - DNA, 320 bp, Homo Sapiens
  misc_feature (134)..(264): n is a, c, g, or t
agaggatcccgtgatgtatccccaacactaaggtatcctggatgtatatgaatcttctagagggcattcttcagagtagattagttagcctcctggtgttgcttttcttttagagatggagtctcaccctgttnnnnnnnnnnnnnnnnnnnnnnnnnnnnnnnnnnnnnnnnnnnnnnnnnnnnnnnnnnnnnnnnnnnnnnnnnnnnnnnnnnnnnnnnnnnnnnnnnnnnnnnnnnnnnnnnnnnnnnnnnnnnnnnnnnnttgtgtgtgtatctttagatagagatggggcttcaccgtgttgggcgataacatca

SEQ ID NO: 230204 - DNA, 245 bp, Homo Sapiens
  misc_feature (60)..(186): n is a, c, g, or t
ccaagacatcattcctcctggcttcaggggcagccagtggaatggaaagaatgtgggatnnnnnnnnnnnnnnnnnnnnnnnnnnnnnnnnnnnnnnnnnnnnnnnnnnnnnnnnnnnnnnnnnnnnnnnnnnnnnnnnnnnnnnnnnnnnnnnnnnnnnnnnnnnnnnnnnnnnnnnnnnnnnnngcaggttgttgtcatctgagttgagcactggtcacattgaaggtgttggggataaatca

SEQ ID NO: 230205 - DNA, 521 bp, Homo Sapiens
  misc_feature (139)..(423): n is a, c, g, or t
cggatccttagttcgacggacattcacatatctgcatgggctgggctggacagtgtcatgcaagggatgtgatacaagtgcaggttaaagcagaagtgtgtgaaagtagtaggatgggtgagttaagagtgggatggannnnnnnnnnnnnnnnnnnnnnnnnnnnnnnnnnnnnnnnnnnnnnnnnnnnnnnnnnnnnnnnnnnnnnnnnnnnnnnnnnnnnnnnnnnnnnnnnnnnnnnnnnnnnnnnnnnnnnnnnnnnnnnnnnnnnnnnnnnnnnnnnnnnnnnnnnnnnnnnnnnnnnnnnnnnnnnnnnnnnnnnnnnnnnnnnnnnnnnnnnnnnnnnnnnnnnnnnnnnnnnnnnnnnnnnnnnnnnnnnnnnnnnnnnnnnnnnnnnnnnnnnnnnnnnnnnnnnnnnnnnnngaggaacacaaaaaaggacgaagaattgagatgtataccaggcttaatcttcagggtacctctagatcaaggctcgtctaacacttgtggcccaggat

SEQ ID NO: 230206 - DNA, 194 bp, Homo Sapiens
  misc_feature (120)..(146): n is a, c, g, or t
tacggatgcattcactgtgtgcttggagcgcccattggtatacccgtaaggagcttggttctatgcattctaatttgaggtcccacacaggctgttaatcaatttttataagtctgaaannnnnnnnnnnnnnnnnnnnnnnnnnnaacaaattactgtccgtctcaagagaaggacgtgaggagtcccatgtg

SEQ ID NO: 230207 - DNA, 771 bp, Homo Sapiens
  misc_feature (86)..(692): n is a, c, g, or t
ggtcggtaccttagacggacgcattcatactaagcatccaagtaaggagaagacaagtgcaaaaagttggtcgggatgagtgacgnnnnnnnnnnnnnnnnnnnnnnnnnnnnnnnnnnnnnnnnnnnnnnnnnnnnnnnnnnnnnnnnnnnnnnnnnnnnnnnnnnnnnnnnnnnnnnnnnnnnnnnnnnnnnnnnnnnnnnnnnnnnnnnnnnnnnnnnnnnnnnnnnnnnnnnnnnnnnnnnnnnnnnnnnnnnnnnnnnnnnnnnnnnnnnnnnnnnnnnnnnnnnnnnnnnnnnnnnnnnnnnnnnnnnnnnnnnnnnnnnnnnnnnnnnnnnnnnnnnnnnnnnnnnnnnnnnnnnnnnnnnnnnnnnnnnnnnnnnnnnnnnnnnnnnnnnnnnnnnnnnnnnnnnnnnnnnnnnnnnnnnnnnnnnnnnnnnnnnnnnnnnnnnnnnnnnnnnnnnnnnnnnnnnnnnnnnnnnnnnnnnnnnnnnnnnnnnnnnnnnnnnnnnnnnnnnnnnnnnnnnnnnnnnnnnnnnnnnnnnnnnnnnnnnnnnnnnnnnnnnnnnnnnnnnnnnnnnnnnnnnnnnnnnnnnnnnnnnnnnnnnnnnnnnnnnnnnnnnnnnnnnnnnnnnnnnnnnnnnnnnnnnnnnnnnnnnnnnnnnnnnnnnnnnnnnnnnnnnnnnnnnnnncggaactattcatcatagaaagaggatctcctatcattatgagccctcttcgtacaagcggcgaacacaaaaagattgc

SEQ ID NO: 230208 - DNA, 659 bp, Homo Sapiens
  misc_feature (66)..(414): n is a, c, g, or t
cggtacgcggtattgagtggcatgtgatgatgagcatttttcatgtgtttttggctgcataaatgnnnnnnnnnnnnnnnnnnnnnnnnnnnnnnnnnnnnnnnnnnnnnnnnnnnnnnnnnnnnnnnnnnnnnnnnnnnnnnnnnnnnnnnnnnnnnnnnnnnnnnnnnnnnnnnnnnnnnnnnnnnnnnnnnnnnnnnnnnnnnnnnnnnnnnnnnnnnnnnnnnnnnnnnnnnnnnnnnnnnnnnnnnnnnnnnnnnnnnnnnnnnnnnnnnnnnnnnnnnnnnnnnnnnnnnnnnnnnnnnnnnnnnnnnnnnnnnnnnnnnnnnnnnnnnnnnnnnnnnnnnnnnnnnnnnnnnnnnnnnnnnnnnnnnnnnnnnnnnnnnnnnnnnnnnnnnnnnnnnnnnnnnnnnntcaataccggtattgagtggccatgtgaatattctgggacttttaccattttaaagggttacataaattataaagtgaggtatttttcatgctatttactgctggggtctgagtaggaacatgaccagtatttcttcagttgggagtcaaaaacctcaggtataccaggtgaaggaggaaaattgaattcagaagagaaatgtgttcctggtgaaaaggggacttcttgtacgggatgttatgat

SEQ ID NO: 230209 - DNA, 220 bp, Homo Sapiens
  misc_feature (98)..(137): n is a, c, g, or t
tgatagagtcttaaccagaggaatcaggcagttggcaggaacacttcaaagcagtgtgatcctcagtcgatgcccaactggaacttactttatccccnnnnnnnnnnnnnnnnnnnnnnnnnnnnnnnnnnnnnnnnggaaacagggcctcactactgatgcctaggcggacgttgcaggggtgaaatcacagcttcactgcaaccttagaacccctcga

SEQ ID NO: 230210 - DNA, 256 bp, Homo Sapiens
  misc_feature (130)..(191): n is a, c, g, or t
gtgctgttcttgaggatcctcggtattgagtggccattgatggttgccatgctgttacgtgtacaaaatgccatgcgatcactacacttcgaaattgttagattttagttgttggcattttgcctcacannnnnnnnnnnnnnnnnnnnnnnnnnnnnnnnnnnnnnnnnnnnnnnnnnnnnnnnnnnnnngcggcaaaggaagcagcggcagcggcggaaccgcggagcgaggaacagcaacagaacaggatgcg

SEQ ID NO: 230211 - DNA, 577 bp, Homo Sapiens
  misc_feature (90)..(104): n is a, c, g, or t
  misc_feature (106)..(367): n is a, c, g, or t
tgcggtgaactgtaaaatacgatcgtgacaagctccaaaacgaacatgggttgaactgtaaaatatgatatatgtgtatacttatacacnnnnnnnnnnnnnnngnnnnnnnnnnnnnnnnnnnnnnnnnnnnnnnnnnnnnnnnnnnnnnnnnnnnnnnnnnnnnnnnnnnnnnnnnnnnnnnnnnnnnnnnnnnnnnnnnnnnnnnnnnnnnnnnnnnnnnnnnnnnnnnnnnnnnnnnnnnnnnnnnnnnnnnnnnnnnnnnnnnnnnnnnnnnnnnnnnnnnnnnnnnnnnnnnnnnnnnnnnnnnnnnnnnnnnnnnnnnnnnnnnnnnnnnnnnnnnnnnnnnnnnnnnnnnnnnnnnnnntgagccactgcacctgggcccaagtaagtttgatgattcaaattctgtctttaaagcaggagaaaaggtgtattggaggggtctttaccccatctcagaccgaattcttaactcctgtctccttgtggtacttgagcttttcttgttcctagtcacaagggaacggtcgcgacagacagccctctcctacttccgtgacaaacgcagttg

SEQ ID NO: 230212 - DNA, 146 bp, Homo Sapiens
agtttccactggacaaccgtgcagggcatcagcagaggctaggcataagtcttccgtaggttacacaagctcgcagggacctggggaatctcactccatatcccgctacagcaggccagcgagcgaagaccgcacccgaaaggagg

SEQ ID NO: 230213 - DNA, 223 bp, Homo Sapiens
tcgtctttaactgcggtgtgggtcatatcgacctgccgcgcgccaaaaagggcggacggcaggaggacgtgcgcgatttacgttccgacgccatcgccgcagaagaatgccaatggcgttacaacacgccggatatggaaagcgcgctcagtaccaccctggccatggccgcgcttctgacacggatcgaacgtcaggcggaggaccggctgcgcatttgccg

SEQ ID NO: 230214 - DNA, 151 bp, Homo Sapiens
aactcagtcagcagcccagttttcaacactgccagcacacatcggcagtggcatgggttctcgcttcaacatcgggcaggcatcgccacagccggagcacaggcacacacattcccttttgtcccacaccgtgtcatccacatttttcacc

SEQ ID NO: 230215 - DNA, 258 bp, Homo Sapiens
catatgctctggatacagctgtcatcattaaatattcaaataattgaatagactaattagacctttctcatcctttccctttgtcttctctaccttctctctcaggttatctttccccatccctgttcctcccaccgtctatatctgtatctaccacatgcttctctgtctcgtttctgactccttttatcattatctcctgttgaaagtggtgaacaagagtaagaattcgcccttaagtattgcttggtgtggggc

SEQ ID NO: 230216 - DNA, 679 bp, Homo Sapiens
  misc_feature (92)..(501): n is a, c, g, or t
  misc_feature (627)..(627): n is a, c, g, or t
gctctgtaagtgaataggtaggtttatcagaaaaagctcagattcatactcgtaaaagtctgagaaaaacattaaaatgctattacaatacnnnnnnnnnnnnnnnnnnnnnnnnnnnnnnnnnnnnnnnnnnnnnnnnnnnnnnnnnnnnnnnnnnnnnnnnnnnnnnnnnnnnnnnnnnnnnnnnnnnnnnnnnnnnnnnnnnnnnnnnnnnnnnnnnnnnnnnnnnnnnnnnnnnnnnnnnnnnnnnnnnnnnnnnnnnnnnnnnnnnnnnnnnnnnnnnnnnnnnnnnnnnnnnnnnnnnnnnnnnnnnnnnnnnnnnnnnnnnnnnnnnnnnnnnnnnnnnnnnnnnnnnnnnnnnnnnnnnnnnnnnnnnnnnnnnnnnnnnnnnnnnnnnnnnnnnnnnnnnnnnnnnnnnnnnnnnnnnnnnnnnnnnnnnnnnnnnnnnnnnnnnnnnnnnnnnnnnnnnnnnnnnnnnnnnnnnnnnnnnnnnnnnnnnnntatatatatttaagagttattatttacccagtagatcaagccaagaccaagttaggtttatgtgtttttggtttaaccaaagaaaatgttcaggcactaaagcagtccatcaatagaacagactgncttttaaaccagggaacacttgtctttgtaggtatttaggttatgaatgaca

SEQ ID NO: 230217 - DNA, 353 bp, Homo Sapiens
  misc_feature (71)..(111): n is a, c, g, or t
gtaggtcaaagtaaaatgaaaatttatgcttttacatgtcccaagctcagtattctgtacatttctctaannnnnnnnnnnnnnnnnnnnnnnnnnnnnnnnnnnnnnnnntgtttttttgtgtagaaatggagtttcacctatgttggccaggctatgtcatatctcctagccctcaatgtgatccgctctgcctcagccctcccaagagtgcgtgggaacacgcggcatgagccagcgcgccatagcctatattcgtgtactatttcttaaagagtatagagtgtgtgaacaacattgagacatactatgagaaaatatgtgtccggggcgcgtcgtgcagcacacacgct

SEQ ID NO: 230218 - DNA, 501 bp, Homo Sapiens
  misc_feature (60)..(313): n is a, c, g, or t
tcagccggtaccgaagtgaaataggtaggtagtgatgcaatgtgagcatgcctcactgtnnnnnnnnnnnnnnnnnnnnnnnnnnnnnnnnnnnnnnnnnnnnnnnnnnnnnnnnnnnnnnnnnnnnnnnnnnnnnnnnnnnnnnnnnnnnnnnnnnnnnnnnnnnnnnnnnnnnnnnnnnnnnnnnnnnnnnnnnnnnnnnnnnnnnnnnnnnnnnnnnnnnnnnnnnnnnnnnnnnnnnnnnnnnnnnnnnnnnnnnnnnnnnnnnnnnnnnnnnnnnnnnnnnnnnnnnnnnnnnnnnnnnnnnnnnnnnacattgatgttttaattccgattccatagcccatagtctattccaattttctccggtttggtatttataactactctttccaacagtaagaattctgtttcttatggtttttaataaacttatttcatcaatctctgggtatgtaaacaatctcccatccccacctccacctacctatttcacaatcg

SEQ ID NO: 230219 - DNA, 659 bp, Homo Sapiens
  misc_feature (41)..(327): n is a, c, g, or t
cacgaagtgaataggtaggtatcttagaataatcttttccnnnnnnnnnnnnnnnnnnnnnnnnnnnnnnnnnnnnnnnnnnnnnnnnnnnnnnnnnnnnnnnnnnnnnnnnnnnnnnnnnnnnnnnnnnnnnnnnnnnnnnnnnnnnnnnnnnnnnnnnnnnnnnnnnnnnnnnnnnnnnnnnnnnnnnnnnnnnnnnnnnnnnnnnnnnnnnnnnnnnnnnnnnnnnnnnnnnnnnnnnnnnnnnnnnnnnnnnnnnnnnnnnnnnnnnnnnnnnnnnnnnnnnnnnnnnnnnnnnnnnnnnnnnnnnnnnnnnnnnnnnnnnnntaataataataataattttttcccagtagaaattattttagacttcagaaacacatgaggaagaaggaagtttatagtacccattaacgtctaaggattaacgtctaaggatcctctggttaacactgtagtgtacttcattccaatccatgtatgtgtatttggttttcctacagatttgaagtgaaacaggtttttccgccaaccttttccccccacccagcatcatatcataggcattttcccattccactaaattttcaaaatggtttttaacagctgcatggtattcctttcaatggatgaaccattaactacctatttcacaatcg

SEQ ID NO: 230220 - DNA, 421 bp, Homo Sapiens
  misc_feature (130)..(130): n is a, c, g, or t
  misc_feature (250)..(250): n is a, c, g, or t
  misc_feature (272)..(272): n is a, c, g, or t
  misc_feature (384)..(384): n is a, c, g, or t
cccgaaaaccgtcacgctcgacgtgcagaacatgacgtgcggactctgtccgatcacggtcaagaagtcgctggagaaggtgtccggcgtgagtgacgtccaggtcaatttcgaccagaagacggcgacngtcacctacgatcccgataaggcccagcccgaggcactgactgaggcgagagccaaggcacgggtggatcaatggatcgagtgcgatccatgaaccccaccttctaaaagatagggcctnagcttaccgtggtatctctggngagcagttccatggcagcaaggcttcgtagtctgagaccgacgacgcatacggcaggcgctcaagtacgtggcgcagccacgtatagggctcctggccgttgaccttggcgnctcgaccaagctggatatctgcgcactttgccggggg

SEQ ID NO: 230221 - DNA, 471 bp, Homo Sapiens
  misc_feature (20)..(20): n is a, c, g, or t
  misc_feature (67)..(67): n is a, c, g, or t
  misc_feature (91)..(91): n is a, c, g, or t
  misc_feature (188)..(188): n is a, c, g, or t
  misc_feature (327)..(327): n is a, c, g, or t
  misc_feature (423)..(423): n is a, c, g, or t
ctcacacagtactggtgggnctccagcgcaacaatggcgatgatgacttcgattacttgcgccaatnggactccatctacctcgacaactncatccagtacagcgacttcaactcgccgaaggagaagtcatggcaagtgcgctacgacctggatatggagtctttcggtgtgcctgggttgagcttnatgactcgatatgcccagggctgggatgccgactacagcaaggccaacgaagtctatatgcgccgtgatgacaacggcgatccgttgaccaaccagaagcgctgggagcgggacatcgaggccaagtacgtttgtgcangactggatcactgaaggatatgtctttccgtggtcgccaaatgaccacttcgcgcgaacgattacgaagtcggatctggatgaagtccgctgatgncgaagtaccccgctggaaagtctctaacccttggcaaaccgggccggg

SEQ ID NO: 230222 - DNA, 440 bp, Homo Sapiens
  misc_feature (82)..(82): n is a, c, g, or t
  misc_feature (116)..(116): n is a, c, g, or t
  misc_feature (184)..(184): n is a, c, g, or t
  misc_feature (186)..(186): n is a, c, g, or t
  misc_feature (189)..(189): n is a, c, g, or t
  misc_feature (216)..(216): n is a, c, g, or t
  misc_feature (227)..(227): n is a, c, g, or t
  misc_feature (231)..(231): n is a, c, g, or t
  misc_feature (247)..(247): n is a, c, g, or t
  misc_feature (301)..(302): n is a, c, g, or t
  misc_feature (313)..(313): n is a, c, g, or t
  misc_feature (329)..(329): n is a, c, g, or t
  misc_feature (332)..(332): n is a, c, g, or t
  misc_feature (348)..(348): n is a, c, g, or t
  misc_feature (376)..(376): n is a, c, g, or t
  misc_feature (398)..(398): n is a, c, g, or t
  misc_feature (400)..(400): n is a, c, g, or t
  misc_feature (413)..(413): n is a, c, g, or t
  misc_feature (420)..(420): n is a, c, g, or t
cgctgggccacccgctggcccatgcagccgcgcccagcttcatcgaaagcctgagccatggctatgtcggccttggggctgncagcgcgttggcactgtacctggaagagcaggcnctgcgcgaggggcggcgcatgcggattcgggtgcgggcagaagggtttgacggggtgattcgcatggngncgngcggtgcaggtgtcgtggtggtgccgntggcagctggngcancgctggcaagggatgntgccgttgcattgggtagcgcttgaggaaccatgggccaaccgcaggttgctgnnatgcactcggnattttactgcgctacncgnctaatgccgcagggcntgggcaacacacttttgcggtttgaagntaatcaaacaagttgcaaggtngntgcccggccaggnattaatngaacctgcaatttaatgtgc

SEQ ID NO: 230223 - DNA, 399 bp, Homo Sapiens
  misc_feature (21)..(21): n is a, c, g, or t
  misc_feature (216)..(216): n is a, c, g, or t
  misc_feature (233)..(233): n is a, c, g, or t
  misc_feature (254)..(254): n is a, c, g, or t
  misc_feature (313)..(313): n is a, c, g, or t
  misc_feature (319)..(319): n is a, c, g, or t
  misc_feature (331)..(331): n is a, c, g, or t
  misc_feature (341)..(341): n is a, c, g, or t
  misc_feature (374)..(374): n is a, c, g, or t
ataggtggaaaaaatattggngagactgttgaagggttagcacggtaccccattaatgtacgttatccacgagagatcagagattcccttgaagcattaagaaatttacctgttgttaccgagtcaggtcagcaaattatcttaagtagcgttgccaatatccagattacagatggccctccaatgctgaagagcgaaaattcccgccctagtggntgggtctatattgatgngcaaggaccgtgacttagctncagttgtacaagatttgaaacataccattgattcgcaagtcaaactttctcctgctatnagcatnagctattcagcnagttttgggntttatggaacgtgcaaatgctcgacttaaagtnataatttccaattacctttggatgg

SEQ ID NO: 230224 - DNA, 292 bp, Homo Sapiens
gatgactcttgttttagccgcagttgattggcttcggccgggaattgcactggcgtgctgcacagcgcctgatagcgcgcagcataggcgggtgcgtaaaattcgatgctaaggcgttctgcctgtatcgccatgccggccagatcggcaagttgcgcaagccagccgtcaagcagtgaatcgaccacgaagcgtttgtaggcgttgcaggcactgatggaatagaagcgcaaccaagcgcccttgtcatcttacacgaagctggaacggccacgttagttgactgcgtaca

SEQ ID NO: 230225 - DNA, 361 bp, Homo Sapiens
gcctttaagtggccccccccgcaagccgactggggttcgctacacccagaacgacatcgacacctgggccaatgtggtcgcccgctcgatccgtgccggaggcgggcgcaaaggcgacaaggtacatgtttcctacggctatggcctgttcaccggagggcttggtgcacactacggcgccgagcgcctgggctgtacagtcatccccatgtccggcggacagaccgagaagcaggtgcagctgattcgcgacttccagcgcgatatcatcatggtcaccccatcctacatgctcaacctggccaacgagatcaagcgccagtgcaccgacccgcacgagctaagctgcgcttggcatttt

SEQ ID NO: 230226 - DNA, 428 bp, Homo Sapiens
cgctgaagagcgctctatcattcaaatcggtcatgcccaaggtttcagcctgcgcggtattgcctgcttgatcaaccgatccccttcgaccatcagccgggagctgcgccgcaatcgagatgcctgtggcggctactcggcccgcgtggcccagcagcagatgcaggcccgccgtcaggtgtgtcgaccgaagcaaaagctgttgccgggtagcgagcgcttcgaattggtggcgcatatgctgcgtgagcgtttgtctcccgagcagattgccggcaagctgcgcagcatgaatattcccagcctcagagatgcctacgtctgtcgcgagacgatctataacgcgatctatgccttgccagtcggcgagctgcgtaaagagctgatcatctgcctgcgccaaagcaagacgatgcgcaggccgggag

SEQ ID NO: 230227 - DNA, 316 bp, Homo Sapiens
agtacctcgacgcccatggtggcctggcacggcgtcacgcccggcgcatgcagcagcggctaaacctcaagtacgctgtggacatcgatataggtgcacacatcgcgcccgggctgcgcatcgcgcacctaccgggggtagtgatcacccggcacgtgcgcatcgggcgcaatttcttcatccggcagaactgctcgatcggcatcaagacccttggcctggaggaatacgcgctgcgcattggcgacaatgtgagcatgggcgccaatagctgcattgttgccgatcgcatcgatattggcgacgacgtggtgat

SEQ ID NO: 230228 - DNA, 255 bp, Homo Sapiens
ctgaatgcctacaaacgcggcacggcgcctgcacatcgctttgagggtttggacctgacccaggcgcgcaacaaccctgaattgctgggcatcgccatgacgcctgacaacctgcaaatcgacaaggaggtacttgagtacgcgcagcacgggtgttcgccgatcgacagtgcgcatggctttcacagccgttggctacgccggttcgccctgaaggggtatctgggcaacgcgatgaaccgacacacgctgaat

SEQ ID NO: 230229 - DNA, 152 bp, Homo Sapiens
cgctgatgatcttttatgaaccgtccgacggcctgcccgcgtaaccgcccagaaaagtgcgttaatgaaaatcacgacattccctcatctttcctgaacattgataccgaccgctatggcagtgcctggctggccttttcgagcgacccttg

SEQ ID NO: 230230 - DNA, 180 bp, Homo Sapiens
tcaaaagtatcccaacataacctcaagaaagattcgtaagcataaaagcaatgtgcagcatgcagctcgcttttcgcctgatactgtggctaagtcactaaaccatactagggcggttaattttttggcgtatgccgaagcgactcttgagcagcaggagtctgagttcggcgcctattg

SEQ ID NO: 230231 - DNA, 140 bp, Homo Sapiens
gccagccggcgccatcacgcgggagtcatacccgtccatttcgatccaggcctgcccatccaggcgccgaatgcccaatgcgtcctggccggtggccgcaacgggggcctggctttgaaacggcgtcaaatcgagttgcc

SEQ ID NO: 230232 - DNA, 127 bp, Homo Sapiens
taaagcactgaccgcgctgataagttttgtttatcgagagactgtttgggatactccagaaaggtttgcaagcgccagcaccattgcgacgtagcatcggcccgtggccgtagacggggcacaggtg

SEQ ID NO: 230233 - DNA, 388 bp, Homo Sapiens
atccccccacgtggccgcgttttcatgtacaatcagcacggtggctgtggttggcattttttccacggtgaacctcgtgcgcgccttagcgcttgaagttcacagtaaacaggcctccaccggggtgctttacattgggcgtcaggcgcttttcttttgatgacaaccacataaacagggctttgcttttcaattgatgacacgcaggctataaaaccagtggccctgcaaaccccggctttagggacaacaataaaaaatgcctgctctcgttcgtgccgccagcttgaccaactacctggaagtgtcccgccatctgggcctcaacccccatgcactgcttgcgcaggtcggccttaacgccgccttgctcgacgaccccaaccgg

SEQ ID NO: 230234 - DNA, 383 bp, Homo Sapiens
caaagccgtcaaaatacgacggttttgtcaattatttcgttacattgaatgactgttcaacaatgatggccatatggcatcattcaaatcaaaaagtatgcaagagggtgaggcacacaacacaatccgcagcgcatcaagagcctggcgccttaccggtgttccggcctttccgtccaagctcctgaggcctgcacgccaccgtcaaggagcattccatgcagttacggaatatgtagatcggcattcgcgctgccagcgtattcgccctgttgggcatcctggtcctgttcatgggccttatcgcactctacgaagcccgccagatggacacggctaccgacgagatccgggtcacctggatgcccgccgtggtggcgttg

SEQ ID NO: 230235 - DNA, 312 bp, Homo Sapiens
cgctgacggtggttgctgatcgaggctattacaaaggcccgttcgatggccacaagcggccgaggctccggcacagttgggtacaacgtacaaacagcagtcgacgacaaacgccatctgatcattgcccatgaggtgaccaacgttcgtaatgatcgcgggcaactgagcaatatggctaaccaggcacgtgaagaaatcggtgctgaggcgctgacggtggttgctgatcgaggctattacaaaggcccggaaatccttgcttgcgagcaagctggcatcaccacctttgtaccgaaaccactgacatcg

SEQ ID NO: 230236 - DNA, 119 bp, Homo Sapiens
aggcacaggaccaggttgtcgtggacggtttcttcctcacgcctgcgctgcttaaaaccgagctcgacactgacgaaaactcgatggttacagccgagatcccaggtggccgactcgca

SEQ ID NO: 230237 - DNA, 411 bp, Homo Sapiens
tcagcacccaggtcactgatgagccaggtacgccaggcaacgaaggcgatatcgttaaggtcaccattacggctgaccaggtatcggtcgccgagaacgtgaagccgaccttcaccgtacacgtcaatcagccgctggatcacgacctggtcgtgaccctgagcaacaatgccacggtcaccatcaaggctggggagaccagtgcgccgtacgagcacgctgcacaaggtgacgacgtctaccaagacgctggcgaaatcagcctgggcatcaagtcggcggtggacgccacgggcgctaccttcgagaatctgcagttgggtggtgatgcttcggtcaaagtgaccgacaccatcgacgaagtggtagccaaactgaccgccacgccttcggtcacacgaggcggcgaga

SEQ ID NO: 230238 - DNA, 439 bp, Homo Sapiens
gaggatccccgctgacgactcctatctttaggctgtattgggtattcacatccaatggtgagtgcaattaccccgatcattacagctcgaccgactggagtgagctagcgactcggtttccaaaaggatggcgagatcatgactactaccaatggctgcaccgttcacatatctcgaaggttttcgaaccggatgatccctacagcgactatgtcgagtacgaggacgaagaagctgggtgcctggaacagcggctttcgggattgcttgctcgcctgcagaccaaaagcgggcaaacagttgaggaattcaggcactggatgtttagtgcagtttgggtagacgtccctgcgctacgcattgttgagagctgattggcgggtgttaatgatcattatgaaaaagggcgccatgggcgcccttattcattacgctctca

SEQ ID NO: 230239 - DNA, 194 bp, Homo Sapiens
acaatgtcggagacaatgaggaaatatccggcgaaaccccgatccagatcatgtatgagctccacgagcaggacgcccaagtctacgagaatatcttcaaagctatccctgagggcttgcatctctatgggagggaacttcctcataggtgcgctacgctacaacttttccgcctcacctttcggctgtctgac

SEQ ID NO: 230240 - DNA, 159 bp, Homo Sapiens
gggtggactcgcgcctacctgggcgatttgaaatgccgacaatgtagtgtctgcatcccgccaggatgaatgccgaggttctagcgccagtggccccgagtagtgcttgcgcattagctcaaaaaagttctgagcaatttttgctccatactccagtga

SEQ ID NO: 230241 - DNA, 164 bp, Homo Sapiens
acgatctagccgtcggtcactgcgttacttattcctctgtccttgttcacgtctttcaacatgttgcagcaaacgagagtcagccccagcgcagatcagcgcttgttggcgagcaggtacagccccacagccagaccaacggcgcacaagcctgccacatagta

SEQ ID NO: 230242 - DNA, 144 bp, Homo Sapiens
accgaagccaccgccgccgccaatgctgaagaagccgcccccgccgctactggaacctgaggagccaggggtgatgacaacatcacccgtggagctgtcatgaagtgtgttttgagccatacagattctccttctctgtatggc

SEQ ID NO: 230243 - DNA, 119 bp, Homo Sapiens
ggaccccgcccaagccaacaccctgttgattatcagtgtggtgatcggtgcgccattcttcgtgttcttcggctggctgtcggaccgcatcggccgcaagccaatcctgatgctcggcc

SEQ ID NO: 230244 - DNA, 307 bp, Homo Sapiens
accgaatggtcgaagccgaacggcgaaccgatggccagtacccactcacccaccttgagcttctcgcaatcacccagcttcacgatcggcaggttcttgccctcgaccttcagcagggccacgtcggtacgcgggtcggtgccgaccaatttggcctgcagctcgctgcggaccgacaggcagacgatgatctcgtcggcgtccgcgaccatcgggttgttggtcagcacgtagccttcactggcaaatgataagcccgagcccagggactgcgcctcgcgctggacgacaccgtgtggggagctct

SEQ ID NO: 230245 - DNA, 420 bp, Homo Sapiens
cgtttggccaataagccggcataccaaatcctgagcagtgatggttccaccacgcatcgcacaattcactaacgccaaccaggcggcccaggcggcggacgtggccgcggccatttccctgcaggtactcaagggcaccattcgggccttcgacccgcgctaccactcggtcaaggcccatgtcgcccaggcgcagaccggttgctatatcaagcagttgctgggtgacagccagctgatcgaggagaacatcgactaccgcctgcaagacacctacagcctgcgcgccatcccccaggtgcatggtgcctccaagcagttcatcgcctacgcccaggcctgcatcgacaacgagatcggctcctcgagcgacgatgtggcaaccaagaagacccggtgagctttgccttcaacgcagcc

SEQ ID NO: 230246 - DNA, 231 bp, Homo Sapiens
  misc_feature (67)..(67): n is a, c, g, or t
gcgcaaggccgccgctatcgccgagcaataccaggccgtgatcgccaactggatcgcccgccaaagnggctcgacccaggccaaggccggcttcgaggcctccatcagcatcaaagcgctgcacgaagcctgtgcccttccctcgcgcagccaaggcgaattactgccttccacagccggccgcctgagcatcgcacggcgccgcccgctgggcgtgatcggagtcatcag

SEQ ID NO: 230247 - DNA, 240 bp, Homo Sapiens
  misc_feature (28)..(28): n is a, c, g, or t
caagatcgacacgccgcccatccgcggnctgcccgacgacccacacgatgccgccatcgcccgcgcgatcattgcccttggccgcagcatgcagctgacgatcattgccgaaggcgtggaaaaccaggcccagcagcgttttctggcagcggaagggtgtgagcagatccagggctacatcgtcagcctgccgctgccaccagacgagttcgcggccgcggtccttcgcatagcactatg

SEQ ID NO: 230248 - DNA, 336 bp, Homo Sapiens
gcagatcatcacttcgacgatgtcggcctgctggtagaccatcgcgcaccaggcccctcccaccaccatcaggccgttgccgagcaggaaggcaacgatgctggccaccaccgccacccgtccgctgcgcgacaaccgggtccagttggtggcctgggtggcaccactggcaaaggtgccaaagaccatggtcactgctgccgaaaaggtcatggtttcatgcggcaccaccgccgccaggccggcaaagccaccggcatcgcgggtgtcggtgccgctgatgttcgcgttgcttggtggtggcgatggtcatcgacacccgcgatgcgggtaccg

SEQ ID NO: 230249 - DNA, 281 bp, Homo Sapiens
  misc_feature (33)..(33): n is a, c, g, or t
ccccttcacccaggaaagtgcgatcttttagtntcgccttgccgccgcccctcggacggccgcgacccagccaaggacgcgctcgcctacactccccgacacggtctggcgtaatcgcgtcgagttcccccgtggtcgtgccgaggtccaggcagttctgacccgcaagtggaaccatgaactggaataccgcctgatcaaggaactgtgggcattcaccggcaaccgcattgccgtgcgctatgcctacgagtaccacgacgatagcggccagtggttcc

SEQ ID NO: 230250 - DNA, 315 bp, Homo Sapiens
atgagtggaccttgatgggcatgccgatcgtggcagcgccttcgagttctcgttcacccccggggccatgggcgccatcgtcggcgaacgtttcgtgcgcgcggccaactacgccctggagcatcgctgcccgatggtctgcttctccgcttcgggcggtgcgcgcatgcaggaggcgttgatctcgctgatgcagatggccaagacctcggccgtgctggcacgcctgcgcgaagaaggcatcccgtacatctcggggctgaccgacccggtgttcggcggtgtctctgccagccttgcaatgctcggcgattt

SEQ ID NO: 230251 - DNA, 212 bp, Homo Sapiens
gtagcaaaggggcttcgtaacccagccgggccaggttctggaacaacaggctcttttccggggcaggctgcccaccccagcatgcgacgactgcccacagctggcacgcagcacgcgaatggcggctgtgccgctgtaggaagtcgccgagttgaactggtcgaagaccacgttcatgcgcgacagcaacgggttgtcgcgcagccccacgg

SEQ ID NO: 230252 - DNA, 354 bp, Homo Sapiens
  misc_feature (77)..(77): n is a, c, g, or t
atcaggtcacagggggtgcgtgacgcggcgatcattgccttgctgtacggcacaggcatgcgcccgccggagtcggncgacatcgacctcgaccaggtcgactttcaagcgcgcagcttgcaggtggtgggcaaggacaaccaccagttggtcaagtacgcaccgccgtgggcgttcgagaagatgcaagcctgtcttgacctgcgccgccaggacctgtctgccggggcggaagatgacccgtttctgttcaactcgatccggcgtgggaggcacattacccgagcgcgaattaccaagcgtgcgatttactatattttcccgcagcgctgtgcgctggttggggtttatatt

SEQ ID NO: 230253 - DNA, 261 bp, Homo Sapiens
atcctcgaccgccatgcaactgcatgatcgatttgaggattgccagccctaaactggtcccgccctccaaccgcgaacgccccgcgcccacccggtagaaccgttcgaacaagcgcgactggtgctctgcagcaataccaggccctcggttctccaccgctagccgtacttcgttgcccgcacgctcgatacgcagatcgacgggctcaccttccgggctgtgccgaatggcattgctcaacaggtttgacagtgctcgct

SEQ ID NO: 230254 - DNA, 324 bp, Homo Sapiens
ctgatgaactcactgctgcccaaggccgtgcgcagggcgctgaccgatagtacaggagcgccagcgccgccgccgcgccgaagaagcattggccgacgttgaggcgcgtgcttggatcgccatcgacgctgccggcatgggcacttggtacctgcgcccgcaggaaggcctgctgtgttgggatgaccgctgcaagacgttgttcggcctgcctaccagcaccgaaatgagccttgaggtgtcctcggtggatctaccccgatgacctggcaatggtgcgtgacgcggtggaatatgccatgcgccccgaaagcgaggggcagt

SEQ ID NO: 230255 - DNA, 257 bp, Homo Sapiens
  misc_feature (11)..(11): n is a, c, g, or t
atggcgctgangactccgttccgtcgctcctcattgagcgaggcgtacatcaacccacattcaacatcatcttcaagctcccccctgcgctgggctgtaggccgcccgatcttgtggcagatgttgagagctttatcgcaagacagccctagccggctttgtcctgttgcaagccgccaaaccactagcctgcccaacacgcctcctaagcccttacaaggaacaagtaatgaggcgccttgtcctttccgtttgcc

SEQ ID NO: 230256 - DNA, 298 bp, Homo Sapiens
tccgctcagggtgggcaggtgcgcctcgccacagaaccagattggccacaggtgccaagccctcgccgtggcgctcggcgaggggcacgtagtcgatggaacgggtttccagattcagccgtccgttggcggaggcagtcttgggagctgacatggggttcgcacctttattgatattgttgtgagcacagcaaagtcgtcgcttcccgcgactaggcccgtttctcttccagggcttgatgcagcagcgcttccaggtcttcgagactgcttgggcgcggtttggtctgccgcgcct

SEQ ID NO: 230257 - DNA, 284 bp, Homo Sapiens
  misc_feature (13)..(13): n is a, c, g, or t
  misc_feature (79)..(79): n is a, c, g, or t
aggaccccagtgntgtcgggcaggctgcggcgtggctgatcgtgacgtattcgcgcacactgaaggcccccccatacgngcgggtaggggataacgaaggcacggtgaccgaggtgggcatgttcaacaccaccatccgcaccggtttgggcgaggtgttgacgctgtccaacttgatgatcaccgggtcggtgacgcgcaactattcacgggtggtgcagggtcaggggtacatctgcgatacggtgggcaccatcgggtttgacacgcccctgcgccagggg

SEQ ID NO: 230258 - DNA, 304 bp, Homo Sapiens
gatgactccgtgcgctttcgatttctcaacaatatcccgcaacggtgtgatgtatcttgactgggagcgcccccccttctgactttggctcaagcgcctggaatccgagcgattcaaaacatcacctgacgccaccgacgaagcgattgtcctcaccgttcaggaactgaactggttactcgactggtttgacctctggcgcaatcgcccgcatcaggttttgacgccgcgattcgtcgcctgattcggtataatccgaggcatgatttccatgcccgaagaccttgccgatgaccccgtggag

SEQ ID NO: 230259 - DNA, 271 bp, Homo Sapiens
  misc_feature (15)..(15): n is a, c, g, or t
gatctacaactgccngtccgtgaccagaccctgttccagcgggccgacaacatcgaaaacggctggcgagcggcgcagccgttctcgatgcctgggcccagggcggcgatgtgcatggctacccggccggcgaagatgggcccgaagcgggcaatgaattgctggcgcgggacaagcgcgagtggcaccggttggggtaagacttttgtaaattctgtgccggccctttcgcggccaaagccgctcccacagggataccacttcctttagg

SEQ ID NO: 230260 - DNA, 287 bp, Homo Sapiens
  misc_feature (119)..(237): n is a, c, g, or t
ttccagatgtatcccaattcaacttgcggtgacgcaatcgctccggtcagtagtacgctgtgagacactaaggtggtgacacagatttagatgaactgcatgatcctttaggcttacannnnnnnnnnnnnnnnnnnnnnnnnnnnnnnnnnnnnnnnnnnnnnnnnnnnnnnnnnnnnnnnnnnnnnnnnnnnnnnnnnnnnnnnnnnnnnnnnnnnnnnnnnnnnnnnnnnnnnntctaggtgatcctcatgccatgtctgctaaagcgtttcttttcattttca

SEQ ID NO: 230261 - DNA, 363 bp, Homo Sapiens
  misc_feature (59)..(301): n is a, c, g, or t
atcgcggcggccttctttattatcgttgttattattgagacatggtctctctctgtcannnnnnnnnnnnnnnnnnnnnnnnnnnnnnnnnnnnnnnnnnnnnnnnnnnnnnnnnnnnnnnnnnnnnnnnnnnnnnnnnnnnnnnnnnnnnnnnnnnnnnnnnnnnnnnnnnnnnnnnnnnnnnnnnnnnnnnnnnnnnnnnnnnnnnnnnnnnnnnnnnnnnnnnnnnnnnnnnnnnnnnnnnnnnnnnnnnnnnnnnnnnnnnnnnnnnnnnnnnnnnnnnnnnnnnnnnnnnnnnnnntcacgctccgtgcctcaccttttgttgaggcctgcgggctttttaagaacacgatgggctca

SEQ ID NO: 230262 - DNA, 149 bp, Homo Sapiens
tgatcctagagttccgattgcttgtgtataggaatcgcactgtgcgacgaatcgactaggattactgagagccgggttgactatactccaccatggtgccaggctggggggggaagtaatgaccaccgggagagagctgatgggtccag

SEQ ID NO: 230263 - DNA, 233 bp, Homo Sapiens
  misc_feature (85)..(191): n is a, c, g, or t
cgtgtgagcatcgcacgtcgtactatggttcagcgtttataccaggagccgttctttacatgggcatattagacaaatacattannnnnnnnnnnnnnnnnnnnnnnnnnnnnnnnnnnnnnnnnnnnnnnnnnnnnnnnnnnnnnnnnnnnnnnnnnnnnnnnnnnnnnnnnnnnnnnnnnnnnnnnnnntgaccaacccctcttcctgaagctacgcaggggcccatcaca

SEQ ID NO: 230264 - DNA, 164 bp, Homo Sapiens
tcctcagtggcccccttcagtcccactccagctggcaaggtcagcatcaggaaaggcacggagggctgggcctggcccaggacactcagaccaggaccctcttccctctggaccctgccccatcacttaccagccatgtctcttcattcgtttatccaagaagg

SEQ ID NO: 230265 - DNA, 201 bp, Homo Sapiens
gggcttgacgtacaggaactcggggtctttatcgatgtatcggctgatcagccacggacaggcgatacggtcgatcttcggatgttccctcgtaatccatttcatggcaccacctcacagggtgagtttcaagacgaggcctatgacggcgcaggccgctatgacctcgatcacaccgcgtttgaacttgaacagcgcaat

SEQ ID NO: 230266 - DNA, 110 bp, Homo Sapiens
gatgccacgtcacaggacctgctcactctctgtctcggacggagcggagatggtgtctcggcctctgcaccctcctgacaggtttaacttcccccttggattaaagaaag

SEQ ID NO: 230267 - DNA, 314 bp, Homo Sapiens
  misc_feature (49)..(251): n is a, c, g, or t
tagctggcttccagtgtatcccgtaaggacgcagtagtcatagtgtatnnnnnnnnnnnnnnnnnnnnnnnnnnnnnnnnnnnnnnnnnnnnnnnnnnnnnnnnnnnnnnnnnnnnnnnnnnnnnnnnnnnnnnnnnnnnnnnnnnnnnnnnnnnnnnnnnnnnnnnnnnnnnnnnnnnnnnnnnnnnnnnnnnnnnnnnnnnnnnnnnnnnnnnnnnnnnnnnnnnnnnnnnnnnnnnnnnnnnnnnnnnacgagaaagtaatactagtacatgtttactgtagaagtacatataatataaaaacatagaaaa

SEQ ID NO: 230268 - DNA, 201 bp, Homo Sapiens
tgcctagatttccctgcttcagaaatcgcggtcatacccagaaacaatgtttaaactgggcacctggggccagtccaggtgacacataaaaggaaccagcatagaggcaaacgatctctccttcttcatctcttcctcttatctgctgccctgaatttggactgatggctggagctccagcagccatattgggccatgagg

SEQ ID NO: 230269 - DNA, 161 bp, Homo Sapiens
gcaccagttccgtgccgacaagaggaaaagggccgctgccatggcattagtgacctagcaactggagaacgctggaggtgcagacaatgggcaggagaacgtggtatcagcggaaggctgaggacaggacctgggactcaaaggccaggttcacagtgtgg

SEQ ID NO: 230270 - DNA, 288 bp, Homo Sapiens
gccgacttggcatccaaacgcgctgggatttacacggcactgatgccatcgcacccggcccgagtgtacatggttcataacattattagccaagaacaccatgtcaatgctgatgcctaccacatcgaataaactcacagtaatcgtcacacatcagcccgtagatgtgtatttcccccgtgtgcatttcgcagatcatcgctgggattggacaacggtgccattaacggcatgtcaagggtatccagtagcgtagtacgtagttaggtggcttgcgattctggacac

SEQ ID NO: 230271 - DNA, 192 bp, Homo Sapiens
  misc_feature (150)..(150): n is a, c, g, or t
gcaagggcttgagtggctggggggaatcatccccatgtttggtccagcgaactacgcacagacattgcaagacagactcacgattaccgcggacgagtcaacgaagacagtctatatggaactgagcagtctgagacctggagacacggnccgcttcttctgtgcgaaacatgactactatgacaccagtgg

SEQ ID NO: 230272 - DNA, 155 bp, Homo Sapiens
cagcaaccagctcggttggggcctaccatggggcaaggctttggagcttaaaaagactagagctgcggtgacagtcctcaggaatttacctgtccatgatgcaaatagagaagctggacatcaccatgcagtgtggcagtggcagacgctgcagt

SEQ ID NO: 230273 - DNA, 274 bp, Homo Sapiens
  misc_feature (68)..(222): n is a, c, g, or t
tacttacgcctcctttcccggattcctcagctatttacaaccctactgagcctataggcatgatcaannnnnnnnnnnnnnnnnnnnnnnnnnnnnnnnnnnnnnnnnnnnnnnnnnnnnnnnnnnnnnnnnnnnnnnnnnnnnnnnnnnnnnnnnnnnnnnnnnnnnnnnnnnnnnnnnnnnnnnnnnnnnnnnnnnnnnnnnnnnnnnnnnnnnnnnnnntcatctctacaaaactccatctctacgcaaaaaacataacacaaattagcca

SEQ ID NO: 230274 - DNA, 166 bp, Homo Sapiens
actgatcccccacctgctccgtgggtacagtgccaggtggggagtttgactgggtgctggtacacctgtcacactggtaactgcattgtgtctaatgtgcgagctcagtgtaggacacgaaacctacccgttggatgcggtggaacacatccacctgctccatgcc

SEQ ID NO: 230275 - DNA, 194 bp, Homo Sapiens
atccttctttttaaggactgaatgatataccatatgtgtatatatgccacattttctattatctagttcatccactgattgaaactgaggtagattccataactatgactagttgcaacataatgctagcaataaaacatggagattgtagcatatctaccttggacatcactaatttacagataccttatgga

SEQ ID NO: 230276 - DNA, 196 bp, Homo Sapiens
taccgatcggctagttctcttactcctctagcctatcttgccctccctgaactacttttaggtaaacgtagtattgatatttttggtttttacccttcagatttgttggcaagaataggagaagcaaccaagcctggtgggacagtggagcacattggtcacattcttgtaaactgggtatggactaggccgatcg

SEQ ID NO: 230277 - DNA, 163 bp, Homo Sapiens
agtcttttcaactttccatggaagttggttgtaccttgtaaactatgtttttaaaattaaaaattaagataaagtgtagtccccgtcccgttacaaagtgccaaaacttctaatgtgttgggttcgccttttttttgtccttccttttcatttggtaaacctt

SEQ ID NO: 230278 - DNA, 145 bp, Homo Sapiens
  misc_feature (75)..(85): n is a, c, g, or t
ttgagttttaaattgaagttataaacatcagtatactttatctctaaacacttcagcataaatattcatagaggnnnnnnnnnnnctttctctggagacagggtctcactcggtcacccaggcgggagcgggggagcaatcaggt

SEQ ID NO: 230279 - DNA, 204 bp, Homo Sapiens
caagatccaactacgagctttttagctgcagcaactttaatatacgctatgggagcgggaattaccggggcggcgggcaccagattggccctccaagggatcctcgtaaaagggataaaagggggactcattccaattacggggcctcgaaagagtccggtatggtaattttccgtcactacctcccggggagcgggggagcat

SEQ ID NO: 230280 - DNA, 142 bp, Homo Sapiens
  misc_feature (61)..(77): n is a, c, g, or t
tcaactctaagcacataaaggagcatagcaacaaagaccataccctttgaagtgtgctgtnnnnnnnnnnnnnnnnntttttggtttggttttgttttcagtcagggtctaagagacaggatctcacttggtcacccaggct

SEQ ID NO: 230281 - DNA, 216 bp, Homo Sapiens
  misc_feature (49)..(142): n is a, c, g, or t
gctcgggctgatttgtattttttgctagtagaggcggcagtcaccatgnnnnnnnnnnnnnnnnnnnnnnnnnnnnnnnnnnnnnnnnnnnnnnnnnnnnnnnnnnnnnnnnnnnnnnnnnnnnnnnnnnnnnnnnnnnnnnccaagtttctaaggctacgcttatgtatctggaagcagtcccagagctcgagggtcgtgctgtgaggagcggtg

SEQ ID NO: 230282 - DNA, 394 bp, Homo Sapiens
  misc_feature (205)..(219): n is a, c, g, or t
tgtccaagcctctctggccactccgtctgcagatgtattccagcccctttaccccaccctcagccacacatacacacacaccagggtgggcctaagtccgggcacaagcatttttcttctatgtttcctccttaggcaagctcattctgggtggacaacatctacacacagggactcccaaatttccatctctgagtcctaaccnnnnnnnnnnnnnnngggagacagagtttgggctcgtggttggcctgaggggggagttcagggggcgcgaccctcgagctcagggcaaccctcggcattcgggggcctcagcttcagcggcaccctcggcattcgggggttccagggtgattctcgtggcttcagcctccggagttagcggggattacgg

SEQ ID NO: 230283 - DNA, 147 bp, Homo Sapiens
acatgatggctccacctgccccgggcccacctgactatttttaatggtattttccttttatttgggggggaaacgggtctcatttggttccccaggttggtctcaaaacttcggggagcatttcatttttcagggattgtctttcta

SEQ ID NO: 230284 - DNA, 285 bp, Homo Sapiens
  misc_feature (64)..(216): n is a, c, g, or t
ggcggccacatgatgtccaccgctcgtagctaattttgtaattttttatagagatggcgtctgnnnnnnnnnnnnnnnnnnnnnnnnnnnnnnnnnnnnnnnnnnnnnnnnnnnnnnnnnnnnnnnnnnnnnnnnnnnnnnnnnnnnnnnnnnnnnnnnnnnnnnnnnnnnnnnnnnnnnnnnnnnnnnnnnnnnnnnnnnnnnnnnnnnnnnnnnttcgggcccaggtatagggggtcagcccagagctgtgggtgaaaggacaggcccagggtcccacctgtg

SEQ ID NO: 230285 - DNA, 110 bp, Homo Sapiens
gatgctcaccgctcccactgttgccagactcgacgaccgttggtacaccactggtgggaccgatgacgtcactgcctcatctgcctctgtgccgtgtgcacccgtgtggg

SEQ ID NO: 230286 - DNA, 250 bp, Homo Sapiens
gccggtccggactagtcccattgtggtgcagcggaagcaatcagactagtaaccatgaggttgcaggttcaatccctggcctcgctcagtgggttaaagatccagtgttgccgtgagctgtggtgtaggtcgcagacgtggcttggatcctgtgtggctgtggctgtggctgtggtgcaggctggcagctacaggtccaattggacccctagcccaagaacctccatatgctgcaggtgaactaggccga

SEQ ID NO: 230287 - DNA, 315 bp, Homo Sapiens
  misc_feature (95)..(235): n is a, c, g, or t
aggcggtcacatgattgtcatcgctcccaaaaaagtaaaatagtcacaggaaaatgatgtaaaccaaaaagtaatctctagaaagtcaccaacannnnnnnnnnnnnnnnnnnnnnnnnnnnnnnnnnnnnnnnnnnnnnnnnnnnnnnnnnnnnnnnnnnnnnnnnnnnnnnnnnnnnnnnnnnnnnnnnnnnnnnnnnnnnnnnnnnnnnnnnnnnnnnnnnnnnnnnnnnnnacggggggagcaatcatggtggggttcctctcaagaagctggaccggcgggctgtgcaagctgggaacgggcggcggtat

SEQ ID NO: 230288 - DNA, 153 bp, Homo Sapiens
  misc_feature (69)..(80): n is a, c, g, or t
gacactgtactcatatcataattctttatctccaataactccttcatttcacctaagccagcaatttcnnnnnnnnnnnnaattatacttaaagtttaaggatacttgtgcacttggtggcgtgtagttacttatgtttacttttgccaggcg

SEQ ID NO: 230289 - DNA, 151 bp, Homo Sapiens
ccacatttcaggttcaggcaacatcagcaggcatcatacatttctgtgtaccactccattttgccaggtactcactggcaggtctgcagcaacctttaaacatgcgtgtcgcgtcacggggcatcctctcaaagtcgcaactgctcaggca

SEQ ID NO: 230290 - DNA, 158 bp, Homo Sapiens
tcgacaagcgagcgcttcgccagccgtttctctcgcttaatcgcgctggaaggcaccggggaggtgatggaggagccgggggaggacggcgaggtcgcctcgtacccggtgtacgcgttctgcagggtgagggcgcgcttccatggcgtcgagctcga

SEQ ID NO: 230291 - DNA, 237 bp, Homo Sapiens
tgcatgatagtacgcacggctgggcgcgggcgacccgtatcagtgcgcaggatcgcttggacgggcgtcgcgctgggtctgatcgtggccgccgtcgtcgtcgggccggtcgtgctgctgcgccacgagatcacgggtgtctacagcaacgacccagcggtgcgtgccctggccgcttcgctcctgctgtgggcggccctgtggcagttcttcgacgcgacgcaggtctgcgccatc

SEQ ID NO: 230292 - DNA, 157 bp, Homo Sapiens
atatgagccaggagtcgaggctacagtgagccatgacacatcactctcccaacagcacaacagagcaagactcatttttttggagacggactctggctcggtggcccaggcgggagtgcaggggctcacggcaagctcggcctccggggtggaggcc

SEQ ID NO: 230293 - DNA, 231 bp, Homo Sapiens
ttcactgaagcaagtgatcataatcagtggtgacaattcaactgggcagtgtactcacaggaggtctgagaatcctaaccgagtgctgtcgctacatctgggtcccttccaatacagaaagcaaagtgtaaccatagtaccaggactatgtcaaagatgtctatttatgcatagcacatcaaaaagtaggattcctgtttactctgtctagtatcctcagaaagggcaggg

SEQ ID NO: 230294 - DNA, 155 bp, Homo Sapiens
ggagagtcatgtacaatgagcaactcagttctctgtacaaaacatcaatcatgcggttcggtatcatgcaccaactcagccgagatcctactggtagcctatcacagggaggatgtgacgactattggcaagtcgataggacacataatggaaca

SEQ ID NO: 230295 - DNA, 156 bp, Homo Sapiens
agcaacggcagtcagcagcagcacacgacgtttcatgaaggtctccaaaggttgactcggcaagcgtgggcctggacactcggggcagtggcgtcgcctgcgcgtggcgacgatcctaaaggcttcgtgttcgcattgcaaccgagtgttcgtata

SEQ ID NO: 230296 - DNA, 194 bp, Homo Sapiens
actcgagctcgacgccatggaagcgcgcctcaccccgcggaaacgcgtacaccgggtacgaggcgactcgccgtcctcccccggactcctccatcacctccaccggtgccttccagcgcgatgaagcgagagaaacggctggcgaaggcgctcgccttgaagcgagttcgatggcctccattccacatgtgcgg

SEQ ID NO: 230297 - DNA, 324 bp, Homo Sapiens
agctgagagatgtccaaagtcctgtgcatggtttcacacatttcactgaaatcagagcagctgctgcatatcttctggaactgatctgatccggcgccttgctctgcctggtccatgctgtacttcaagtgtccgcaaaaacaggcccctgctctctgccctcattatgtgacttaatgggagatgccaaggtgggcaggtgctggggctgcaggtctgggaagtggacaaagcagccgtgagttgggaagaatggtcccctctacttagtgttgctagacagcatgtgtgttggaagtgagatctttcaagatagaactgaaa

SEQ ID NO: 230298 - DNA, 173 bp, Homo Sapiens
  misc_feature (69)..(126): n is a, c, g, or t
gtggaaacatttctgaacctttgtgagccaccacaggtggctggttaatgttaagggatacccctagcnnnnnnnnnnnnnnnnnnnnnnnnnnnnnnnnnnnnnnnnnnnnnnnnnnnnnnnnnnttcactggagttggggtgcactagcctcctgacacgtgggtgagttc

SEQ ID NO: 230299 - DNA, 364 bp, Homo Sapiens
agaagtccgagcctcataccgaagctacctcataatgggcaaatggtggcaactggagtcggtagtgcgaacacccagtccgatcctgttctgacttctagctagtttcttctgccctcagtcatgaggggctaccctatcctcccatcctatggtacccaggtgcatggaactagagagaggggaagggaagacgacgacggaagacagtttggtgccaggtgaaggtgtctctgctctgcatacttaattgggccctggccatgactaccagcaatcgtgggtgcagattggctgggccaagggttgggggcatggtgctgatactccctaggcatggtacgagcatgcagattctaggaga

SEQ ID NO: 230300 - DNA, 214 bp, Homo Sapiens
aaatttaataaagtgctttgtgcactggagtaatcagaggctctaataaaaataaaagcttggtagaaggaaagctggattgtaataaaaaacatcatttgagtataaaagatgggaaaaggtatagaaggtaggagatatgggtgagagcacagaagtaggaatgatttaaaatccacaaccgtcgtggctcagtgggaggtgtcgcagaatt

SEQ ID NO: 230301 - DNA, 628 bp, Homo Sapiens
  misc_feature (112)..(204): n is a, c, g, or t
  misc_feature (243)..(286): n is a, c, g, or t
gagtaactcacttgatgatcttgccaccttgcttcaatgagccaaatgccgtcttgaatttaagaaaaaatgggctgtctcactgccagctccgcctcctggggtcacaccnnnnnnnnnnnnnnnnnnnnnnnnnnnnnnnnnnnnnnnnnnnnnnnnnnnnnnnnnnnnnnnnnnnnnnnnnnnnnnnnnnnnnnnnnnnnnaccgtgttaagcaggatggtctcaatctcctgatttcannnnnnnnnnnnnnnnnnnnnnnnnnnnnnnnnnnnnnnnnnnntgagccaccacacccagcctattttctacattttctacaagaaattagtattctgtgttgacattttatttataaattacattactgtatttataaattacattacaggctgggattacaggtgtgagccacgatgcccagcccagatttaaattattgagtaaaagagcactgatttttttaaaaaataaagatgacctctccccaactgctgaggtttgggatgtagaccagggactaataagtaaactgaaggaacagtacaagaaggaacgaaaggggaagaaaggggtgaagactgaaccaataacgtttcatctggaggggcagtcattatatggg

SEQ ID NO: 230302 - DNA, 359 bp, Homo Sapiens
  misc_feature (102)..(307): n is a, c, g, or t
atgacccactgcaacccagctggtgttttatatttttatataattttcttccatcttcataatgaaaagttagcttcatttaagcatcattcagtaagggcnnnnnnnnnnnnnnnnnnnnnnnnnnnnnnnnnnnnnnnnnnnnnnnnnnnnnnnnnnnnnnnnnnnnnnnnnnnnnnnnnnnnnnnnnnnnnnnnnnnnnnnnnnnnnnnnnnnnnnnnnnnnnnnnnnnnnnnnnnnnnnnnnnnnnnnnnnnnnnnnnnnnnnnnnnnnnnnnnnnnnnnnnnnnnnnnnnnnnnnnnnnnnngtatcagactcttttgtgtctgaattgcaaattcgaattatctcagcctttt

SEQ ID NO: 230303 - DNA, 142 bp, Homo Sapiens
cagtggaggtaggtatgtagtaagaggccactatactgcccataccgccctaacccaaatagtatggcagggaaaattttttatgacatacacgaagtgtctaaaaaggaaaaaaagtagttgagtagggggagaataacct

SEQ ID NO: 230304 - DNA, 574 bp, Homo Sapiens
  misc_feature (58)..(475): n is a, c, g, or t
atgcattgtcttccccatgatgttacctttcattggatggtgactccctgcacatacnnnnnnnnnnnnnnnnnnnnnnnnnnnnnnnnnnnnnnnnnnnnnnnnnnnnnnnnnnnnnnnnnnnnnnnnnnnnnnnnnnnnnnnnnnnnnnnnnnnnnnnnnnnnnnnnnnnnnnnnnnnnnnnnnnnnnnnnnnnnnnnnnnnnnnnnnnnnnnnnnnnnnnnnnnnnnnnnnnnnnnnnnnnnnnnnnnnnnnnnnnnnnnnnnnnnnnnnnnnnnnnnnnnnnnnnnnnnnnnnnnnnnnnnnnnnnnnnnnnnnnnnnnnnnnnnnnnnnnnnnnnnnnnnnnnnnnnnnnnnnnnnnnnnnnnnnnnnnnnnnnnnnnnnnnnnnnnnnnnnnnnnnnnnnnnnnnnnnnnnnnnnnnnnnnnnnnnnnnnnnnnnnnnnnnnnnnnnnnnnnnnnnnnnnnnnnnnnnnccatcctggcctcagtgatgcttatttgggagtgtgtttttttcctattactgctctaatcttttaaattagatctgaagagatgctctaatttttttt

SEQ ID NO: 230305 - DNA, 226 bp, Homo Sapiens
  misc_feature (157)..(168): n is a, c, g, or t
tgactccgaggattacgattgcattgtcttcctctaaagacttaaataatttagtctcatttaattctgaaacaaatctcacctgcacatacattcaattgcacacacattcatattaactgttttcagtagctgaatactcaaggtaaaaacgacnnnnnnnnnnnnggaaaagggagtctcgccttgtcccccgggtgggccaccagggggagagcttgtctcc

SEQ ID NO: 230306 - DNA, 500 bp, Homo Sapiens
  misc_feature (114)..(196): n is a, c, g, or t
  misc_feature (225)..(407): n is a, c, g, or t
ggctatagagcatccccatggccggtgaagagatacgaggcaagctttactgacggcaaaacgacgtagcagagggagatagaagaggagggacgtctggacaccgagagatgnnnnnnnnnnnnnnnnnnnnnnnnnnnnnnnnnnnnnnnnnnnnnnnnnnnnnnnnnnnnnnnnnnnnnnnnnnnnnnnnnnnccacccttccagctccccatccatcctgnnnnnnnnnnnnnnnnnnnnnnnnnnnnnnnnnnnnnnnnnnnnnnnnnnnnnnnnnnnnnnnnnnnnnnnnnnnnnnnnnnnnnnnnnnnnnnnnnnnnnnnnnnnnnnnnnnnnnnnnnnnnnnnnnnnnnnnnnnnnnnnnnnnnnnnnnnnnnnnnnnnnnnnnnnnnnnnnnnnnnnncaagctgaaagagctttgtaacactggggttgcaggcacccacctctagacgctaccgcagagccagagcccaaagccctcttcaccggccat

SEQ ID NO: 230307 - DNA, 198 bp, Homo Sapiens
  misc_feature (108)..(126): n is a, c, g, or t
tcgcccgaccaaggagctggaggctacagtgaactatgatggtgcctctgaatagttgctgtactctagtctggtaacacagcaagaccctgtctctctatcttgtcnnnnnnnnnnnnnnnnnnnggaaccgggtttccttgttgtgcctggggttgggttgtggggctgggttttgggggccttgccccgggttca

SEQ ID NO: 230308 - DNA, 146 bp, Homo Sapiens
  misc_feature (79)..(80): n is a, c, g, or t
cgcattcggggagcgtgccgtggctctctcggctctcatgcgtgacgtcagggtaagctgtcgctggtctgtctgtcgnngtctcgtcgtatcactgagagaatctcagtctctcgtcaccactgttgagtgctgcgtctggtcgg

SEQ ID NO: 230309 - DNA, 199 bp, Homo Sapiens
gcttggatggatcacacaggactgtgtgtgtgagtgtggatgagatgcccgtactgttctttgggatcagtcaacagctcagatgagttaatgggagcctgagatcattgtctctgagacatgctgtctgaggagttggtggttcgagctgagcttcgagggattagaaatgaaggggaaggcaggttcgggactactg

SEQ ID NO: 230310 - DNA, 149 bp, Homo Sapiens
  misc_feature (105)..(105): n is a, c, g, or t
  misc_feature (113)..(114): n is a, c, g, or t
acagcgaatgtgtcagtagaggtgtgatgactgacaacgacacttgatagatgtctgacgtgagtgttgatgttgagtctatgctcttgatcatgacaatgggtncgcgctcnnatcgtaatatggtctagctgatactggtgaatgtt

SEQ ID NO: 230311 - DNA, 180 bp, Homo Sapiens
  misc_feature (110)..(110): n is a, c, g, or t
ttatcgtgcgagtgtctcggcatgggagctctgagctgtgttggggctcgtctctcctcctgagctctgagctgctgtcgatgctctgcctcacctgtgtaggagcgcgncctggctgcggtacgagctcgatcgtatctggctgctttccggtaatgttccgctacccccgccgcgcgc

SEQ ID NO: 230312 - DNA, 604 bp, Homo Sapiens
  misc_feature (169)..(408): n is a, c, g, or t
atacatgtttctactggtgagtcttttcaaataaaatgttctctatccttaaaaaaattagcacaagtcttacctccttcatgcagcttctctcatttactattactcacatccatttctccctactgtcttttcttctttttttggagatggagtcttgttctgtccnnnnnnnnnnnnnnnnnnnnnnnnnnnnnnnnnnnnnnnnnnnnnnnnnnnnnnnnnnnnnnnnnnnnnnnnnnnnnnnnnnnnnnnnnnnnnnnnnnnnnnnnnnnnnnnnnnnnnnnnnnnnnnnnnnnnnnnnnnnnnnnnnnnnnnnnnnnnnnnnnnnnnnnnnnnnnnnnnnnnnnnnnnnnnnnnnnnnnnnnnnnnnnnnnnnnnnnnnnnnnnnnnnnnnnnnnnnnnnnntgagacagcggccgcagccactaatgagcttctactaggcaaattcatggatacttaacattcttaatctcatctgacttctctaaattatgacagtattgactacagaagagttgaaaacttttctgtcaagccaaagaaaaaatgtcattattatatatttcatggacccctgattttttactttttctaatgt

SEQ ID NO: 230313 - DNA, 119 bp, Homo Sapiens
tgtcaatctaaggctacgctccaactaaaactccactctacaacgaacgggggctccggacatagattattttgcatccacaaaatcatctaatactggccgcgcaccggcggtccaca

SEQ ID NO: 230314 - DNA, 140 bp, Homo Sapiens
gcgggcgccagagaccagtccttctctaatcactctataattatgctgtatgagctgataaatactcagcactgtgtatgtgtctgcatagtctgggtcttgcactgtaaagcattaatcatcacagcaggctcttaagg

SEQ ID NO: 230315 - DNA, 175 bp, Homo Sapiens
  misc_feature (89)..(89): n is a, c, g, or t
tttgagtgactctaaggatccgtgcgattgacaggagctactgtgactggttcagtagcagctacagcactgcacgtgagcagtcttcncacgactggttcagtggacacttacttcagatttgagcacactcttcccacatgcccggacaaattacaaagatcgcagtaccgat

SEQ ID NO: 230316 - DNA, 212 bp, Homo Sapiens
  misc_feature (158)..(158): n is a, c, g, or t
  misc_feature (168)..(168): n is a, c, g, or t
aggtcctgggccttgatgggctctgagctcgtgctgtttgtgctacttgaccctccaagtgtagcactgatgattagacaatgactagtaccatgctcatctctattcattttttggcatggatatattcaccattgatgtaatcacttattattatngtcactgtgnttctcctccatatcattaattctgatgggcaggactttgttcaa

SEQ ID NO: 230317 - DNA, 182 bp, Homo Sapiens
taacatacatgatggcttctgatatgctgtgatcttcctagtgtggtgactgtatgttacagaaacgtagtatggatgtgatgtcatcatctgtagtacgtaagaagatgtactgcggcgcgggtggtctgggaagcggtcgccccacgctcgtgcagtgcttaatctgaggacccctcctg

SEQ ID NO: 230318 - DNA, 127 bp, Homo Sapiens
taccatggtactggcgatgacgataaagcggtgccacgaggcggtctgagccatgatcgcggcgatgtcgccccccccatacctgcagccaggcctcggcagcagcagcagagtggccgccgaagcc

SEQ ID NO: 230319 - DNA, 112 bp, Homo Sapiens
tgaacgtcctgacctcaatgtgatctgcccacctcgtggctcccgaaagtgttgtgaattacagtgcgttgagccactgtcgtccacgcctccaccctgtctgcgttttcta

SEQ ID NO: 230320 - DNA, 223 bp, Homo Sapiens
ttactaggtgagctttttgtgtgtatgtgcataagagtgatgggtctgtggtattcttggggtggtattgtggtaatgcgggcctcatgaaaatattgggaagtattctcttgcattttgggggaaagttcataatgaatatgaattcttatttaggatgaaagattgttgatttacagtgctatgttagtttcaggtgtaccacgacatgcctcgttaagct

SEQ ID NO: 230321 - DNA, 192 bp, Homo Sapiens
gacccgcttatgaggcactggtttgtacttacctcatggacaactgtgaatgatgtcactaagaaaatggctttatttaaccgagtttgccagagacctgaaatgtcccccaaactaaattagtggcccaccaggagcagaaatcggggacttcatggcaggtttttttggctgctaatcctcgttaagctt

SEQ ID NO: 230322 - DNA, 208 bp, Homo Sapiens
  misc_feature (88)..(109): n is a, c, g, or t
gcttagggtatgtgattatttcttgaaagtcaccagtgacgtgaattgaaggggtcgtgggtcaaaaatctggcacatttctttctannnnnnnnnnnnnnnnnnnnnnacctgttttttctataacaaaccaagtagtctcctgaatgccttgtgtcagtttctttaggaggcaagtcagcctttgattacttacctcgttaagctt

SEQ ID NO: 230323 - DNA, 208 bp, Homo Sapiens
  misc_feature (23)..(23): n is a, c, g, or t
ttttattactgagaggctacaanatctattacgcgaggaactcctcctcttcctcccaccacaaccttttagaaagtggagtctgtactcacttaacatcagtatgccagccactgtgtgcccacgggaagactcgcactcctcctgcacgagtgggtgcttcacccccaccccacctcctaggtcgggagggcccctcgttaagctt

SEQ ID NO: 230324 - DNA, 169 bp, Homo Sapiens
tgaccacgcttactaggacagtctggggacatgacagcagagaggagtgctttggaaattgtcggttaataaaaaatgaaagggggtaaatatgtttactttttcaaatatgtagtatttttagagaaacattccctgagctatttatccaaagtgcctcgttaagctt

SEQ ID NO: 230325 - DNA, 161 bp, Homo Sapiens
ccggaccaccttacgaggctggacctcacacgagtgagagatggacaaggcatgctttgcagagagcacacgtgcttaggcttattaccaccaatatctaagggtcctctaaaattaatggactctccgtgctatacctgccaatctccctcgttaagctt

SEQ ID NO: 230326 - DNA, 192 bp, Homo Sapiens
  misc_feature (32)..(32): n is a, c, g, or t
  misc_feature (62)..(101): n is a, c, g, or t
cgcttatgaggcacagagcttcaatgtctccncgaaagggctgactgctggtggtcagcaannnnnnnnnnnnnnnnnnnnnnnnnnnnnnnnnnnnnnnngagtccatcacttttaagtgtgaaccagggtgcagttacattatcacctaaaagcacaccatccatgcctgcaagagacctcgttaagctt

SEQ ID NO: 230327 - DNA, 611 bp, Homo Sapiens
  misc_feature (110)..(392): n is a, c, g, or t
  misc_feature (403)..(475): n is a, c, g, or t
acgcttaagtaggagacctgtctggatggagagacgccacctgagtggtccacacagcctgtggggactggggcttgaggtggggaaccttctgctcaagaaaagcaggnnnnnnnnnnnnnnnnnnnnnnnnnnnnnnnnnnnnnnnnnnnnnnnnnnnnnnnnnnnnnnnnnnnnnnnnnnnnnnnnnnnnnnnnnnnnnnnnnnnnnnnnnnnnnnnnnnnnnnnnnnnnnnnnnnnnnnnnnnnnnnnnnnnnnnnnnnnnnnnnnnnnnnnnnnnnnnnnnnnnnnnnnnnnnnnnnnnnnnnnnnnnnnnnnnnnnnnnnnnnnnnnnnnnnnnnnnnnnnnnnnnnnnnnnnnnnnnnnnnnnnnnnnnnnnnnnnnnnnnnnnnagaccttgtcnnnnnnnnnnnnnnnnnnnnnnnnnnnnnnnnnnnnnnnnnnnnnnnnnnnnnnnnnnnnnnnnnnnnnnnnntatgaaagaatagttgtagagacacaaactgggcccttgaagctgtgactaacattttggcaacatgcatccctttgccaaataacttcttttcttcttgagtgtgattgttgatctccttctcaaagtaaggcct

SEQ ID NO: 230328 - DNA, 354 bp, Homo Sapiens
  misc_feature (43)..(196): n is a, c, g, or t
  misc_feature (248)..(280): n is a, c, g, or t
ttaattaatatatatattttgagatggactctcactctgtcgnnnnnnnnnnnnnnnnnnnnnnnnnnnnnnnnnnnnnnnnnnnnnnnnnnnnnnnnnnnnnnnnnnnnnnnnnnnnnnnnnnnnnnnnnnnnnnnnnnnnnnnnnnnnnnnnnnnnnnnnnnnnnnnnnnnnnnnnnnnnnnnnnnnnnnnnnntttgccatgtagaccaggctgatgtcgagtgcttgggctcaagcaatccttnnnnnnnnnnnnnnnnnnnnnnnnnnnnnnnnngtgtgaaccactgtgccccgtctacgtggaattgtcctatatgagaacagaggttctaccatcatccagtgata

SEQ ID NO: 230329 - DNA, 382 bp, Homo Sapiens
agcttagtttcagtgccagtagcttatgtctgtaccaaatgtatcaacttaattaaaaaatactttcatgctagaaaaatgctaaccttcatctgagactttagccaagtcataatctcatggctggtggagggtttgatgatattatgagaatgaccaaagcgtgacacagagacacgaaggtagaagatgctgtgttagaaaaaaatggtgccacaaaacttcagttggtcacaaacttgatatcagcgaagcatgtacagaccttaattaaatgatactttattgctagaaaaatgctaaccctcatctgagactttagcaagtcataatctcatggctggtggagggtctgaaatatgatgagaatgaccaaagcgtg

SEQ ID NO: 230330 - DNA, 172 bp, Homo Sapiens
gctcaaatccactatctaaaaaacccccaaccttataacttacctcctcacaccctattcggcaccaatctatcaccctatagaagaactaatgtccgtataggataacatgaaaacattactcctccgcatagtcctgcgtctgattaaaacactgaactgaccaatgctt

SEQ ID NO: 230331 - DNA, 195 bp, Homo Sapiens
accacgcttggtatgcagagtaacaaatttatttccagcactttgtcagtcgccttacaatgtatcctttttctccccctagaagtaagagagagtctaacttgtttcccgatgtaagaaggttatgtctgccctctgccactaacgtctctagatacattgtttctccagcgtgtgatccctgaccaaagtctt

SEQ ID NO: 230332 - DNA, 153 bp, Homo Sapiens
tcagaaggtgagaagagcaacaatactgctgctacttacacaacactgacgacgagagaacagtagatgaaaggacgcgataggcaacatcatcatcattgtgccgagcaggagagtcatctagcagaaagcaaagaaaagcacttgatggag

SEQ ID NO: 230333 - DNA, 101 bp, Homo Sapiens
ctcaactaaacagcagagcagaacactagttctgatatctgtccatactctgtggccgtgataatattctttcatagccttctaaagatctaacttctggg

SEQ ID NO: 230334 - DNA, 306 bp, Homo Sapiens
cagtgtgagaacattgtacacacatcctggaataccttcagtgactgaacaggcacatcttatgtgcaggtcagagttacatggtcaaatcacacaccagtcacccagttgtctcagccagcccacagtatccaaaagagtctctagtactgaattcagcatgtcatagcttgatgcatcgttcagcaagcaattctgacaagcggatttagatgaactgaggacaaaatcttgactagtttcagatggcatcactaagtgaaagtaaagttattgccacgattccgtcctcagttcatctagggt

SEQ ID NO: 230335 - DNA, 578 bp, Homo Sapiens
  misc_feature (130)..(383): n is a, c, g, or t
  misc_feature (398)..(527): n is a, c, g, or t
gtcaattcaatagattcaacaactccaaaaaacaagacattctctttacaaagaataattattaaaaataaaattcagaattccattttatttattcgtttatttttgaaacagagtgtcgctctgtcannnnnnnnnnnnnnnnnnnnnnnnnnnnnnnnnnnnnnnnnnnnnnnnnnnnnnnnnnnnnnnnnnnnnnnnnnnnnnnnnnnnnnnnnnnnnnnnnnnnnnnnnnnnnnnnnnnnnnnnnnnnnnnnnnnnnnnnnnnnnnnnnnnnnnnnnnnnnnnnnnnnnnnnnnnnnnnnnnnnnnnnnnnnnnnnnnnnnnnnnnnnnnnnnnnnnnnnnnnnnnnnnnnnnnnnnnnnnnnnnnnnnnnnnnnnnnacccagctaattttnnnnnnnnnnnnnnnnnnnnnnnnnnnnnnnnnnnnnnnnnnnnnnnnnnnnnnnnnnnnnnnnnnnnnnnnnnnnnnnnnnnnnnnnnnnnnnnnnnnnnnnnnnnnnnnnnnnnnnnnnnnnnnnnnngcatagcattgtatcacagacaaagcacaaaatacttgggcaatcaagctt

SEQ ID NO: 230336 - DNA, 454 bp, Homo Sapiens
  misc_feature (156)..(214): n is a, c, g, or t
aagcttgacgcccactaaatatttgattggtttgtaggtgaggcatgagcactcctttgtagaagctccccatttccatagggtgctaaatacagcaaaatctcacttttttgttgttgttgttgtttaaatacagacgaagtcttgctctgtcannnnnnnnnnnnnnnnnnnnnnnnnnnnnnnnnnnnnnnnnnnnnnnnnnnnnnnnnnngttcaagcgattctctttgcttcagccatcccaaaagtgctggtatttacaggcgtgaagccaaccatgcctgggatcttgtattttccccttttaaatccgaagatacttaggtggcaataatatttgggctgttccataattctctttgaaccaagttacttggtttatatatattcgagtggccaggagttaaccagtatctagtcacaccgtggcaatcaagctcggggtaccgag

SEQ ID NO: 230337 - DNA, 150 bp, Homo Sapiens
tgactctagaggaccccaagcttgattgccgtagtacatatcatcacagttgagcatttgaagcaccaggtatgaatccaaaagctcatgccctgttctattggcccttaggggttttaaaatcccttgggcttcccgcaatagattctt

SEQ ID NO: 230338 - DNA, 583 bp, Homo Sapiens
  misc_feature (51)..(106): n is a, c, g, or t
  misc_feature (169)..(421): n is a, c, g, or t
gggggtatgcccaggttgaagtgcaatggacaatctcagttcactattacnnnnnnnnnnnnnnnnnnnnnnnnnnnnnnnnnnnnnnnnnnnnnnnnnnnnnnnnacaggcatgtgccagctaagctttgtgtattgtatttatttatttcatttttttgagacagannnnnnnnnnnnnnnnnnnnnnnnnnnnnnnnnnnnnnnnnnnnnnnnnnnnnnnnnnnnnnnnnnnnnnnnnnnnnnnnnnnnnnnnnnnnnnnnnnnnnnnnnnnnnnnnnnnnnnnnnnnnnnnnnnnnnnnnnnnnnnnnnnnnnnnnnnnnnnnnnnnnnnnnnnnnnnnnnnnnnnnnnnnnnnnnnnnnnnnnnnnnnnnnnnnnnnnnnnnnnnnnnnnnnnnnnnnnnnnnnnnnnnnnnnnnngtgttagccaccacaccttgccttacttttccccttttatttgctttgctatgaccgacttctgttaagttcaattctccacttcgtgcctttgccaataatagctgaacctgatttgagggacatagatagccttcttgactgatcttactttcagttcat

SEQ ID NO: 230339 - DNA, 144 bp, Homo Sapiens
ttagctgcggagttggtggaaagtaaggatgtggcgagaaactatgctgaggcaaaggatgtcttcctgggcatgttgtggtatgaatatgcaagacaggcatcctgagtgactcgtgtcggtgctgcgtgctggaggacttgc

SEQ ID NO: 230340 - DNA, 464 bp, Homo Sapiens
ctgacgatccatgtgtcctaatgtactgcggacatatacagagtagggctgaaattggccatgcactgtacatgtggatggtgcttattaggacaaaaacatctcagcggctatcactctacaggtaaaatcatgcctatttagtttgaaggtgtaggttacatgtatcccataaatataaagtaagggaaaggggagaaacgctcgctaaaatccggatatataagtgatgcattcatggaattattccacacttcacgcgatgcacatacagataaaagttagtcccttcgaagagctaacactctgtaagacctatgatataagactcctgtaaccttatttacttacttatataaagaaagttttcatacctattaaatcattctcaaggctatatctatcaaggttcatgctttctaattcctcttgggggtggggcaatcaagctgggggatccacta

SEQ ID NO: 230341 - DNA, 187 bp, Homo Sapiens
  misc_feature (76)..(108): n is a, c, g, or t
gtaattttaaaaaataggccttatgtaagcaattaatctttatacttggtattcagttttaacgagctcatcagannnnnnnnnnnnnnnnnnnnnnnnnnnnnnnnnggggaagggcccttgggccatatgagccagggagggaggtggcgggggggcaaagcgggccaagggaaacctcggcccc

SEQ ID NO: 230342 - DNA, 304 bp, Homo Sapiens
  misc_feature (58)..(239): n is a, c, g, or t
taggctggagtgagtggtgcgatgtctgctcacttcactctggctccttggttcatgnnnnnnnnnnnnnnnnnnnnnnnnnnnnnnnnnnnnnnnnnnnnnnnnnnnnnnnnnnnnnnnnnnnnnnnnnnnnnnnnnnnnnnnnnnnnnnnnnnnnnnnnnnnnnnnnnnnnnnnnnnnnnnnnnnnnnnnnnnnnnnnnnnnnnnnnnnnnnnnnnnnnnnnnnnnnnnnnnnnnnnatgagccaccgccctggccctcaaaaaaacgctttcatctgaccttgatataggcgatcaagctt

SEQ ID NO: 230343 - DNA, 160 bp, Homo Sapiens
ctgggcagatgagctaaaagatatgattcgccactctgaagattttcgcccctggtctttgtactacatgcctccagaaaccatgagctggaagcctgtagctggcctgacattggctggagatgcagcccacgtcgcaactccaaacggcgaaggtgta

SEQ ID NO: 230344 - DNA, 243 bp, Homo Sapiens
tctgactcccgtcacgcccatgtcgaagcccccatcgcagggtcaatcgtactctgcagccgtactcttaaaactcggcggctatgtgtatcatacgccatcacactcattctcaaccccccgacccaacacctagcctcccccttacttgaagtatccctatgaggcatcattcatccacaagctcccatctgccgtctgcacaacacagacctcaacatctgcacatatgcatactcttcc

SEQ ID NO: 230345 - DNA, 120 bp, Homo Sapiens
ggaaacaggactcgctatacacaggtgccaccatagtgtgcttagatgatgacagctagcatcttatttgcgttcaacataagtcatccacataacacaatatagatgagaaaagatggg

SEQ ID NO: 230346 - DNA, 135 bp, Homo Sapiens
catcaatcttctcttccatctcctccatctccttctcatttgctgcatcctgcagcaatggtctatgcaatttccaacacaggcattctccaggcatccagccaacatcagcaacgcgcatgcacgtggcaggcc

SEQ ID NO: 230347 - DNA, 155 bp, Homo Sapiens
tgtaattggggtcgttataggaccgcacctgtagcttcatgtccatgggcacgatgcgcatcacgtggttcatgccattgatcagtgtcagtacggcgatcgggcttggcggccttgagcaggcgggcatccttgacctctacctgaatgtcgtg

SEQ ID NO: 230348 - DNA, 360 bp, Homo Sapiens
tcatggccggcattttcggtgcggcgaaagcggctgccgggtcatggcgcagcaggctgatcatgtacggctgcacgctggggcggaagatcacttgcagatccttgggcaccttgtcgtcggtcttgccggcttccaggctgctgatcagctcaaaactgcgcttgagcagggcaggcggcaggtgattgcgttgcagttgctcgcgcaacagcacgcccaccgggcgccctgtaccggcaatcgaaaccacgccggcagcaccgatttgtggggctgccaggctggcgatcattgcgccttcactgtgcccgagcacaaacaccttgccaaagcgcgggtcgcttttgagtttctcgc

SEQ ID NO: 230349 - DNA, 446 bp, Homo Sapiens
  misc_feature (188)..(251): n is a, c, g, or t
catacgcttagcaagcccttatcctgcgtacacatgctctgctcacctcagccattctggtctgcctcgcgcgctagactgtgaattcctctggcaggatctgttcatttctaatcaccgcccgttcccctccctagtgtctagcccgtgctcgggtacgtaagttcaacacacatttaataaatacnnnnnnnnnnnnnnnnnnnnnnnnnnnnnnnnnnnnnnnnnnnnnnnnnnnnnnnnnnnnnnnngcatgaaccactgtgccgggccagaaagtcttagcatcttagtaacatttacatttggcctccctcgtgtgcccttagctattcattaccagagggcaaagatggttagaacatgatttacccaccctaaaatgcattgaaggcatcagagggcaccgtgggccacaaggcctggtagccacaaatgttcagtgg

SEQ ID NO: 230350 - DNA, 182 bp, Homo Sapiens
cagtcttgagcctcgcttggccgggcccgtttctcttccgaccgtgctacgttttcttttgcctgacgacgaccctcccactggacggcacggggacctttcttgtgactctttctgggtcggggtttgtgctagctgctacctggacggccgtacggggcttcgtgtggggtgctcctcta

SEQ ID NO: 230351 - DNA, 279 bp, Homo Sapiens
accctcgttgataatctcacatgttggaggaaagttgaagagacgatgtgaactatggtgtagccatgggcatccaagaatgagatatgtatgttaggttgcatgtcaatgacagtgaagtccacgtagagttgaactcccgcaacctttaccttgagggtaatggtacccatgatctccctcttagagttgtcaaagcctttgacaaagaggtcggatggagtgatcatgtcgcgagtcactccaatgcgtacagcggtacgcataacaccacacaat

SEQ ID NO: 230352 - DNA, 333 bp, Homo Sapiens
tgtgttcacaggatcttattgtgtggtgttatggttgacactaatgtagtcgagcatagccatactacaaaacatgtaaacgatgaggtaaagccctacacaaaaacacacggttagtttgcctacaaaatgagcacacaatgagtcacaaacgtttttagggtttggttttgaaaacacgaaaacaaacgcaagatcaatttcccatctatgatgcatacaaatatggacaaacaaagcctatctcgttacgagtttgggttgctgatgacgaggtttgcatttcactaagtccgttaggggattcgtgtctagtcataacaccacacaatt

SEQ ID NO: 230353 - DNA, 258 bp, Homo Sapiens
agaggacctggaatgtgtggtgtatgccagattaagtcatatctagttctctcttcaaaatcctaatacatcaacagactttaggtttctggaaaacgttgacttgcattttattttatcatctttttttagaaaatagatcaattaaaatataaaattgcccctagtggactttcgaaagataggtttagccatttcgaaagaaaactattttcattccttttcttaattccaaaaacaacttagttttacttggaa

SEQ ID NO: 230354 - DNA, 201 bp, Homo Sapiens
cagaggacccatgatgcactaactatgcatgtcttcatcatatgttagatctaggtttaattcacttgattaccttgagtcaaaccaattatgatgagtttcttaattttttatgtattacatgaagtattgctaatatctatgatcctaaattgcttcaaatctaccaaagcattttccaatacataacaccacacaatt

SEQ ID NO: 230355 - DNA, 244 bp, Homo Sapiens
gcacaggacctgatgtgtggtgtatgtatggtgactaggaagcgaatcaagtgagagtgtgcctatcggaaacagttacatcactgttcgtgcagttgtcgatgttcatcttaccttaagtagttgacatgtttggaatttaaaaaagaccttttatgttccgtgaatttttctagaaaacttaatttctacttctagaccttgcaccatttgtggatattccccttttatcctttcagaattg

SEQ ID NO: 230356 - DNA, 322 bp, Homo Sapiens
tgtcagcgatctggaatgtgtggtgtatgttctgtaatgaaggaatgacagtcgacagtgatgattcagatgccattattttaatggcttcattgctctggtaccatgatagaaggtaagattttttatattaacttactaacaaacaaagttatcaaatggtaactttggcacaactaatctactaataacaaccttaggatagtgaatgactaaaaggtcattagtctaacctactaacaaacaagtaagacagtaaatagcaagaagtaaaaaggaaaaattttactttctaacaagtaaacacatgaagattgaagat

SEQ ID NO: 230357 - DNA, 153 bp, Homo Sapiens
cctgaatgtgtggtgtatggctcagtaaactctgtccttgttaattttataataaaaggttacaaagctctgtcaacggaccgtagctgatataatccagtggctgaatatatttccttcctttgttcgttctcaattcttgattcaatccac

SEQ ID NO: 230358 - DNA, 231 bp, Homo Sapiens
tctttatcgtctaacgtcgaacacctccattcacgaactccactctactcatcgattcatcaaacatgttatcaaagtacgtaggaagcaatcaaggttgccgaaaattaaaagaaccctagggtccgagattcaacaggccttgaagctcacgaaatgcttaccgtcaacctcccaagcgaaagaaagtacaacatcgatccattgacattggcataacaccacacaatt

SEQ ID NO: 230359 - DNA, 180 bp, Homo Sapiens
atgatgatggtgtatggagaagtgaccgagccaataggctgctacgtatccgtttgtcggaatcagatcgaatgtatttcgaaggtttgagatacatctcgaagatttatgataggagggttatggttttactttggtcaaaccgggttgactttcgacgccgcataacaccacacaatt

SEQ ID NO: 230360 - DNA, 314 bp, Homo Sapiens
atgtgtggtgttatgtacaacttgtattatttatataaatgtattgaactctctagaaaaatgtaattatttggtattacaaaaaaacaaactacggtactacataaataacaaacttagatattgtattcttatgtgtcttaaaactacatattagtgtaagcatgatatttatcatttgatatcaatttatgctttattatgacacacagggtaattatatgcatgatatctatcatttggtatcaatttttgaagttatatgcatgatttttacattgaaacaccaaattccaatctactaatatgatact

SEQ ID NO: 230361 - DNA, 627 bp, Homo Sapiens
ggtaaaatgactagaaccccggagatgacggctacttcgttaaatgggtaggatgaatggctcggaaaaagtgaaacagagatggtactctccttaccgaacgaattgcccattaagtgatcgaggaatagagatgtagtggtcgtcgagggatgtacctctaggaaacgaggaggacttggtgtctagattggggatgggataaccgagaccaaacctgccaagagggggagaaagaggaataaggtcggtgacaccattttcgttacggcctaaccctgaaccctcgtgataacccatttttaacatcatatcataggcaatatcagaataatatgaagaaataagggagtaagagatcatacctgtggacacaggacagacgtcgtatccgtttagctcaatgcccggagcggatgcgagaacagataccaaagttatggaggtaggctctctgaggatggtgatgatcttaccatcgttgatcatcttcaactgttggttggaacgttgaagagaccgctgtgaccttggtgtcgccatgggcatcccagaatgagatggtctggtggttgcatgtccatgacggtgcagtccacgtcgagttgaactccgcaccctttactt

SEQ ID NO: 230362 - DNA, 285 bp, Homo Sapiens
catcacgtctggtgtatgagcagtacattgaagtcaattggtgtgatatccgaattaaggtgaaaaatatctaaattggaagactcgaaaagaataacttcgagtatttcaaagaaaacgaactcttgatctcccctacttatgctctttgtttaactcatcatgatccttttttcttctctcattgtttaaatttctacctcccatacattaatctgattggccctcctcatttcggatctagccttctattggccattgagaatgtactttttaggagtgagg

SEQ ID NO: 230363 - DNA, 451 bp, Homo Sapiens
tctgttcagaggatcccgtcctaggataataagaatctcttagacgtgtttgaaaggaagggcgaagaggggcaacttcatgatctaatcaataaagataatttgggattacaatcaaatatgaaggaagttgtaaaaataataatgttagttgtttggtgtcttcaaaaagacttctctaaggggccttcaatgacaagtgtggtcaaggtcttggaatgcgccgttgaagtcgaaacaacttggattacaatttcatgagaaaacaaagacacgaatgaatgaatcatatgattccaatcttattgattttttcccataatgggagtcctatatatacacacactatttttacagtatatggaaagaaatcatgtttatctaaataacacaatttatgcctactatatttatctaaacaacacaatttatactatccatatttaccata

SEQ ID NO: 230364 - DNA, 199 bp, Homo Sapiens
gttatgtgtggtgtatgccaaagctagaggtgcattacattgccttaagagtgctttggaaaggttcttcgttatggcaaaatcgtctcgcagtaccttcttgaatgagatggaatcatcgaagggtttaagccttaagatggaaggggacttgatcatcattatagcgcgaaagtcctcggcataacaccacacaatt

SEQ ID NO: 230365 - DNA, 289 bp, Homo Sapiens
gtcattcatgccttgacatccgtcgcatttcatcggatctcttatcgagatcaacatttggctaaccacggataggcttagcaccatttcttcggcattcattacatttcattgtcgtctaaggagattttccccacagagttgctcaacgtctatgatcggaacatatccctaagcagataccgcgttgctacgcatcagacacttcgtcgctctgattctcactcgagtcatcgctatctccagtagtcgaattcttcgtcgaatgctcatcgatttcaatctccag

SEQ ID NO: 230366 - DNA, 148 bp, Homo Sapiens
taaacattgatattagtagtggctagcagcaaggatctatgggcgtccgaccgtgatgagttcgttcaacgtagcataagaacgactcgtcgtagccatagcgtactctcagatatgagactggctctgaccatctacaaccactctt

SEQ ID NO: 230367 - DNA, 269 bp, Homo Sapiens
gctgttcagaggatcccacaaaacatgatacatacctcgggataatcacatgagtatgctagatctaggctacgggttcgatttgaagtatgttccagcttttgtgttcttcgagtcgatcccttatgtgatagtcccgaggtatgtatcatgttttgtttacttcgggatctatgtgcgagcatggtaggaaatggatagaaactacttaggatagatgtcattgtacctacgtgcttgggaatcgtagagcataacaccacacaatt

SEQ ID NO: 230368 - DNA, 297 bp, Homo Sapiens
aacatgtagacttagaccaaattccatgtcatgatgtatgttagctcatgcttaggattcatatgatgtgttttgctatgtgcatggtgaattacggtaattcacctctcccaattcggcgtgttcttcgcatatgaactacatctgacctgatccccttggtacgtaggtagtctctaatcgagattcgatcaaaaccattttcaaaaccctttcggtttgactatggtaatcacatgatttacgtcgcatcacatgatctgtttgacatcacatgatttgcataacaccacacaa

SEQ ID NO: 230369 - DNA, 360 bp, Homo Sapiens
agcggatcccttatgtatgtatagaaataggtacaaaaccaaggaggttatctattacctttgaagggttactgatggcatagctcgtgtttcactaagtccaataaagggtattagtgtctaaaagaatggaagatagtggtgatacctttgaaccccctcccccttgcgtaatctcatagaatccctaatcacgggccctgtgggagataatagaaggtcgtagtgtatcaaccaaagtaaatgttgagatatctcttaccctcatcagttagtcaacccaagtaagagaagaccacattcaagagataagatcaactagccaccaaaggacgtatatgaatcctatgtgatggagat

SEQ ID NO: 230370 - DNA, 179 bp, Homo Sapiens
gtgtggtgttatgattccatcacactcacaagtacagattctaatcagaaccacaaattgatctgtcgggttaaggagttattcttaatcggagcacaactaaatgtcggagtaatggcttatactgacggttatagcctaataccgtcggtgttactcactaataccgacggtattag

SEQ ID NO: 230371 - DNA, 447 bp, Homo Sapiens
cctctgtatactggaagcttcatctctctcaaataatgggcttctgagatcgcatagagtgaaatggaagtcataggacgaagtggtggcatttagttgctatataatgataatgttgttgtgacttttctaaggaagaacaaataattctcccatgtactactagaatatggaaatgattcctttctattcacggcaatttatgtcgaatgtattgataaggaattttttgagagagatgaaggcttccagtattacagttctttgactactctactagctgatgactttaatgctattttgtcgcccaacgaaagggtgctcagctaatttcaattacatctacctgaactcgaaggtagagctcaattatatcgacccttacggagagattaattagattacgtgttgtgtgcgactccccattgtaaaccataacaccacaca

SEQ ID NO: 230372 - DNA, 360 bp, Homo Sapiens
atgtgtggtgtatggcttagataatggttctttgacaatgatgatttcgtacaaggtggcaaattaatggctcattgtagccatcgcgtacatgcgattaaggttagaacttaccatctcaataatttttctcttatacagtaagatgtcaaccttagaggcaacattagtccatcatgccatgaatacatggaaattcttgcgatctccttgaacaatcaaattgagttgttcctcatgctttgtaatcatagtgtacatggaaaagcgacctataaaatatgtaattagattgataacagggaaaaacttaccccacaattgtagtggtaccatcgctcgacataacaccacacaatt

SEQ ID NO: 230373 - DNA, 268 bp, Homo Sapiens
tatgattcatcaaggggactctggatgtcagacttctctatagacgaatgaatgaatgtgaagcgaaattcacaggcttcgtggatgcggactttgtaggagacttggacacaagacgatctttgactggttatgtcttcactttgtttgggtgtgcagttaagttggaaagctcaactacatcatgtagtcaagtacattgccacaacaaaaggcgtaaaggaatctctttggttgaagggattgatcaatgtaccataacaccaca

SEQ ID NO: 230374 - DNA, 307 bp, Homo Sapiens
gaattgtgtggtgttatgttctccttgtgcttgtagcagtgtttgctcaataattttgtaagaagcattgatatgtcgatgcatgagcagctcggcaagttcaccatcgccttctgcaatcgcatctaaaatacggatatgttcgtcccaagctttgcttggacgatcgggtgtgtttgaaaactgaattcggtacatacggatgagatgataaagctcatcacatagcattttttctagggttttattgccactacttttgataatgcagtagtgaaaatcgtcctgcccataacaccacacaatt

SEQ ID NO: 230375 - DNA, 360 bp, Homo Sapiens
gagccctgtgattgtgtggtgtatgaaagaggagatcaagttgctcgcgaaaaatgatacatgggaactcacttctctaccgcccaacaaaagtctcataggcgtgaaagtgggtgtacaaaataaaaaaccaatccagatggttctatcaccataaacaaagctcgattggttgcgaaagggtataaacaaaaggaatgagaagatttcgacgaacagcgttgccgaattgggaatacgaagcaaattaagtttacgggaggcattcttgaagtaaactaaatttaattaacagccttttagtattcttactttaaataaatgtctagaaataaattagggacataacaccacacaatt

SEQ ID NO: 230376 - DNA, 296 bp, Homo Sapiens
aacacagtgtcgtttacacttaacacaattacttactaagacaattacaacccacactcattattgctagagaacaactacactttttaacggctgcacatacaatctcagaaatccaagcattatccacagtcatcatttccatattcaacacagctcatagacaaggaactgcggcatgggcagcggatggctcacgacctgtaatcccatgcacttatgggacggccgagtgcaggagagatcacgacggtcagtgagatacgagaccatcgctggctaaacacgtgtgaaac

SEQ ID NO: 230377 - DNA, 200 bp, Homo Sapiens
agtgtggtgttatgcatataatgtcagatcatttatgttttgctattgagttgcatacattccttatatggttttagtactaactccttatcaggttgtgatttacaaatattttctcccattcagggtgttgccttttcattttgtcctttctttggctgtacaggagctttttaatctaatgtaatctcacttgttga

SEQ ID NO: 230378 - DNA, 228 bp, Homo Sapiens
gggttagaacttcagttgttgaatgtgagtggctgcatttgttcaagttcaagactgttagtaattgtttagttagtactgtgttgacaaatcattttaaacagaattgtgaaatgatttgtactgagttgtcaagtagtttgaacttctttggcaagtggttaaaattgcgttgtgaatttgttggactgttgtcaatttattttaaccgcataacaccacacaatt

SEQ ID NO: 230379 - DNA, 234 bp, Homo Sapiens
atcgaggattcggaatgtgtggtgtatgtatgttaactttctttatattaataaaacctctaattgacttgtcaaataaaattttcattaggcttatcaattaattctttaattgggcttaccagttaaccatttaattgggctttcaactaaaccaatccaaacatagatttagttaggcttatcaattacccaacctaatacttttgtgtacgaccataacaccacacaatt

SEQ ID NO: 230380 - DNA, 117 bp, Homo Sapiens
ttaactcttcaagtcttcattatttaaacaaatatatttcttcaagacttatagctgcccataaatacatgcacttctctgcgtgggggtccctgagctctgaattctgtaatccca

SEQ ID NO: 230381 - DNA, 300 bp, Homo Sapiens
  misc_feature (149)..(201): n is a, c, g, or t
tcatatagtggctgtactagtaacaaaccgcaccaacaatgtgtacgtgtaccctatatctccagatcctccctagcacttctttatcgtctattttaattgtagacattttttctttccttttatattgagacaagagtctaagtcannnnnnnnnnnnnnnnnnnnnnnnnnnnnnnnnnnnnnnnnnnnnnnnnnnnngtgggttcaagtgattcttgtgccatcagactcccgagtagctggaattataggtgtgcaccaacaaaataggctaaattttcttatttttataaagat

SEQ ID NO: 230382 - DNA, 227 bp, Homo Sapiens
attgcatggagctgcagcagtcatccgtcagcccagaagccaatacagaaaacaaaaacaatcacagtttctcatcagttacctagaataaaagagtagaccgtgaacaagattcccattttattaaaataattaatatatttccaaaagaatgactgtaatttatctctaaccattggacctaattgcccacagtttgatcccgctgcagagagtcatatccatcc

SEQ ID NO: 230383 - DNA, 679 bp, Homo Sapiens
cgaatgtactgtaagaagactataaatagtagcagatgagataggaacagacacgattgggcggatttgttaaaagtcgagctccgagtcgggcgtattattcaggccgaagtctttgagcaggctacgtagcccgcttatattttacatgtcgactttggccatgaaattggcattaagaaatcgagtgcgcagattactgagcgttatcaacctgaactgttattgggtaaatcggtggtggcagtggttaactttccaaacaaacaaattggtcccatccagtctgagtgcttagtgactggctttcatgattcagacgcaggcgtggtactttgtgtgcctgatacagatgttccagtaggtaccaagctactataattgaaaaagaaaaacccaagctcagcttgggtttttctttggaacagtctgatccaacaatagcaactatcgacgagacttaaacgatacatcgactttacgtgacgatagatccagaccaagatcagtaaaaaaactgagaaacctaaaattggccagtcacttaaacgggtatatagcgtttgaccttgcatagcaggcagttcgccgcgaagacaggtagccacatcttgtgggggcagttttacgatatgcccttgatggtcaaataacgcagttccgctgtttggtggcacga

SEQ ID NO: 230384 - DNA, 272 bp, Homo Sapiens
tcctgcttttcatcctgttgggtggctgtctcctctcgacagcactctgccctccccacctgtttctgctggtggtgacatgctattctgccgcggcactccagtccacccagcgtcggttcacggttcctcctgtggtttctgacctcccaccacgctccttcgacacttaagctaaacctctgtaacctctgacgacttaaccctacgaccttgataaacttacgccccacatgaccgacgcatttttacgacctactgtgcactccact

SEQ ID NO: 230385 - DNA, 275 bp, Homo Sapiens
  misc_feature (54)..(109): n is a, c, g, or t
actcgtggcgagcactgtactccaatctggtgacgagccagactccgtcctcannnnnnnnnnnnnnnnnnnnnnnnnnnnnnnnnnnnnnnnnnnnnnnnnnnnnnnncatagagaaaactcttcagaacatcggcttaggcagataatttatgagatgaaataccatgacaacacaggcaaccataagcaaacagtggacaacatgggatcacattcaagttaaacaatcttctgcgattgcagacggaaatatgtacacgtgatcgaaccaa

SEQ ID NO: 230386 - DNA, 374 bp, Homo Sapiens
  misc_feature (44)..(163): n is a, c, g, or t
tcgaccactgtactcactgtagcttctacctcctcggttcatgnnnnnnnnnnnnnnnnnnnnnnnnnnnnnnnnnnnnnnnnnnnnnnnnnnnnnnnnnnnnnnnnnnnnnnnnnnnnnnnnnnnnnnnnnnnnnnnnnnnnnnnnnnnnnnnnnnnnnnnntgaactctctaggctcaatgtgatcctttctgcctcagcctccttaaagggattacaaagcaggagccgctgtacctgggcctacttggaaggtcattttttaaaaaattatatactcttccaatcttttggtcttttaattggtagtactccagaccattttgcttctaaaaataattccctggggtaccggagctccgaaattcgtaat

SEQ ID NO: 230387 - DNA, 248 bp, Homo Sapiens
  misc_feature (41)..(163): n is a, c, g, or t
acagagcaagagtccctctgcaaaataaaataaaatgcacnnnnnnnnnnnnnnnnnnnnnnnnnnnnnnnnnnnnnnnnnnnnnnnnnnnnnnnnnnnnnnnnnnnnnnnnnnnnnnnnnnnnnnnnnnnnnnnnnnnnnnnnnnnnnnnnnnnnnnnnnnnacataaaatatgagcacggctgctgagcaccaggaattttcatgcattgttggctaggattgcaaatagtacagtgatcgaccaa

SEQ ID NO: 230388 - DNA, 244 bp, Homo Sapiens
acaaacttgcgatttactagaaagcgaagcaatcagagattaattctagaatctacacttcgtaatattcaaaataaagtagtaataggttaccggtggtggtggaacatatcggtagtgaactactgtagaccacacttgacgacgaaactaactccaaacgactgccttatcactacttcgaatatactactaacacaactacgatagcttactgacgacttgacgccagagacaattaaag

SEQ ID NO: 230389 - DNA, 251 bp, Homo Sapiens
tctgcaggatctccaataaattgttggtcattgatgtattcatcgtcaaagcgccgtataagctgcggatcaaacaggtcgtgccttgcggctcgatggaccaatccgcttttgccgcagctgcttccaatgctccgctcgtgatgtaccggtaattatcgtctaccgagacgtaatgaccggttacgcgattgcggatgcggtacgatccgttatcttcttcaagcagatcaatgaccaacaatttattg

SEQ ID NO: 230390 - DNA, 171 bp, Homo Sapiens
tagaggatccctttaatgtggcatgatgcaaagaactgaggagtgtgagaagggttgctgggagagatacggggaggagcctccgggggataaagggaatcgtataaagtcgatgtagggccggtgagggagaggttttggctcaggttatcaatgaccaacaatttattg

SEQ ID NO: 230391 - DNA, 134 bp, Homo Sapiens
gatcctctggtcatagatgctcacagctccacataccattattcatcgagtacttttactccgaaaagatcaatgaccagcaatttattgatcaatgaccaacaatttattgatcaatgaccaacaatttattg

SEQ ID NO: 230392 - DNA, 169 bp, Homo Sapiens
ctagaggaccctataaatgttggtcattgattggaacggacatttaccgttactatgccgcaaacatcgtaaaaatttgccgatctttattgtttcacacgtaacagaagggaggtttggcaatgaatttatatacgcgtacaggggatcaatgaccaacaatttattg

SEQ ID NO: 230393 - DNA, 215 bp, Homo Sapiens
tctagaggatctcaataaattgttggtcattgatgccaaaacggggattcggggcaggaaaacgccgacaaaggcgacgcattatagtactgttgaacaaaatttccgaatttacaaagttcacgaacatcaacacataccggagattgaacaggaacttgccgaacgggatggggaacaaacaccgatttctatcaatgaccaacaatttattg

SEQ ID NO: 230394 - DNA, 177 bp, Homo Sapiens
gttgatcgtcgatcaatgcaacagatacttttttatcctgaaccagtttagcaagagatggtaaatagcttctactttccatgtccatgtcactacctgcttttatggctaattctgctgcttcagatttattttttgcgtaaccgtgattaatcatcaatgaccaacaatttattg

SEQ ID NO: 230395 - DNA, 174 bp, Homo Sapiens
tgatcagaggatccgagaaatatccaaagatgcttatcatattcgatatatatacaaaagtacttatgagattgagtcaggaataaagaagaaatcatcctgaataaaattttgtgggagagattggttctgtgagagaagtctttaagcattggatgatatatttagatcaat

SEQ ID NO: 230396 - DNA, 413 bp, Homo Sapiens
ctctttcggtctgctggtggctgagctcgaagcctgcctgcctgacagctccatttccgcgtacaatatcatctacttcgtaggcaatgtggtgaatgcctacgaggtttttgtcgataagagtttggcaatggcactctcgctgtatgtaggcttccagtagctctatcttggtatcgcccagcataaaaaaactggtgcttaccccttcgctggccaccgcctctactttataatggtctttgccgaaaagcttcctgaggagttcattggactgcccgagatgcttcatggcaatgccgatgtgttctacttttttgagcatgggtgttttctaaaagtacaaaaataagggatttaagttattttgctaaaagccaatcatttattacatttgtagcctaatttttatg

SEQ ID NO: 230397 - DNA, 626 bp, Homo Sapiens
ccctgataatagtaggtcatagatatcgagcatctaaaagatgtcaatagaagatatactagaaagagaagcaatcgagataaattctgaatctacacttccgatgattcaaaataaaggggtaataggttaccggtggtggtggaactatcggtagtgaactatgtagacaaattgcgagaaataatccaaagatgcttatcatattcgatatatatcaaacatcagtcacttatgcagcattgagcaggaattaagcaagcagggggtcctgacattaaattttgtagcattgcattggttctgttcagagcaagctatcaagattggctgcatcatcatttgcatcaatatagcacccagcaaatcagtcatcatccatgctgcagcacataagccatgtcctttcactggcacacccagtcctacatgcggctcattaaaaacaatcatttatgggcacttcataatcactgcatttgcagccattgagcatcataacagccagccacaggttcatattgcatctctcacagatcaagctgtaaacccaacatctatcaggggaactcctaaaagagcttgtgacatgcatcatccatcatgaccacaatttatcggggtac

SEQ ID NO: 230398 - DNA, 224 bp, Homo Sapiens
  misc_feature (97)..(113): n is a, c, g, or t
gccatccattgcttatttggaaatggtatgataaattaatagtgacattctccctcatgaagtcacgttatcttggtaacatttgttggttgatacnnnnnnnnnnnnnnnnngggaaacggtttttgtctttttaacccaattgggttgcctggtgccccttctagcccctgggaacctttggcccccgggttcaaggaattgggcttgttccaccccccaaa

SEQ ID NO: 230399 - DNA, 140 bp, Homo Sapiens
acctgtagcattaaagtgctgatttttatattttaaaagacgaacgaatattgcgatatgattcaaatcgaatgtatttggatttcgtagacgatagaggcagagttaaaaattccactacactatggataaaaagtgca

SEQ ID NO: 230400 - DNA, 223 bp, Homo Sapiens
aggatctggttgatgctgtcgaagttgtacgagtagcgctcttccggatcggcgatgaagtcgtaggccggatcgtcgtccaccaccaggccgtcctccgcggtcagcgggctggggtacggcagcagcacctgcgtctccgcggtgggacggccggtggtgatgcccatgacgtcgacgtagccgtcgttgaagccgaacgagttgaagtcgccgatcacca

SEQ ID NO: 230401 - DNA, 262 bp, Homo Sapiens
tagtcgatgaccagcttgctccaggaacaggtcgcggatctgctcgacggtgaacggggtggtctcggcttcgtggccgcgggtggccacgtgggcttgcaggaattccagcgtggcctgttcgtcgcgatggtcggccagcaccgcctcgccgatgcgcgcggtgatcggcaggatcacgatgttgtgctgttcgaagtagtcctgcggcaggtcgcagcaggaatcgacgacgataccgatacgcatgcggccctccaga

SEQ ID NO: 230402 - DNA, 260 bp, Homo Sapiens
gcggaggcgaacatcggcgttcccgtgcgcccgttcccgcgctggatgcgctgcgtgaagtgcggcttgttgtctcctttcgataccggcctgttcgagatcaaggagcaccgtttccgtccggagcgcacccgcttcgtccacaagagctgtcgtggttccaagggcgaccagccggcgaaggaccccgatgcggttcccgcgcgtttcctgctggcctgccgaaacggccatctcgacgacttcccctggcactactt

SEQ ID NO: 230403 - DNA, 142 bp, Homo Sapiens
gccacaggatcgtgacgatcccgaagtcggtgtgctcacccatgcccgtgagtcgccgtcgagctcgacctcggtgccctcgggaagggcgtagcttgttcatgcgaagctggtcgatcgagtggtccgtgaacgcgtcgaa

SEQ ID NO: 230404 - DNA, 252 bp, Homo Sapiens
catgttggccagcacgatggtcggcgtgatcggcgtcaacggcggcaccggcatgtcatcgagtaccgcggcacgaacgatccgcgcgatggacatggaacaacgcatgaccctgtgcaacatgagcatcgaggccggcgcgcgcttgggcatggttgcgccggacgaggtcaccttcgactacgtgcgcaggacgccgtacgcaccgaaggatttcgacgccgcggtggcaaagtgaaagcagctggtacc

SEQ ID NO: 230405 - DNA, 161 bp, Homo Sapiens
tgccgttgcgccgccctttactcgggtcagcgctgggctcggggcggctgtggttctctggtggtctggactttgaggcggcggtcgggctcgcctggggatctcctccgccccgtacccgccacgttccggcgtccatgtgcctctggaggccgggggcc

SEQ ID NO: 230406 - DNA, 198 bp, Homo Sapiens
  misc_feature (39)..(39): n is a, c, g, or t
accatcggtgcggtctggagcgggcagctctacggatcnggcttggctgggggtaccactggctgggtctctctctgcgatatgccgggttaggtaaacgactggcggccgcctggagggaggggtttggattcctcgtcctggtcgggttgtcgtggtccttaagcgtaggtgtgtatggagtctctagctccccga

SEQ ID NO: 230407 - DNA, 121 bp, Homo Sapiens
cgcgattaatgtgtccccctcgatccttcacatatccgcacaccacggaaattcggggatactccccagaggtcacatccggccacgctcgctccccccattacaccgatccccgaaacca

SEQ ID NO: 230408 - DNA, 115 bp, Homo Sapiens
cagcacttaatggaagatagatggtagcgtgcccaccttgctggcctcccgcactctgctcacccctgtcccaatacactcgagccaccacttcattttcacctggcggctgctc

SEQ ID NO: 230409 - DNA, 124 bp, Homo Sapiens
accaggcgctcatatcatggcagcagggtcaggggggggccaggggcagcatacgtcccagccccctgttgggctgtctcgggcgagtaggcagggtgccctgttccgggtgtccctccacggg

SEQ ID NO: 230410 - DNA, 137 bp, Homo Sapiens
  misc_feature (80)..(92): n is a, c, g, or t
accaccgatcctagggacacccggaacaggccaccctcctactctcccgagacatccaacaggggactggacgtaggctnnnnnnnnnnnnntaccgctctccatgatatccagcgccttctgacaccctttacacc

SEQ ID NO: 230411 - DNA, 208 bp, Homo Sapiens
ctccttcacacgtatccgccacaccacggaaatcggtgatactcccctagagttttccatcctggccacgctccctcccccgcattcacctgatcccgcgaaccaagccatgatttaccactcccccaagctccatccctcctgggcggatacacccagcagtctatactacgcacgcgtcctccaccttcgtgaaaatcccccgccc

SEQ ID NO: 230412 - DNA, 146 bp, Homo Sapiens
atctaccacctgactcatgagggacacccggaacggggcaccctccatactctcccgagactatccaacatggggactggacgtaggctccgctcccccccataccccctccatgatatccagcgccttgtgacacccttttcacc

SEQ ID NO: 230413 - DNA, 143 bp, Homo Sapiens
  misc_feature (91)..(99): n is a, c, g, or t
tgcatacaccgacttatgagggacaccggaacagggccaccctcctactctcccgagacatccaacaggtggactggacgtaggctccctnnnnnnnnntaccctctccatgatatccagcgccttctgacacccttttcacc

SEQ ID NO: 230414 - DNA, 150 bp, Homo Sapiens
gctgctgttatccactcataccactcgaacatgacttactccagtatccttcgagttctggacggcgatcgatacgaaggccccttcaagccccctcacctggacaccaccaatcccacctgtcacaccctccgcagtcacgaggttgtc

SEQ ID NO: 230415 - DNA, 139 bp, Homo Sapiens
ctcattgaaattaagagagacatagagagagactcaccaaaatgcccaacggtgacaaagtgtgcagaaccgagaatcattcttcaaaaactcaccttgatcttgaagacccgctcgtgataccaatggagtgtggctg

SEQ ID NO: 230416 - DNA, 122 bp, Homo Sapiens
cgtgccccttcttactctcgcgagacttcccaacggtgggcttggctgtaggttccttcccccccttaccttctcctgtgatatccagcgcctttggacacctttttcaccattgagtgtgg

SEQ ID NO: 230417 - DNA, 172 bp, Homo Sapiens
tctcgctttactccagagtcacattgactccggaacgtgagggtactagggctgatggagatccccagtgcgatccctgaacctcctgcctcaaataccagtaccaccagagtaaccaccctactgccactgatccctagctctgaccctggggatcctactagatgtctga

SEQ ID NO: 230418 - DNA, 219 bp, Homo Sapiens
accatgtagggacacccgtgaacatgggccaccctccatactctcccgagactatcccgacagtgtggactggactgtaggctcacatacccccccacatacctctccatagatatccatgcgccttcttgacacccttaatcaccatatgatgttggctgcgctgtaacggtatgggacccaaggccatacaggagctggaatgccaccgagatactc

SEQ ID NO: 230419 - DNA, 144 bp, Homo Sapiens
aattccccttctccagcgtcacatttactcggaacgtggcgggtacgtgggctgatgtgagatcccaggcgatcccgaatctccgcctcaagatccagtaccaccagagtaaccacctctctgccccgatcccagttcgaccgt

SEQ ID NO: 230420 - DNA, 303 bp, Homo Sapiens
ggctgtcaccgcagtggtttcagccggggaacatgcgcctataggagcgatgtgggttgggaccaggagggtcgcaggtcctgatattggtcgggatgtggatggctgtggtcccctggtgatggggcctcttatggcctgtggcttctccccctctccgtggagcgagggagggggagaggggggagtccgggtgccagggtggtgtgtgacatgtgtgggacttggttggtgtccagtgtgatgggggcttgaatggtgcttcgtgatcgcatcgcctgtcctggaatctgaggagatact

SEQ ID NO: 230421 - DNA, 151 bp, Homo Sapiens
tttaactgaaattatgagagatcctatgatgagaactcaccaaaattgctacaactgtgacaaatgttgcatgaacctgatgaatctgttcttcaaaaatcaccttgatcttgaatgaccctgctctgataccaacttgattgttggcttg

SEQ ID NO: 230422 - DNA, 310 bp, Homo Sapiens
  misc_feature (72)..(161): n is a, c, g, or t
cgcagcctgtcaataaaggacgatacacaaattgtttccatccaaagtccagtcgtagtggctaaaatcaannnnnnnnnnnnnnnnnnnnnnnnnnnnnnnnnnnnnnnnnnnnnnnnnnnnnnnnnnnnnnnnnnnnnnnnnnnnnnnnnnnnnnnnnnatcgtagaaacgatcagggaatatgtactgtgcaatatggtcgaaaatcgagatccactctctctgcatgggtaattgttgcttccgagttaacgacatagcacgtaatgaattcgatgaaatacatggaaatttgagcctagccagcc

SEQ ID NO: 230423 - DNA, 148 bp, Homo Sapiens
  misc_feature (92)..(104): n is a, c, g, or t
cgcttcgcactccaccgatcatgagggacacccggaacggggcaccctcctactctcccgaggcatccaacaggtggactggacgtagcctnnnnnnnnnnnnntaccctctccatgatatccagcgccttctgacacccttttcacc

SEQ ID NO: 230424 - DNA, 105 bp, Homo Sapiens
cttactgagcagccgccggtgaacatgaagtttgggtcgagtgtttgggacggggtgagcggatgcgggaggcggcacggtgggccacgctaccatctatcttcc

SEQ ID NO: 230425 - DNA, 129 bp, Homo Sapiens
tctgtaatgcgtgcatttaaatcacacccctgctctgcctaccactgaccatgaggacaccctggaacatgtgccaccctcctactctccctgagacatcccaacagggtggacttgtgactgtatgct

SEQ ID NO: 230426 - DNA, 105 bp, Homo Sapiens
acacccgctctgcatccacgacccattatggacaccctgaacatggcacctcctactctcccgagacatcccaacatgggtggactggactgtaggctaccccta

SEQ ID NO: 230427 - DNA, 127 bp, Homo Sapiens
caattggtatcagagctggcctcaatgatcaggtgatttttgaatgaacgattctcgtgtcttgcaacatattgtcacagttggatgcaattttggtgagtctctctctatgatctctcttaatttc

SEQ ID NO: 230428 - DNA, 134 bp, Homo Sapiens
  misc_feature (78)..(90): n is a, c, g, or t
gtaaccatgagggacacctggaacagtgcaccctcctactcccccgagacatcccaacaggggactggacgtaggctnnnnnnnnnnnnntaccctctccatgatatccagcgccttctgacacccttttcacc

SEQ ID NO: 230429 - DNA, 116 bp, Homo Sapiens
ctgcttagtagtgtgtcccccgtcgactcccttcatacaagagtccgccacaccacggaaattcggggagtactccccagaggttcccagtccggccacgctccctcctcccattc

SEQ ID NO: 230430 - DNA, 150 bp, Homo Sapiens
  misc_feature (94)..(106): n is a, c, g, or t
ctgccataccacctgaccatgatgggacaccctggtacatggccaccctcctactctcccgagacatccaacatggggactggactgtaggctnnnnnnnnnnnnntaccctctccatgatatccagcgccttctggaaccctcttcacc

SEQ ID NO: 230431 - DNA, 115 bp, Homo Sapiens
agcgcgtatatcaacaccctgctctgcatacactaccatatgggacaccctggaacatgtgcaccctcctactctccctgagacataccaacatgtgtggactggactgtaagct

SEQ ID NO: 230432 - DNA, 284 bp, Homo Sapiens
gaaatcaatccactcataccactcgaacattgacttaccccagtatccctcgattcctggacggcgatctgatcctgaagccccttcaagccccctcaccgtggacaccaccaatcccacctgtcacacccccctggcacctggactccaccctctccccctccctcgctccacggagagggggagaagcctcggcaataaagaggcccatcccatggggaccacgccgtccacatcccgaccgatatcggacctgcgaccctcactggacccaaacccacatc

SEQ ID NO: 230433 - DNA, 108 bp, Homo Sapiens
aaatggcgtgcggtcacccgagtcctgggtaaggtaagtcggggggctacggtggaagagtgtggagtcgggaagctgagctgtcggatgagtaagattgatgtggct

SEQ ID NO: 230434 - DNA, 156 bp, Homo Sapiens
  misc_feature (72)..(84): n is a, c, g, or t
acaccctggaactggccaccctcctactctccctgagactatcccaacatgtgtggactggactgttggctnnnnnnnnnnnnntaccctctccatgatatccatgtgccttctgacacccttttcaccattgattgtggcttgcgctcgtactgt

SEQ ID NO: 230435 - DNA, 165 bp, Homo Sapiens
  misc_feature (95)..(113): n is a, c, g, or t
ctctgcataccacctaccatatggacaccctgaacatttccaccctcctactctccctgagacatcccaacatgtgttgactggactgtaagctnnnnnnnnnnnnnnnnnnntctccatgatatccatgcgccttctgacacccttttcaccattgattgtggc

SEQ ID NO: 230436 - DNA, 127 bp, Homo Sapiens
gtgcgggacctcgcagtattgatggagaatgtgctggggtggtgggcacagtggctgatcgcctctgccagggggtcgacgcggtgaggtgtggtgatgaggactccgcccacgcctgcagaccctc

SEQ ID NO: 230437 - DNA, 148 bp, Homo Sapiens
tagtaattccactcataccactctgaacatctacttaccccagtatccctcgattcctggacggcgatcgatcctgaagccccttcagtgccccctcatctgagacaccaccaatcccacctgtcacaccccccgtggctccctggac

SEQ ID NO: 230438 - DNA, 187 bp, Homo Sapiens
tctcctctgccaatggctggcaaactacctgtagctggtctgtcctcaagtgacctatggcatagtgcaacatgtatgataatcttgcagtttcgaagcgacatttagtccacagcagtaaggccgtcgacactcccgcaaccaacctcaataaaaggcctgaatatactgcaaaggttgggctgat

SEQ ID NO: 230439 - DNA, 107 bp, Homo Sapiens
tcaatggaagatagatggtcgcgtggccaccgtgcggcctccgcatccgctcaccgtgtccaaacactcgacccaccacttacatttacaccgtgcggctgctcata

SEQ ID NO: 230440 - DNA, 123 bp, Homo Sapiens
tcagttgaagatagatggtagctgtggcccactagtgctggctccctgcatcactgtcacccctgtcccaaacatctcgacccaccacttacatatttcacctggctggctgctacatatgat

SEQ ID NO: 230441 - DNA, 390 bp, Homo Sapiens
ctgcctcacaggttcacgccattctcctgcctcggctcccaagtagctggggctacaggtgccggccaacatgcctggataattttggtattttctgtagcagacggagtttcaccggtgttaagcccaggatgggtctcgagtcttcctgaacctctgtgatccaagccaaccttcggcctcccaagagtgctggggattacagtgcgcgagccatctatgcccgggcctctttcaatgcgtctttattaaaaccgtgtttctccgagaacccaaggggtcccaacctgcagagataccctacacgagaataatttcgagatccatgaaccatttttcccacttcagttaatttccagtggggcagacaatgcatttgcacgtgatggg

SEQ ID NO: 230442 - DNA, 185 bp, Homo Sapiens
  misc_feature (64)..(138): n is a, c, g, or t
caggctgatctagaggacccctgctgcctgacaatcagtgcaatcatatatttgatatgagacnnnnnnnnnnnnnnnnnnnnnnnnnnnnnnnnnnnnnnnnnnnnnnnnnnnnnnnnnnnnnnnnnnnnnnnnnnncaggtgtggtggctcacacctattaatcccgagcactctggggaggc

SEQ ID NO: 230443 - DNA, 229 bp, Homo Sapiens
atattcagtcgagccgtgcaaccatgcccggcattgatatgcttttttctcatcgccttctgaaacggatgccttcaacgtcatgagccaactgccctttctgccgttctccaagcccaccattgatgaagccaccatctcggcggtgggcgacgtactgcgctccggctggatcaccagcggggccaaagtgcaggcgttcgaagcgcagctgtcggaatactttggc

SEQ ID NO: 230444 - DNA, 275 bp, Homo Sapiens
cggctcccctcctccgccgcagccgtctttctctgctctctgcgctccgcttctttctcttgcctcgcggccgcaccctctgtctcctctcctcttcttttttctggcgttcccctcggccctcgttccttgtggcctcctctgtctcctgtcccctgccgggtttgctgtccgggtcggtgtccttgccgcccctctcctcccgcttcccgcggcgatcacagctcatcagtgccgcagctgcgtcggcggagggggtaccgcagctcgcaatc

SEQ ID NO: 230445 - DNA, 175 bp, Homo Sapiens
cgcacactttgcagctgatctcggacgaaggttgcgaagtgattgccaagagcgacactggtgggcatggcagctttcctaactattaataatatttattatccgccgtgcccgccaagtcgtcaatgtgcggcatcgttgagctgcgtctgctgaggaggggtaccgcgctcga

SEQ ID NO: 230446 - DNA, 183 bp, Homo Sapiens
tgggtagagtgggtggaagagggagcggagctgagaccgaggagagaatgaccttaggggaagataaggatcgggcggggaccgagagacgaatggtgcggaaacgcggtgaagtgagggcttaactgcgggtgatggtttggggaacgggacgtggctggggtgtatactgtagacggggta

SEQ ID NO: 230447 - DNA, 365 bp, Homo Sapiens
  misc_feature (78)..(96): n is a, c, g, or t
tcttgtttcctgcacttctgcattttcctttttttccacccctgttttagtttggctgttatttaaaagtcggtttgnnnnnnnnnnnnnnnnnnngactgcttttgcggagcaggctatcctataagcagtatgctgagagtagcgtattcagaagtttttaaaatggaagtgcaggaaacaagaccggtcttgtttcctgcacttctccccacctaaaacactattctccaagttatatcacaggtttctacctcactggttgcaccctctcagtatctttctcctaaatgagatttctaaaatctagtgtgccacagggctctattcttggccctcctctcttttcatttatcctctctttc

SEQ ID NO: 230448 - DNA, 377 bp, Homo Sapiens
  misc_feature (157)..(320): n is a, c, g, or t
tggagcctgcacttaagcctggatgacactgatagagcttgttacaaaaaacactaacaaaacggggggccatctaaactaaagataaagagagctgaacataaatgctgtcatctagttagaagtatgtgttagcaattctgaaactatattatgnnnnnnnnnnnnnnnnnnnnnnnnnnnnnnnnnnnnnnnnnnnnnnnnnnnnnnnnnnnnnnnnnnnnnnnnnnnnnnnnnnnnnnnnnnnnnnnnnnnnnnnnnnnnnnnnnnnnnnnnnnnnnnnnnnnnnnnnnnnnnnnnnnnnnnnnnnnnnnnnnnnncacagatggaaagatacagaaatataggaatgtggtaatatatgtggattatgccat

SEQ ID NO: 230449 - DNA, 370 bp, Homo Sapiens
gtctagagtataccaggacttgcttcctgcacttcctgttttactgagaaaatggaagcaatgggaagaaaacttcgatgagttcttaccccctcttcacctcacctatatgaaggtgttatcccctctgtggccacatattctgcctgcctcctattaattgtgcatgacctgtccatgttcctatctaaggcaaatccctctagtgcccaaggctcagggtcccctcccacccacagctccggattcagatggccagcattggagtgtgcgaacccaggggctctctggctctcattagcagggggctcctcgaatgtgttcctgagaacacctgttctgtaagaagctccttggggaagagaagggt

SEQ ID NO: 230450 - DNA, 156 bp, Homo Sapiens
  misc_feature (62)..(101): n is a, c, g, or t
aggatactcaaaaaatactcaagtgctattttaaaaatgaaagatacaggcagctaggttcnnnnnnnnnnnnnnnnnnnnnnnnnnnnnnnnnnnnnnnnaaacaaaacaaaataccagtggctagcttttctgtaacatccttgggattgggtt

SEQ ID NO: 230451 - DNA, 153 bp, Homo Sapiens
caaaaatagctcggtaccgtcagcaccggaggctcacccacaccttcagcacgcccggccctgtgcccgcggcttgcggggggtgtgccactgtgtatgctcagttgacagggggcaacttcagtatttccttccttttcaaaatctctccaa

SEQ ID NO: 230452 - DNA, 362 bp, Homo Sapiens
  misc_feature (45)..(140): n is a, c, g, or t
  misc_feature (237)..(300): n is a, c, g, or t
atcacaggtcgtggccatcctcccacctcagcctcccaagtaacnnnnnnnnnnnnnnnnnnnnnnnnnnnnnnnnnnnnnnnnnnnnnnnnnnnnnnnnnnnnnnnnnnnnnnnnnnnnnnnnnnnnnnnnnnnnnnnnggctcaagcaatctgcacacctcatcctgcctcggcctccgaaagcaccgcaattataggcatgagccacagtgcccagcctttcttctttctttcnnnnnnnnnnnnnnnnnnnnnnnnnnnnnnnnnnnnnnnnnnnnnnnnnnnnnnnnnnnnnnnnataacccttgggaaaaccgggttttttgggaaaaacttctgtggggggaacccggagggggg

SEQ ID NO: 230453 - DNA, 274 bp, Homo Sapiens
agtacgttgaccaccgtgcctgccccaacagacatttatttactaataattattactgttgctgtaaattctgtgccatacagcttatggttctcccatcccatgttgattgagacgaacggcagttcgagaatgtctctgaggaattgactttgaatggtgaaacctaagaatgaagggaggatctaagactgtcctaagtcgagcagatggcacaggtggaatgtcctgaggagggaaacactgtttgtatttagacgtagtccgtgaggag

SEQ ID NO: 230454 - DNA, 491 bp, Homo Sapiens
cgcacgtccaactatactatcctaatctatgccgtgagatatattcataacaacagaataacatgaaatgagattatcacaatagatacctctgattaactttacaaatgtcaagatgtcatgaggttgggaattagaatacataatttgaatgagagttgagatttaataagaaaagaaaaagaacaggggacaagtttaatttagggctcaaacaaccctggaaacaatgaagccaatggcaacaagggtgaaaaaggttaccgggttcctcccactttgaattcccaaagaaaccagtttaccacaggcccgggaagggacgaaaccagaactccagaagaatgcctattaaaataggcatcatggagtttcccggtggaattaaaggcagggaggagagttcaggaactctgggccccaagaattttggggctgtgttcatggttcaatatttaagtgtcaactttgattgggattgaacgtattga

SEQ ID NO: 230455 - DNA, 162 bp, Homo Sapiens
tgagccggtccgacttcgaggatggtcttcttctcggtctcgcgtggtgagcgccttcgttgtcgatctcgccgccgcaacgtcgcgccacccagtcgatgaagtcgagcacgttctgccagcggctggccgcgagcttctcgttgtcctcgccgtcgtaca

SEQ ID NO: 230456 - DNA, 552 bp, Homo Sapiens
  misc_feature (41)..(68): n is a, c, g, or t
  misc_feature (87)..(234): n is a, c, g, or t
  misc_feature (273)..(331): n is a, c, g, or t
ccgacgaatgcacacattttacctattaagtaggaaaatannnnnnnnnnnnnnnnnnnnnnnnnnnnggacttggattctcactcnnnnnnnnnnnnnnnnnnnnnnnnnnnnnnnnnnnnnnnnnnnnnnnnnnnnnnnnnnnnnnnnnnnnnnnnnnnnnnnnnnnnnnnnnnnnnnnnnnnnnnnnnnnnnnnnnnnnnnnnnnnnnnnnnnnnnnnnnnnnnnnnnnnntagtaaagatgaggttccaccatgttgcccaggatgttnnnnnnnnnnnnnnnnnnnnnnnnnnnnnnnnnnnnnnnnnnnnnnnnnnnnnnnnnnngtgtgagccactgcccccagtgaaatcttttttccataatggtttttttctacacccttcttgcttctcaaatggggaagaattctaagaaaaggggtgttcacagaaaatttggacgcaatttttaccagggagagtggtcagtaatgtcagatgctatagtgagataaaataaagcaaaagcctccagtgctttaagcagtggaggtaacccgggaggg

SEQ ID NO: 230457 - DNA, 337 bp, Homo Sapiens
  misc_feature (104)..(237): n is a, c, g, or t
ccctcacgatttctcttcaaaatatctaacaaaccatattcaacagcccattaaaagaagcattcatccatgatcaatgttagatttatcccactgaatacaannnnnnnnnnnnnnnnnnnnnnnnnnnnnnnnnnnnnnnnnnnnnnnnnnnnnnnnnnnnnnnnnnnnnnnnnnnnnnnnnnnnnnnnnnnnnnnnnnnnnnnnnnnnnnnnnnnnnnnnnnnnnnnnnnnnnnttatcaaagtgtgtgactgcttctaacctgtcaaatatgcatcttatactacatattaagtcccaccaaacaagtcatttaagtcaacattattttagca

SEQ ID NO: 230458 - DNA, 319 bp, Homo Sapiens
  misc_feature (97)..(135): n is a, c, g, or t
  misc_feature (137)..(235): n is a, c, g, or t
gtctgggctgatctgcttggggctaagagatgaagagagaagccagacaatagtccaaggccctctgctttaggtctttcttctaaattctgattcnnnnnnnnnnnnnnnnnnnnnnnnnnnnnnnnnnnnnnngnnnnnnnnnnnnnnnnnnnnnnnnnnnnnnnnnnnnnnnnnnnnnnnnnnnnnnnnnnnnnnnnnnnnnnnnnnnnnnnnnnnnnnnnnnnnnnnnnnnttgagccattgcacccagcctgaacttgcatactttctggtcatcttttggctacccgtgtttaacaagaagatgaggcccacg

SEQ ID NO: 230459 - DNA, 209 bp, Homo Sapiens
cgatcgtcacccgcaatcccgctggagatacgccgctcggcacttacggcctgatcgccgcgctggctgggcgcactacggctccgagaagctgctgccgctcggcagcttcgtgctggcgctgtatctcccctgcgcgctgcacatcgtgcgtggtgtacggcagcctgctcgccgcgcacggactcaatccgctgaagcttcttccg

SEQ ID NO: 230460 - DNA, 216 bp, Homo Sapiens
  misc_feature (46)..(84): n is a, c, g, or t
tcaaaaaagaagaaagacctcaaataaacaacttaatgatgcctcnnnnnnnnnnnnnnnnnnnnnnnnnnnnnnnnnnnnnnntagttagaagaaagaagaattaatgagattcatagcgaaaataagatgtatacacgacccagaaagagctcagaaggacagaaggtacggggataatagcacaaaaacaaccccgaaaatgaggtctcaccg

SEQ ID NO: 230461 - DNA, 184 bp, Homo Sapiens
ttggccctgctgcttcgtgggggctttccggcacccgaatcacactgcccacgggtctccttcgtggggaagcaggattgggcgcgggaaggccttctgcgcccagaccacagccatgctccctgagccagctgggacgcttagcgccgaggccccggtcgcaccgacggccccaaaccagctt

SEQ ID NO: 230462 - DNA, 138 bp, Homo Sapiens
catgtacgccgttttatttaaaccaaagcaagcctggtttatattaatggccagtaacggtaatggttgatttacccatgtccagaccattgatttccaggtcaccaatggatgcattagctgctgaacccaagtgaa

SEQ ID NO: 230463 - DNA, 163 bp, Homo Sapiens
ctcgtggtaccgatcgaaatggggtttctggacttcgtgacggagcgccgccaggccgaaggcccggatgctctgcttttttcagagctgcgctttgacgagaaacacctctactcgcgtgctgcgagccgcttcttctgtggccccgaaacaggcgccggat

SEQ ID NO: 230464 - DNA, 155 bp, Homo Sapiens
cagaggaacaggcaactggggtttaggcgattagctagggtcacacaatttaagtatctgaaacctgttttgaattcagatcatcttgactctctaggcccagaactctatatactgcaaaaactcccatcacacactaagataagctctatatg

SEQ ID NO: 230465 - DNA, 160 bp, Homo Sapiens
tggacccgcggttatgtcttacgactgtacaagcttatgtttggattcacattacacagtgaagtgattgcttgtcaaattaattaacctatccatcccctcccataattagcactttcttgttctctagaacgtcatcatccgtaagacataaccgcgg

SEQ ID NO: 230466 - DNA, 255 bp, Homo Sapiens
gcggttagtcttacggacattggaagtgttaatgcataacaggggaaaatgagagggggatgctgtcaggaattaatgtggtggaatgtcggggaagacaggaaaggaattaatgtggtggaatgttggggaagacaggaaaggaattaatgtggtggaatgttggggaagacaggaaaggaattaatgtggtggaatgttggggaagacaggaaaggaattaatgaggtggaatgtcgtaagacataaccgcgg

SEQ ID NO: 230467 - DNA, 230 bp, Homo Sapiens
gccggacccgcggttatgtcttacggaataggtgttggtattgtgtaatcatactaaataagtaagtattcacggttacatacctcttcttgggtgctgtggacttagccattctcccaaatcatttgtatggcatttattaatcacaggtctatgacccccattaaaacagacactctattgtcaactcgttctatcctgtcttacatgagcgtaagacataaccgcgg

SEQ ID NO: 230468 - DNA, 107 bp, Homo Sapiens
cggtatgtctacgtctggaactaaatcttaaaatgatgagattttctacttggaaaaggattttcaaatgaaacattgaattgctttgaactataatccctttcttt

SEQ ID NO: 230469 - DNA, 104 bp, Homo Sapiens
ccggtatgtcttacgggaactcctctttgcctatttttaaatggagctgtttgggttttttggttttgagttgtaggagctacttcagtctccgcaggaaggta

SEQ ID NO: 230470 - DNA, 200 bp, Homo Sapiens
ggtcttggcttctttcttttgtctgggatgcccatttccaaactcttcacatcttcctcctgagatgggatttctgcggtctccctgtttaaagtagccctatgattcctagatcttcctatgccatcaacctgttcattcctttcttaactgttctattgatcaatgactgtgtaacgagtcacctgtaagacataact

SEQ ID NO: 230471 - DNA, 119 bp, Homo Sapiens
  misc_feature (49)..(49): n is a, c, g, or t
ggacccgcggtttgtcttacgccctggcccagtgtggtgttctgcaagngatcacattgcagcaactgaagctgtaggttacagctaaggctcatattcaatccctggtcctggaactt

SEQ ID NO: 230472 - DNA, 176 bp, Homo Sapiens
  misc_feature (66)..(78): n is a, c, g, or t
atactgtcttacgtcggctatgccgcaggacctcattgcttattcatttccaaatgcaagagtcannnnnnnnnnnnnaaagaaagggatttatattccaaagcaattcaatgtttcatttgaaaaatcctttcccaagtagaacattctcatcattttaagatttagttccagga

SEQ ID NO: 230473 - DNA, 204 bp, Homo Sapiens
  misc_feature (48)..(73): n is a, c, g, or t
  misc_feature (126)..(153): n is a, c, g, or t
acttctacgtttctccattgtacattcccttccatgcttttccatacnnnnnnnnnnnnnnnnnnnnnnnnnncacattcttttaatgtcacttctttctatgtgcctagtttcctagggtgttgnnnnnnnnnnnnnnnnnnnnnnnnnnnnaaggggtacccacccggaaaaaaatacccccgggggtcccgcccccaattt

SEQ ID NO: 230474 - DNA, 131 bp, Homo Sapiens
acctcttgccgaagtctcacttattgttgattgagcttgagcatcattagaagaaaatgtatttatggtctgggtcagagcaagtgttaactggccaggtgaggggatcccacctagtaacagccttggag

SEQ ID NO: 230475 - DNA, 337 bp, Homo Sapiens
  misc_feature (69)..(287): n is a, c, g, or t
cctgcgctttgatagttcccgcctgctacatcccttgactttggcttcagctgtcgcgtgccggacatnnnnnnnnnnnnnnnnnnnnnnnnnnnnnnnnnnnnnnnnnnnnnnnnnnnnnnnnnnnnnnnnnnnnnnnnnnnnnnnnnnnnnnnnnnnnnnnnnnnnnnnnnnnnnnnnnnnnnnnnnnnnnnnnnnnnnnnnnnnnnnnnnnnnnnnnnnnnnnnnnnnnnnnnnnnnnnnnnnnnnnnnnnnnnnnnnnnnnnnnnnnnnnnnnnnnnnnnnnnctatagaactttaacaaaataaaacgaatccaaccccggcagggcgtgga

SEQ ID NO: 230476 - DNA, 199 bp, Homo Sapiens
  misc_feature (110)..(110): n is a, c, g, or t
tcgcgctcggtgatgtttcatgagtatcagtcaggtcccggccagccacggatccatactgcaggatggcttgggggagggcttacccctcgtacataggcacagtgtgntgtgaccccgtcaccggcagtccatcacagtatgccagtaggtacggtcgaaaggcgtacagggtatagcacaggccctggcagtagca

SEQ ID NO: 230477 - DNA, 146 bp, Homo Sapiens
gtaccctcattagctgtgacccgagatattcttgtgacctgcatccaccctcatgatgcgacaatgggcatctggctgccgaacgcgaatacatctgaggcctgaactggctgcctgacgaggccaacaaacccatcatcgatgtg

SEQ ID NO: 230478 - DNA, 213 bp, Homo Sapiens
  misc_feature (40)..(40): n is a, c, g, or t
taggcggacccgcggtatgtttacggtgtctcatgctcanattattcacagattcaggttgagataatgcaggtatattgagatgttcacacagattctggtcttgcataaaatcatctttatcaacctagacactcagaagttcaatatttgaaattgtattggcatgtcacatctctaaggatcacattgctccgtaagacataaccgcgg

SEQ ID NO: 230479 - DNA, 148 bp, Homo Sapiens
tcttcagtgactctaaggatcccccaggagtgcccagtgcccgatcgagtgcccgctgaatccgacgtctccggcccggccgcgggggtgatcactgccgccctgcgccgggcgatccggagccagaccggtgccgcccgcgcctacg

SEQ ID NO: 230480 - DNA, 338 bp, Homo Sapiens
  misc_feature (59)..(102): n is a, c, g, or t
  misc_feature (127)..(287): n is a, c, g, or t
ggggttacatgcaattctcagtagctgaaataaaagacgtgcaccaccatgcccagttnnnnnnnnnnnnnnnnnnnnnnnnnnnnnnnnnnnnnnnnnnnnggagaccacagtctcgctcttgtgnnnnnnnnnnnnnnnnnnnnnnnnnnnnnnnnnnnnnnnnnnnnnnnnnnnnnnnnnnnnnnnnnnnnnnnnnnnnnnnnnnnnnnnnnnnnnnnnnnnnnnnnnnnnnnnnnnnnnnnnnnnnnnnnnnnnnnnnnnnnnnnnnnnnnnnnnnnnnnnnncaccatgttgccaggctgtctcaactcctggctcagggatccgctgttcga

SEQ ID NO: 230481 - DNA, 318 bp, Homo Sapiens
tcagttagatggaaatgaagaaaatggtgttggaagtaaagtgactgcccacgtcccatagctcaggtacgggggtagggaggacgaccaggcttcctgattcctggtccagtgggctcctcaggacaacacaattccttccgttcctaaggtttgatgaatcaagtcaattctgctgagagagactcataccatagcctgtgaagtctgcatcgggggaatggtatgaagctggtgctaaagggatctcttgtgaactgaaggagacctttgttgaatatttctgctgtttactttggccaccagcgaaagtcaacg

SEQ ID NO: 230482 - DNA, 304 bp, Homo Sapiens
tgcggcatcactgcacgctgctctcggggtgggcctggcccccgtgccccttcaacctcttgggcacggcatgtgggggtgctggcagctggcagtggcatggtcccccgtggcatggggctcgaccctctttcttcagcactgcggtctttaacttgcatccctctcttgggccaagccgagggttggacgtgcctgtcggaatcgggcatggccatcagggttggcaagtgcaatgtcggcacatcgggcatggcaatcagggttggacagcgcaaagtcaacgcatgtgtcgggtcaccgc

SEQ ID NO: 230483 - DNA, 110 bp, Homo Sapiens
cacatcgttgacttcgcccagaagttcattgaaaatactatggtagttgcttttatttaaaccaggaaagtaaaattacaattaatttggtgtaggcggagcaggtgtcc

SEQ ID NO: 230484 - DNA, 210 bp, Homo Sapiens
ccctcctgcttactgtgatggaggaaggaattgcaccccagaacacatagcaggagtgcccaaggaggaggaagaggggctgagaaccatcactggcccgtgctttgccaacttctcattgtattggcctctgaaagactgcaggtgtagcaagcaggggatatatatcaagcaactgcaagtattatctcgcgaaagtcaacgatgggt

SEQ ID NO: 230485 - DNA, 201 bp, Homo Sapiens
ggactttcgctgtgtctcgtgctcagagatgctgcactcccattgtgtcacagcgggcactcctgaagttacatttgaaggaagtatttctaagcgtgattaatgcagtcaatgtttctgatgcacactgagaaactgctttagcatgagtattcctggagaaattcagtgtgtgttttttaagtcgcgaaagtcaaggat

SEQ ID NO: 230486 - DNA, 185 bp, Homo Sapiens
caggacttaacatgttgactttcgccaggctaggagtcaagtggagctgttgctgcctgcctatgccagagccacagcagtgccagatctgagatgcgtcttcgaccaacaccacagctcatggcaacgctggatccttaacccactgagcaaggtcaggaatggagcgaaagtcaacgatgtgt

SEQ ID NO: 230487 - DNA, 189 bp, Homo Sapiens
gtcactgcccattcagccatttcagccagcccttcatttcacattcatttcaacatccattttcatgtttcccatatttccccaacgtgcccccatattcatgcaatcccatgcacatcccacttgcacatattttcttgttttgtggctgccctgctgtccccactctggggtgctcctcgtcgcagt

SEQ ID NO: 230488 - DNA, 137 bp, Homo Sapiens
tccccctacacgttggtatgacgaagacttccggactcatgttgatcggaaacactcaaccccgctgtaatgaggtaaccgaggtgatcgtcacatcagtaccaggccaagagctacaggtagaagtctttgacaag

SEQ ID NO: 230489 - DNA, 580 bp, Homo Sapiens
  misc_feature (127)..(230): n is a, c, g, or t
  misc_feature (262)..(404): n is a, c, g, or t
tcgcggaagaatacacgtcaaaaatgtgtgaggtgaaccatgggaatcatatattaatgtaatagagaagtaccaagttgagggtatagaattttatttcatgttatctgttcgagacaaggtctgnnnnnnnnnnnnnnnnnnnnnnnnnnnnnnnnnnnnnnnnnnnnnnnnnnnnnnnnnnnnnnnnnnnnnnnnnnnnnnnnnnnnnnnnnnnnnnnnnnnnnnnngtgtacaccaccacgcccagctaatttttgannnnnnnnnnnnnnnnnnnnnnnnnnnnnnnnnnnnnnnnnnnnnnnnnnnnnnnnnnnnnnnnnnnnnnnnnnnnnnnnnnnnnnnnnnnnnnnnnnnnnnnnnnnnnnnnnnnnnnnnnnnnnnnnnnnnnnnnnnnnnnnagggtaagaaaacttttccagaaaatcaacaaccacccctcccagcttttaataaggtaacctttcaaacttttggaaaatgggaaggtaactttggtcattggtatacccactatatagatacagaagtggtggtgaaataatctgcctggatatgtgaatgtggtggttgtgga

SEQ ID NO: 230490 - DNA, 184 bp, Homo Sapiens
  misc_feature (90)..(99): n is a, c, g, or t
gactccaagcatggatacagcaaatgagatccacatcaagactcattacagtccaattgttgaaagccaaagacaaagggatattattannnnnnnnnnaaaaaccgggtttacccataatatggcccaggctggtctaaactggcgtggcgctcaatggattctcccgcctcaggcctcccaa

SEQ ID NO: 230491 - DNA, 730 bp, Homo Sapiens
  misc_feature (88)..(408): n is a, c, g, or t
  misc_feature (438)..(688): n is a, c, g, or t
gatattaagaccgaaactgtgaagctactagaggaaacgcttcatgtacactggtctaggtaacaatttgctggatatgaccccgaannnnnnnnnnnnnnnnnnnnnnnnnnnnnnnnnnnnnnnnnnnnnnnnnnnnnnnnnnnnnnnnnnnnnnnnnnnnnnnnnnnnnnnnnnnnnnnnnnnnnnnnnnnnnnnnnnnnnnnnnnnnnnnnnnnnnnnnnnnnnnnnnnnnnnnnnnnnnnnnnnnnnnnnnnnnnnnnnnnnnnnnnnnnnnnnnnnnnnnnnnnnnnnnnnnnnnnnnnnnnnnnnnnnnnnnnnnnnnnnnnnnnnnnnnnnnnnnnnnnnnnnnnnnnnnnnnnnnnnnnnnnnnnnnnnnnnnnnnnnnnnnnnnnnnnnnnnnnnnnngcccatacatataagatcaaacaatcttcnnnnnnnnnnnnnnnnnnnnnnnnnnnnnnnnnnnnnnnnnnnnnnnnnnnnnnnnnnnnnnnnnnnnnnnnnnnnnnnnnnnnnnnnnnnnnnnnnnnnnnnnnnnnnnnnnnnnnnnnnnnnnnnnnnnnnnnnnnnnnnnnnnnnnnnnnnnnnnnnnnnnnnnnnnnnnnnnnnnnnnnnnnnnnnnnnnnnnnnnnnnnnnnnnnnnnnnnnnnnnnnnnnnnnnnnnnnnnnnnnnnnnnnnnnnggatccagctgtgcgaaatgaacccgctcttaaaaaagaaga

SEQ ID NO: 230492 - DNA, 316 bp, Homo Sapiens
catataaagtaggtgcccagagttacactcagtgccagttggtggccagtctgccaatgtctacagtcgggccctcaattcaaacacacaacttgtcaactcatgcccattcacattttcaatcccagtcaccatttttcttctaatcatgcatggcagcacattctgcaatcttcacatttctgcagggggtttcaatgcacccactagcagcttgtcctcatcattcagtccgagtttcaatcactgtcatgtctcagtcagcatgggctcatcatcattgcctctcattctttgcagtgtgcattctggccgg

SEQ ID NO: 230493 - DNA, 213 bp, Homo Sapiens
atacaggaaatcagctatgccaggaaatagctctgaacaggaatcgcgtataaccatgaaacagctatcactaggaaacatcgatgacctggcacctgttctacctgtcatcgggatgatccatgaaacagatcatcctcgtgctcatcataatctaagtacgagaaatacattagttattaatttatctttatttgagacagggtctcactc

SEQ ID NO: 230494 - DNA, 208 bp, Homo Sapiens
ttgcacgccggttatgtcatgccatggagaagatgtaagtaccatagcaaggctgcaaacctgtcttccagtatggagccgggattgtaatggacacatttgggaagtcaggccaggaaggagagaagactctggtacaagtgtgctgctttgtcccatttgtgtgctatccaccttaaacaaagacatgtccttggagaaactatcc

SEQ ID NO: 230495 - DNA, 140 bp, Homo Sapiens
  misc_feature (110)..(110): n is a, c, g, or t
  misc_feature (127)..(127): n is a, c, g, or t
tggctcgctttcagttctgaatatagcattttcaaacaaggggtttctacaatccaggaaccaaagcgaggcttcatttcctttatcttcttcttctacttcatcctcanttcctaacaacattggngggctattaatga

SEQ ID NO: 230496 - DNA, 123 bp, Homo Sapiens
  misc_feature (67)..(67): n is a, c, g, or t
atacgttaattatcatctggggcattaaacaagacttaatttaagttggcccaaataccaaagcatntgaatggccccaaatgggaccagaattttaaattcagatggggcttaatcacatta

SEQ ID NO: 230497 - DNA, 432 bp, Homo Sapiens
  misc_feature (25)..(25): n is a, c, g, or t
  misc_feature (115)..(126): n is a, c, g, or t
  misc_feature (138)..(383): n is a, c, g, or t
tagacaggcaatttacataaagagnaggatagccaatgaatagtttagaatgtaagtgcttccagagaaaagaagaacagaacaggacaacgggcagaggtgatctgaaaaagcnnnnnnnnnnnncagacagaatgnnnnnnnnnnnnnnnnnnnnnnnnnnnnnnnnnnnnnnnnnnnnnnnnnnnnnnnnnnnnnnnnnnnnnnnnnnnnnnnnnnnnnnnnnnnnnnnnnnnnnnnnnnnnnnnnnnnnnnnnnnnnnnnnnnnnnnnnnnnnnnnnnnnnnnnnnnnnnnnnnnnnnnnnnnnnnnnnnnnnnnnnnnnnnnnnnnnnnnnnnnnnnnnnnnnnnnnnnnnnnnnnnnnnnnnnnnnnnnnnnnnnnncaggtgtgagccacctcgcaggccagcttctttttttatggtttttctg

SEQ ID NO: 230498 - DNA, 112 bp, Homo Sapiens
gtcacgagttcagtgaatcgtatcctgtcctcgctgtttcctggtgtcaacgcggcacgtgcctcctgtaactccttgtcctcgctgtttccagtgtacaacgacggcccgt

SEQ ID NO: 230499 - DNA, 128 bp, Homo Sapiens
tctggcctgctgctgtcgtctctgtcccggttccccttggcgtgagcggcgcgtctggcctaacctcgacccctgtggggcctgctggtgctcccgactcttcctgcaacgggaattgaagcactcca

SEQ ID NO: 230500 - DNA, 209 bp, Homo Sapiens
tcagctcgggggtgctctactaatacatcatacaaaccactaacctgaccaggacgccaactcaggccattactaccaaaggaagacaaggctggtctctacacccacagtggaaaggcctgccttgtgagacaccacagtgcggctgactttgaagtctagagcatgactaatggagacccaacttgcagaataggccctgatatgat

SEQ ID NO: 230501 - DNA, 139 bp, Homo Sapiens
tgcatggcgtattcactcgccatggttcttctattcatcattcctcatcccttagaactctgaactatctgaccatcaactttttcaggaagctttttgttctattttctcattataaggggtgggagtgaaattacgg

SEQ ID NO: 230502 - DNA, 269 bp, Homo Sapiens
acgaatgaggacagaaccaagtgcaaattcctgtacctttgaatatctacgtcatgccatgcagatacttgacttaccccatggtaacctcagttttcttctgtgtgaaacaggaacactagtttcattcgtcactcagtttctctcaagattacacgagatcatacctataaaacatccaagtcatatctctgtatcagcatctctgtcatagctattgccagccatttcactattattggatatacagttctgtgcctgaaacctac

SEQ ID NO: 230503 - DNA, 350 bp, Homo Sapiens
  misc_feature (59)..(201): n is a, c, g, or t
cscccccactgtsggcatcatgatgccgacagtggggcvacdgtcggcatcatgattgnnnnnnnnnnnnnnnnnnnnnnnnnnnnnnnnnnnnnnnnnnnnnnnnnnnnnnnnnnnnnnnnnnnnnnnnnnnnnnnnnnnnnnnnnnnnnnnnnnnnnnnnnnnnnnnnnnnnnnnnnnnnnnnnnnnnnnnnnnnnnnntccggtctcatctggaggtttgactgtgggaagatccacttctaagctcactctgtgactactggtaggcctcaggctgtcactggctattgactgaagactaattagtytcccccctggyssmcctccaatcatgaygccgacagtgg

SEQ ID NO: 230504 - DNA, 193 bp, Homo Sapiens
  misc_feature (145)..(145): n is a, c, g, or t
agtccgtcattgctacgcgatattabyccttccacgdgcttcagcagtaggttcgttcgctaatcattcaggttgtagcgcttccacatacatcgtcgctgttgattccggcgcatcgtatagtacgttttcagattgttccavntttaamgttaggggktttgacttcacgaktggbctgcgttaaggcctg

SEQ ID NO: 230505 - DNA, 315 bp, Homo Sapiens
  misc_feature (280)..(280): n is a, c, g, or t
ggatvtagagggggggataytgaggtatgatgattggggaagaggtttattatggttmtaatgaagaragaggataagyagggtaagctgkgtttaggatggatagtttgaataattttagtaggrtctggggataagggttgtstmtggtggtttaghaaattggvtctggggtgaataggataagtggatagtggtyagagtataagaggbagstaagtaaaaaatgtggttgaggtatgggbtyttattggttgatttgtatttcaaaaagsvcaantatggggaagttaattaatgtttggdaattatgat

SEQ ID NO: 230506 - DNA, 140 bp, Homo Sapiens
  misc_feature (130)..(130): n is a, c, g, or t
mccccggvmcactgtcggcatcatgattgggggccactgtcggcccagtggcccggccctaaraagtggtgacattgggytgacatcymcmtagcaagmcaaggccaatgtgcatcaaccagtgagcdcnvvrggggttt

SEQ ID NO: 230507 - DNA, 212 bp, Homo Sapiens
aacgcctatccctgctgcatattgaattaactagaaataactaggcaaggcgagcctagcgctaagacccccgataccagacgagctgcctaagcacagctataagagcacaccctgtctactttcgcaaaatattaggaagctcaataggtggaggcgccacccctactgcgcctgtgctcatagcctggttgttgaccgagtagacgtct

SEQ ID NO: 230508 - DNA, 220 bp, Homo Sapiens
gctccagcagtccactggggcatgcaagctggccaaaggcagcaacatgtgcacaacacaggcttctttccgcaggttttcattcaatgtcaagaccttcaggcatgttgtcaggcaatggcagcagcaccagtggcagtggccccaagtgttgccacgcaaatgttcaaggtccatgcagcaggtgggttctggccaaggccagcgagggcatcctctc

SEQ ID NO: 230509 - DNA, 365 bp, Homo Sapiens
tactaaggaagggtgacgtctaggaagaaggctgtgagtgcttgaagagacacgataggagagagtgccaaaccctgtggttccagacaagcagaatgcgctggccttccactctgtgatggtttcagggacctggtcaccagctcacttatacctaatgagctagtgaaggagcagagaagaggagtataagcacatctttttcttgctgaacacaaagcatggctgaatcctcgaagcaatgataactcagtaccctagtgtggtaaatgctaaacttgatataagggtagatgctcctgaatgaagattataaagttaatgttactccctacctcccttactccctctttcactccctccct

SEQ ID NO: 230510 - DNA, 111 bp, Homo Sapiens
ttctcgtctatcactgattagagtggggtggcaggtattagtggatatatttatttagcattctgaccattctgactctgcccagaacgccgtcccacctgcagacaccct

SEQ ID NO: 230511 - DNA, 382 bp, Homo Sapiens
  misc_feature (91)..(191): n is a, c, g, or t
  misc_feature (367)..(367): n is a, c, g, or t
gggaggtaaccctcgctatcctgctgtgagaatataacatggtatagccaccgttggaaaacagcttgtcagtttcttcaaagctcagtgnnnnnnnnnnnnnnnnnnnnnnnnnnnnnnnnnnnnnnnnnnnnnnnnnnnnnnnnnnnnnnnnnnnnnnnnnnnnnnnnnnnnnnnnnnnnnnnnnnnnntaagtacaatggtctccggttccccagtagtggtaaagttccccagcccaggaacgtttcattatcccctccgtctccactcctagtcacttcatctctgaggcctgcgagtggggatgggtgacagaaacggttccaagttgtatatatcattattccaaaccatcaagagccanggagggaagagaaaa

SEQ ID NO: 230512 - DNA, 124 bp, Homo Sapiens
tagctatatcagtgggatgaaggcctgcttacctttgtgtgtgggtgatgaggaggtataaccttccagtaaagtagttgagccttcagaaatgattagggtcacaacttgcacctgtaacatc

SEQ ID NO: 230513 - DNA, 500 bp, Homo Sapiens
  misc_feature (44)..(409): n is a, c, g, or t
cgcatcctaaagttaatatgaaaatgcgagggacatagaatagnnnnnnnnnnnnnnnnnnnnnnnnnnnnnnnnnnnnnnnnnnnnnnnnnnnnnnnnnnnnnnnnnnnnnnnnnnnnnnnnnnnnnnnnnnnnnnnnnnnnnnnnnnnnnnnnnnnnnnnnnnnnnnnnnnnnnnnnnnnnnnnnnnnnnnnnnnnnnnnnnnnnnnnnnnnnnnnnnnnnnnnnnnnnnnnnnnnnnnnnnnnnnnnnnnnnnnnnnnnnnnnnnnnnnnnnnnnnnnnnnnnnnnnnnnnnnnnnnnnnnnnnnnnnnnnnnnnnnnnnnnnnnnnnnnnnnnnnnnnnnnnnnnnnnnnnnnnnnnnnnnnnnnnnnnnnnnnnnnnnnnnnnnnnnnnnnnnnnnnnnnnnnntactctgggccttcgagggtgaggaattcctggactgaatggtggggaagctctaaggagagagtcaggctgaaactggggggacctctag

SEQ ID NO: 230514 - DNA, 410 bp, Homo Sapiens
tggcagcccagtgatcacatgcttagacatacgataataaagaaagtgccaatgtatcatcgtgtacgaactgacagcgatagaccagtgatgactggccacgccataaagattactgaatgctgtaccaatcgtttagatttaattctgtaagcaatgggacttttacagttttgatttgtgttttgggcatagttgttattggagataatattatagatgtataaagagatggaagaccagtaaaactgaaatatctgttgttggaatagagatcataatgagtgcgaaaggaattgcactgggtgggagaggacgatcataggagggtgtcagtattcaagaggtagtgaatattgcgtagccttattaatctgttgctttgctttatgggatcccaagccatatcc

SEQ ID NO: 230515 - DNA, 149 bp, Homo Sapiens
ctaacagctatgacctgcactggccgtcgttttacactaacagctatgaccatgcactggccgtcgttttacactaacagctatgaccatgcactggccgtcgttttacactaacagctatgaccatgcactggccgtcgttttacact

SEQ ID NO: 230516 - DNA, 149 bp, Homo Sapiens
tagtccgctgtattattgggtctgttaaattgtcattctcagtgtcttaatctgacgcagcatatgcgaggaaaatgtatcatgttactctatactaacattcgttctactatagggtgacagattgctcccattgggtgtgaggactt

SEQ ID NO: 230517 - DNA, 108 bp, Homo Sapiens
gtaaaaacggggctttgttttgtttccccaggcgggttctcaacggaggtccccatccttataaggagaaacaaaaagtttaaatagggaagggaggttttgattcca

SEQ ID NO: 230518 - DNA, 235 bp, Homo Sapiens
  misc_feature (56)..(123): n is a, c, g, or t
  misc_feature (128)..(150): n is a, c, g, or t
agtgcagtgtcgtgatcacagactcattgcacgctcaatcccctaggctcaagcannnnnnnnnnnnnnnnnnnnnnnnnnnnnnnnnnnnnnnnnnnnnnnnnnnnnnnnnnnnnnnnnnnnaaggnnnnnnnnnnnnnnnnnnnnnnnaaaaaggggccttcccttttttgtccccaggcgtgctctcctcaagtggaggtctccccattccttatatagggagaacacaaaa

SEQ ID NO: 230519 - DNA, 305 bp, Homo Sapiens
gtaaaaacggggctttgtttttttccccaggcggttctcgatggagtgtctccttctcttataaggagaaacaaaaatgttttattagggaaagggagtgtatgatcttccaccatcagcataccacaattagagaggctgatccccccatatgttccaattgatctataaaacagggattaaccacaacccatgaaaagacggatgttaccttccaaaaattctaactatcatatctggtgaatataacaacaaacaaaaatgtgtaaaacacacaaaactcttatgaaatatctcatcttctg

SEQ ID NO: 230520 - DNA, 384 bp, Homo Sapiens
  misc_feature (202)..(280): n is a, c, g, or t
gggaaagagaaaaattataatcaagcataactatagcacagggactatcccctatacctttctgcgtatgaattgactagaaataactgcgcgaggagagccaaagcttagaccgccgtaaaccagacgagctagctaagatcagctaaaagagcaggtatacaccacagtgtacacaccagtgtcatacaacataccgtannnnnnnnnnnnnnnnnnnnnnnnnnnnnnnnnnnnnnnnnnnnnnnnnnnnnnnnnnnnnnnnnnnnnnnnnnnnnnntctcccacacatatactatacacatgtaacttacagcttacgtacaccacatacactccatgcacacttatacaccagacaccacacacatgaacatcatgtgt

SEQ ID NO: 230521 - DNA, 244 bp, Homo Sapiens
ccctgtactgcgctgggatatagtaccgtaagggaaagatgacaaattatcacctaagcataattataccatcggactaaccccgtgtaccttctgcataatgaattgaactagaaataactttgcaaggagagcctgcagcaaagtacccccgtataaccacgacgacgctacttatagaacagtctataatgagcacacccgttctactttcgcatacatatgtgcgaagcatttatagtgc

SEQ ID NO: 230522 - DNA, 240 bp, Homo Sapiens
ttcttcaattcttcatgttggccatctcacatgctcactcatgcaccagtttttcagcaggtggggcccttcaggcaggtgcattagggccatgagggttctggcgcttcatacagtgggcattcagtgcccccactacaccagcgggttggggcagctttttgccctatttgctcatgtgcagaacacagacaagaaggcaccatcatggaaagcaaaacattcaagaccgatcaggga

SEQ ID NO: 230523 - DNA, 236 bp, Homo Sapiens
tatatgtctccatgtactgatcctcacaggtctccaccaaatacttcgtcatcatgttgtggaacatcatcatattatggaacatcatatgtactcgatttcatcatcttattgtggaacatcattgtcctcgaaattcattatcatcaatcagatgtcatcaccaacaaatatccataagtcataaccattcgacatcactatctaaagtctcttctaccaccatgcaaattacc

SEQ ID NO: 230524 - DNA, 296 bp, Homo Sapiens
gagaccgggcgttcaatccagtgcccggacctcggtctcgacgcgcctgttaggttccaggcactgaatcagttcggtgcgcggcgcttgcatgttgcagcgcaccaggggtttgttgctaccttcgcccacggcatcgaccagttccgccggcaggcccttgcccaccaggtaggtcttgatggtctgcgcacgttgccgcgaaacctgcaggttgctctggcggtcgccaatctggtcggcatggcggtgatcacgatcttgccgacgttgggggtgttaagcaagttggttgc

SEQ ID NO: 230525 - DNA, 252 bp, Homo Sapiens
  misc_feature (34)..(35): n is a, c, g, or t
  misc_feature (41)..(41): n is a, c, g, or t
  misc_feature (47)..(47): n is a, c, g, or t
  misc_feature (88)..(88): n is a, c, g, or t
  misc_feature (105)..(106): n is a, c, g, or t
  misc_feature (108)..(108): n is a, c, g, or t
  misc_feature (149)..(149): n is a, c, g, or t
gggttacvkagctcgdattcgkkaaycawgggknntaagdnrtttcnvgtgtgaaatkgkkakddktgkgkggkgkgtrrkagkgtangtgtttkkgggtttggnngngtgttkgggaaktttkkkagtgtktgggggggtgtktstsnttgtkkggggggtttgdkhtsagtktgtgkgkgtgtgwttggaatggggtgdtkkggrgrgatgwtkgtgtkgatktkkgdgggggatgatggrtgdtgwtkk

SEQ ID NO: 230526 - DNA, 527 bp, Homo Sapiens
  misc_feature (368)..(368): n is a, c, g, or t
  misc_feature (376)..(376): n is a, c, g, or t
  misc_feature (394)..(394): n is a, c, g, or t
  misc_feature (407)..(410): n is a, c, g, or t
  misc_feature (434)..(434): n is a, c, g, or t
  misc_feature (436)..(436): n is a, c, g, or t
  misc_feature (438)..(438): n is a, c, g, or t
  misc_feature (452)..(452): n is a, c, g, or t
  misc_feature (467)..(467): n is a, c, g, or t
  misc_feature (471)..(471): n is a, c, g, or t
aaaacbactggccatttgcyaagctttgcattktyttgcadggtcbgactcctagaggatcccccyttgawtgatatctccactggaggcccctcgccatcttgagamagttcccagaacccaggttctcagggactcagcagttggagttgagcccagcctcttctctcaggaatgcaggaccctaaggcttgggaactgaggtatcttcgcccccaggaatccagctccttcccctgccagaagcccagatcccagcccctgacctcccgggtctctcgscctcatkyctcctgstaacctccggctycagtggagatatcaycatgggggtaccgagctccgawttcggaatcatgggtvdkagnvgkttccngtgkraaaattgtagmgnkhdwcwctgtgtnnnnvtvtktbbytkkkktttttttgtngntnagdrkgskctgtgntgtmkkgkkkgtgtntctnggtgtmtagtgkttagtgtgtagtmtcktttkttghkvttgttatgtgtggtakkt

SEQ ID NO: 230527 - DNA, 764 bp, Homo Sapiens
  misc_feature (59)..(59): n is a, c, g, or t
  misc_feature (101)..(101): n is a, c, g, or t
  misc_feature (148)..(148): n is a, c, g, or t
  misc_feature (243)..(243): n is a, c, g, or t
  misc_feature (447)..(447): n is a, c, g, or t
acggtttctcaccctacgtaccatcgatcatccaagctgattgctgaagtcactctaangatccctcttcctggccagtgaaggagaaacatcctaatggngagactgcctgttttcttttgcattgagtccatgtgactaagccgangcaccttctctgcagagacagaagctcagtactgcccaggtacacagtctgcgccagccacagctgagcaacatcagatgggtgggaaattcggnttttgaaacccattaaaatgggcttcactgtagaaaatttaccaggaggaagcaggaagaagcggaccgacttaatcgaatatggcatactggtctgtggaatggatcgttcaattccacaaatacagcggacctaaggtaagctggggccaagagtggctacccattaatggttggctactggcgcttcaacggaaccttgtngcaatgattagaattgcaaaccgcgagagagttgcgattggcgccttccttctcgtaagaacctgtgctcgcgtcgatgggaaggtatatatctagcgcgtatgtgtctcaatatgggtaccagagaacattgcacagcgcacagcgcagccgtaagcggtgtgcgtgtctagagctcgctgtagatataaacacgcattagagtgtgaacgcagacgttatacagcgtttccgaagactctggccttttcgacctcggtatgaattccgcctttctctgagaggggtcttaaataccgcgattataggaggcggcc

SEQ ID NO: 230528 - DNA, 150 bp, Homo Sapiens
  misc_feature (28)..(28): n is a, c, g, or t
  misc_feature (74)..(74): n is a, c, g, or t
  misc_feature (77)..(77): n is a, c, g, or t
gcaagccgaacggttgggcttatccgtnactattggctgaagtcaccggttagaaccaattattgcacttgcanaanccattgtacacgattgccaaccaggttttagcgtcctcaaaatctttgatgtgggctaattcggtcacttaaa

SEQ ID NO: 230529 - DNA, 105 bp, Homo Sapiens
tataacgtaacacctgaaggaatctaaagttccgggtaaggtcgttccgttcaaagttggcgttgttggaccaacccccccgttatacccgaccctgggcctttt

SEQ ID NO: 230530 - DNA, 105 bp, Homo Sapiens
  misc_feature (36)..(36): n is a, c, g, or t
attgcacctgtaagaagccttgttaccaggtttccnaaccagtatttaggcgtgctcaaaattttgaatggtggccaactccggtcacttgaagaaagatttgcg

SEQ ID NO: 230531 - DNA, 387 bp, Homo Sapiens
  misc_feature (80)..(80): n is a, c, g, or t
  misc_feature (202)..(202): n is a, c, g, or t
  misc_feature (233)..(233): n is a, c, g, or t
  misc_feature (246)..(246): n is a, c, g, or t
  misc_feature (252)..(252): n is a, c, g, or t
  misc_feature (260)..(260): n is a, c, g, or t
  misc_feature (264)..(264): n is a, c, g, or t
  misc_feature (302)..(302): n is a, c, g, or t
  misc_feature (324)..(324): n is a, c, g, or t
  misc_feature (331)..(331): n is a, c, g, or t
  misc_feature (344)..(344): n is a, c, g, or t
  misc_feature (366)..(366): n is a, c, g, or t
  misc_feature (373)..(373): n is a, c, g, or t
atcgggtagctgcggccgaagaggaactgcgagatctgggtgctgtcgacgcggaggggccggattacggtgagggggcngtcaccttgccacgtttccccttgacccacgtctggcaagggctttgaccgacggtgccgcatcgtcggatcccgccgctgtgctgagatcgccgcatgcttgcctggaagacggcaggtcngaccttcgtgggcaaatgggcgtcaatttgngatcggggccganacccanagcttgtnaatntgccgccgctaaacttgaacggcttggcccggttaatnaccaaggttccccttaccggcntaaccgntaacaatcccgangcaaccgtcggttccttggttngcccggntggattggttccaa

SEQ ID NO: 230532 - DNA, 203 bp, Homo Sapiens
ccaggtcaccgccgcccctttcgaccgcaaactggtcaggcaggcccgtgacgatgctgcggcattcgttgccagcgatggcctgatccgcggtgcacgcctggaagccgcactcgactcgctgcgccacaactgcgctcggcactccgtcggcgaccttgaactggcagaagcaattctcgtccaataactacccctgactc

SEQ ID NO: 230533 - DNA, 179 bp, Homo Sapiens
  misc_feature (16)..(16): n is a, c, g, or t
  misc_feature (28)..(28): n is a, c, g, or t
  misc_feature (40)..(40): n is a, c, g, or t
  misc_feature (61)..(61): n is a, c, g, or t
  misc_feature (68)..(69): n is a, c, g, or t
  misc_feature (88)..(88): n is a, c, g, or t
  misc_feature (100)..(100): n is a, c, g, or t
  misc_feature (115)..(115): n is a, c, g, or t
  misc_feature (123)..(123): n is a, c, g, or t
  misc_feature (127)..(127): n is a, c, g, or t
  misc_feature (148)..(149): n is a, c, g, or t
  misc_feature (151)..(151): n is a, c, g, or t
cttcaccgggataggnagaggcctttcncacagggcctangaaagccaccacggcatttcntcccttnngtcagacataattccttangtttggcccttncaccttttatccatncaatagtngacnggcctttaattagtcaaattnngncaggcagttttttaaggctcttagattt

SEQ ID NO: 230534 - DNA, 118 bp, Homo Sapiens
cagtgtagtagttcagtcattcaggcaggggtggttgttcagcggggtccggcaggcaccacggttgcgggcaccagcatcaacatcaggttgttgttgcatttggttcaaacaacat

SEQ ID NO: 230535 - DNA, 137 bp, Homo Sapiens
tgctgctcacatacattcggctgtgggtggttgtgttgcttccacacattcatgtgtgtcgggccacgtccatgtccagatggtcagtccatcatccatgggtcgggcacgcattcagcttttcagccatatggcag

SEQ ID NO: 230536 - DNA, 154 bp, Homo Sapiens
acggggtacggacgtcaggtacgttacgtacttacggacggaggggtagttacgaggggatcggacggacaacaggttggggacaccacgctacacactacggttgttgtagactttggtatacacaacacactacgtacgacgggactgactg

SEQ ID NO: 230537 - DNA, 320 bp, Homo Sapiens
  misc_feature (155)..(195): n is a, c, g, or t
tgatctacggatcttaggactggcgtgcttatggcctcgtaacataccaaggccagcacagacaatatgtagacaaatgagcttggtgagtatcccacaaaacatgatttctaaaaacaagtagctagctctgctctggatgataacagggatcnnnnnnnnnnnnnnnnnnnnnnnnnnnnnnnnnnnnnnnnngaaagggccgtccctgtggcatagggaggtcccagggctagggctcatactagagcgtgatagccaccagccatacgcaaaagccacagcaagggtgggtctccagtctaccaggtgtgcaacca

SEQ ID NO: 230538 - DNA, 162 bp, Homo Sapiens
cttgcgggtataagagaataaactgtttccatgtcactactcccatccgggtttggcctcaggatgggaggggcatccgtttccaaccatcggagccagctcgcatgcagaggtgcatggcgtgtgcatctttcatctacagaaaacttaggtcagctctag

SEQ ID NO: 230539 - DNA, 465 bp, Homo Sapiens
  misc_feature (185)..(418): n is a, c, g, or t
tgcaattcttcccattagcccctccagaaagactagacataatgttttcctactgggggggagtactacaagtgaaaagccagcctcatttcccttaatgccctcaatcatgaagtagctaattcctgacaaaggcaatgttttgtttgttttttgctttctgagacagagtctcgctctatcgnnnnnnnnnnnnnnnnnnnnnnnnnnnnnnnnnnnnnnnnnnnnnnnnnnnnnnnnnnnnnnnnnnnnnnnnnnnnnnnnnnnnnnnnnnnnnnnnnnnnnnnnnnnnnnnnnnnnnnnnnnnnnnnnnnnnnnnnnnnnnnnnnnnnnnnnnnnnnnnnnnnnnnnnnnnnnnnnnnnnnnnnnnnnnnnnnnnnnnnnnnnnnnnnnnnnnnnnnnnnnnnnnnnnnnnnnnttacaggcgtgagccattgcccccggccaagaatactcttattacac

SEQ ID NO: 230540 - DNA, 640 bp, Homo Sapiens
  misc_feature (51)..(331): n is a, c, g, or t
  misc_feature (352)..(395): n is a, c, g, or t
ctatagggtagaatcagtctctctgaagaaagataagggatgtggatcaannnnnnnnnnnnnnnnnnnnnnnnnnnnnnnnnnnnnnnnnnnnnnnnnnnnnnnnnnnnnnnnnnnnnnnnnnnnnnnnnnnnnnnnnnnnnnnnnnnnnnnnnnnnnnnnnnnnnnnnnnnnnnnnnnnnnnnnnnnnnnnnnnnnnnnnnnnnnnnnnnnnnnnnnnnnnnnnnnnnnnnnnnnnnnnnnnnnnnnnnnnnnnnnnnnnnnnnnnnnnnnnnnnnnnnnnnnnnnnnnnnnnnnnnnnnnnnnnnnnnnnnnnnnnnnnnnnnnnnnnatgagccaccacgcccggccnnnnnnnnnnnnnnnnnnnnnnnnnnnnnnnnnnnnnnnnnnnnacaaatgcattctttttttacgaaagaaaaaatactgtgcatcatttggtcattactctatctagaaatgacatcctccttttaataattagtaacttgatactaatacaatgtaaatattttgttggtaggggaaacttgtggaatttattaacatgaatattaagcacaaaaaatcaggttattatttagtatcatgaatagtgcaggtgaaaacattaatctggtagcaacatgtataatta

SEQ ID NO: 230541 - DNA, 135 bp, Homo Sapiens
ccaagagtcaggtgatagtgcattcgggtatttaagaagggtttcagctatgaactgcgtatgtgctataagtgtgacggtaccataagttacttgaactttttaaaacgacggaacacctccgtgagatgacgc

SEQ ID NO: 230542 - DNA, 138 bp, Homo Sapiens
ctggggcggtctagaggatcccaacaagtcagttcttctacgctaggatcggaagtcatccggggtggccgccagatggaattccttggatatcatggcgtggaggtcgccggcatgcctgaagaactgactgggtgg

SEQ ID NO: 230543 - DNA, 210 bp, Homo Sapiens
ggggtgctggcggagaggatccaggatgcagcaagtcagtgctcaggacagcctttaaggcagagtcacggcacaggaagctcgccgcggcagttccagttccgggcggcggtcgcgacaccgggagctccggcctctcgagctccgtattcaagtcctggctccaccgcgcacctgccccgtgaccatggagacgacacgaacacaggg

SEQ ID NO: 230544 - DNA, 205 bp, Homo Sapiens
accaggatgcaagccaagtcagtgctgtcagttgagcttctataacaaactctcccacacggggtgtcttaaaaaatacacattaatttctcacagggctagaggctgggaagttcaagatcaaggtgctggcagattgggtgtctggtgagagccagcctcctggcttgcagatggccaccttctaggtgtatcatcacatagt

SEQ ID NO: 230545 - DNA, 156 bp, Homo Sapiens
  misc_feature (41)..(59): n is a, c, g, or t
accagatgcagcaagtcagtctattctcagcttctgtgagnnnnnnnnnnnnnnnnnnnaaaagattccacttgtaagtaagatctttggtcgctcggtgccgggcctatttactaaggtcaggccctcagggccctcctatgctgctcaaaagga

SEQ ID NO: 230546 - DNA, 447 bp, Homo Sapiens
  misc_feature (155)..(224): n is a, c, g, or t
atcagacacaagttctgcgcacaagtagctagaactgcccagagccgtactgctctggccaggtctgtttagtttagtagcttaatgacagttagctgcatgtcttccttcgacatctgtggcatcacctgcgaactcggcatcatagactcatnnnnnnnnnnnnnnnnnnnnnnnnnnnnnnnnnnnnnnnnnnnnnnnnnnnnnnnnnnnnnnnnnnnnnncaatgtgagacaaactctggaagaagttgggtccaagagacaaagcgtagtggacagaggttttggagcatctgacctgagcaagatgtagacagaaataaggtgggctcttcatctaggaaggactgagctgccaaacaggttatggtcaagggtcagctggctgcaaggaggagaatgagacccagtagcagagcaagaattaacacaagattaaaatgcc

SEQ ID NO: 230547 - DNA, 394 bp, Homo Sapiens
tggaacaattacacagctgtcgttggtaaccagtcatttttatgactgagagttaggcttgctgaaaataaagaactagaacacactttctagtcagcagagtgtggttggctctcaatggggttctggaaggttatatgtcgaaccaataatgggctgcccaagactattagggcatagatagagtagatctcatctccagaacagggtgggggtagctcaatttcaagccttggggatatatgatatctctggagcctgaggagcccacgacagcttagaaaatcaacggaagcataaaacatgctcacatctgaatgggtctctttggacttcatttgggaattggtgacaccaaggggaaaagcaccatgtcgtcacgggttttacaggc

SEQ ID NO: 230548 - DNA, 247 bp, Homo Sapiens
acaccaagcaatcttcagggtcttccctaatccgctccttctgttgaaaagccagcattttactgagaacagtactcgtgtgtgtgaccctgacagtactgtcaacttaaaaaatgcacaaactgaacgttaagagttaggttttatttggggcaaaattaggatttaagcccaggagacagctccaatgtagccccgaaaaacacttctcactcattctataatgtttccctgtatccctgaagat

SEQ ID NO: 230549 - DNA, 206 bp, Homo Sapiens
  misc_feature (69)..(160): n is a, c, g, or t
gccacgtcggcttccggaggtgctgggatgacaggtgtgtgagccgccacgcctagctgtctctttgcnnnnnnnnnnnnnnnnnnnnnnnnnnnnnnnnnnnnnnnnnnnnnnnnnnnnnnnnnnnnnnnnnnnnnnnnnnnnnnnnnnnnnnnnnnnnctctgtttctccctttctccctgaagaccctgaagattgcttgtgg

SEQ ID NO: 230550 - DNA, 279 bp, Homo Sapiens
attggggttaggactgaagacctaattgactgtttccaagaaatccttctcggtagcattttttcgccgtgctcttggtggcaacatataccagcctctgtgcagactgctcctgatctgagcaccagtgctattcggacacagtcgtgctaccaggtacaaatctgatatctgtttgagcactcattgatcgagcgtgagtcgtgaaatatgtgggtccgaccctctaggatcgggcaagcgagaattcgattgttctatccaatctccgctggcctc

SEQ ID NO: 230551 - DNA, 204 bp, Homo Sapiens
  misc_feature (70)..(88): n is a, c, g, or t
aatcaggagactgtagactatagcattacttcaataaatatcctgattttaagaatttaaatttctttcnnnnnnnnnnnnnnnnnnncctcttttggttttcaagggctgcccccgaaaatatggagttccccaggcaagggttcaaatggaaaatgaacccacgggctaaaacaacagccaaagcaaccccgtgaaattggt

SEQ ID NO: 230552 - DNA, 180 bp, Homo Sapiens
gctgggctggagtggcggtggatgcgagcagcctgtgggcaccccagctgctggtggatgtggtgactggggccagcttgtggtccgcaaggggagcagtgcagctgccgcccatgtctccctgggttatcctctgctggcaacctcctcagccaccagcaccagagcagggcattctat

SEQ ID NO: 230553 - DNA, 165 bp, Homo Sapiens
  misc_feature (82)..(82): n is a, c, g, or t
tgggactgagaatgcaggaaccataatactctgtagtagccataataatctaaatacagtattagagacctagaaataatgngtctgattcactacccctaccagtataggaagatttagactacagagtttgcttcttcacataacaccctatatccaacaggc

SEQ ID NO: 230554 - DNA, 404 bp, Homo Sapiens
  misc_feature (172)..(306): n is a, c, g, or t
actgttttattttgtatcaaagaaaaaattttttgacacagttatcttgcttgtgttgcccagactgaattgcagtggcaaggatcacggtctcactgcagcttccaactcctgggctcaagtgatcttcctgtcacatgagtctcccaagtagttggaacacaggtgccannnnnnnnnnnnnnnnnnnnnnnnnnnnnnnnnnnnnnnnnnnnnnnnnnnnnnnnnnnnnnnnnnnnnnnnnnnnnnnnnnnnnnnnnnnnnnnnnnnnnnnnnnnnnnnnnnnnnnnnnnnnnnnnnnnnnnngtgtgagccactgcaccctgcctcagtacctccattcttcccacacaccctcctcatgtgctccttcctgacatcttaatctggggcccaagcctgct

SEQ ID NO: 230555 - DNA, 419 bp, Homo Sapiens
  misc_feature (116)..(226): n is a, c, g, or t
aagtgctttagtgaatagacgatgttcatatgcatgttgtgcatgatatacataggtcatttgttttaccattttttctatttgagaccgagtctcactctgtctcccaagcgggnnnnnnnnnnnnnnnnnnnnnnnnnnnnnnnnnnnnnnnnnnnnnnnnnnnnnnnnnnnnnnnnnnnnnnnnnnnnnnnnnnnnnnnnnnnnnnnnnnnnnnnnnnnnnnntggaaatttttcctttgcttaatcctaaacctctgctctgtatttccccttctcaggatcacaatatacgtagtggctctgctacatatttactgtttgaatagctgataaaaggtccttggtccttaaaccatcttcagataacaactttgatttccttccatgacatcttaatctggggcccaagcctgct

SEQ ID NO: 230556 - DNA, 114 bp, Homo Sapiens
atacatcgagccggtaccataatatctggttaatgaaagcttactgttgaaccccgcattgttgcactttagacaaagaatattatatgcatggtccattcagtttacgagatg

SEQ ID NO: 230557 - DNA, 248 bp, Homo Sapiens
ggtaccagcaggcttgggcccagataaagatgtcaggtctacagctatccagccaattcggtccgggttccgagctgacgcgggttcgacccgctgtccccgccgacacggacccccgtgtcgaggggccgtgcggtcgacctgctgtctggccgactcggacccgtgtcctagtagccgtggggtcgactagctatcccggcggactctgacatcttaatctggggcccaagcctgctggggactcc

SEQ ID NO: 230558 - DNA, 174 bp, Homo Sapiens
ataagtggtaccagcaggcttgggccccagattacgatgtaaagcacatacacaatgtatagaacctgcggttctctacgtactgagcaggattactcatggcaacaacacatacatacagtagggtaaaactaacctgtactacacgacggtctagacatctataatactagg

SEQ ID NO: 230559 - DNA, 224 bp, Homo Sapiens
gtggtcctgaaatctttatgcatagggtgtgtgaccaactttggggttgtggattgaaagtacatgagtgaaggtgacccaaagaaagtgatgcttagcttgagtcttaagattaagtacaagttatttttcttgtatccagcaactttataaagcaacttgagtcctgaagaaaagactgttgttcttttaagaaatgggtcttctcgaattataaactttaa

SEQ ID NO: 230560 - DNA, 409 bp, Homo Sapiens
tacatctttatgcatagggtgtatgtaccaggcgacgctatttgtggtagctatagagtctattcttcatgctctggattactcgaacaatgggattatctttcttaaaaacctttggaaaacatgtcactatgtacgacaaatactcagttctattggtggtataaagttagtggtttgagagtatacttccagacttaaatactatgcatttcagtaacatatcttattgtattctgtgcctcattgtgtatcctgatagcaacataaactagagatactaaatgataaaataacatccctatattagcatctttcttttccttttgtgtttgtctaacattttacaatattttcaccaataaaatatggtattacagtttcatcattccttatctgacacccttat

SEQ ID NO: 230561 - DNA, 271 bp, Homo Sapiens
catactgggatgccatgtaacgcatatggatagataacctataaggaaatgatcttctagaatcattaagcaggaaagaaagcatgaatgtagcgctatataaaaccacccttatctcccatgcaagagtttatcatactgcgcattgggcacaggatgcagacggttacttgcagattttctctcgaggagtctgcccagcaaaagcattcctggccattaactcaaaagtggctctgtaagttgcatagcactgcacaggaggttcacc

SEQ ID NO: 230562 - DNA, 320 bp, Homo Sapiens
ttaaagctcccctctgacatccggactgtttcttctcaaataacaaatactatcctccatctcagtcatatacctatcatctctccctcactaaaacgtaagacagtaaccacgtccgcggtgatgtctcacggacgataaatcgagaacggatcagaggtctatcctagatgtaggtggatttccccccctgtggtgaacaggaaaagttggcgccagtcctttcatgtgattaaggatgacatggatggagcgtggtggagggtagtgtgagaaaaagaatgtatatatttgtgtgtgcccgtaagacataaccgcgg

SEQ ID NO: 230563 - DNA, 125 bp, Homo Sapiens
cgcggctcactgtcttacgaagatgctgtatagggtcttgacacctgcccggtgctggaaggttaaggaaggtgcttagcaagtacttcgaaggcacttgactgagggccccagttaaacgcgcg

SEQ ID NO: 230564 - DNA, 103 bp, Homo Sapiens
ccgcggtcactgtcttacagattctgtatagggtctagacacctgcccggtgctggacggttaagtgaaggtgcttacgaataacttcgaaggccttgactga

SEQ ID NO: 230565 - DNA, 202 bp, Homo Sapiens
ttatgtcttagtttcccatagggcatatcttactcaagctatctaacagctcttaaaatattggatattgtatttaagtttttgatattttggttaattcactctacgtattcttcaaatagcaatatcgtctgctacattttctggtgcttcaaaggattgattttgcatatgatcgttagacataatccgcgaggtgtgt

SEQ ID NO: 230566 - DNA, 220 bp, Homo Sapiens
tccccccgccggtctcactgtctacgcagcttaaagacagcgagccccagagcagtcccctacttcaaagatcactctgcgtcacgtggactttattacgcacaaaaaaagatcaagcaaacccggacttgttaacgagtgtgctggttatctcctttaaaggacgagcgagtgtttctgtccacatttccagaatacggtccgtaagacataaccgcgg

SEQ ID NO: 230567 - DNA, 126 bp, Homo Sapiens
ggtcgatctagagtatccccccgcggtcatgtcttacgtggctaatggtgtgcacaccaattttacctgagtacaacaaaagacgtactccctctttgcaaagggcaaggcagaatgaacaccacg

SEQ ID NO: 230568 - DNA, 303 bp, Homo Sapiens
tagagatcccccgcggtcactgtcttacgttacatattgtgacaattcctgctgcacagcaaagtgattcagttacacatttgcacaatccattctctttcagattctctgcccacatatattatcaccgtatattgggtagagttctctgtagctgtacagcattctccccatctatccaactatccataattcctcaggtatgtacatttctcaatccccgcttagacataatccgcggggtgtaccgaggctcgaaatctcgtaaatcttcggttcattagcgtattttcctggtgttga

SEQ ID NO: 230569 - DNA, 193 bp, Homo Sapiens
tgtcttacgattcatttgctaaactcaattcctttgaagcaccagaacatgttgcaacgatattgctattttaagtttacgtcgaatgaattaatctatattatcaataacttattacaatatcctatcttctaagactgttagatactttagtgagtatttgccctatgggatacgtaatacatcaccgcgg

SEQ ID NO: 230570 - DNA, 123 bp, Homo Sapiens
ccgcgttatgtcttacgctggtcccagtattccctaagcactgggggtcttttttagaatgtgccaccagagtcaatgtaagaacacttttgagagaattacacctatactacactgttgtgt

SEQ ID NO: 230571 - DNA, 228 bp, Homo Sapiens
ccgcgtccctgtctgacgaccagaactgaataacattaaataacgttctccatgtgaacttcttttctgatttatcatctataattctttgttataaaatccaggcttacaatagacattttaggaaaagtaaaaagaaactgaagacagtgaataaaaatcactctaaaatattttattcaccttttacccagttgtaaaatgatctctcgtaagacataaccgcgg

SEQ ID NO: 230572 - DNA, 166 bp, Homo Sapiens
cccggttatgtcttacggcagctaggaatatgcaataggaccgcggttctatatatgttggcttttcggaactgaggccataattacacagggacggccgcgggtgcattcgtacttgcgccgcctagagcctgaacattcttgagaccgggcgcacagactggac

SEQ ID NO: 230573 - DNA, 351 bp, Homo Sapiens
  misc_feature (80)..(117): n is a, c, g, or t
gagagagaatgaacgctgagtgagccaggaagttgtacacacaaaaggaaagatgaacttagatttgtcaatttaaccannnnnnnnnnnnnnnnnnnnnnnnnnnnnnnnnnnnnnatagggccgcaccctttgtatatggaaattccgtaagaaataactgcccgcggttatgtcttacggcgggctaatgctttgcacacgattttttaccgagtacaacaaaagacgtactccctctttgcaaagagcagggctgaaagaacaccattataaattcgacctgacttaaaaggtcttaagaggaattatatatctctgggtctatttccccgtaagacataaccgcgg

SEQ ID NO: 230574 - DNA, 192 bp, Homo Sapiens
  misc_feature (103)..(139): n is a, c, g, or t
gtcttacgagtcaaagacagaagcgacatgtagctgagtgagccacgaagttgtacacaacaaaaggaatgatgaacttagaatttgtctatttaatcatctnnnnnnnnnnnnnnnnnnnnnnnnnnnnnnnnnnnnncgggccgcaccctttgtatatcgagattccgtaacatcataaccactggggct

SEQ ID NO: 230575 - DNA, 239 bp, Homo Sapiens
gccggcatactcttacgacggaaggggagtgtgctccggctgctgagatgccaggaacggtttcagatagctggccacttgactgcgtttcacgggcctttcctgacagtatccagccccctgccaatctgtggcacccagaccactgctggcccccaaggatgggctcttgggtgcttcttttcatagatgggctgtaccttcggcgcgttacgacataccgcgtgtgggtaccgagc

SEQ ID NO: 230576 - DNA, 236 bp, Homo Sapiens
gcctagagtagaatagaacacagtataatattttagaacagattagaatatattagaatagaacagatcagatcagaatataacagaatagactgaacagaatagaacagaatatcctagactagaatagcaatataacagactagaacacaacacaacacaacacaatactccagaactatatagaatagatcagaagcgaatagaatagaatcgaacgtaagacattaccgcgg

SEQ ID NO: 230577 - DNA, 293 bp, Homo Sapiens
  misc_feature (33)..(33): n is a, c, g, or t
  misc_feature (49)..(58): n is a, c, g, or t
  misc_feature (72)..(227): n is a, c, g, or t
cccaggaaacacgctagtaacatggaactaaanttcaccaatgaatacnnnnnnnnnnaatttgaaacggannnnnnnnnnnnnnnnnnnnnnnnnnnnnnnnnnnnnnnnnnnnnnnnnnnnnnnnnnnnnnnnnnnnnnnnnnnnnnnnnnnnnnnnnnnnnnnnnnnnnnnnnnnnnnnnnnnnnnnnnnnnnnnnnnnnnnnnnnnnnnnnnnnnnnnnnnnnccctatttatttttctctgtagctgttcatacagaggcagacttcatagctgtttccctgtgttac

SEQ ID NO: 230578 - DNA, 104 bp, Homo Sapiens
aacaaaaagagaatcttttttaatgcgaggtattttcttaagctttcttcggtcgatcagtcatcatcctaccttcgggtgagtacctgttgagaacccagctc

SEQ ID NO: 230579 - DNA, 120 bp, Homo Sapiens
gcaatcattggatgaaaccctactaggaatacaaagttagccaggcatggtggtgcatgcctgttgatcccacgctactcagcgagccttggcaacaagtagcaacaactccagtctcaa

SEQ ID NO: 230580 - DNA, 281 bp, Homo Sapiens
  misc_feature (61)..(228): n is a, c, g, or t
atccttccgtttcatttctatatttttcttttcactgctggtatagaaagatttctaatgnnnnnnnnnnnnnnnnnnnnnnnnnnnnnnnnnnnnnnnnnnnnnnnnnnnnnnnnnnnnnnnnnnnnnnnnnnnnnnnnnnnnnnnnnnnnnnnnnnnnnnnnnnnnnnnnnnnnnnnnnnnnnnnnnnnnnnnnnnnnnnnnnnnnnnnnnnnnnnnnnnnnnnnntgtcattatttaaacttttcccattcaagaaaaaagctcattgtttttgtttt

SEQ ID NO: 230581 - DNA, 428 bp, Homo Sapiens
  misc_feature (207)..(332): n is a, c, g, or t
aaacagctaacttgatacatctaaacacctcatctctataagcttccatgatactcttctctagctttcttaactcactaaattctcttaagctatctagagctcctcagctgtcactacccctttgacttactttatagccctctgtactccctaccgaaataccatacaatcccatgcctttaggtgccacctatatgctgattnnnnnnnnnnnnnnnnnnnnnnnnnnnnnnnnnnnnnnnnnnnnnnnnnnnnnnnnnnnnnnnnnnnnnnnnnnnnnnnnnnnnnnnnnnnnnnnnnnnnnnnnnnnnnnnnnnnnnnnnnnnnnngattccttatagttatctgtgtactatatcatgtaatttgtgaatagatatagttttacttgttcctttccaaacttttctttttcttgcctaatt

SEQ ID NO: 230582 - DNA, 136 bp, Homo Sapiens
ccgggtagatctcaaggtgagccatgagacacagagaagtaggagaggtggaagaaaggcaccaccgtggtatgggtcttgttggactccaccaggcggaagccatagggtcgaccagtagccacagcatgaaacg

SEQ ID NO: 230583 - DNA, 236 bp, Homo Sapiens
cagccactgcgctctggatccgacgataaattttctcattgaaaatactccttttaagtccatatatggaaatttgaaaactgtgaaacgaataaataattagtcatgcagattatgaacagaaccatatttaaaatagcaaaaacataaagattgcgcatctttttcaagtaaaagagcagcatgatgtataaaacgactatgaatgatgtgcctaaaacctttacatcaacaat

SEQ ID NO: 230584 - DNA, 598 bp, Homo Sapiens
tgtgtggtgttatgggatataaactgttagaacgccttcttaaacattcacggagagcgttcttacaagagacaatctaagttaagggacatcgggtccttaatccatttctcaaggaacgagagatttttcctaagtcgaattctttgagacctttgaaagcgttcactaagcacattgcacgtaaaaaaggtttgaaccttgactcgactaaacatccctcggattttaggagcatgctaaaagggaggttctatctcaatagcattttgaagtgatttgtaagtaaaactgtgatccctaaatctaggattggggtcacaatctacctacgtatctttcctagcggggatatcgtaaaattaaggttatacccaacgcaaataaacatccctagcaaagggacatccatttatgtaagacatatcctaaaattcatgaagcatacaaggcattagtaacctaaactacataccttgggatttgtaacatgctacacataaggatcctatcatcatgtgactagtttccaaagttctagcatgcaaaagcaatcaagtaacaagataattaattaatcaaagattacattcaatta

SEQ ID NO: 230585 - DNA, 165 bp, Homo Sapiens
cagttatattttcgcgccgtttctatgctgaataaggaaaaaaatgtacggttgaatctgtttcttctttaaattctgtatatttgaatgacgtatatcagcgccatgcattaacacctacacatattcctggtgtacctgagactctgaattctgtaactcatg

SEQ ID NO: 230586 - DNA, 268 bp, Homo Sapiens
  misc_feature (58)..(156): n is a, c, g, or t
  misc_feature (158)..(183): n is a, c, g, or t
atgcaggtgatctagaggactccccggaatggtggtgttatgctaaataattgtcttnnnnnnnnnnnnnnnnnnnnnnnnnnnnnnnnnnnnnnnnnnnnnnnnnnnnnnnnnnnnnnnnnnnnnnnnnnnnnnnnnnnnnnnnnnnnnnnnnnngnnnnnnnnnnnnnnnnnnnnnnnnnntaataataataattgtctttgaatggctgactgaaagcacattcatattatctagtcaaatgaatgtccataacaccacacaatt

SEQ ID NO: 230587 - DNA, 324 bp, Homo Sapiens
aatgtgtggtgttatgcgagaatacatatataggtttatgggaatattgaggtaatttccgaggcacgcctaaagtgaacacgaggaatacaatgaaaagacctaattagtcgtggactgcgaaatgagtagtagaatgtttgggaaccggctgtaaagcggacatgaacatactactatcatttcaatactatatttaaattatatcatcaaaactgtatttagattgtattaatgtaaaaactaacgatacttgtagacggttggaacacataacataatttacggaaacatatgggtaaaccaccataacaccacacaatt

SEQ ID NO: 230588 - DNA, 259 bp, Homo Sapiens
aatttgtgtgggttatgcctaacaatggaatatatgccggaggtattaacgctatcggctaactgctctttcgtgtttcttcctgacgtatggacggagtatgcccgacggtgtaaacccttattaccaaaccaaacaagctaatgaataagcatagtctttcaaagtaaatctcatacggggtttcttctaaaaagaatgtttgaggatatagctctgttcttaaatacagtatagtaccataacaccacacaattcc

SEQ ID NO: 230589 - DNA, 259 bp, Homo Sapiens
catccccggtatgtgtggtgttctggaaagcgttgttcgaaaatgatgacctatgctaaacatcgatctcgaaggtgaagttttgcaggcagccgatgaacgctgagacgtagcatttcttacagcgcgtcgaagtaggttggagagcgcatctcgactccgtccaaattgatgaataatcgtattttcggcgttattgagtttgtttccaattaaaacaatttatggctcttcttgtgaatataggttaacctcaatt

SEQ ID NO: 230590 - DNA, 243 bp, Homo Sapiens
attgtgtggtgttatgccaacacaattgtttgctgagcctggattaaaaatgtcccatgatatcaaatggtcttgattttaatgtccaggaatttgtaaattgtcttctttaacattatgattgatttatgttcttggaaaaagtcaatattattttgaacctgaagaaaatgtgaaatgttttttgcggtttcggattctcttggacataatttgactcttataccataacaccacacaatt

SEQ ID NO: 230591 - DNA, 272 bp, Homo Sapiens
atagtgtggtgttatggacattttcctgcaggacatgactcactcaagtaccgcacgtatcttgttaagctcgtatatttcccataattcttcgacctaatccctgatttcgctgcggacctgtatattctcctgttactccactgacttctgcagattgtaatacatcccttagtgacattcccactgtgtactgaggtcgctgtccagaagccaccaagatattcgcatattctacacagagagcataggatcacgcaattccgggtacc

SEQ ID NO: 230592 - DNA, 223 bp, Homo Sapiens
ttattacaagtggtttgaagtcgttggatctctggtaaggtaaaaatagcatttctcccaaacagtgtccagatcccgcgactaccttagaaattagggcataatttcggctacacttgtccaaatgaggcaaatttgtgccctaaatgaagctgactcaatttaaagaactatttgtaaaatagtattttcaccaattcaacgtccataacaccacacaatt

SEQ ID NO: 230593 - DNA, 188 bp, Homo Sapiens
aatgtgtggtgttatgctcgttgaggtggaaagagttttagtttgtccttctgccccatatgcactctcttcgatttaaaaagaaaaagttatgttaattcttaaaggacattaggatgtccgatggattttattcaaacattggtcattgtgtaaatattgataaaaaaagatacgcggattaaata

SEQ ID NO: 230594 - DNA, 481 bp, Homo Sapiens
  misc_feature (114)..(263): n is a, c, g, or t
  misc_feature (337)..(437): n is a, c, g, or t
tccacaagtaattgaatataaaattactgatcaatagatcacagagggaccaaatcactctgaagaagaatttagattatgtaagaagacttctgagataacaagaaactcacnnnnnnnnnnnnnnnnnnnnnnnnnnnnnnnnnnnnnnnnnnnnnnnnnnnnnnnnnnnnnnnnnnnnnnnnnnnnnnnnnnnnnnnnnnnnnnnnnnnnnnnnnnnnnnnnnnnnnnnnnnnnnnnnnnnnnnnnnnnnnnnnnnnnnntgttctccaatctctgctcactaccactggtatgatacaatgggaagatggccagctgcagaccaagaagcacnnnnnnnnnnnnnnnnnnnnnnnnnnnnnnnnnnnnnnnnnnnnnnnnnnnnnnnnnnnnnnnnnnnnnnnnnnnnnnnnnnnnnnnnnnnnnnnnnnnnnttttctgtggaagcagtctgaattgactcaaacagtcacttgga

SEQ ID NO: 230595 - DNA, 431 bp, Homo Sapiens
  misc_feature (122)..(364): n is a, c, g, or t
tgattataacccggatcacggctttacgggcagaagaatgcaacaagagatgaagctttgtcgtaataagccactgtagttgggctatctattatcacaagaaaatggataacagcactttnnnnnnnnnnnnnnnnnnnnnnnnnnnnnnnnnnnnnnnnnnnnnnnnnnnnnnnnnnnnnnnnnnnnnnnnnnnnnnnnnnnnnnnnnnnnnnnnnnnnnnnnnnnnnnnnnnnnnnnnnnnnnnnnnnnnnnnnnnnnnnnnnnnnnnnnnnnnnnnnnnnnnnnnnnnnnnnnnnnnnnnnnnnnnnnnnnnnnnnnnnnnnnnnnnnnnnnnnnnnnnnnnnnnnnnnnnnnnnnnnnnggcatctactaatcagagaagcagggtggggtctcctgaaaagagcatggcctttgggatttaaaag

SEQ ID NO: 230596 - DNA, 609 bp, Homo Sapiens
  misc_feature (383)..(427): n is a, c, g, or t
acgcgatcacaggtgccgtcgtttacaccccggaaacctgttttgccccattaatacggattcccagggcggatggttataccacgaggaaaccagttatcccgtttatccgggttccctgggcggccgtatatccctgagaacacagtgagtagcgtgtataccggttgcctagggcgctcgttacatccgaaaaagcagtgcaaggactgacactccgatggccgaggggcagcgcgagtcccacaccagccacagttttagcaccgtgctgtcgtggtatagaattaccttgcaggtcatggaggctaaggtgatggtacacaaaaggcatcatacagcagccagatgttcatgagactaaatggaaaatatgactcagnnnnnnnnnnnnnnnnnnnnnnnnnnnnnnnnnnnnnnnnnnnnntgagccaacatgcccagctcaggagtagatatataaaatactcccctcttctatagtaacaaaattatttcaataattaagaaatacatcatacatgatgatgataatggccagaacataatttcagacagttaaccttttctatactgaatctgtgaatctgatgccgcactagaaagggg

SEQ ID NO: 230597 - DNA, 509 bp, Homo Sapiens
  misc_feature (187)..(414): n is a, c, g, or t
gatcatccagactaaatgaacgaagaaacatcaaacttaatctgcactgtagaccaaatggatttagtagatattctctagaacgtgtcatctgatggctgcagaatttacattgttcgctttagcacatggatcgtcctcaaggttagaccgtatgttaggctacaaaataagtcagttcataatnnnnnnnnnnnnnnnnnnnnnnnnnnnnnnnnnnnnnnnnnnnnnnnnnnnnnnnnnnnnnnnnnnnnnnnnnnnnnnnnnnnnnnnnnnnnnnnnnnnnnnnnnnnnnnnnnnnnnnnnnnnnnnnnnnnnnnnnnnnnnnnnnnnnnnnnnnnnnnnnnnnnnnnnnnnnnnnnnnnnnnnnnnnnnnnnnnnnnnnnnnnnnnnnnnnnnnnnnnnnnnnnnnnnggataaaaacatgtgattattcaatcgatgctgaaaggcattgataaattcacatcttgctgataaatctcttaactggtttggagagactactc

SEQ ID NO: 230598 - DNA, 151 bp, Homo Sapiens
gtgtttttggccctgaacgtggactctatgcagcttgtttgtccaggctggagtgcaatgggctcaatctccgctctctgaaatctccacatccggggtacgaggcattccccgtgccccatgcctcccgcagtagctttgaacgagcatt

SEQ ID NO: 230599 - DNA, 224 bp, Homo Sapiens
gaaaagaaccatacatcaccaggccatatagcaaactgtgtaggaagccgacgcttatactatcttataaagcaatgatggtccagcacacacattgaaatgcagcatagcaagccaatacgcaatacattcaagcagagaaataggtgtcttcacctgcactgcttaaccgcatggactctgatgtaggtcacgtgcaccttagaccccagcaagcagcatga

SEQ ID NO: 230600 - DNA, 267 bp, Homo Sapiens
atagcagcatgtcattatgaaactaacaggtttgtgtgtcacttcttttatactcaacttcttttttttattataaaaggtacacttctgtttatatttaaacaacaaagaacaaaagctactctacacacttaaaaatcttaattacaatattcctcaaatctatttcacctacattttaaaactactacatacagcaagccagacatgcagcagttaagaaatggaataacggtgcgggagacagacggggaccacgaaagaaaa

SEQ ID NO: 230601 - DNA, 287 bp, Homo Sapiens
  misc_feature (60)..(211): n is a, c, g, or t
cttggtactcagcactgactagctgggactacaggtgcgcggccctagcccggctaattnnnnnnnnnnnnnnnnnnnnnnnnnnnnnnnnnnnnnnnnnnnnnnnnnnnnnnnnnnnnnnnnnnnnnnnnnnnnnnnnnnnnnnnnnnnnnnnnnnnnnnnnnnnnnnnnnnnnnnnnnnnnnnnnnnnnnnnnnnnnnnnnnnnnnnnncacttagttttgctaattactatctttccataatgttttgagtacaacgctattgtagttaatacgttgttttgcg

SEQ ID NO: 230602 - DNA, 125 bp, Homo Sapiens
actagaatctgactcgcattctgttagacaagcttcttacttctgatatgacatgatgtatggtattctgcaatacggattttatccacaggatcatggtcatcaaaagtaacaaagcaaagctc

SEQ ID NO: 230603 - DNA, 161 bp, Homo Sapiens
cactcgatgaggatcccggtggttggtgttaactacttttgacgttgggtgactgacggaatacgtgtacggagtatgggggtaattatggtgggccatatactagtatccttaatcatttgaatgcccaactacaatactacagtatggcccaccataat

SEQ ID NO: 230604 - DNA, 177 bp, Homo Sapiens
agtggtctggctctctgccgcacattcggcttccttcgtcggccatgtggcattcgtgctgttttccacgcattcgcttctccatcctgctcccccccactcagtgccgcaggccgcctcatctgtctgccccaaaccttccgtcctcaggggctccctccattcacttcagggcac

SEQ ID NO: 230605 - DNA, 207 bp, Homo Sapiens
  misc_feature (65)..(159): n is a, c, g, or t
tgttgcatggcatcatctgcagcaattcgcgcttcaagcatgttggttcgcgcatgcaggcaagnnnnnnnnnnnnnnnnnnnnnnnnnnnnnnnnnnnnnnnnnnnnnnnnnnnnnnnnnnnnnnnnnnnnnnnnnnnnnnnnnnnnnnnnnnnnnnngcgtccaaccaacacaccacacagcccccatcgtcggcacccagcaca

SEQ ID NO: 230606 - DNA, 136 bp, Homo Sapiens
cacatagggcgactgggcttatagatgcatgctagagcggccgcagtgtgatggatatatagcagaattcggcttagatcactataaattcgtcggtgatcacttaacttcgtcggtgatcacttaatttcgtcgg

SEQ ID NO: 230607 - DNA, 141 bp, Homo Sapiens
aatgggcttctagatgcatgtcgagcggcgcagtgtgatggatatctgcagaattcggtttgatcacttacatcgtcggggcattccggatagtgcgagaaagtgttgtgggacgaagttagattacgcgatgaatatgat

SEQ ID NO: 230608 - DNA, 428 bp, Homo Sapiens
  misc_feature (63)..(354): n is a, c, g, or t
gcgtactcctatccttaggcagatggtccagaactcagaatttcccagttgtagaaagatggnnnnnnnnnnnnnnnnnnnnnnnnnnnnnnnnnnnnnnnnnnnnnnnnnnnnnnnnnnnnnnnnnnnnnnnnnnnnnnnnnnnnnnnnnnnnnnnnnnnnnnnnnnnnnnnnnnnnnnnnnnnnnnnnnnnnnnnnnnnnnnnnnnnnnnnnnnnnnnnnnnnnnnnnnnnnnnnnnnnnnnnnnnnnnnnnnnnnnnnnnnnnnnnnnnnnnnnnnnnnnnnnnnnnnnnnnnnnnnnnnnnnnnnnnnnnnnnnnnnnnnnnnnnnnnnnnnnnnnnnnnnnnnnnnnnncaccgcgcctggacaaaaattgagtttttaaatcattcattacttggtcacatcaggagaacgcgtcaaaatcg

SEQ ID NO: 230609 - DNA, 548 bp, Homo Sapiens
  misc_feature (151)..(197): n is a, c, g, or t
  misc_feature (228)..(380): n is a, c, g, or t
aatttattatggcaaccctacaaaaaaaagtttcaggtaaaaaccagtcatacttaggatcactaaacacatcttaaagttctataattaaaaaacagaggcattaattaccatttatattattcaaaaataattagaaactattagggcnnnnnnnnnnnnnnnnnnnnnnnnnnnnnnnnnnnnnnnnnnnnnnnctacaggcaaccgccaccacgcctggctaannnnnnnnnnnnnnnnnnnnnnnnnnnnnnnnnnnnnnnnnnnnnnnnnnnnnnnnnnnnnnnnnnnnnnnnnnnnnnnnnnnnnnnnnnnnnnnnnnnnnnnnnnnnnnnnnnnnnnnnnnnnnnnnnnnnnnnnnnnnnnnnnnnnnnnnnttttactttattctaactagtatattggaattctacattgtgtagtagggaagtgtgtatgagtgtgtgcgagaaagatctttgtttccttcatagattctatctcattctgtatctatacaagtcatgtctatgagtatatagttgtcatcccccaaagcgaattcg

SEQ ID NO: 230610 - DNA, 394 bp, Homo Sapiens
  misc_feature (90)..(318): n is a, c, g, or t
aattcaatacttttccctgattggaggagattaaagctctgaatggatgggcacatagtgacaacgcgaactagaccacttcggatgggnnnnnnnnnnnnnnnnnnnnnnnnnnnnnnnnnnnnnnnnnnnnnnnnnnnnnnnnnnnnnnnnnnnnnnnnnnnnnnnnnnnnnnnnnnnnnnnnnnnnnnnnnnnnnnnnnnnnnnnnnnnnnnnnnnnnnnnnnnnnnnnnnnnnnnnnnnnnnnnnnnnnnnnnnnnnnnnnnnnnnnnnnnnnnnnnnnnnnnnnnnnnnnnnnnnnnnnnnnnnnnnnnnnnncattatagtattaccaagcaatcccaccattcaggatttacttaacaaaaataaaaatcttcgttcacttaaaacc

SEQ ID NO: 230611 - DNA, 198 bp, Homo Sapiens
aattgggcttattattgtttctgtttccaaggatgcttggggggtgagcccagcagatctctcccctgcttaccattgacatgcggtttctctttgctggattgattgggctgggattacttctggcaaatattcactggaagctgaccccttatggagcctgggacgcactgtcaaagttgtggctgtaccatatgg

SEQ ID NO: 230612 - DNA, 209 bp, Homo Sapiens
gacgattacagaccgagaatcagatataccgggagtagagcaacacaagcgtgtccacatctccactgaatccgtgattcgcagagtaaatcttgttatgtagaacattatgagctaactctaaaggttcaaccaacaaaacttacatattctcgagtatttctttaaagtctaaatagtttatctctgatcaaggatggagaaaggac

SEQ ID NO: 230613 - DNA, 361 bp, Homo Sapiens
tgagtatattagatgattgtgatagctgttgcgtgatgatagaatatgatgggaagtatttaggaattgatgattagtaccggtgtagtccagtgtacatcgtatgttcagtatgtattggtgtggcaaatgatatgagggtgagggagggatcgttgagctcgtttgtaatgtaaaggatgtgtatggatgggagtggtgatgagagataggatgatggcgggcaggatagttcagacaggtttctatttcctgagacgtctgagagtgttctgtattagttagattttgtttgtgatgtgttagtgaaaatgggcatacatggactatggaagcagatataggaaaagtgattatgatg

SEQ ID NO: 230614 - DNA, 220 bp, Homo Sapiens
ccacgtataagtaatacacatctgatcaaccacgcgctccatcatcttaacgtcgtctctcggtgaagcttctccccgctggagtggtctgtcggtgaccagtgtgactgcttgattgtagatatatgacgcagtcagtgcacagaagttgtactaggtagctgtactcatccatggagcctgtagtacacttggtatggggtaacaggtgcagtgtttt

SEQ ID NO: 230615 - DNA, 235 bp, Homo Sapiens
catataactagatcaggacttcctgagaaaggggggaaggtaaggtcagacaaacacaaactgggtgccgtattgtcctatcatgccgcgatgtcaacgagtcctgccatcgtaataaccagtagaactgaaagcagaggcaagacaagaaaatagtaacatagaacaattcagatttcaaatactgaaggacgccctcaataatcatggtgtgtaactataagggctgctcaat

SEQ ID NO: 230616 - DNA, 164 bp, Homo Sapiens
gatcattaattgcaagactctaatccctgtattatgtagtcaagagacagtcttgacatagaaaaactgtgagagagtaaaattacaccatgtagctaaagcgcacattaagaagcgtcagctcacacccatactaaaaatccaacataacgagcgtgcatggt

SEQ ID NO: 230617 - DNA, 189 bp, Homo Sapiens
  misc_feature (98)..(116): n is a, c, g, or t
ctcgaatacgacggttctccttatacaacattgtagacccaacagggaggacaaagcttgaagcaaatggctcccactagctgcctggaaagtttgannnnnnnnnnnnnnnnnnnacacctgtggttcccttccctaagggaaaagggaaagccccaaaatttttgaaacccgtcacccattgtgctt

SEQ ID NO: 230618 - DNA, 606 bp, Homo Sapiens
  misc_feature (47)..(132): n is a, c, g, or t
  misc_feature (194)..(294): n is a, c, g, or t
  misc_feature (443)..(451): n is a, c, g, or t
  misc_feature (462)..(512): n is a, c, g, or t
ctcgaattcgacggtttctcgatatttacagaaaagactctgaccannnnnnnnnnnnnnnnnnnnnnnnnnnnnnnnnnnnnnnnnnnnnnnnnnnnnnnnnnnnnnnnnnnnnnnnnnnnnnnnnnnnnnagtagctggatctaaaagtgtgtgccaccaggcctgatgagttttcaaattttttgtagagnnnnnnnnnnnnnnnnnnnnnnnnnnnnnnnnnnnnnnnnnnnnnnnnnnnnnnnnnnnnnnnnnnnnnnnnnnnnnnnnnnnnnnnnnnnnnnnnnnnnntgtgcctggccattctgcacttttctaaatccttttgttatgttatatctgtgataaatagtatatagctagattatatttatttgttttatttctttttacacttaatagactatgtcttttaatcagtaaatggaatccatttacannnnnnnnnattccatgtgnnnnnnnnnnnnnnnnnnnnnnnnnnnnnnnnnnnnnnnnnnnnnnnnnnntcccccttttctgcccttattagatcagtttggtttcatgctctttttccataacctcaactctgtaagtatagtaatgaccatgagagacttt

SEQ ID NO: 230619 - DNA, 212 bp, Homo Sapiens
catggtacgatactgtcaactctggaacaccattatctcattacatccaagaatattaattctctctaacattaccgcaaattcattagaatctccatgctcaaaatattcctgtatgagtaggtgttaaagtcttctcatgtgccctttcatccaaaggcgagacaacggtttcatcaaccaccgttctccttcgaggggagaagaccctg

SEQ ID NO: 230620 - DNA, 541 bp, Homo Sapiens
  misc_feature (284)..(436): n is a, c, g, or t
atgtcttttcccctcaaagccttcacattagcagttatccctctggttaggacctccctctgcctctgccccactttcctctgtactaattctcacctctccttcagtccaagtataactggtacttcctcagggatacccttcctgacttctgaactagcccatattcctctgctttatgaacccacagcattctgaggggatgtcagaattcaagcctgacacacagtcacactcaatgcatatctgctgaacgaatcaaagaaatgcagagaaaagacatnnnnnnnnnnnnnnnnnnnnnnnnnnnnnnnnnnnnnnnnnnnnnnnnnnnnnnnnnnnnnnnnnnnnnnnnnnnnnnnnnnnnnnnnnnnnnnnnnnnnnnnnnnnnnnnnnnnnnnnnnnnnnnnnnnnnnnnnnnnnnnnnnnnnnnnnnagcaagtggacagtttttaagaattaacatttcacttttatacctcttagtaggagcattgtttaagcctattagagatggttagttgatagccaggtggcttat

SEQ ID NO: 230621 - DNA, 271 bp, Homo Sapiens
  misc_feature (121)..(141): n is a, c, g, or t
  misc_feature (168)..(222): n is a, c, g, or t
cagtggtcttttccctcaaaacttattaaattgataaaggaggaaatgtggtatttcattcagagatcattctccttttttcaatatgactgcttctaaagtagagtgaaggtgtatggannnnnnnnnnnnnnnnnnnnnaatcaaaacaaggcctcacttggtcannnnnnnnnnnnnnnnnnnnnnnnnnnnnnnnnnnnnnnnnnnnnnnnnnnnnnngttcaagtgatcctccgtgcagtttagatatgatatgccttagatgtgg

SEQ ID NO: 230622 - DNA, 544 bp, Homo Sapiens
  misc_feature (71)..(137): n is a, c, g, or t
  misc_feature (243)..(255): n is a, c, g, or t
  misc_feature (301)..(359): n is a, c, g, or t
  misc_feature (393)..(497): n is a, c, g, or t
ggtcttcccctcaaagactacaagctacatggccaaaaatccctgtatgactcttctctcgatcctgcatnnnnnnnnnnnnnnnnnnnnnnnnnnnnnnnnnnnnnnnnnnnnnnnnnnnnnnnnnnnnnnnnnnngattctatcaatcaatcaatcaatcaacaaaattgtttatcttcttggttcatatacagtaatacctgtgtcctaaacaacaaccataaagtctactgaggctaannnnnnnnnnnnnggtattttaagtagagatggggttcaccgtgttagccaggatggtnnnnnnnnnnnnnnnnnnnnnnnnnnnnnnnnnnnnnnnnnnnnnnnnnnnnnnnnnnngggtgagccaccgcgtccggctaatctatttccnnnnnnnnnnnnnnnnnnnnnnnnnnnnnnnnnnnnnnnnnnnnnnnnnnnnnnnnnnnnnnnnnnnnnnnnnnnnnnnnnnnnnnnnnnnnnnnnnnnnnnnnnttgagccattgcacctgatccttttaattaaaaaaatttttatagtc

SEQ ID NO: 230623 - DNA, 142 bp, Homo Sapiens
  misc_feature (60)..(88): n is a, c, g, or t
gccttcccagcttcaacacttactcgctggattccatttcccaaactgcagtaatgcaannnnnnnnnnnnnnnnnnnnnnnnnnnnngggggggaaaaaacacccggggttacggcccccaatttcttatccggggtctta

SEQ ID NO: 230624 - DNA, 172 bp, Homo Sapiens
tcttttccctacaaacatgcagaaagtcatacttaaacggggcaaatactactatgtctttgatattttttatgtgtacgtattgtatagtgacgcgatagaagttacctattattttttacctataacttagactagtgcttcatatttacataaacggataaatattgat

SEQ ID NO: 230625 - DNA, 175 bp, Homo Sapiens
gccgtcctgtgtaggtagcgcatgaaggcggtaatactggaacgtctgcgcaaaccgtggagctggaaggcacggtgcgcacccacagcgacgcggtgcgccgccaggtaccggacaagattcgccaggtgatcgacggcgttgccgccgcgctgggcgcgcaggccgaactgcg

SEQ ID NO: 230626 - DNA, 305 bp, Homo Sapiens
aggaacacgagatgtgagtaaggatacccccttaaaagaggtgttatactccggtgctggaagctaaagttcggaccacaaactagtaaaagcattctacgagtacaacccgatagctagccaggattcggagtctgaaacaagactcgcctttttgtgcttggcctgtaatgctctagagcctgagatggacgtaaggaagagaacgtgagtgtctgcggcccttgggcagtagtggcaattgggcggtgcggcagggacggggtagcagtggccaaaccctggaccaccgtgcttatctcaat

SEQ ID NO: 230627 - DNA, 162 bp, Homo Sapiens
ctagctgactctagagtatcccactatcgctacataaactcaggtatctcccgcctcagatctccacagtgctggtattacacgtgtaagccactgcactcagcttgtattaaatgagtttatgattttacgtgtgatatggatccactgttagggtcatga

SEQ ID NO: 230628 - DNA, 546 bp, Homo Sapiens
  misc_feature (254)..(285): n is a, c, g, or t
aaaactccttggctaatgtgattaaggataatcatatttgacctggcatcaagttactgtacaatttggattttccctataacataagtcttcagcttgctcagactttcccattcctaagtcacagctaaacatgtgtcttcaagaaggaaatctggtccatatatcagggattcaggcaaacagatgcccaaattcctgcattcccaagctgtcttctaaaacccaaagctgcacgcgtgtatggccctgcnnnnnnnnnnnnnnnnnnnnnnnnnnnnnnnnaaagaaaatgtgttttaggcagcatcagtagagcaaaataagatttaatgttgttacttcaaaactgtatcccttacaagacgatacaaaattcagagtgttttggccccttttctaggacagatctagaaacttatagacttgtagttctaggataaatgtatgccagagctttcttcaaagaaagctccatcataaggtggtttttcttcgtggtgcctatatattacaggaacatatagaggggttcttagcgatagt

SEQ ID NO: 230629 - DNA, 349 bp, Homo Sapiens
tgcaggccatagatcgagagtacttcgcttgttattcttacattgttggccggcttgtgttgtcattctcagaccggccgcccggaactcacttatctccagcagcagtacctgtgccaggtagctgaggccacttgggagcaggaagccatcccggactcagcagcaagagagctcaatccatctgtcgctgtccagttcactttcctccagctgatccccaacccggtgcagcatgtagtcaccaaacagtccatcctcctcctccttgctcaaatctgtctggctgggccagccggaacaggcagtcatacacagggtcccctctgaccatcatgggcgtgttgta

SEQ ID NO: 230630 - DNA, 508 bp, Homo Sapiens
  misc_feature (268)..(300): n is a, c, g, or t
  misc_feature (310)..(441): n is a, c, g, or t
atagacggaagtcgttcacatcattccactgaaactgcctttctaattgcaaaatctaaagagtcctttccaatacttatttcaaacaggcgtctctgggtctttttcaaactccctcccactaatgcctttcaggcatcctccccagcttagcctcccctgggaccagcttcctgccagtcctgaaatgcccacatacacggggaagattcctgcttccacatgaccagcccccagtgacatctccctcagactccagacctcgtcnnnnnnnnnnnnnnnnnnnnnnnnnnnnnnnnnggaaacagannnnnnnnnnnnnnnnnnnnnnnnnnnnnnnnnnnnnnnnnnnnnnnnnnnnnnnnnnnnnnnnnnnnnnnnnnnnnnnnnnnnnnnnnnnnnnnnnnnnnnnnnnnnnnnnnnnnnnnnnnnnnnnnnnnngggcctaacttccatctcttgagggctcccacagccacttctcacatgacccagtcagcataaccca

SEQ ID NO: 230631 - DNA, 111 bp, Homo Sapiens
  misc_feature (51)..(51): n is a, c, g, or t
  misc_feature (53)..(53): n is a, c, g, or t
  misc_feature (57)..(57): n is a, c, g, or t
  misc_feature (75)..(75): n is a, c, g, or t
  misc_feature (86)..(86): n is a, c, g, or t
ggacccataactagtacaaatgttaaaaaaagtatgtgctctccttcccangnatgncagtgtgtagctattctnacaaatgaagngggaggggagacggtggactggggc

SEQ ID NO: 230632 - DNA, 219 bp, Homo Sapiens
  misc_feature (40)..(40): n is a, c, g, or t
  misc_feature (114)..(114): n is a, c, g, or t
  misc_feature (130)..(130): n is a, c, g, or t
  misc_feature (132)..(132): n is a, c, g, or t
  misc_feature (143)..(143): n is a, c, g, or t
  misc_feature (146)..(146): n is a, c, g, or t
  misc_feature (168)..(168): n is a, c, g, or t
  misc_feature (178)..(178): n is a, c, g, or t
  misc_feature (185)..(185): n is a, c, g, or t
  misc_feature (201)..(201): n is a, c, g, or t
catctccctgctgattttagctactaaggcataggcaagntacttaacctctggctaccctgagctaaaactaaacccttagaagagctggctgcactctagcttaactgcttntagaaagctaaacaanantttaggattgnaanctagctttactatttattttantattttttantcttccntcgctttattgcattnagttaatctctctaaact

SEQ ID NO: 230633 - DNA, 227 bp, Homo Sapiens
  misc_feature (45)..(45): n is a, c, g, or t
  misc_feature (53)..(53): n is a, c, g, or t
  misc_feature (73)..(73): n is a, c, g, or t
  misc_feature (84)..(84): n is a, c, g, or t
  misc_feature (105)..(105): n is a, c, g, or t
  misc_feature (118)..(118): n is a, c, g, or t
  misc_feature (145)..(145): n is a, c, g, or t
  misc_feature (189)..(189): n is a, c, g, or t
  misc_feature (214)..(214): n is a, c, g, or t
gccctgcctggcctgctacctgctaggacccgctactactgcacngggaaacncctccaaagaaagaacctcncctcttcaaangaaaagaaaggaggccgactnccactaaactaancactgaaaaccaacaacctgggaactnactactcgagcaactcaagcctctgaaaggcagcagggctgccnaggctgaagcctggcctgcttttcnaaaggcaaacatg

SEQ ID NO: 230634 - DNA, 123 bp, Homo Sapiens
  misc_feature (45)..(45): n is a, c, g, or t
  misc_feature (49)..(49): n is a, c, g, or t
  misc_feature (72)..(72): n is a, c, g, or t
  misc_feature (76)..(76): n is a, c, g, or t
  misc_feature (97)..(97): n is a, c, g, or t
  misc_feature (112)..(112): n is a, c, g, or t
ccatccctcaggcctcagtcctcagagctcagtcactcagggggngacncccatcaaaacctagtctcaaancaanaatcagtctcaaaaaaagtcncatcagtcgcctccnccctctcccca

SEQ ID NO: 230635 - DNA, 111 bp, Homo Sapiens
  misc_feature (16)..(16): n is a, c, g, or t
  misc_feature (28)..(28): n is a, c, g, or t
  misc_feature (39)..(39): n is a, c, g, or t
  misc_feature (53)..(53): n is a, c, g, or t
  misc_feature (65)..(65): n is a, c, g, or t
  misc_feature (72)..(72): n is a, c, g, or t
ggcctgctactgctancagcccactaancctagcttacnatatactgcttaanaaatacagcttnctgctgnctctccttgggaaaccgcttagctgctgctagtctatct

SEQ ID NO: 230636 - DNA, 157 bp, Homo Sapiens
  misc_feature (36)..(36): n is a, c, g, or t
  misc_feature (62)..(62): n is a, c, g, or t
  misc_feature (86)..(86): n is a, c, g, or t
  misc_feature (97)..(97): n is a, c, g, or t
  misc_feature (112)..(112): n is a, c, g, or t
  misc_feature (127)..(127): n is a, c, g, or t
  misc_feature (136)..(136): n is a, c, g, or t
tcgagatcggccacgtcatggtatttctaagaaganttcttttactgaaagaaagaggaggntcccatacaactctgctgaaaaanaaaactgggantactactgagaatanagcttgaaaggcagnagggctgcnagctgaagctggctgcttttc

SEQ ID NO: 230637 - DNA, 206 bp, Homo Sapiens
  misc_feature (46)..(118): n is a, c, g, or t
  misc_feature (127)..(127): n is a, c, g, or t
  misc_feature (138)..(138): n is a, c, g, or t
  misc_feature (148)..(148): n is a, c, g, or t
  misc_feature (176)..(176): n is a, c, g, or t
atcatctacttcccagtcgctcggtacctcagaaagcggcagcgcnnnnnnnnnnnnnnnnnnnnnnnnnnnnnnnnnnnnnnnnnnnnnnnnnnnnnnnnnnnnnnnnnnnnnnnnnatgagccancacgcctatanccaacatgtntttcttttgacttctactttggtatctnttcttaaatggttccctctgtccccccgac

SEQ ID NO: 230638 - DNA, 188 bp, Homo Sapiens
cccgacgagacacgtacaagtagcaggttcaggcagggtgcatggtggctcatgcatggtggggctgctgcggctcttgttttttttgtgcattcttcgatactggcccatttgggcacccccgccggttcgcgggggcaggcctcctcgggagaggagggtggatggacttcagggtgttcgtcatg

SEQ ID NO: 230639 - DNA, 105 bp, Homo Sapiens
atacgatcggcttgcgattccttactacattgtcaccatgcagaggctgtcacttggagactgctgcggatatggtacggccggcgcgagatttaaccctctccc

SEQ ID NO: 230640 - DNA, 331 bp, Homo Sapiens
  misc_feature (69)..(125): n is a, c, g, or t
tgctgtcttcaggacgatctcctaacaggtatcatgcccctctataacctttatccaatttaccaacannnnnnnnnnnnnnnnnnnnnnnnnnnnnnnnnnnnnnnnnnnnnnnnnnnnnnnnngcctccaatgcaatccaaataaactcgccctacatcttccccagtcttcaaatcctgcttcctaaacattgttaataactcttcaccctgtcaactacctagtttttttgttgagatccaaagaaaacctgcttatagtaatatgtgtttaatttttctgtcacacttattttgatctatactgggattaatattattcccattcc

SEQ ID NO: 230641 - DNA, 187 bp, Homo Sapiens
tgtaaggtacctagagtcccatctgtctcaggatgtctcaatcttgactcgtgatctgcgctctgctccaaagtgtggatacaggcgtagcactgtgctgccggattcttttagagatcatcatactgactgtgcccattcctcctcactgtctgactgcatcccttttcgggagacagaagtgggg

SEQ ID NO: 230642 - DNA, 519 bp, Homo Sapiens
  misc_feature (67)..(374): n is a, c, g, or t
tgtctcccattctatacagttaacccttgcttactgagatgaatgtatatctgatagcctcatatgnnnnnnnnnnnnnnnnnnnnnnnnnnnnnnnnnnnnnnnnnnnnnnnnnnnnnnnnnnnnnnnnnnnnnnnnnnnnnnnnnnnnnnnnnnnnnnnnnnnnnnnnnnnnnnnnnnnnnnnnnnnnnnnnnnnnnnnnnnnnnnnnnnnnnnnnnnnnnnnnnnnnnnnnnnnnnnnnnnnnnnnnnnnnnnnnnnnnnnnnnnnnnnnnnnnnnnnnnnnnnnnnnnnnnnnnnnnnnnnnnnnnnnnnnnnnnnnnnnnnnnnnnnnnnnnnnnnnnnnnnnnnnnnnnnnnnnnnnnnnnnnnnnnngtagcaaatagtcttaggccttgagagccctctcgtagtttccatatataagccctcatggatgctggccaccaagcaaaccttggctatcctgcttaaagggacatcgggagaggggttctgcagggcgacgggacacatggag

SEQ ID NO: 230643 - DNA, 322 bp, Homo Sapiens
tcactctcatgtgtgcacgcatgacatttaggcacttttaaatccagtacgtagcggaatagatgatcttcattagactcatggtgtatctgagctctgctgccaaagggcctatagatgattttgcctccagaaaagctcttcgtttccaaatgcttcattactgagagacgtgcttatatccagaccgaagccttctttttgcctccaaggcataataaatgggaatcagggacatgagaacagaagcgactcccatttctgtcctaaatgaactagatggctattctaagatgtccgacttccgtattgtcagtgagca

SEQ ID NO: 230644 - DNA, 158 bp, Homo Sapiens
  misc_feature (138)..(138): n is a, c, g, or t
  misc_feature (144)..(144): n is a, c, g, or t
taggaccccatgctgtctcaggatgtgtcatatacaagcatagatggattcatgacatacgagtccgatctgcttcatcggccatgcgatatcaccaatggcgtggtgttatcctgatacagccaagaatctagaatngatggnagctctagctggtg

SEQ ID NO: 230645 - DNA, 355 bp, Homo Sapiens
ttgatgttatatggctccccttgtcagatcatctctctctgcgcctgtgagagagcttcacataatgtaagtgtctgagctcccagcatgcagactgtgagtcataaccctttcttataaatatcagtcttggtatgcttatagcagagatatacaaaccaaaccaagcagtcacagaacgatggttgctatgagctgaagcatgtgcatgcatgagccagtcataatgatgagtaggagtgatgcggaagtcagcagagccacagttacatgtggacaaatggattgtcttacccatggctgatgctccaaagaggagggtaatcacacgatgggcgaaaagcaatgatacagg

SEQ ID NO: 230646 - DNA, 116 bp, Homo Sapiens
actggccgcgtttacaggccggcgactgacaaagacaagactggctttttgccatgcttaacaagcgatgctcagaaaagtgactagaccttgaagatgtgtttcttgattttttt

SEQ ID NO: 230647 - DNA, 202 bp, Homo Sapiens
aaataactcctggactcctacctatatttacaccaaccacccaactatcttaaacctagcctggccatcccttatgagcggcgcaggatatagcttcgctctaagataaaaatgccctacccacttttaccacaggcacacctacaccctatccccatactagtatatcgaaaccatacctatattaaccatacccggccga

SEQ ID NO: 230648 - DNA, 106 bp, Homo Sapiens
aaggtcggacagggctataagaggaggctgtcggagcaggacttctggtaagctcaccactggggcatcctgggataactggcttgtggcggccaagcgttcatag

SEQ ID NO: 230649 - DNA, 540 bp, Homo Sapiens
  misc_feature (67)..(79): n is a, c, g, or t
  misc_feature (136)..(482): n is a, c, g, or t
aggcatgagccactgtgccaggccaaaaaaggctttttaaggtgtgacatcaaaagcattagtgacnnnnnnnnnnnnncagataaattgaacttcatcaaaattaagatactttgtgcttcaaaagatgccattnnnnnnnnnnnnnnnnnnnnnnnnnnnnnnnnnnnnnnnnnnnnnnnnnnnnnnnnnnnnnnnnnnnnnnnnnnnnnnnnnnnnnnnnnnnnnnnnnnnnnnnnnnnnnnnnnnnnnnnnnnnnnnnnnnnnnnnnnnnnnnnnnnnnnnnnnnnnnnnnnnnnnnnnnnnnnnnnnnnnnnnnnnnnnnnnnnnnnnnnnnnnnnnnnnnnnnnnnnnnnnnnnnnnnnnnnnnnnnnnnnnnnnnnnnnnnnnnnnnnnnnnnnnnnnnnnnnnnnnnnnnnnnnnnnnnnnnnnnnnnnnnnnnnnnnnnnnnnnnnnnnnnnnnnnnnnnnnnnnnnnnnnnnttttccaaaagataaacatagagtcatcatataacctaacaattccaatcctagatat

SEQ ID NO: 230650 - DNA, 112 bp, Homo Sapiens
caatgatgcgccatcttctcccatcagcttagcccttactagatgttggtcccaccccaggtcatctcattaacataaattcagtgtggccttgatgggatgccctactgcg

SEQ ID NO: 230651 - DNA, 154 bp, Homo Sapiens
tgtggcctgtgccttggctctcctttccctggtgtttcatcattatggacccccacagctctccttcagtcacatctcctgctccttgccgagtgcattgctccatctcatttccttttgtattcctggccctacgtgtccggccgtgttcttc

SEQ ID NO: 230652 - DNA, 334 bp, Homo Sapiens
tcttggtccatcaggtgggagtacactccctcaggtacggacataatcttgtgatccatcgtctctcagtccacggaaaccgacttatgaatactgactgctcaccccacaggacacaatcttggacattaacccctgaggctccacctacccaccctttcatttcacccccatgaagcctaaggtctaatacctgatgggagcacagatgtgagactcaagttaaacgaatggggcaggaacaacctgtccactgcaatgcatcagcagttacatcatatgattgttgccccacttcgattctatcttgagatctgatgtgacgaatactgcg

SEQ ID NO: 230653 - DNA, 602 bp, Homo Sapiens
  misc_feature (95)..(254): n is a, c, g, or t
  misc_feature (280)..(423): n is a, c, g, or t
ccgccccttatatctgacagagatgtgaggctagaatgaccgtctacacaggcctactacaccccggtgatacaaggtaagttactcttaccaannnnnnnnnnnnnnnnnnnnnnnnnnnnnnnnnnnnnnnnnnnnnnnnnnnnnnnnnnnnnnnnnnnnnnnnnnnnnnnnnnnnnnnnnnnnnnnnnnnnnnnnnnnnnnnnnnnnnnnnnnnnnnnnnnnnnnnnnnnnnnnnnnnnnnnnnnnnnnnngcagtgtagtgatgcaggtgtcagtnnnnnnnnnnnnnnnnnnnnnnnnnnnnnnnnnnnnnnnnnnnnnnnnnnnnnnnnnnnnnnnnnnnnnnnnnnnnnnnnnnnnnnnnnnnnnnnnnnnnnnnnnnnnnnnnnnnnnnnnnnnnnnnnnnnnnnnnnnnnnnnncctgctgttccctttgcttaggatgcctttcctctgcataccttcatattcgttccctcacttccttcaaacgcctccatatcacagaggtcttccctgcctacctgcataaagtgtcaccaacctggtactttctgtcctctgtattagtctgttgtcatgcacctgatgggacgcaa

SEQ ID NO: 230654 - DNA, 329 bp, Homo Sapiens
ctcacaattgcactacacaagctcataatagcgccacacaggctcacaaggagcaccactctaaagctcacaacagcgcctgcacagctcccaacagctgccgcacgagctcccaacagcaccacgcagctcccaactagcaccacacaagctcacaacagcgccgcacaggtcccaacggggccagacaagctcacaacggcaccacgcagctcacaatggcaccacagaagctcacaacagccaactgcgggcttgacattgctttgttttgtatgctttctagctttcctttattctgtttctgctgtctttcctgatgggacgaa

SEQ ID NO: 230655 - DNA, 288 bp, Homo Sapiens
  misc_feature (58)..(154): n is a, c, g, or t
taggtgggactattgacaagcgccaccacgcccaggctaatttagtatttatagtagnnnnnnnnnnnnnnnnnnnnnnnnnnnnnnnnnnnnnnnnnnnnnnnnnnnnnnnnnnnnnnnnnnnnnnnnnnnnnnnnnnnnnnnnnnnnnnnnntgagccactgtgcccggcccctggtttatttcttaattccacaacttgtgctgtgtggaaactattttctaatgttttccactgacacttactatgactaatggtgtctacttacctgatgggagaagactgcg

SEQ ID NO: 230656 - DNA, 170 bp, Homo Sapiens
ctaacagctataaccatgcactgggccgtcgttgtacacaaacagctataaccatgcatggcccgtcgttgaacagctaacagctataaccatgcattgcccgtcgttgcccagcaacaggctataaccatgcatggcgcctgcagttgccagcagcaggtataaccatc

SEQ ID NO: 230657 - DNA, 134 bp, Homo Sapiens
acactaacagctataaccatgcactgggccgtcgtttaacactaacagctataaccatgcagtggccgtcgttgaacatgagatcagctataaccatgcatgggccgtcgttgaacacgaacagctataaccat

SEQ ID NO: 230658 - DNA, 221 bp, Homo Sapiens
gcgtttacactaacatgcattaccatcactgcccgtcgtttatacactaacagctataaccagtcactgcccgtcgtttaacactaacagctataaccatcactgcccttcttttaacactaacagctataaccatccattgcccttctttgtccacaaacagctataaccatgcattgcccgttcgttgccagctaaacagcatataccaatgtcattgc

SEQ ID NO: 230659 - DNA, 119 bp, Homo Sapiens
ccaacagctataaccatgcacgggccgtcgtttaacacaaacagctataaccatgcattggccgtcgtttgacacaaacagctataaccatgcatgggccgtcagttgacacaaacagc

SEQ ID NO: 230660 - DNA, 138 bp, Homo Sapiens
aatatatattgttagttctcataaagcataacatctaattaaggaaagggaaataaaccaccgggattaattaaaggaagatgagccaggcaatattcacatattaccaaggccttgatacagaacagaaggtacagg

SEQ ID NO: 230661 - DNA, 242 bp, Homo Sapiens
gactctagagatcccgggaggaagagcgaccctcacagtaacatgattacttagcaccatgttacagcttccctacagatattcagtacaggtaagtgtgctcgtacagtgtttgcaggcccgggagcaataagctataccatcatctaggattgtccaagctacaacttcaagcagaagagagaggagttgtgtctatcaaagtgagtgtgtgctaccccgttacctggctataaaggaag

SEQ ID NO: 230662 - DNA, 199 bp, Homo Sapiens
tagcaggatcccccccaatagtcgggactgccatctttcttctccaaatgtcacaatgtccacaaaaaatagtcttaagaaatgtccgcgccactgtccattggtgtggggtacgaaacctatgtctacatatcactggcatggaatccatgtgcacacgaaccctgtctgtggaagtatataaatcacacggactact

SEQ ID NO: 230663 - DNA, 108 bp, Homo Sapiens
gaagtgctggcttcctgaaatagatggtccaagatttccttatgttgatttttttaatgctctatctctctctcctgccttcttcttttcctccctacacctttttct

SEQ ID NO: 230664 - DNA, 115 bp, Homo Sapiens
ttttggactccgcccaacaaccagctgttacggccaacaaccaggataccaacggtaacatcaacgtgcgggacgtggacatctgaggctacgactgggacgtgcgggacgtgga

SEQ ID NO: 230665 - DNA, 188 bp, Homo Sapiens
acaataggaagcataggaagtaacagacaaactgtacaccaactaagaacggcatgcaccaccacccacggaatagagaaagagctatacaatctagtacaatactagtacagtgcccggtgccgggtagaggtttcccgatgttgagtacaacatataagcctgcaggccctgatactatcctaata

SEQ ID NO: 230666 - DNA, 117 bp, Homo Sapiens
cgagcgaagggataggaagtatcgacgtgcgaaggataggaagtatcggcgtgcgaaggataggaagtacccagcttttgttcccctcttcgttctgcatcgtgttgtagcccttgc

SEQ ID NO: 230667 - DNA, 341 bp, Homo Sapiens
  misc_feature (62)..(213): n is a, c, g, or t
  misc_feature (218)..(249): n is a, c, g, or t
aacgtgggatttactggacagaagtcagggagtccaggatgggaataagcatcctacagagnnnnnnnnnnnnnnnnnnnnnnnnnnnnnnnnnnnnnnnnnnnnnnnnnnnnnnnnnnnnnnnnnnnnnnnnnnnnnnnnnnnnnnnnnnnnnnnnnnnnnnnnnnnnnnnnnnnnnnnnnnnnnnnnnnnnnnnnnnnnnnnnnnnnnnnnaacannnnnnnnnnnnnnnnnnnnnnnnnnnnnnnnccgcagccagaatgtctgccatgccacagcatgccaaggctgggaaaccagggctaaaggagctcatttctgcatttggttcctgcaagggc

SEQ ID NO: 230668 - DNA, 115 bp, Homo Sapiens
tataaaacgacgaccagggaattcactgtcatgatgagaggtgcagcaggagtttcaagcagcgcgaagctactctgctggctggaggaagcatgcagcgggaacatgagaggcc

SEQ ID NO: 230669 - DNA, 599 bp, Homo Sapiens
atttccttactgcctcttgccatacagacctaagtcagcggcaaaatgaccggcagctacaggatctccaacaccatatcatcacatgcgttgaacctcaccggggctcacttcaaatttgacacatcaaggtacgcctacatgacctttatcagcatctcaaactgcaaacacactgacatattcatgaaatccaccgctagagtaaaaatgcgcaactgaaacgacattaacagcggaaccacgggaatgactagacacaacagagactgatcattcactgatagatactgtgatctaagcgcataatgtgcatagacaaacccagtcttacttctgcatcaagaccatagagcgtgaaggcagtctgcaatgcgaaaacatccacaggatgatagtcgtcagatgtcacatagccgaaggctcaagaacagccaaaatgactatcaggtatgcatcagagcgtagatggaacagcatatgctagagagaaacctctgatgctatgagctctcagcagcataatgaactcagacactgacagatcaatgacaggagcctgatctactggtgaacagagtcgtgtctagctacaggag

SEQ ID NO: 230670 - DNA, 599 bp, Homo Sapiens
attcttacagtgtctcgcgctctgtatggcatgcttgagggcacagctgtgacgatagttcatggttgtgtcagactctaacactaacgacacactcatgtgtgaccctgccacggtgctccaactataggagtgtgcgagctcactgcgccacatccatcgatgctctggtcaggactgggcctaactatacaggtgagcaacgacggttgcgcagacagcgaagacgatatggcggatatcgacgaggctcaggtccagacttagcgaacttgcactatctaggacactgtgacgtgctgatctggttgcgcctgatacagaaccgaggccttggagatagcaagtagttaccacctggtgcagcaacactttacgggcccggtacgtgcgagacccgatgaggagacactgcaagagagcctgtaccgacttgcacgtcggcagtctgcggagcacatgctgctcgtgaatggctatagacagacaccatatctcccggaagactatctgataacgacccatgcggagctggtggtggagcatgtgcaagatgagtggcatgcctaagcggagcgcactgcaggtttctcagcagg

SEQ ID NO: 230671 - DNA, 598 bp, Homo Sapiens
atttccttactgcctcttgccttcacgtgggactgggagtctattaatccatgttcttatgtagaccgtgcctgcggatgccttctgggaggcggatgtgtctgccctacagtcttgggagccttatgcttgggactcatgtttgtggctgatcaagtactgatgactcctgtaggactacagtgccttatggctggtataatgctgcatcctgtgctgcctcgtgcactgtgccctggaactcttgatcatctggcatgctagcaacgtgaccgaacactgaactcctgggccacaggcatgaagtccaccttccagggcgatattgtgtgggcttcacgtcctccgagacactgtatcaagccagacctatccgctccccttacttgcagtgacctacggttgcagtgctacaggtgatgagtggatgaatgatcagactgtgaactacgcaagatgaactggtaggatgatcaacatatgtgcgactctgacttgatgaatactagcacttgcagactcatcagaggctatcgcattgacaatgccaatagagtgctgccgaggactgcagaatatactgacgtcatgagcttca

SEQ ID NO: 230672 - DNA, 137 bp, Homo Sapiens
tatgaggcacagcgtttctgtcatgactgatcaggagctcttagagatggacacagatccatccattacacatgagaacatggatgcttatctatgagaggtaagatcgggagaggcacgaggcaccgaggaaatgc

SEQ ID NO: 230673 - DNA, 135 bp, Homo Sapiens
aatcagatcaagacccgagatgctctgtcctatgcgcctacagaattctccgatccgtccctaacgaactaggaggcgtccttgaatgtattactatacatactgatcctcggcaatactccccatcctccatac

SEQ ID NO: 230674 - DNA, 247 bp, Homo Sapiens
ctacatgcacaacagcgcattccatctgtccatccaagaccgtaccaaaccgtagcagcttcttccctccggtcaccaaactgcttgcaataggatctcactgaaatgtgggtgcaccagcaataattttaacttggaccagtcacaacgtctcgtcgaacattcttctcctagactacatgtccataataccttacaccttgccaatcgctctagaacacacgccccatgtagctctcacactttc

SEQ ID NO: 230675 - DNA, 299 bp, Homo Sapiens
tggaggtgaaatggcatgcaccaaggctgctgtcactacctgtctgctacccaaactgcaacaaagcgcccactcaacgggaaaaggcccagaccgaacccacgcctgcccctgcctggccccgatcgtttgatagctacgcaaccctaccagtgaaatttccatgcctggaagcctgaacaggcccacgaacaacatgcagtacgccaatgcgcccgcgagatctaccgccgtgaaatgctagcctccacccatgcgcgacacaaggcgccgtggtataacgtgacgatgtggcgcaa

SEQ ID NO: 230676 - DNA, 334 bp, Homo Sapiens
actagtgcgtactacgacatatccatgcttcatatcatgcaatgtgaggaatctgtatagcttaatagatttgcctcaccacagggctccgcatggtcagcccacgggtgtgtgggggctcccctagagttgatcggggggtctgtcctttcgctactggcctacgtccgaaacatcagcaacctggctgactctaccacccatttcttcccatttccttagtctccatcctcagccaaaccacgccatttctcatcaacagtctccttaaaatgacctctgtctcaatctgtgcccccgacaatccatttttcattcagcaatctgaacaatc

SEQ ID NO: 230677 - DNA, 430 bp, Homo Sapiens
  misc_feature (348)..(356): n is a, c, g, or t
gaaaagggaaggaggtggaggggagggcaatagaggcgggcacactcagtataacttaatggaactatagggtactccctctctgacattttgggcaaattcctctaaaaaatgtttctatacagtaccattccttctcccatcattggcttccatatcagtgccagtattatagaaagatctaggtctaaaagaagccaaaagcagtcttaaataatgggaagctttcgggcagatgggtctaccatcagtctatcgggcagtgtatccctctacatcttctccctcatcatcgggcaggggttgggaagcacggagctccatcaagcggtcttctctaacctcctnnnnnnnnnagctaagtactggattttctccaaaccatgatatctggaagtgctccacatctcatctttttgggccatatcta

SEQ ID NO: 230678 - DNA, 224 bp, Homo Sapiens
gaagaaatcacatcatggcatcattccatatccctacacccctacaccctggtccatcagaaacctggctgactctaccacccattacttcccatttccttagtctccatcctcagaccaaacccagcccattctccatccaccagtctccttccccagcacctctgtctcaatctgctgcctgtgggtgctcctctcacatcgcaccttgccaggccattgca

SEQ ID NO: 230679 - DNA, 499 bp, Homo Sapiens
tttctcgcgggtgagactttttcgcggaggtggagtcctctgtgcttctccatctaacgcgggggtttacgtggctgtcaatatacagttgaatcctttacgatccggtttgtggcctacatccaacaccgactgagcacttgctaagtactgggatctgaagattactcagccactgtctccacggagatcatcgttaacgggagagaaagccacgtaaaacaccacgttagatggagaagcacagaggacaccagccgcgtttaattggatttagcaccaggaaacgtttgagaagattttcacagtctgcagacatgtagaagggaattctgtatttccctcttaatactctctctctcagatcctttggagaggtacagaggaaagaaaacgagtaagtcaacctttaggtttaggtaacaaaacacaacaaaaaaccccctgaaaccccccgcactgatataatgttaaaaatattaagccatgtaatattagg

SEQ ID NO: 230680 - DNA, 205 bp, Homo Sapiens
tcagcctcaggccctcgggcgtctcttcctcgaccagcaggtagcggccggcgcgggctatcacggccgcgacagtcacgttggggcgaaacctctctgtaccagccatgaaacttcctctcgaattcccgcaccgggatggcgcaggcattgtgtaagctgccgcgcaccccagcccctgcaaggaaattccatgcaagttcgg

SEQ ID NO: 230681 - DNA, 136 bp, Homo Sapiens
tcagctgacttgggactggctcagctgattctagcccctacccagcgctctagacggtcaaggtgtggtggaatcagcggggaaagaagaccctgttgagcttgactccagtcccaagtcggcgaagaagcgaaga

SEQ ID NO: 230682 - DNA, 137 bp, Homo Sapiens
agcggatccttattcgcgacttgggactgaccggacactatcatccagctgacaaagcagagcacatgaagcgacaaagacatcccatgattgcgccgccaggtcggcccaggtctatctttcccgtccctcccact

SEQ ID NO: 230683 - DNA, 207 bp, Homo Sapiens
  misc_feature (95)..(123): n is a, c, g, or t
atagaaggttgtggcagggcggcagaggttgccagtgcagttgcagcatcatgctcatgctattccaacctgggtgagagtgagacgccatctcnnnnnnnnnnnnnnnnnnnnnnnnnnnnngtaatcacaatgtcagtgatgacttcatgttgagcagggcattcgttcacagcggtattgtcactgtccatctccacgcccgcc

SEQ ID NO: 230684 - DNA, 123 bp, Homo Sapiens
ctctgtgaaacagctatcactgtccttcgtgttacactgaggaaagtgctataactgtgattcggttttcactgtccgtcgtgttacactcatggaaacagttatcaccggtcgcagaccgtg

SEQ ID NO: 230685 - DNA, 282 bp, Homo Sapiens
cgacgagtatcgcggggcagagtatgtgcaaacatggaacatagctgacgggattgacttgtccatgatcgtgttcaaacgttcaaacggcgagccgattcatccgaccacggttcgaccttgatggaaagtagtagcgattcccgcccatgtggcgggaaaggcgctgttttctttttcattcgtcaaaaatggaccttccccaaaaggtgtacgtgacttttagaaaaacaaacatgatagaagtttcgctcaatcgatttgaatgatctcccacctacg

SEQ ID NO: 230686 - DNA, 409 bp, Homo Sapiens
gagtaacgtacgagcggtgccagtgtccctgcttagaaaggatttttaaatcgggtgcgtttttgcctgcgctccaacaacatccattggttgtactaaatcttttcacgcccgatattgtagcatcctagtgcgacgacgtgtaagagcagcaggtatcatcaagtgggcttctctgggcttgcagccaaaactaattgcagtactcaaaatacgaatcgacgtcttgtttgtattgcaatttagcctcagagtgcaccgaaaggccgtgctcagttactcacagataaatggccatatcgacgtccttgtcgcatagcaaagaccagtatcaacttgattcaaaattgtacaaaccacctctgcttcgaacgattgaaattatgtcgaatttctcctcgaatgatat

SEQ ID NO: 230687 - DNA, 342 bp, Homo Sapiens
gatcacctctctttcctgaaaaagcattgaaccgctgttgttttccggtcgcgaaacacctgcttcctgccggtgccgttgtcgacgatgcaggggtgaatgcaacaagcgtgcacaaaccggtaaccgaatgtgattttttcgtgaaaattgtcaacggcctgtaaaaaccgcataagcacgggctttttacgccgtttggtttggccttgtggcacctgccgcacgcccctgcggtagtgcataaaacctgcaccagaacaaaacgttaccggttcacccctttctgtgagtagtcggtggatccctttgaagcacaaatgggtcattttggtgcaggtg

SEQ ID NO: 230688 - DNA, 121 bp, Homo Sapiens
tgcaggtttgcgggaactcgatctgccttgcgctaaatctgctggactacaatgggcgctcaagcttcatggctgtatcagatcgccgccgccgggatgcgtacgtgcagcctagccggcc

SEQ ID NO: 230689 - DNA, 591 bp, Homo Sapiens
acatgccgaacggtcgtttgccttaaagctttcgtccgcacgatacctttcggcttcgcctgccccgggttcgctgcgatctcctgaaaccatgccggtgcttttgcgaggttcttgttgcttttgtcgtgcatgaaccacggcgtaccctcgccggtctgatccttcatgtcgacgtgcagcatgtcggggctgctggtgtaagtgatgaaccggcgcgcaccacgcgaatacagttcgcggacgagctggccacgctctgcctcgctcatacccttcatagagatatccgacgctgtgccatcggcatgctcacccgggccgcctggcttcgcagcctctacgcgatgcgacggggagcgatagcccgaattgattgtgaaatcgcgacccatcgccttcgacgtctcggaaaggatcgaggcgaactgcggattgatcttatcctgaccggcatgcacgaagttcagcttgccgccggtgccgattggcgcgtcttccggctcgcggacgaggcgggccagccccttaccgttcgggtacgggacctttgtacccttcccttcatcgccctggagaagatcgaggtga

SEQ ID NO: 230690 - DNA, 474 bp, Homo Sapiens
cgttaaaatcattcagtgagtagttcacagactgaggtgatcttctgaggtgatcttctgattcatcgccgcgcattaaccacaatgtatatgcgcaaaataggtgccgcaatcgcttgcgccgtcgcacccaggccaacccaccctctttcacttgaattctgccggtggatatgaactcattggcggcgagttgcctttacacaacaacagccggaggaaaatatggacgcggaaacgaagaagcgctcggtggagctgacggttggcggcaagctgcgcagcttcgatatagacgatccggttcttcccgactgggtggaggaaaacaagctttccgccggtgattttccttacgacaaaaagatgaagcgcggggaatacgacgccgccctcgaagcgctgcaggtggagctggtcaaggtgcagttctggctgcaggcaaccggcaaacgggtgatggccgtgttcgag

SEQ ID NO: 230691 - DNA, 212 bp, Homo Sapiens
aggatcctcatgtcagaagataccttgcagctgggcacaccttgtgccctgggcacgacgcgccggacacctgccctggcaaagtaccatcctggccgagaagaagaaagaaggagctgccaaggtgacggacgctcaagccccgaagaagaacacccgcaccctgatcggcctgcgtggtgagcgacaagcgcgccaagaccgtgacggtg

SEQ ID NO: 230692 - DNA, 363 bp, Homo Sapiens
gtattcggcttgctaagtgcagatcggcgaaaacgacatgtatatattatcatactgatgatcaggacttctcgtactacttgaacggttcccttgccaatgaggccttggagccatctgacgcggtgcttagcccaaatgcgacgcgacagtgtgtggacatttatggtggcccatttgtcgagaacaacccggtagctccttatcagtgtgccggatcgaaaaatcacgtcaaccaaatctggccagcaccgggcgctccgggataatccaagtctccctgagcgccatcggaaagatggcgctcaggaaatgctggtgcatgcaatcacgccgccgaatgaagataattacggggagggg

SEQ ID NO: 230693 - DNA, 230 bp, Homo Sapiens
gctgtcacatgtgccatttgcactgattcgccttcctctaattgattcgaatgggattcccaatctcattccttccactggccgttctcattgatatacactttcatatcggaacggagccgatgataatataatacgctccgcgggcgtcgatctcggccagtgcggcaacggagaaaaagcccaaatcccgaatacataggtcattcgggaaaatcgtgtgctgggca

SEQ ID NO: 230694 - DNA, 148 bp, Homo Sapiens
cacctaaacctgatctgccctgcaatgatctggcgtgccgccttcaaacttccaatggagctctttccatgttgattcataaatggccgacaaaatcaatcatttctccgccaaattcgacagtgctccatctgttcgagcaacgccc

SEQ ID NO: 230695 - DNA, 546 bp, Homo Sapiens
gagttagaacaggaatacccattcttttcccattacgaatatacgcatcccaaacatgcggatcgaatgccattgcctttttccacgtttcatttgcgtatacatcaaacaacgagccaacttcacggaaaaagcctgaatcaattaaatcttgtgctaacaactggtcacttaccactacaaaatctggtatttcctttccggaagataaggcaagtcgcaatttcgtttcaaaagcaccatttacatccgcaacgtaccaaattgtcttaatttgaattcccaactttttataagcccatctagtagcgacattatttgcaatcgtttccccgttttaaaatgataaattcggattaacagcacgaacagtactgatcgtaacaggaggatcatacatgtccttgtatccttctaatattgattttcttttaaatgaaagactttctttaatagaagaaccagataaacttgaaaatataaacataacgataattattaataccgaccgattcaacagtattctcatgaggtgatctctgcacg

SEQ ID NO: 230696 - DNA, 131 bp, Homo Sapiens
aattcccgtgttacgctgccctccggctccaagactggttctttcctcagccaacagagctgtggttggtgtggtggctggaggtgtccgacattgacacatccatcttagaggctggccgtccgccccga

SEQ ID NO: 230697 - DNA, 142 bp, Homo Sapiens
attcctttattgcgctgatacacctgtgaagcaaagacgcaaaaggtcagaaggatcgtgagtgcccctgctttcactggtctgtattctgtactgaaaatcaacgatcaatgctgagcttttgcccatcctgcttcactgt

SEQ ID NO: 230698 - DNA, 274 bp, Homo Sapiens
cttggcgagcacggcgaccccgttccacgccttttgcccatgccagaccgcgccatagcccgccgcctcgatcgcttgcgccgggaaggtatcgtcagccgccttcagttcctgcaggcagacgatgtcggggccgtcctcggtcagatactcgaccagccggtcgagccgggccttgatgccgttgacgttgtaggtgacgatcttcacggccaccgctgtagagcaaagaggccgtacgggaataccgttcgtgctgagcgaagtccaggga

SEQ ID NO: 230699 - DNA, 118 bp, Homo Sapiens
ttcgattcacaatacgaaaacctggcatgacatgtgaagtcaggagtggctcatgagtcagctaaaggacgtttagcgatggggcgcactgccctttttcagtactgaaacctgtcgc

SEQ ID NO: 230700 - DNA, 441 bp, Homo Sapiens
acctcgcttagtgctccttggccgcgctcagtggtcaatgaagctgagcggcaggtcatgggaattactccgcccggtacccaaagactatggtttatgggaagcagtacgacgggttatgggaataacgcaacctcatagtctggcggtagagtaaatagaacatactacgacagtgtttgatctctggtgaaccttgcactggtgcaagagattaacgaatacatgctcagtacaagcgctcgctgtcgtccgtcttgagcatggcctagaattcgaactctagcagagcagtaccaatgccctatgccattattcctaactatggtctccattgcgcactccaacagagtggaaccgaggtcctattccataatatggagatggcgtgttcatgcgggaaatggctgttctgtacactttccacagagcactcaacca

SEQ ID NO: 230701 - DNA, 195 bp, Homo Sapiens
tttctcttatcctttttttctcttacttgatttgttttccttagtctggtcttctgatctcgtgctttattcattcaattcaaagtgtggcttattttgataatccaatctgtctattgtaactactctttttctttatcatctctttcttaactcccattcctcatgtactatcacctctcgatttgtcttcct

SEQ ID NO: 230702 - DNA, 216 bp, Homo Sapiens
aatccttgttgagctgcatatgaggtgttgctcggtccctcgggggatcgcacttcatgctctttcgactctcgagacagagttggaaggaggcggagagtccggttttcagaaacgcgggcagctcatgggaaatcttctgtcctttcccctcttgtgtctcgtcaactatatcacgttcaagttctgtgtacccattgagcactaagcgaggtc

SEQ ID NO: 230703 - DNA, 245 bp, Homo Sapiens
cttagtgctccctggtttcgaggcgtacaccggcgcgcgcctcgacgcgcagctcgacgaccaggcgcgcgcgttcctgctcaagtcgccggagaagaaccgggtcgacgtggccacccggacggtgtacctgggccccatcttcgtcgagttccgcgactacatcaacgatttcggcggcagcgaggcggccgtgggcaagtacgtcgcgcggggagcactaacgaggtccagggagcactaag

SEQ ID NO: 230704 - DNA, 148 bp, Homo Sapiens
cctcgcttagtgctccctggagtaccctatcgttgaaatgccggcatgccaaagtcaagtagtcctgcggcttaagatacccgctccgatattcgacctcattaatattgaatgcaaagttccatgcaatagctggcatgctagtgca

SEQ ID NO: 230705 - DNA, 193 bp, Homo Sapiens
acctcgcttagtgctctttggcgcgaatcttattccttccagcggattttcaagggacgtcgggagcgcaccggacgctacagaggtgtagcgctctgccagccattaaaccctagctccggacaaaccgttttcagggtgagagactgttaagtagaaaagataactctacccagggcgcactaagcgaggt

SEQ ID NO: 230706 - DNA, 231 bp, Homo Sapiens
ttgaatggagtggagtggagtggaacggattgcaaaggaatgggaaggactggacttgactggactggggtgtaatggagtgaagtggactgcaactggactggagtggagtgcagtggaatgcaatggacatggcactggcatggacttcgactggactggactttgacaggacatggactggaatggactgcacctcaaatggaatttacctacaacggaatgaattcg

SEQ ID NO: 230707 - DNA, 468 bp, Homo Sapiens
tgacttggggccacacttaatcaacaatatgatctgaacgagcttttggttcaaaacattccccccttatgtcgctttttgcacgaacaacaagtgtcgtaaaaaccatgtcgatgtgatgaacagaacaacaaataaaacagaaaagccgacgaacaactgaggaaccgatctaattaaagtcgggatcactcgcaaaagactaagcataacactaaagacagaagacgaaagtgaaacgataaaaatgccaataggagacaacgccatcaagcttagcaataacactatgagagaagcaaaaacgaaccacgacaccttagtgcgtgaagcactcttttccgttttatccgcacgaatgacggcaagaacgttttcttcaaaactttgcggaacttcaacacattgataaactaacgaaatgttattttttattgtaaccatgttttccatcagcaattgacattg

SEQ ID NO: 230708 - DNA, 131 bp, Homo Sapiens
cctgaaaaacgggttctcgctattttgcccaggcagttctcaaacccctgggctcaacctactcctcccgccttcttagccctccctaaaagcgtggaattacaggcttgacccaccgcccccggccttta

SEQ ID NO: 230709 - DNA, 121 bp, Homo Sapiens
ccgagcaccaccaatacaccgagcaccaccaatacagagagcgccaccaatacaccgagcgccaccaatacaacgagcaccaccaatacagagagcaccaccaatgcaccgtgcacgatta

SEQ ID NO: 230710 - DNA, 319 bp, Homo Sapiens
  misc_feature (15)..(15): n is a, c, g, or t
  misc_feature (31)..(31): n is a, c, g, or t
  misc_feature (48)..(48): n is a, c, g, or t
  misc_feature (54)..(54): n is a, c, g, or t
  misc_feature (61)..(61): n is a, c, g, or t
  misc_feature (78)..(78): n is a, c, g, or t
  misc_feature (88)..(88): n is a, c, g, or t
  misc_feature (115)..(115): n is a, c, g, or t
  misc_feature (117)..(117): n is a, c, g, or t
  misc_feature (131)..(131): n is a, c, g, or t
  misc_feature (136)..(136): n is a, c, g, or t
  misc_feature (140)..(140): n is a, c, g, or t
  misc_feature (147)..(147): n is a, c, g, or t
  misc_feature (149)..(149): n is a, c, g, or t
  misc_feature (154)..(154): n is a, c, g, or t
  misc_feature (181)..(181): n is a, c, g, or t
  misc_feature (192)..(193): n is a, c, g, or t
  misc_feature (200)..(200): n is a, c, g, or t
  misc_feature (206)..(206): n is a, c, g, or t
  misc_feature (219)..(219): n is a, c, g, or t
  misc_feature (234)..(234): n is a, c, g, or t
  misc_feature (249)..(249): n is a, c, g, or t
  misc_feature (265)..(265): n is a, c, g, or t
  misc_feature (269)..(269): n is a, c, g, or t
  misc_feature (272)..(272): n is a, c, g, or t
  misc_feature (275)..(275): n is a, c, g, or t
atggtggggcgcggnccccaaggaagggccnagcgccggtccgcaggnagggangaacccngtccccagggagggagnaaccccggtncgcagggagggagggaggaaccccggncncaaggaggaagacncaatnccanaagggancncagtnccaggaaggaagaacccggcccaaggnggaggagttannttcaagnggaggngccagccaatttnaattggccatggttnccttagggaaaaccngggatggaaattttgncccnggnggncttttgtttaaaacagggggggtttctttattcccgggaactaa

SEQ ID NO: 230711 - DNA, 192 bp, Homo Sapiens
tccaacatctcattaccccttccaacatctcatcgctcctttcaacatctcatggctccttccaacatctcatcgccccttccaacatctcatcccaggttcaagcagttctcccaccttggcctcgcaagtagctgggatgagatgttggaaggagccttccaacatctcatcgcgacctcagatcagacg

SEQ ID NO: 230712 - DNA, 157 bp, Homo Sapiens
ccttcaacatctcatgcctccttccaacatctcattcccctatccaacatctcatatccccaatatctcatctcaccttccaacatcccatctcacctccatctctctccctgtgcaggccatgagatgttggaaggaggcatgagatgttggaagg

SEQ ID NO: 230713 - DNA, 109 bp, Homo Sapiens
ccttccaacatctcatggctatagggaggcgccatgggatgttggaaggagggatgagatgttggaaggcgcaatgagatgttgaaaggagggatgagatgttggaagg

SEQ ID NO: 230714 - DNA, 104 bp, Homo Sapiens
ttcaaacatacaagtttctcttttttcccccccaatgacagttcaacaatagccataagcttggggcaatgacagtttcaacaatatccataagttgggggggt

SEQ ID NO: 230715 - DNA, 299 bp, Homo Sapiens
  misc_feature (22)..(22): n is a, c, g, or t
cggtttggtcgcgctctccctncactgaagtcggcacgggtgtcggcgattcttcgtcgcctatcgggggtgcgacagtgcccaggcgacgtgctcggggaagttcaacaacctggtccgtttccgcggcttcccctacgtgccgattccagagaccgcgatttaacaaccccacgattcaacccacagacccgccaaacgcgggtctttttgtttgaggacgagcatgacgacaccaccgccgattgagcaatttactggtgcaggtagccagctccaattccaacaagcactgagtg

SEQ ID NO: 230716 - DNA, 163 bp, Homo Sapiens
ataggccgtatagagatgtctaagtacatagctatttaggcaaatatagacaaaatacttaacttaaccagtgtgagtaaagaacggaatctagcctatcatgcaggaggtctaggagtagcaggtagcaaggggatgcatggcaagtggcacacaagtacta

SEQ ID NO: 230717 - DNA, 464 bp, Homo Sapiens
cctagaggaccccgactagtccaaccataccattctggctaacttaagctcgtgaaattcacactaagccactgagcgtcatcttgtaaaaagttgcattagaagattttcagctgttccaaatgggacttgtaagtggaatgtgttgtacaggatcatatcagatgaatgaaaggtatatggtccttcgtttccttaataataaaatgatggttggggcagaataggctagagtctaaacacagagctattatgaggctttattgttacacacgaggtctaagcctaagtatgtcaatacaacacatacttactgtttcattactagtaatgaaaagaaagagcaggtcttagtggcataaggatgatttaaatctggttattgggcaacattgtggcctgataaatttacatctactaagaacatttctataggtatggtagggacctagacggagaaccga

SEQ ID NO: 230718 - DNA, 528 bp, Homo Sapiens
tagatggttgcttcatctatgtggcgggcgcggattgcgtctggcgcgctttaatacccaggtggggactgccgacaagcactacttcattggcctggccagtccggctgcggcgggtgtggtagccggtatagtctgggcattcagcgactacggtatccagggttccaagatgtcgttcctggtggccttgatggttgcggcggccggcatgctgatggtcagcaatatcaagtacaacagcttcaaggagctggatctcaaagggcgtgtgccgtttgtggctatcctggcagtggtgctggtgtttgccgtggtcttcagtgatccgccgcgaatcctgctgctggctttccttgtgtatgccgcgtccggcccggtgcagtaccttctgcatcttcgtcagcgcaaaacgttgccttaatgtaatttcccccatactccgcagtctatgggtgcatctgtcctccaaagctgcggagttgccatgttactcaagtttcccaaagcgtcagattgccaagaatc

SEQ ID NO: 230719 - DNA, 288 bp, Homo Sapiens
actagtccaacatacgactgtccacatgctggtaattttttgtatttagtagcagacaggtttcatcatgttgggcaggatggtctcgatctactgactcatggtccacaggcttgacttccaaagtgctggggattggggcgtgagccacgcgtctgccgtatctgattctttccccaaaaacagaaacagcacgggtgccagtatgcgttcatgggtgaacggcttctttgggtagccgctttgtctgcagagcccttggactctggaggcctagaactagcaatg

SEQ ID NO: 230720 - DNA, 667 bp, Homo Sapiens
atgtctagaggatctccgagtagtccaaccatacggataaaagtggtggctttacgatttccaatagttatggttccggttttatccaaaagcaatacatcaatatctccggcagtttctactgctttaccagatttcgtaattacatttgcccttagcgccctgtccattccagcaataccaattgcagaaagtaaaccaccaattgttgttggaattaaacaaacgaacagcgaaattaaagcagcgattgtaatcggtgtattggcataatcagcaaatggttttagggtaacgcaaacgatgataaataccaatgtgaaactggctaaaagaatggttaatgcaatttcgtttggtgttttctggcgtgatgcaccttctaccaaggcaatcattttatctaaaaagctttcgcctggtgcggtacttacctgaactttactctcatcagatagtacttttgtgccaccggttacagaagatttatcaccaccagattcgcgaattacaggagcagattccccagtaattgcggattcatcaatggttgcaattccttcaataatttctccatcagtagggatggtatcaccggtttcacaaacaaaacatctccttttttagctgattagatgaaggattatattgttccattataataacc

SEQ ID NO: 230721 - DNA, 163 bp, Homo Sapiens
aagcagtcggttggagcgagcatcccccaaagttcacatggtggccggggcttttgatagcacatcgtggttttttacatagtcatcccaaatataagatgcgtagtaacaggaaatcccttgcaatccaaaaagcaaccccatttatttctaaggagatggg

SEQ ID NO: 230722 - DNA, 111 bp, Homo Sapiens
tagtcccacacctgcaccggtagtcccacacctgcaccggtagtcccacacctgcaccggtagtcccacacctgcaccggtagtcccacacctgcaccgtgggtaccgagc

SEQ ID NO: 230723 - DNA, 169 bp, Homo Sapiens
cgcggtgcaggtgtgggactaccggtgcagtgtgtgggactcccggtgcaggtgtgggcctacccggtgcaggtgtggaactacccggtgcaggtgtgggacctaccggtgccggtgtgagaactaccggtgcaggtgtgggcctacccggttgcaggtgtggaacctc

SEQ ID NO: 230724 - DNA, 143 bp, Homo Sapiens
acacccccggtttgttctcctcacacagtgcgcccttctttggtggcccaattgaaaggcgggccaccacatttgtcctttgatctcgtagagggtactgcacaccctttggagatcgccggtcgatggtgtgaaactaccgg

SEQ ID NO: 230725 - DNA, 119 bp, Homo Sapiens
tggtagtcccacacctacacctggtagtcccacacctgcacctgggagtcccacacctagtcccacacctgcacctggcccagcccttagagccaatccttatccctgaggttacggat

SEQ ID NO: 230726 - DNA, 216 bp, Homo Sapiens
tgggtgccggtgcctgtgatgtaaagctgtccagtgattgtgtaaagtgatatagcgcgtactgagatgtgagagattggcgtgtgctctcgagtagaaaaacagaggcagtgtcactgtgtccacgacaacataaatcttgccacatcatctgcagtaatgtgtcacgtaacaagccttgtgcgtcatcttaccatcagatactccactgtcagt

SEQ ID NO: 230727 - DNA, 137 bp, Homo Sapiens
tgggtcagtggtgactgtgtgggtgcagtggtgatgtttaacgataattagagcttggcaggtagacaagggcagccgtggcagacagtccccacagcataacaggggcggccgccctcctcatcagccgagagccg

SEQ ID NO: 230728 - DNA, 100 bp, Homo Sapiens
cagctgcttgctgttggtgactctagaggaccccccgctcagagcatttcttccgctagagccttctgagtacctgagactataccatgcccaagtaatt

SEQ ID NO: 230729 - DNA, 410 bp, Homo Sapiens
  misc_feature (85)..(102): n is a, c, g, or t
  misc_feature (116)..(238): n is a, c, g, or t
atttgatcgatagtgaaagctctgcaatttacacaggatagagatcacatggagctcatttcacagacagggaaactgcatttcnnnnnnnnnnnnnnnnnnggattgggattctnnnnnnnnnnnnnnnnnnnnnnnnnnnnnnnnnnnnnnnnnnnnnnnnnnnnnnnnnnnnnnnnnnnnnnnnnnnnnnnnnnnnnnnnnnnnnnnnnnnnnnnnnnnnnnnnnnnnnnnnnnnaccacgcagtttaatccgggtaaagcgaatgataagaggtctggggcgccgaaacgatctcaacctattctcaaatctttaattgggtgtaaaaacgccggctcgctgggcgtgaacccgggcgtgaaatgcgagtcgctatgggcgcactttgggtaagcagaacctgggc

SEQ ID NO: 230730 - DNA, 142 bp, Homo Sapiens
tagatctcgtgcttaccaaagagtgggccacgtaggcagtcgcattgcacgcccggttccacgccagggagtccgggggttgttacccatttaaagttcgataataggttgagatcgtttcgagaaactgactctgaacgat

SEQ ID NO: 230731 - DNA, 102 bp, Homo Sapiens
cagagtcggtatttgggccctgacggcactggccccaacatcctcaccgacatcaccaacgggttgcagatacctcaagcgagaatcaatggacagctgtgt

SEQ ID NO: 230732 - DNA, 217 bp, Homo Sapiens
cactactgcttaccatggagttggaccactagggcagtcgcattcacgcgcgcgtcacgcgagagagccgggcgtctcacccatgttaaagtttgagaagaggctgagatcgtggcggccccaagacctctaatcattcgcttcaccggataaaacggcgtggcgggggtgcgtccggactgggaaaacaacagctatcctgagggaaacttcggag

SEQ ID NO: 230733 - DNA, 161 bp, Homo Sapiens
ttttatggtttctgaagccgctggcggaggaaagggacgcgctcaatctgaagtttggaaagaatccccccaaaaaagccgccagcgaactggcggctttttttgtgccgccggaatcggaaagaccgatcggaatggatcccgttggcgggcaacccagg

SEQ ID NO: 230734 - DNA, 384 bp, Homo Sapiens
  misc_feature (48)..(180): n is a, c, g, or t
cagaacctggactcaagcgatcctccagacctcagacctcccgagtannnnnnnnnnnnnnnnnnnnnnnnnnnnnnnnnnnnnnnnnnnnnnnnnnnnnnnnnnnnnnnnnnnnnnnnnnnnnnnnnnnnnnnnnnnnnnnnnnnnnnnnnnnnnnnnnnnnnnnnnnnnnnnnnnnnnatgagccactacagctggtcccagcttctatgtcttttcttcattgattcaacaaatatttatgtagctagtaaatgccatatactattctaagagctggtgaaacagcagcaacccaaatattgccttatacggcttacattctaatgggagacatagcaaataattcaatgtataatggtctaggtagcaggaagtatcagt

SEQ ID NO: 230735 - DNA, 225 bp, Homo Sapiens
tgggcaatttagtcaaagtgtctctgttacctgagggctgcttaatggccttagggaacgagctttggaagcacctgttaaagacaggcagaacgctgcaggagggatgcctgtcattccacggtgtctgcccacgctgtgctggtccatcctaatgagcacgggcattagaactcaagacggcacaagccccaggcagcggagtgagcggcctccagcctcatg

SEQ ID NO: 230736 - DNA, 131 bp, Homo Sapiens
tatccatttgaatgtttgagaataggttgatcatcgtgtcggccccacgcacctctaatcattcgctttcaggcggaataaaactgcgtggggggtggtgcgtcgtcgtctgacgacagcaccagcttatc

SEQ ID NO: 230737 - DNA, 292 bp, Homo Sapiens
  misc_feature (102)..(211): n is a, c, g, or t
cccgctaaccagtttctattcagctatgtttaatctgcttttaaacgcattgtcttagtccattcaggcttctataacaaaatactacaaacgaggtagctnnnnnnnnnnnnnnnnnnnnnnnnnnnnnnnnnnnnnnnnnnnnnnnnnnnnnnnnnnnnnnnnnnnnnnnnnnnnnnnnnnnnnnnnnnnnnnnnnnnnnnnnnnnnnntatgcctaactcgggtgtccgccgtaagtacggcatcaatatggtgaactcccgggagcgggagaaactggctctgagcgg

SEQ ID NO: 230738 - DNA, 118 bp, Homo Sapiens
ctgcgacaagtatgattccgcaaacagcatacattcatcctcctactagtaatcctccttcaacaatattctctccgcgagaatgaagcatcaccacctactacgagggtgcctgcgg

SEQ ID NO: 230739 - DNA, 252 bp, Homo Sapiens
ccacgtactacttacgtactacgacgacggtacgacgtttttttcgtgactacgtggtccactggactaacgtggcgttggcttgccactgactggtgacggggtacggacgtcacggtacgttacgtacttacggacggaggggttcgttacgcggggctcggacggacaacacggttaggggacacacgtctacacactacggttggattgtatgacttatgagttacacacacacactacgtacgacgt

SEQ ID NO: 230740 - DNA, 231 bp, Homo Sapiens
  misc_feature (77)..(189): n is a, c, g, or t
cacgtaagcatgatggggcacgggtgcgaggtggggcgcacagtgggagcgcgtggggcgtgatgggacacatggcnnnnnnnnnnnnnnnnnnnnnnnnnnnnnnnnnnnnnnnnnnnnnnnnnnnnnnnnnnnnnnnnnnnnnnnnnnnnnnnnnnnnnnnnnnnnnnnnnnnnnnnnnnnnnnnnnaaagaaactataaacatcattgaaagaaactggctgagcggg

SEQ ID NO: 230741 - DNA, 122 bp, Homo Sapiens
acgggcgcagaatgatgcgaacaggcgtgatgatacgcgcctaagcatcgtgtaagcgttcggattagtgggctaattatctgctagggggtggaagcggatgcgtaagaagattcctgcta

SEQ ID NO: 230742 - DNA, 291 bp, Homo Sapiens
gcccgtgctgatacacgacgggcggcctatcctacccccatgctgtctatcaggctctctgggggacttttcaacctgctcattttctttggccccagtcaggaagcaccagctgtaatgtgagcttttgcctgacaggagtgtactcttcttgacgactattgaagcagcaaaaatgcagagtcactgtaggcaggcagcaagttaatagctgcatctgatttctagtatcatagttcaatataatataaaaaataaaacatcactccattaaaaaatcatcaaaatgaa

SEQ ID NO: 230743 - DNA, 427 bp, Homo Sapiens
  misc_feature (68)..(314): n is a, c, g, or t
agacgtgacacacacggagggaaaggtgctatgaagatagaacacagagagattcgacggtcctgacnnnnnnnnnnnnnnnnnnnnnnnnnnnnnnnnnnnnnnnnnnnnnnnnnnnnnnnnnnnnnnnnnnnnnnnnnnnnnnnnnnnnnnnnnnnnnnnnnnnnnnnnnnnnnnnnnnnnnnnnnnnnnnnnnnnnnnnnnnnnnnnnnnnnnnnnnnnnnnnnnnnnnnnnnnnnnnnnnnnnnnnnnnnnnnnnnnnnnnnnnnnnnnnnnnnnnnnnnnnnnnnnnnnnnnnnnnnnnnnnnnnnnnngcaggttagcaacagccactgtagtcctactggcctctgctaaagtcttcaaaaggcctcagtgtaacctccaagactttgcacttgcttcatctctacctgtagcactctta

SEQ ID NO: 230744 - DNA, 529 bp, Homo Sapiens
cccgttcccgttggcccagtgcgctgcagtgccaatcgcgttatcccgcaagtttcggatctggcttgccggtttctccttatctggcattgtgccctcatgcctgaggttcgttcgccttgtgattcgtgatgaggatatgggtacggcccggcgcgaggatgacaccgtctcccccggattgacaagggccatcggaaagtgggagataccgagtctctggatacgtaatcgatgggcatagctattgccggagtgcaacatcattgggatgatcgccgacgaatgccaaatggaggtaatcctcatggtcctccagggcccattaggccttctgggagtccgaccaggaatgccctcctcagcctcagggggcctgcacccttacgtcgtcctgactcatctgatgaccgttatgtaatgacaaaacatgccaccattaatccaactgaagaggagttacaggcagttcagaaaattgtatctattactgaccgtgcttaaaaatcgttcagacagtttgtatgac

SEQ ID NO: 230745 - DNA, 334 bp, Homo Sapiens
tcgtgctctgtcgactagcacacctgtaccgacagctggtacgaggtccacactagtgcgctgcccctgggccgcgagaagggaggcaagctgactcctgaggaagaagagatctcaacatcgacacacatgacgatctaaaataattcacaagaaatatgatcacaggaaacatatcgccagattcagctctctcctgaagcagcagttccaccagggtcgagctccttgcgtgcatcgccttcagggccgcgacagtgtggccgagcacatcggtatttgctaaagggcaacagagttggagtgctatcttagtacaatcacggcccgctaa

SEQ ID NO: 230746 - DNA, 215 bp, Homo Sapiens
  misc_feature (86)..(107): n is a, c, g, or t
  misc_feature (116)..(125): n is a, c, g, or t
  misc_feature (129)..(175): n is a, c, g, or t
ctggatgtctcgggacttttcttttattggcagaagtaaacatggctagaaagaaccacgtcagggaatgacgttgtgcccagccnnnnnnnnnnnnnnnnnnnnnnggtcccccnnnnnnnnnnctgnnnnnnnnnnnnnnnnnnnnnnnnnnnnnnnnnnnnnnnnnnnnnnncggaggagaaccttaccacaggtttggggttctagagatt

SEQ ID NO: 230747 - DNA, 233 bp, Homo Sapiens
gcacgactctagtctacgcagctttatacccgcacttactgcgaatcctcgttcatgtggcctatattgcatccccgatccccatcacgaatggggttcaacgggttaccgcgcctgccggtgtaaggtaggcacacgcatgagccagtcggtgtagctgcgcgtgcagtcccggacatctaatggcgtcacagacctcctattgctcgctctcgggtggctgaaagccaccc

SEQ ID NO: 230748 - DNA, 247 bp, Homo Sapiens
atcccgtactttcagtagcatctaaccccgactagtctgttgcctccggggtcggcggtgcaggcagccctcctgatgtgggcacacgtccgcgaacgtgcaggacctgctgctgctgggcgtggctccccttttcgctggggtctggccactgccggatggcgtgatgactgccctgatcaatgcgcaactccaccatccccaccaagcagtacgcatatcttagggtacccgaatgcctcgaaat

SEQ ID NO: 230749 - DNA, 172 bp, Homo Sapiens
aacccgggtacgagcttcatctctaacgcttcatgggtgcatttcgacagagttttacttccgtttgtaacgttgacttggagcaaagtgtgaccactcagtactcgggtttgaataacaccagtctccaatcgtgcccatctacgtgaacctatgtaccacattgaccact

SEQ ID NO: 230750 - DNA, 154 bp, Homo Sapiens
aagcctagggcgcaggtccaggtgtagccgccgccggtccagatcttgtgtggtagtagcatatattccaaccagaacttatgcaaggccgaagtggagaagggtcccatgtgaaccgcagttcaacattggtcagctgcggtcctgacacgat

SEQ ID NO: 230751 - DNA, 120 bp, Homo Sapiens
gaatatagaactcaaagaagcgggagatggatataacgatgatccgtcgagcggtccatgacgatcaccgcggctgtacccagacatgtctgagcctgcaccaacagcatcacagtccat

SEQ ID NO: 230752 - DNA, 609 bp, Homo Sapiens
  misc_feature (238)..(535): n is a, c, g, or t
  misc_feature (580)..(580): n is a, c, g, or t
tcggctatctgtgcttttcctcatacagccaccaggctctgcctcagggcttctgcccttgcttctcctatccagaacattcctttcctgaatttcttcaagcctcactccctcctttacatctctgtccaaaggtcaccctttggacatctttcttacagaaaggtcacactttctgtaagacattccctgaatgtcatttgaaattacaggccccctgtaataaaagtgctgggannnnnnnnnnnnnnnnnnnnnnnnnnnnnnnnnnnnnnnnnnnnnnnnnnnnnnnnnnnnnnnnnnnnnnnnnnnnnnnnnnnnnnnnnnnnnnnnnnnnnnnnnnnnnnnnnnnnnnnnnnnnnnnnnnnnnnnnnnnnnnnnnnnnnnnnnnnnnnnnnnnnnnnnnnnnnnnnnnnnnnnnnnnnnnnnnnnnnnnnnnnnnnnnnnnnnnnnnnnnnnnnnnnnnnnnnnnnnnnnnnnnnnnnnnnnnnnnnnnnnnnnnnnnnnnnnnnnnnnnnnnnnnnnnnnnnnnnnntgtctgggcgggaaggatcgttttattttccctatttggaagatnaggacagtgagtacagagaggtgaagtag

SEQ ID NO: 230753 - DNA, 351 bp, Homo Sapiens
  misc_feature (74)..(301): n is a, c, g, or t
aggatccgggtcgtggtgcaactgtagtcccagcatctgaggcaggaggatgcttgtgccagaagtcgaggctnnnnnnnnnnnnnnnnnnnnnnnnnnnnnnnnnnnnnnnnnnnnnnnnnnnnnnnnnnnnnnnnnnnnnnnnnnnnnnnnnnnnnnnnnnnnnnnnnnnnnnnnnnnnnnnnnnnnnnnnnnnnnnnnnnnnnnnnnnnnnnnnnnnnnnnnnnnnnnnnnnnnnnnnnnnnnnnnnnnnnnnnnnnnnnnnnnnnnnnnnnnnnnnnnnnnnnnnnnnnnnnnnnnncaattatgtaattattgagaaagggcagttcatcgacttgggtaccgagc

SEQ ID NO: 230754 - DNA, 718 bp, Homo Sapiens
  misc_feature (91)..(257): n is a, c, g, or t
  misc_feature (298)..(409): n is a, c, g, or t
  misc_feature (421)..(511): n is a, c, g, or t
tgaggattacccgatggccatgctgtccacatgcgtatctcagagctccccagacggcaccccactgcttttggcccactggtgtccagcnnnnnnnnnnnnnnnnnnnnnnnnnnnnnnnnnnnnnnnnnnnnnnnnnnnnnnnnnnnnnnnnnnnnnnnnnnnnnnnnnnnnnnnnnnnnnnnnnnnnnnnnnnnnnnnnnnnnnnnnnnnnnnnnnnnnnnnnnnnnnnnnnnnnnnnnnnnnnnnnnnnnnnngttaaaattttttttgtttgagacagagtcttgctctcgtnnnnnnnnnnnnnnnnnnnnnnnnnnnnnnnnnnnnnnnnnnnnnnnnnnnnnnnnnnnnnnnnnnnnnnnnnnnnnnnnnnnnnnnnnnnnnnnnnnnnnnnnnnnnnnnncaccgtgcccannnnnnnnnnnnnnnnnnnnnnnnnnnnnnnnnnnnnnnnnnnnnnnnnnnnnnnnnnnnnnnnnnnnnnnnnnnnnnnnnnnnnnnnnnncaaaacattgtttttaattagtgggagccttttctttaaataaacactacccagatgctcaattggtaaatgagagttgctttcggagggtagggggtagcaggttagcacagagacagtggaagggagctcagtctctccggccttcgcaaggcaggctcaagtacctctaggtaccttcctcatgaacagttccaaacctttggc

SEQ ID NO: 230755 - DNA, 249 bp, Homo Sapiens
tgtcgctgctgtccgtgtatatgacggcagtgcatcgatactatagtctttgctttacatgtgtacaacgacggcagtgaatccctagtcatagttatagcttttaacctaggtgtaaaacgactgccactgtataactacctcatagtaaatatcaatagtcgaatgtcatacgagtactggtgagcactagtcttttatcacaggttgaacctgaggaggatgaactcttgagattaagtatctgta

SEQ ID NO: 230756 - DNA, 408 bp, Homo Sapiens
  misc_feature (88)..(189): n is a, c, g, or t
  misc_feature (214)..(251): n is a, c, g, or t
  misc_feature (270)..(326): n is a, c, g, or t
cagcagaggacgtgatcgttttatcattcaagagatggatacacacctcttcttactttttattagagacagggtctagttctgtcannnnnnnnnnnnnnnnnnnnnnnnnnnnnnnnnnnnnnnnnnnnnnnnnnnnnnnnnnnnnnnnnnnnnnnnnnnnnnnnnnnnnnnnnnnnnnnnnnnnnngcacatgtcaccatgcccatctcannnnnnnnnnnnnnnnnnnnnnnnnnnnnnnnnnnnnnggagatggagtctagcttnnnnnnnnnnnnnnnnnnnnnnnnnnnnnnnnnnnnnnnnnnnnnnnnnnnnnnnnntgggtccaagcgattcttctcaggtttgagacggaacaggctctgcgcatgaccttgaaggccgacttcaacggcctgcgca

SEQ ID NO: 230757 - DNA, 114 bp, Homo Sapiens
actacgtctagctctgtagacgacgatgtagcgctgtaaatcttggcaccgttcaaaccaatcacgttgatccattcgtgctccattagatcggttagaagaacaaccgcatca

SEQ ID NO: 230758 - DNA, 155 bp, Homo Sapiens
cagttgtacttgtactctcctttctcctttcttcccctttctctgcccgccatccccttgactggggtttccactaatacggcatgccggctggggaacttaagttgccgcccgttcccggccccctttacacttgcgcccgctcacaccaaaca

SEQ ID NO: 230759 - DNA, 135 bp, Homo Sapiens
tacagcctgtactacacctacaacctgtccaagcgcaccaacctgtacgcgctgggttcgtatgccacgaactatcgcgttcatcgacggcgtcaagagcaccgtcggcatggtgggcgtgcgtcaccgctttct

SEQ ID NO: 230760 - DNA, 247 bp, Homo Sapiens
gttctaggggttgaagggcaggcgcttttgctcggggttgtagccgaacgactgcggaccctggaagctggcgatggtcttggcctggcccagcagcagctgcttgaccgatggtgtcgcggtccaccgccatgatcagcgcgcggcgcacgtcgcggttctgggtgatgccattcttggtgttgtagcgcagcgcgaaggcccacccgggcccgccggtcggaaatgacgtcggcattgcccaagt

SEQ ID NO: 230761 - DNA, 142 bp, Homo Sapiens
cgtagtggtatgcgaacttagccttatccaaatacccgtcatatacctagaatccgtacataccaagttgcaccatcgagaaggtatgcgcatgagctggcaggacgaattcaggcagtggtttcccatcacccgcgacaag

SEQ ID NO: 230762 - DNA, 198 bp, Homo Sapiens
acacggatcacacttctaatgacatcgaccgacggtcggaaaaatcggtttccagctcaatttccgggtaacgccgaacaaattccgccaccaccggattcaacagtgccgcccaccagcggcaaactgacacgcagcttgccgcgcggcgcgctgtgcgtatcgctgatttcccgttccgccgccgccaattccccg

SEQ ID NO: 230763 - DNA, 119 bp, Homo Sapiens
ccccgtgtcttatgttggtttgtccaacattggcttcaccatcagaaagtaatagcactcggctaactccataactgctcacaatatgggagcaatttgctgagcacccgactaaccag

SEQ ID NO: 230764 - DNA, 248 bp, Homo Sapiens
acggaacgtcgcgcaagtcgacgatggataatcggcggtgctcgacgcgatatccagttgcgtatcgaaattttatgaaccgatgctcaggtttgaaactcgctttccccgaaccccatgacatccatcccgcagccccgtaaatcgccgcgccagcagggttcgaagcagaccgtggacaccattctgcaggccacggatcgcgtacgtgccgagcacggctaccgcgggaacaaacaccaacctga

SEQ ID NO: 230765 - DNA, 230 bp, Homo Sapiens
gaagggggtcaccggcgtcgagaagggcatcgccaatactgtcgaacatcaacgtcggcttcctgtgcctgctgctgcttgttcgtgtttttgtgccgggacgacgctgaacctgctgaacggcatgttgcagaacctcggcgattatctcacctcgctggtcagccgcagcttcgatatgtatctgtacggcaaggctcgccaatggcagggtgcctggacgctgttct

SEQ ID NO: 230766 - DNA, 161 bp, Homo Sapiens
ggttattgatgaggcagatcggggagagtagatcgacgcctgaaggtcaggattgtggaggccagatggaagacgttgttctcaacgcccatgtccgcatacagctgagcaagacggacaaaactctggttggtagtttcgaagtcagcgatggcatcggg

SEQ ID NO: 230767 - DNA, 194 bp, Homo Sapiens
tggacgtatcacacccagaccttcgcgctgaccctgctgcgccgtggtgaccaggatgtgggcaccaactggaccatcggttacgatccgggtcagaacccgccgtacggtgaggccctcaaggctgcctacaagttcatcaacgtcggcaactaccagctcaacgtttcctgcggtgctctcacccaggaaga

SEQ ID NO: 230768 - DNA, 116 bp, Homo Sapiens
agcgcacttttcgaactggttcacgcagaatcgggccaacatacgataggagttggccttgagcttttcctcattacccagaatgaggtcgacttcatccatggcctcgaatttgg

SEQ ID NO: 230769 - DNA, 159 bp, Homo Sapiens
tacgtcccagtaggcgccaccgcttctgcgacagcacctgacggcgttagtgattgtcgtagctgctgtaggcgcagattgatgaacatggttttgtgttccatgttctgctggaattccgggctggccagataatcggccttttgctgcgcctcggga

SEQ ID NO: 230770 - DNA, 159 bp, Homo Sapiens
ggtacctgactggaggttaatatggtggctggattaatgcctgattgctacctcggatagagcactggtgagtacacccgctcgctgtaccaggtggtgaccatctgctgctggtggtgtcatggatcgcggcggtgctgttcatcccgtacctgggcg

SEQ ID NO: 230771 - DNA, 218 bp, Homo Sapiens
atctgtcgcttcggacgttcccggcatcgcactgccgtgctcggccgcattccctcgccggaagaactcgattacctgtgccgaaggcggatttgccggctaagaaaaaggggacggaggggattaagtcgtgtgtgccataaacgaattaatcccctccgtcccctttttcagtgccgatcagtacttcggcacgccgattgtccacgtcttcacgt

SEQ ID NO: 230772 - DNA, 272 bp, Homo Sapiens
agagatgtgcgcacgcaagttggaactctcttagcgaaagaaggagcgtccctgcttggttctctgggcttcaatacattgattggtcgggaaaaaccaaggacctgcgctacgtctccccataccttggaaatgcgctgctactcgatgaccatggtccgtacgtccatcccggacaagaacatctctgggttgagattccactcttcgggtctccttatccgccagacgatgacggactagaggtagcctcgcgccttattcgcgcacga

SEQ ID NO: 230773 - DNA, 142 bp, Homo Sapiens
tgcctagcggtattggtgcgtgcactgtgtctcgacgcataccagtcacgatcggcgatgcgcacccgctccagcggtggcggatatcggcgtcgggaccggtcgcgcgcagaaccgtgcgcaggctggaaatagcgcttga

SEQ ID NO: 230774 - DNA, 150 bp, Homo Sapiens
gcagctcgggcagatcgtcatggtgctgatcgtgacggccgtcatggcgcaaatcccgccgcgcgtgtacgaaagctgggcgccctatctgtatattttctgcgtgattttgctgatcctggtagacgccttcgggcagatcagtaaagg

SEQ ID NO: 230775 - DNA, 164 bp, Homo Sapiens
ccctgctgtcatagtcttgatcatacaggctatggtcgatggacttgcacttccagtaggagacaggcacgctaaacaagtgcatgcagctcactagatttcatcctacagtttccgaacagtgaccaccacaagtatgttcgacaagcctggcccacggccga

SEQ ID NO: 230776 - DNA, 109 bp, Homo Sapiens
catgttaggagacaggccacgccttgcaatgtgcatcagttcactgatttcatcctctagtttccggcacagtggccaccataagtatgtcaacaagcctcgcagaagg

SEQ ID NO: 230777 - DNA, 206 bp, Homo Sapiens
atctggttttttttgagcacggatcttgcctattgcccaggccgagtgatgtgggattcacgctgtggcccacctatgcctggccggaatatcctatatggtaaaattaaaggctgtattttcactgtcttgaagacgtttagatctaattggattttccattttctcctgcagtcaattgggtcacatcctttcaagccgacaat

SEQ ID NO: 230778 - DNA, 249 bp, Homo Sapiens
ctcataatagcctatatatgacgtaatcgtactaacaaatagacaaccggttccagaccgacagaccaccccgtctatccaagacgctcgcaacagccgacagaacatctcggtgcccaccaaaatgccgctaatgaagtaacaacaaccccgcaaacgttgtgtagattcccatggcactatgtgctaacatgttagtcgtatggagcagtatacccaaccgtacgaggaatcttgagcgcgcacacg

SEQ ID NO: 230779 - DNA, 337 bp, Homo Sapiens
  misc_feature (93)..(197): n is a, c, g, or t
  misc_feature (219)..(240): n is a, c, g, or t
atacagtgccaggatacctctcattatagcactacaatccttttttgggggggactggattatttattttgagacagggcctcactctgccannnnnnnnnnnnnnnnnnnnnnnnnnnnnnnnnnnnnnnnnnnnnnnnnnnnnnnnnnnnnnnnnnnnnnnnnnnnnnnnnnnnnnnnnnnnnnnnnnnnnnnnnatgtaccactacacccggctannnnnnnnnnnnnnnnnnnnnngtagagatggggtcctgctatgttccccaggtcggtcagtcggtcatgtggtacttcatttaggccaggtatggtgcctcggcgtgtgcagggtacc

SEQ ID NO: 230780 - DNA, 475 bp, Homo Sapiens
  misc_feature (47)..(56): n is a, c, g, or t
  misc_feature (217)..(380): n is a, c, g, or t
ccacgagcgcccatacagtcaggttttcctttagcaatagaacagannnnnnnnnnatcatcagataaagttgctgacgtgaatttaaaaagtagtttgttccaaacacatatacctttatttatttatttatttattagacagagtctcactctgtcaccccggctggagtgcaatggtgcaatcggctcaccgaatcctccgcccccccgggttnnnnnnnnnnnnnnnnnnnnnnnnnnnnnnnnnnnnnnnnnnnnnnnnnnnnnnnnnnnnnnnnnnnnnnnnnnnnnnnnnnnnnnnnnnnnnnnnnnnnnnnnnnnnnnnnnnnnnnnnnnnnnnnnnnnnnnnnnnnnnnnnnnnnnnnnnnnnnnnnnnnnatggtgcttcggcgtgtgcagaggcaccagactttaaaagcgcatagtgattggggatgatgtgtctcgatgtattggcgttcggcgtgtcggtt

SEQ ID NO: 230781 - DNA, 394 bp, Homo Sapiens
  misc_feature (88)..(97): n is a, c, g, or t
  misc_feature (120)..(173): n is a, c, g, or t
  misc_feature (183)..(269): n is a, c, g, or t
  misc_feature (271)..(350): n is a, c, g, or t
catctcagcccctgtcaatctggtttttgtccttatggacttaccaattctgaatatttcctataaacagaatcacacaatatttgannnnnnnnnnaaaactaagccttgctctgtctnnnnnnnnnnnnnnnnnnnnnnnnnnnnnnnnnnnnnnnnnnnnnnnnnnnnnnagttcaagannnnnnnnnnnnnnnnnnnnnnnnnnnnnnnnnnnnnnnnnnnnnnnnnnnnnnnnnnnnnnnnnnnnnnnnnnnnnnnnnnnnnnnannnnnnnnnnnnnnnnnnnnnnnnnnnnnnnnnnnnnnnnnnnnnnnnnnnnnnnnnnnnnnnnnnnnnnnnnnnnnnnntaatatgtgatcttttgtgtatggatcctcggcgtgtgcagggt

SEQ ID NO: 230782 - DNA, 170 bp, Homo Sapiens
ggagccgaggcttgttttttcccccaagtttgaagggaagggtgaaattttaagttaattgaaggctccgcttccgggtttcacccatttttcttccttaagcttccgaggaggtgggagcccagccccccagcctaaaaaacttttcaaggcaattttacctccgttta

SEQ ID NO: 230783 - DNA, 191 bp, Homo Sapiens
ggtccgggcggatgataatacaatcagaaacaactaaacttaattgaagcatgttaaaccctgcattagggccgggtgcatccggagtggcaaatgccagcctggaggcagctgttagggtccactccaggacctggagctgtcccttaagaatccctgtggatatccccctccgcatgccccacggtatg

SEQ ID NO: 230784 - DNA, 422 bp, Homo Sapiens
  misc_feature (77)..(225): n is a, c, g, or t
acggcggggtgtacaatgaaggtggtatctggtatagcaatcatcagatacaaggcaatagtcttattaagggcctnnnnnnnnnnnnnnnnnnnnnnnnnnnnnnnnnnnnnnnnnnnnnnnnnnnnnnnnnnnnnnnnnnnnnnnnnnnnnnnnnnnnnnnnnnnnnnnnnnnnnnnnnnnnnnnnnnnnnnnnnnnnnnnnnnnnnnnnnnnnnnnnnnnnnagctaccacactcagccctagcctacttgaaacgtgttcagagcatttaagttaccctacagttgggcaaagtcatctaacacaaagccctttttatagtaataaaatgttgtatatctcatgtgatttattgaatattgttactgaaagtgagaaacagcatggttgcatgaaaggaggcacagtcgagccaggca

SEQ ID NO: 230785 - DNA, 143 bp, Homo Sapiens
  misc_feature (59)..(59): n is a, c, g, or t
tgagctcggtaccgctggtacagttgtgggactgcatgctactgtctagagctgttccntggatctagaacttcatcgcccgctgaatgacgcacaggatggcgccccgaatgcatgccgccgaatgcattcggcgcgcagaa

SEQ ID NO: 230786 - DNA, 111 bp, Homo Sapiens
atggtgttctgctaatgaatggagcagacatctaatatattctatgccttaagagcagtgtaactaaatattgggatacttaacaattggttttattatgtatttgataaa

SEQ ID NO: 230787 - DNA, 254 bp, Homo Sapiens
tggggtatgtatagcttaggttaaacttgcgttattgctacaggttaagcactgcgttgtcccgtgagggatgtgagcataggctaatccgtttcgatgcagcattgctgcgatgcttgattgcatgtccctttagatcgtggtgatataaaaggtgaactcactggaacggggatgctgtgcctgtgtaatcttactacagagctaatataaaggctagggaccaagacctatggggggacactcgaggctag

SEQ ID NO: 230788 - DNA, 111 bp, Homo Sapiens
gagggtccgcggaagaggcgcactaaacaattagggaggatgaaggttgggcgcgacactcgagtgtctcgcctaatagaaattctagaaagaggaagtagagaatagaga

SEQ ID NO: 230789 - DNA, 209 bp, Homo Sapiens
atatgctagtctcatcgccctccatcctacgcatcttaacataacagacgaggtcaacgcatccctcccttcacatcaaatcaattggacacccaatggtactgaacctacgcagtacaccgactcacggcgagactaatcgtgcaactcctaacatactatccccccattattcctcagaaccgggcgacactcagggtaccgcagct

SEQ ID NO: 230790 - DNA, 260 bp, Homo Sapiens
cgcggcgggatgttgacgcgatgtgatttgccagtgctctgcaatgtcacagtgaagcaaattcaatgaagcgcgggtcaacggcgggcagtcactcatcactctcgttaaggtagccccaatgcctctgtcatctcaatgcagtgtgcgcgccatgcaatggcatgcaacgcagcattccccactgttccctcacctcactcatcccaggaggtcacagcagactcgcacattcgctcaatccatggatccatagcgtg

SEQ ID NO: 230791 - DNA, 219 bp, Homo Sapiens
gttgtgcacatctgctgagggcccgtatcactatgcgcgtgggtcatacagatcgtaatgtacagttgttgcagatcacggtggacgaagttgttgcgcaagaacttcgtccattcagacctgcggcggtctggatcttcggcgtgtgcaaacaacttcgtccaccctgatctgcggcggtctgttggctcggcgtgtgcaacacgccgaccgcccaga

SEQ ID NO: 230792 - DNA, 133 bp, Homo Sapiens
ggtcggaggtcgctggcggtgtggtctttcggcgtgtgcagggccaggtcagtatggacgaagttgttggtgcacacgccgtagtgtgcagaccagagacggtgtggagaagtcgcagtggacgaagttgtgg

SEQ ID NO: 230793 - DNA, 267 bp, Homo Sapiens
  misc_feature (173)..(196): n is a, c, g, or t
cagagtgtatcttaagtacatctttgagtagaggggcacggactagagtgtgtatgtagagaatctggagacgtgtctgggttcagcaggaaatggttccatgattgatgggtgatgtatgtcctaagtgtggaagagggtgtggtcgctcgggcacacgccgaggaaccatnnnnnnnnnnnnnnnnnnnnnnnngcggtcttaaaactgataaaaacagatactacactagatcttagccaaaaggctgagaagaaatatcagag

SEQ ID NO: 230794 - DNA, 207 bp, Homo Sapiens
tcgacagtacttcgttggactacgtcgggcaacaattatcgtgcactcggatcttgacagaagatgtctggagtctcggcgatgtgcagcaacaagttcgtccacactgacatcaagaagtgtttggaccctcggcgtgtgcagcaagaacttcgtccattgtgatctttccaccaacagtcaatgtgtggtgcctcggagtgtgca

SEQ ID NO: 230795 - DNA, 227 bp, Homo Sapiens
ctgggacgcgaataccatactcagtctggtagtcaccctcttgagtgtcgggatggacgaagttacaacgttcgtccactctgacttctcggactcgcggcgtatggtcactcggcgtgtgcagtttggtgtttcggcgtgtgcatgcacacgccgagactccataccaccctgaacgcgcccgatctcgtctggatgctcggaagtcgctgtggacgaagttgttg

SEQ ID NO: 230796 - DNA, 214 bp, Homo Sapiens
gtaagttgttgcgcgacaactgcgttcattaggacttgcggcggatatggacctcggcgttcatgcgcacgccgatggtcccatacagctcatgatggacgaaattgttgctgcacacgccgaggaaccacaccccttggtgcacaaatctcgatggacgaagttgtgcaacaacttcgtccactaggacttgtatggacattcggcgtgtgca

SEQ ID NO: 230797 - DNA, 289 bp, Homo Sapiens
aggatcctctcacacgccgaaatccctagcaacaacttcgtccatcctgatctgtatgtatgggctctcggcgtgtgcatgcacacgccgaatatccacacacacgccgaatcaccatacccgagcgcccatactatattctaagtgggaccaaaagaagattaacttccaggtggagtgacagccatgtgaatcatccacgcctttttcccacaccactcccagcactcattctgcagaagagatggaattcagtatggtttctcggcgtgtgcagggtaccgagctc

SEQ ID NO: 230798 - DNA, 322 bp, Homo Sapiens
tgctctcgaggattccacaacttcgtccattgcgatttgctcagtttggatactcggcgtgtgcagcaacaacttcgtccaccgtgacttgatttcaagaagtgtgtggaggctcggcgtgtgcatgcacacgccgaagacccaaactgcacatgccgaatgcccagactatcctcaactaggggaccctatagttccccgttgccttgaggacctcattctatcaagatgtttcaggtactggatctccgtggtatcagggaaatccgcgcgtagcttgtagagcctcgtggcagcttttccagctgcttcggagctcacc

SEQ ID NO: 230799 - DNA, 201 bp, Homo Sapiens
gaggattcatcacacgccgagtcccagacaagtcggtatggacgaagttgttgcgcaacaacttcgtccatagagaccgcaacaacttcgtccatcgtagaccttgaccaaattagaggagaacaagtctgggcactcggcgtgtgcagcaacaacttcgtccatactgatttgatgtagtttggtgattcggcgtgtgca

SEQ ID NO: 230800 - DNA, 230 bp, Homo Sapiens
acaatcagactggacgaagttgttgcacacgccgagtgtcatacgccgcaagtcgcagtggacgaagttgttgcgcaacaacttcgtccatcctgatctgatttgaagaagtgtgtggttcttcggcgtgtgctgcacacgccgaatctccacacaccacacgccgaatctccacactgcacacgccgagagcccagaccccttggtgcaccaggtcctgatggacgaag

SEQ ID NO: 230801 - DNA, 126 bp, Homo Sapiens
tgtgcacacgccgaatgtcacaccactctgacttgcaacaacttcgtccatcacgacctgcaacaacttcgtccacccggatctggtccatactgagcagaccggtatggtcgttcggcgtgtgca

SEQ ID NO: 230802 - DNA, 176 bp, Homo Sapiens
aagacaaaacgaaatgttggtcactcggcgtgtgccagcaacttcgtccactatgactttctgcgagtttggttactcggcgtgtgcatcggactcgcggcgttttggaccctaagtctggatggacgaagttgttgcaggtcaggatggacaaatctcagtggacgaagttgttg

SEQ ID NO: 230803 - DNA, 225 bp, Homo Sapiens
ctctacaggatcctgtgcacgcgcgagtactgtattcgcagatgcacacgcgagcatcaaaccgtgtgtcaccaagaggtccgtatggacgaagttgttgcagatcggtgtggacgaagtcaacaacttcgtccatactgatctgtgtggtcattcggcgtgtgcaacacgccgaagccccatacgtccgagagagtcaacatgtcattgtggacgaagttgttg

SEQ ID NO: 230804 - DNA, 163 bp, Homo Sapiens
ttctcgaggatctccgcaacaacttcgtccatacgcacctgtgtcaacaaggggtatgggcgctcggagtgtgcagcaacaacttcgtccatcatgatctgcaacaacttcgtccattccgatttgacttcaagaagtgtctggtccctcggcgtgtgcagga

SEQ ID NO: 230805 - DNA, 162 bp, Homo Sapiens
agcaggaccctgcacacgccgagccccatacacttcttcaatcccggtggacgaagtgtgcaacaacttcgtccataatgacctgtatgggttttcggcgtgtgcagtaacaacttcgtccactgggacctctcggactcgtctggatgttcggcgtgtgca

SEQ ID NO: 230806 - DNA, 223 bp, Homo Sapiens
cctgcacacgccgaatatcatacgccgcaagtcgaatggcgaagttgttgctgcacacgccgagactccagacgccgcgagtccgagagatcactgtggacgaagttgttgcgcaacaacttcgtccacagcgacctgggtctgggtcctcggcgtgtgcagcaacaacttcgtccacaagacctgatcttaagaagtgtttggagactcggcgtgtgcaggt

SEQ ID NO: 230807 - DNA, 133 bp, Homo Sapiens
caacaccttcgtccattccgacatggcaacatcgagacacattatccatcactatgcgctatttagtctggttcttcggcgtgtgcagtccactgtgacttttgcaccaaggtatggactctcggcgtgtgca

SEQ ID NO: 230808 - DNA, 255 bp, Homo Sapiens
  misc_feature (104)..(156): n is a, c, g, or t
ctcacacgccgagcgaacatacacttcttaaggtcaggtcacaagtggacgaagttgttgcagatccgtgtggacgatagtggttgctgcacacgccgaagaannnnnnnnnnnnnnnnnnnnnnnnnnnnnnnnnnnnnnnnnnnnnnnnnnnnngtgtgagccaccacacccggtctctctttttatttaatcgcaacaacttcgtccaccaggacctgatttcaagaagcgtctggaccttcggcgtgtgca

SEQ ID NO: 230809 - DNA, 112 bp, Homo Sapiens
tctagaggatcccggcaaacttcgtccattgcgatttctcgtatggtcgttcggcgtgtgcagcaacaacttcgtccatagcgatctgtatggaccttcggcgtgtgcagga

SEQ ID NO: 230810 - DNA, 180 bp, Homo Sapiens
gtgagtctagaggatccctcacacgccgagcctccagacgtccgagaaatccgaatggacgaagttgttgcgcaacaacttcgtccattctgatttgcggcggtatgggtattcggcgtgtgcagcaacaacttcgtccaccccgatctgaagaagtatggagattcggcgtgtgcagga

SEQ ID NO: 230811 - DNA, 178 bp, Homo Sapiens
ggacttagcacacgccgaaagcccatacccccacgttagacgctcgaaatcccagtggagcgcagttgttgcgcaacaactctcgtccattcggatctgtgtggactctcggcgtgtgcatgcacacgccaagcatccatacacttcttgaagtcaagtcatatggacgaagttgttg

SEQ ID NO: 230812 - DNA, 165 bp, Homo Sapiens
aacaacttcgtccaccctgagctcgtccacccggacttgaataagtgtatggtccctcggcgtgtgcatgcacacgccgagggcccaaactacatcatgtggaggtctgtgtggacgaagttgttgcaggtcactatggagtctggatcttcggcgtgtgcagga

SEQ ID NO: 230813 - DNA, 320 bp, Homo Sapiens
cgatctgaggatctcacacgccgaataccatacacttcgtgaaatcaatcggtatggacgaagtggtgcaggtccaaactacatcatgagatcttagtggacgatagatgtggcgcaacaagcttcgtccattctgatctgcaacaacttcgtccacagtgacttgctcctggagatggtttggagcttcggcgtgtgcatgcacacgccgaatgtccagacaagtcagtaagttgagctgtggtttaggctctgtacaagaggggcggtaaagatgaaggagtgggactgaggatgggtgtggtttttcggcgtgtgca

SEQ ID NO: 230814 - DNA, 327 bp, Homo Sapiens
gagactatgctgcagcaggagacagtgctcaccagagacgcgccacctggtgagagtatgcaaggcacggcgcatccacgtgccatgcacggacatccacccagtccatcgcaatcttccatgcatcggcaacaagacagcagcggcgctctgagcagtcaggccccagggttcagcagcagtagggggttgggacattcggcgtgtgcagctctcggcgtgtgcatgcacacgccgagtgtccatacgaagttgttgcatgtcttggtggacgaagtagttgcagcacacgccgagcacccatacagatcgtagtggacgaagttg

SEQ ID NO: 230815 - DNA, 116 bp, Homo Sapiens
gcgagtagcatactgcacacgcgaggccacactgcacacgccgagagcccagaccaaaatcgccgatcttcacgtgcacacgccgagtgcccataccataatcgccgatcttcacg

SEQ ID NO: 230816 - DNA, 112 bp, Homo Sapiens
ccggaccgtatggacctcgggtgtgcagtctggatcttcggcgtgtgcagcgagagtcatgcacacgccgagactccacaccgccgcgaatgcgttgtcgccgatcttcacg

SEQ ID NO: 230817 - DNA, 247 bp, Homo Sapiens
cgctgaacaatgacacggcatacgcagaggtcacgacactgcacacgccgaggggccaaactgcagcacgccgagcatccatagcaaaatcgccgatcttcacgtgcacacgccgaaaaaccacactgcacacgccgaaggtccacactgcacacgccgagggtccatactgcacacgccgagaccccacacggacaggtcacaggccgaaatcgccgatcttcacggatcttcacgagagcaatgt

SEQ ID NO: 230818 - DNA, 294 bp, Homo Sapiens
ggaccgtgacatcggcgttggggtctcggcgtgtgccgtgaagatcggcgatttcggcctcgtgaagatcggcgactttggtctggacgtgaagatcggcgataatgcattgacttcaagaagtgtatggatcctcggcgtgtgcagtatggattttcggcgtgtgcacgtgaagatcggcgattttggtttcgtgaagatcggcgattacggtctggttactcggcgtgtgcaacacgccgaagatccataccgtagtcgatcggcgactttggtctgggcactcggcgtgtg

SEQ ID NO: 230819 - DNA, 321 bp, Homo Sapiens
acgatcggtggacatcggtttgggcgttcggcgtgtgcagtatgggcgctcggcgtgtgcagtgtggttttcggcgtgtgcagtctggacattcggccacgccgaacgtccacacacttcttgaagtcaaaccataatcgccgatcttcacgagggcgtaatcgccgatcttcacgcgtgaagatcggcgatattggtatggatactcggcgtgtgcagtttggatgttcggcgtgtgcagttgggggcttcggcgtgtgcagtatggacactcggcgtgtgcagtgtgggccttcggcgtgtgcaattttggttactcgg

SEQ ID NO: 230820 - DNA, 335 bp, Homo Sapiens
ttggtcctggacactcgtgcgtgtgcacgtgaagatcggcgattatggtttgctcagtgtgggcattcggcgtgtgcacgtgaagatcggcgatttcggcatgctcagtgtggaccctcggcgtgtgcagtttggtcactcggcgttgcacacgccgaatgtccacacttaaggagtgcataatcgccgatcttcacgacacgccgaaggtccacactgcacacgccgagagcccatagtcgccgatcttcacgtgcacacgccgaatgtccaatgcgtagtcgccgatcttcacgccaagcgaccatacggcgtgctggagcaacccattatcg

SEQ ID NO: 230821 - DNA, 146 bp, Homo Sapiens
  misc_feature (39)..(39): n is a, c, g, or t
aaagacggcgatattgctctgctcagtatggtcattcgngcacacgccgaggatcagacggacaggtcaaagcgaagtcgccgatcttcacgctgaagatcggcgatttcggtctggtgcttcggcgtgtgcagtctgggggctgg

SEQ ID NO: 230822 - DNA, 185 bp, Homo Sapiens
cgcgaatacacacacttcttgaagtcatagcaaagtcgccgatcttcacgacgccgaggcaccaaactgcacacgccgaatcaccaaaccattatcgccgatcttcacgagatcggcgacttgctatggaccctcggcgtgtgcatgcacacgccgaagatccataccgatgtcgccgatcttca

SEQ ID NO: 230823 - DNA, 160 bp, Homo Sapiens
atggcgtaatggctgctcagtgtggagttcgggtgccgtgaagatcggcgactacggcctcgtgaagatcggcgattatggtatggtgtttcggcgtgtgcagtgaagatcgccgatcttcacgcgtgaagatcggcggttaggaccttcggcgtgtgca

SEQ ID NO: 230824 - DNA, 142 bp, Homo Sapiens
ccgtagatgggatatgcgtgacttaagaagtgtatggattctcggcgtgtgcagtgtggagattcggcgtgtgcagtctggacgttcggcgtgggcgacaacggtctgacctgtccttaagtatgggtactcggcgtgtgca

SEQ ID NO: 230825 - DNA, 195 bp, Homo Sapiens
ccacgccgaaggtcacactgcacacgcgagcctccacactgcacacgccgaatacccatactgcacacgccgagtgtccatacacttcttgaaaaagcgaagtcgccgatcttcacggatcggcgatttggtctgctcagtgtgggctttcggcgtgtgcacgtgaagatcggcgattttggtttggtcgctcgg

SEQ ID NO: 230826 - DNA, 184 bp, Homo Sapiens
acgggcggcgatttggcttggctcaggtatgggctttcggcgtgtgcagtatggactctcggcgtgtgcacacgccgagcccccaaaccatagtcgccgatcttcacgaaagcgaaatcgccgatcttcacgatcggcgattttggtttggtgcctcggcgtgtgcatgtggatattcggcgtg

SEQ ID NO: 230827 - DNA, 188 bp, Homo Sapiens
gtgaaagacggcgacttcgccctgcgaattatgccctcgtgagatcggcgacaacgctctgctcagtttggatactcggcgtgtgcaacgccgaggcaccataccgaaatcgccgatcttcacgcgtgaagatcggcgactacggtctggaccttcggcgtgtgcagtgtggactctcggcgtgtgca

SEQ ID NO: 230828 - DNA, 148 bp, Homo Sapiens
atttggctggacctcggcgtgtgcagtgtggacattcggcgtgtgcacgtgaagatcggcgatttcggtttgggttctcggcgtgtgcaacacgccgaggccccatactgcacacgccgagtcaccaaaccgttatcgccgatcttca

SEQ ID NO: 230829 - DNA, 149 bp, Homo Sapiens
atgcttcgtgaagatcggcgatattggactggacgctcggcgtgtgcagtatggttcttcggcgtgtgcatgcacacgccgagtatccatactgcacacgccgaagatccacactaggacaggtcagtccgtaatcgccgatcttcacg

SEQ ID NO: 230830 - DNA, 183 bp, Homo Sapiens
atgcctagtgcgcgtgtccgggtggagccgccgcagtgtgcaggtcttggtgggtcgtacgcagatattcgacacgagaactttgaagggccgctgcgggtgagcctctgaatcctagatgcgcggtgcccgggttggagcgcgccgtcaggtgcagactcttggcgggtcgtagcaagatat

SEQ ID NO: 230831 - DNA, 141 bp, Homo Sapiens
aagtgcccggctgcgcgctgtacgggcgcgatccgctccgggaactgtgccaggtggggagttggactcggggcggtacacctctcaaacggtaacgcaggtctcctagagcgagcttttgggttttaagcaaattaggtg

SEQ ID NO: 230832 - DNA, 241 bp, Homo Sapiens
ccactgccgtccatagctgtggaattacgattgcaccccggcagtggtctctatatcatgtcccgacatgtgctgaagagtagtgaaaatagaaccgtggtcgcatattccatatattctctagacatgcggtatccatggcgggtcgggcctgtatcgaacagtctccgttttacaaagtgaacgcttcagggccccggcgggacactctagctaagaccatcgagggggcgtcgatgat

SEQ ID NO: 230833 - DNA, 319 bp, Homo Sapiens
cccagattcctgagatttgcaggttgttgtcgggaatctcccgaagccctgcgatcgtggcgacaccaccgaggcgtccttgcgctgtcccctgtgaccaaaaacgtgcatgcccattggaataggtgcaactggtgggcacgttgatgccccatatcgctatggaaggggaacggtaatgacccagccaggtactggttccgagaaacccgacaaccttggtgactccagctctcgtggtgagtccagtcctgcccaggacggaggcacgaatctgccatctggagccgagcttcagcctgaggactcccagcacgat

SEQ ID NO: 230834 - DNA, 379 bp, Homo Sapiens
  misc_feature (223)..(223): n is a, c, g, or t
  misc_feature (246)..(246): n is a, c, g, or t
ctgtgtacatctccgccttactccgccttactctccgccttaccacccaagtagctgggattacaggtgtacgctgccacacccagctaattttttatatttttagtagagatgaggtttcaccatagttggccagagatggtctcagatctcctgcacctcgatgatccagcccacctcggcactcccaaaagatactggagattacaagtagtgagccacncatgcccgagcacgtaatttcanagtttttacagcctacaattttatccaatctgtaaaactggggatcgtaactaagatccacccacatggcgattgtcagagggactcgtagttcaacccaggtgatctcatagtcacagagctcaagcccgat

SEQ ID NO: 230835 - DNA, 223 bp, Homo Sapiens
tcttgagagatatcaggcgatgaagagacgtagtagcatgcgataagctgcgagaagatgagcaaacacacattgatccgcagatttccgaatggaggaaaaccggccgaaaggtcatcgtatactgaatacaatagggatacagaagcgaacgcagtgaactgaaacatctaagtagctgcaggaacagaactcaaacgagaggggctcctctagaagtcga

SEQ ID NO: 230836 - DNA, 205 bp, Homo Sapiens
aggattccacatagcaccacgactaggggattcatggataggtttatagcatgttgggtggttggagtaaataagtgaggcaggcagtccgcaagaggtaagttgtggaataaaaatgcattccggatactagtcataagagatcaggttcgtcctttagtgttgtgtctggttctcatttgttttgcagagttagtttgattag

SEQ ID NO: 230837 - DNA, 292 bp, Homo Sapiens
ctactacgcactactgcgctggcgctagtaacgcactgcgccaaaaggtcccccagcggctgccacatagtctctgcccatcctgagtgacgctgcacacttggctccacaggccctgctcgctccaccgcagcgggcacccagggggcatcgcagggcacctggctagaactaccaacaaatcactattatgacaggactagaatcccacaaacacacatcagcaggagacaatataaacgagggagcagtcggactataaaggtcacaatgtcatcccaccaaacatgcc

SEQ ID NO: 230838 - DNA, 229 bp, Homo Sapiens
  misc_feature (88)..(99): n is a, c, g, or t
  misc_feature (118)..(177): n is a, c, g, or t
ctgatgcgattcttgatgtaaaaaggaaaaacaaggccataaatggggatttgtgttggaattctctcaataaatgctttataaaacnnnnnnnnnnnnggaaagggattctccctcnnnnnnnnnnnnnnnnnnnnnnnnnnnnnnnnnnnnnnnnnnnnnnnnnnnnnnnnnnnngttcaaaagagtttcggtgcctatcagctcccaagcggggggaataaacagg

SEQ ID NO: 230839 - DNA, 486 bp, Homo Sapiens
  misc_feature (112)..(238): n is a, c, g, or t
  misc_feature (270)..(377): n is a, c, g, or t
ctgatggatcttgatagtcagtaaatcacagcatacatgcaaggaacaaaggagaaaatgaaatcatttacttggagatgagagaagtcaactttatcagtgaattcattcnnnnnnnnnnnnnnnnnnnnnnnnnnnnnnnnnnnnnnnnnnnnnnnnnnnnnnnnnnnnnnnnnnnnnnnnnnnnnnnnnnnnnnnnnnnnnnnnnnnnnnnnnnnnnnnnnnnnnnnnnnnnnnnaagggatcctcatgccaaggcctcctgagtannnnnnnnnnnnnnnnnnnnnnnnnnnnnnnnnnnnnnnnnnnnnnnnnnnnnnnnnnnnnnnnnnnnnnnnnnnnnnnnnnnnnnnnnnnnnnnnnnnnnnnnnnnnctacaaataacacattcgtcagattatgggcaagcattactgtgccaaagtagaaatgactcttctcagtgctaccaaattaattctagtcagactcagagtggggaga

SEQ ID NO: 230840 - DNA, 134 bp, Homo Sapiens
cgaatcagactctatatcatcttccaggcaattgattattgtacatatccctctttgtcactggattatgaattcctatgagagggaggttccagcgatctgtatatatctgtatctccagatgcctacatcac

SEQ ID NO: 230841 - DNA, 550 bp, Homo Sapiens
gaggaaaagatgacttcattctcgcggagaaagaaacaaccagcgtgcctatgcgtataaatcatctctctacagctacaaggaatagcatcccccatggagtagatcttcagtaagcgtctcatcgggtacagattgactatcagaccacggggattctgaagaagaaatcagaatgcggggctgagaatagttaaagggcttggagccagaaaactgtgccatgcataactccatcattctggttactgaccctcaggctttcacgaatacccactgtgctgcgctcgtcttcatcatcatagcctattagaagcaatggacgagaagcaatcgtgaaggaatcagtagtgaatacatgcatgatcccgtgtcgtagtctcatgcggtggcatgcttggtgcctgatccctgtccacagtggtgagggggctcggcacccctggctatctctcgggacctccctctaggtcctcctggtctgggctttgtggctctctgtttgcttttgggcagtatggctgtcctgtgatttcaggggcaggcgtgg

SEQ ID NO: 230842 - DNA, 128 bp, Homo Sapiens
aaaaaattaatattattttttttaaattggcaacataatataatattactagtagaaacccgacagcttcgccagccgcaaataattatttcattgggccaatattattcttcctaaatatttatctt

SEQ ID NO: 230843 - DNA, 229 bp, Homo Sapiens
accttctacccacgagaggagctgttccagcgtcaccgtttcgccaaagagccggcggcccaacacctcctcggtgaggcgcgctttcgcagaaccgctgcgttcgctttcggtttgcaacacgaagacgttaccggcgccgaactcacgctcatagcgcaggactgccaacgcgttgagctccggcgaaggcgagagggccaacaggaaattgatgggtaccgagctc

SEQ ID NO: 230844 - DNA, 270 bp, Homo Sapiens
attttcactacgattacgtacccgtgttagcgggtccacactatcctgctgaccttttgcgtttcaccatgatgtgtcaaaccagtttccacaggtcatactggcttgtggcggtcaacccttcatcgcgacatccctttttgcctccttcgatctctgctcttcctatcattgttaagcccaattcaccaagcgtttcattgtgcacccactactagggcacgttacctgcgtttagaccgtcttgagacaggttagttccaccctact

SEQ ID NO: 230845 - DNA, 591 bp, Homo Sapiens
  misc_feature (54)..(54): n is a, c, g, or t
  misc_feature (83)..(173): n is a, c, g, or t
  misc_feature (179)..(314): n is a, c, g, or t
  misc_feature (335)..(408): n is a, c, g, or t
  misc_feature (435)..(520): n is a, c, g, or t
tgatacaatcgagctcggtacctcaagaatcgcgcacatcaagcaaggaaaaancacaaagcaggatagcaccatgtgaggtnnnnnnnnnnnnnnnnnnnnnnnnnnnnnnnnnnnnnnnnnnnnnnnnnnnnnnnnnnnnnnnnnnnnnnnnnnnnnnnnnnnnnnnnnnnctgaannnnnnnnnnnnnnnnnnnnnnnnnnnnnnnnnnnnnnnnnnnnnnnnnnnnnnnnnnnnnnnnnnnnnnnnnnnnnnnnnnnnnnnnnnnnnnnnnnnnnnnnnnnnnnnnnnnnnnnnnnnnnnnnnnnnnnnntttattttatttaatttttgnnnnnnnnnnnnnnnnnnnnnnnnnnnnnnnnnnnnnnnnnnnnnnnnnnnnnnnnnnnnnnnnnnnnnnnnnngaaggttcaggcaagtctcctggctcnnnnnnnnnnnnnnnnnnnnnnnnnnnnnnnnnnnnnnnnnnnnnnnnnnnnnnnnnnnnnnnnnnnnnnnnnnnnnnnnnnnnnnggagggtgctctggtgttaggtattcttaccagacagaaaataaccaaatgacaggtatgactatatagtg

SEQ ID NO: 230846 - DNA, 203 bp, Homo Sapiens
taagaaggcatttaccaccacccacggaatcgagaaagagccatcaagtctgtcaagtccgtgtcctgtgtactgggccgcggtgaggtttcccgtgttgatctcaatattagtcccacagtactccacgtccttggtgtctgccctctccgctcacacttccttttaatgtttcgagctattggcaaccattacctccgccc

SEQ ID NO: 230847 - DNA, 386 bp, Homo Sapiens
  misc_feature (125)..(336): n is a, c, g, or t
ttgagataccaggaactaacgattatatggcctgtccaggatctgagagaagtcaacaagcgggtggaagacatccaccccatcgtgcccaatccttataacctcctaagtgggctcccaccgtnnnnnnnnnnnnnnnnnnnnnnnnnnnnnnnnnnnnnnnnnnnnnnnnnnnnnnnnnnnnnnnnnnnnnnnnnnnnnnnnnnnnnnnnnnnnnnnnnnnnnnnnnnnnnnnnnnnnnnnnnnnnnnnnnnnnnnnnnnnnnnnnnnnnnnnnnnnnnnnnnnnnnnnnnnnnnnnnnnnnnnnnnnnnnnnnnnnnnnnnnnnnnnnnnnnncagcacccagacttgatcctgctacagtacctgccccggcggccgctcga

SEQ ID NO: 230848 - DNA, 253 bp, Homo Sapiens
  misc_feature (142)..(142): n is a, c, g, or t
  misc_feature (159)..(159): n is a, c, g, or t
  misc_feature (181)..(181): n is a, c, g, or t
ccgtacggcacgcagtgtcatgcggtagaagcgagtgatgagaggtctaggggccgaaacgacctggtggctattctcataacttttgaaatgggtaagaagcccggctcgctggctgtggagccgggcggtggaatgcgangtgcctagctgggccancttttgggtaagccagaactgngcgctgcggtgatgacaccgaacgccgaggttaaggcgccctgatgccgtatacctcataactgaacccacg

SEQ ID NO: 230849 - DNA, 346 bp, Homo Sapiens
ggcgctcggcgccgttatgcgaaccgcgtcacccactacgtcaaggacggcctcgctggacctcggtccgaagggcgcggcctggtgtcacggttggtaccggtgacgggggcatccccgacctggacaagctgcccgcaccgttccgtacggtcgtggagagcgcctacggacacggtgtcggcgacgtcttcctgttcgccgctccggcggcgctgatcgccttcctgatcacgatcttcatcaaggaggtcgcgctgaagacgaacgccgcgaacgacgccccggcggaggccgaggttcctgccgcggtgctcgccgaggtcccgtccggtgccgccgcgct

SEQ ID NO: 230850 - DNA, 195 bp, Homo Sapiens
tgatgcggttcggacgtcatgaggttcgaatagaagccggcgtacagagtgtctagatcaccccctcccgcagagtaacaggcgtaaagactcgacctgacgttgaaaacgaactccaggtggacacaacatatagatctacgcaagagtggcattgtaacactatcgtgaatcgagcacgaatgagctaacgac

SEQ ID NO: 230851 - DNA, 221 bp, Homo Sapiens
agatctttcgcccctatacccaggttcggacgagcgatttgcacgtcacggatccgctacggagcctccaccagagtttcctctggtcttcgccctggccagggcataggttcagcatctttgcgggtctctaacacagtgcgctcgatgctccattctccccgggcgcggctgggtcgagacgtggccgagtggtgcgcccgtcgcgcggcactggcgaa

SEQ ID NO: 230852 - DNA, 123 bp, Homo Sapiens
agtctgcacagcgttatatctgtgggaaacttctggtgggaaaagcgtactagatggtacgattagtcgtttcgcgcctactagcctggtcgggctgatcgattagcacgtcaggacctgcta

SEQ ID NO: 230853 - DNA, 183 bp, Homo Sapiens
cctctagaatgctctaccaggcccactctggaacctacagaactcaaccattttcctccctgaatcccccctggggaacttaatcacagccatgaaggtttaaggcaccagtgacggcctgcaggcatgctcccccaggtcagtgggcagcaggcaagggatcgtctataggtctagctgcag

SEQ ID NO: 230854 - DNA, 165 bp, Homo Sapiens
gttatgggtcccacctgtctaccggctcattggtcgacaggctggccccaccgtttgggggtcttgtcgggggctggttactgttgcctcgcctctgatgacgagggctttgtcgaggtaagcatggctatagtgccgccgccttgcagactctcactgtagcct

SEQ ID NO: 230855 - DNA, 286 bp, Homo Sapiens
caacattaagtatagtgcgcatcagaagttgaaagcctggtcgcaatcgatatcgtaccgcgcgggaaagatgaaaaattattaccctaaagtcactacatatatctaggactaacccctataccttctgcataatgaattaactagacatcactttgcaagcgagagccaaagctatgacgcccgaaaccagacgagctagctaataacagcttaaagatcacacccgtctatgtagcagaatagtgggaacatttataggtcgaggcgacaaacctaccgagcc

SEQ ID NO: 230856 - DNA, 474 bp, Homo Sapiens
gacctcagagggtgctcatcttcgattccgtctgccatataaatgcccgacttcaacgcagcagccatgtccaccacaccatctttatctaaagatggtgtgggcacccaggcaaattccgccttcaaattaccttccttaagcgagaaagacatttcgccattttcaatacgctcagccacattcagcaggatttgaccagcctccggcccttcgttgccgttttcaactgcaccgtttgaaatgccttcaatcaccaagcgtaagccaccttcaggaactggatcagatggtttttcgattgagtacttaaacgaacccaccgcattaccattgacatcgcggagacggagactgtagtccttcaagaagtcatcggctgcgatgtcgctcgcctgttctttcaaaatacggctaacttcgagcttgcgaccaacatccgcaaaagccgcattgtcagtattgtcaatggtc

SEQ ID NO: 230857 - DNA, 114 bp, Homo Sapiens
gtgctgttaaacgggcatgacttaatcaacgcaagcttatgacccgacacttactggagaattcctcgattcatggaggaataacttgcaatccccgtatctcccatcagcacc

SEQ ID NO: 230858 - DNA, 132 bp, Homo Sapiens
cgattctcagacgggtgcgcgaattcacacactggtgtgctaattactcaagccacccccgatcggtctgcgtcaaccaatttcatagacgagatgagttgcattcagccaacctagatcgatcaatagtct

SEQ ID NO: 230859 - DNA, 144 bp, Homo Sapiens
ttaaggctgaacacgaggtggtgaggttgatcggggttcatcgaattacagaacaggctcctctacagggatatgaaggcacccgatctgagcattagcacccgtctgcaaaaggggatcctctaatatctcgaccatgtcaga

SEQ ID NO: 230860 - DNA, 325 bp, Homo Sapiens
gacttgacctccaatggatcctagttaaaggatgtaaagaggactcattccaattacagggcctagagagagacctggattgatattttacgccactacctactcgggtcgggagtgggaaatttgcagcgcctgctgtcttacttggatgaggcagccgctaataagaattcatctccgaaatcgaaccctgattcgctgtcacccgtggtcaccatgttaggcacggcgactaccatcgaaagaggatagggcagacgtttgaatgactcatcgtcgccacgaggggcgtgcgatcagctcaaggttatctagagttaccaaa

SEQ ID NO: 230861 - DNA, 222 bp, Homo Sapiens
tgtctactatatgtgtctctatagattaacctgctgtagacatttcatataaatgtaatcatacaacacgtgattgtaagcgttagggtttaataacttcgtgtaatgtattatcagattgtaaatctcaataacagcgggcagcactctcaacagacgcatggtcttcagtaatgggtgtagcagtaggaatacatgtgccatagtcaactgtgaaactgt

SEQ ID NO: 230862 - DNA, 233 bp, Homo Sapiens
atactgttgacttgatgccgaatggtatactcaatgtcgctgctgtggatgacagctacggcacgcgagaacaaaattactatcacgaatgacagggccgttggagcaaggaatacattgaacgtctggcccaggaggccgagatgaacaaagctgaagatcacaagcacagggacacgggtgtcatccacgaaattcacttacagttcctatagtcccaactaacatgaaag

SEQ ID NO: 230863 - DNA, 140 bp, Homo Sapiens
aaggatcagaaacctagatggacgagtaccacaggagtgctatagctgatcagtgacctgcatctgtgaaaggataaaagtaaaacaacaagggtggataacaaacgtctcagaccagccacagttaaagacataataga

SEQ ID NO: 230864 - DNA, 511 bp, Homo Sapiens
  misc_feature (263)..(322): n is a, c, g, or t
cttatccattcatgcagcgccactaattagagtgacgaggacatttggatacctataaggatagtcatagtttgtcgccctgtgtaaacgggcgtcgtggaatctctgcatcattgcgatacctagctccggggtgcaatccaatctcgtgccacagacatccgacgttgtggggaggatccgctccagttaacatgcccaggctactagctggagtactggccagtggatgggaacagtcagtgacatgcaagatcgcgtcnnnnnnnnnnnnnnnnnnnnnnnnnnnnnnnnnnnnnnnnnnnnnnnnnnnnnnnnnnnnatgagccaccgcacctggcctggctaaattatattttgtaatgtggatatgccatattttgtttacccattcatccgttgatggacaggacatttgtttttttctaactttttggctctgatgaataatgctgctgtgaacatttgtatacaagtttctgtatggatgttttgagttctcttgagtgga

SEQ ID NO: 230865 - DNA, 247 bp, Homo Sapiens
tgaattgacgacttgttattagctcaatctcggagtggctgaactgccacttgatccctctaaagaagttgcgaggacgccggaccgctcggggggtcgcgtacctaagttagcagtgccagcagtcgtcgtccgttatcgagaattgaccagcacaaatcgtctccaccacactaacgaacgttacatgcaccgaccatcccacgtgaactcgagtaaagagcgtatcagatcttgtcaagtcact

SEQ ID NO: 230866 - DNA, 318 bp, Homo Sapiens
  misc_feature (169)..(188): n is a, c, g, or t
accggtccttctcttgatgtgagtaagcttcacaaagagattacatattacccaagacatgtaagtgctccaaaaagaagccaaatccaggcacacagtgcctttacagaatgtgcctgatacttataatttactgatttaatctgaagtgaacataatacttagttgnnnnnnnnnnnnnnnnnnnnggatccccttccccctggggccctatactttctccactgcaccctatcaagtttgggccaaaacgcagagtctttcgcagcccttttctgtggccaaaacctttctcccttaaaacattccgtggttaac

SEQ ID NO: 230867 - DNA, 340 bp, Homo Sapiens
agcatatgcagtgcaagagtagctgacagtacacagaaaaccggtcctcagagtcagaatattactctacatactctcgtaatgttcacgatgtctcctgatactgtgccacatgctcctagatattttaaagcaggatatacctctttaggaagtatatcctgagttactctatccaactatccgtcaggcatcactaccactcctttttcttcatactttgattctcatttttccttttcccttcacgacctgtctcactttgctgtaagttctctataaactagtattggtcaacatactgatactctcctccaaaatacattagcatcatctcttc

SEQ ID NO: 230868 - DNA, 306 bp, Homo Sapiens
  misc_feature (61)..(102): n is a, c, g, or t
catcccccccttacacttccttacccttctctaagataccattcttcactttcctcaggcnnnnnnnnnnnnnnnnnnnnnnnnnnnnnnnnnnnnnnnnnncgcgcgcgcgtgtttagaggcacagtcttgcgtgtcgccccagttggagtgcagtggggtgcctgctaggtacaagtgattcttcgtgtctcagcctcccaaatatctgggactacaggcgcatgctaacaccaccgagctaattgttgtatttttagtcagatatggtgcattttgccatgctggccaaagatggtctttgaa

SEQ ID NO: 230869 - DNA, 496 bp, Homo Sapiens
  misc_feature (70)..(417): n is a, c, g, or t
cccgtacacttccttacctgataactctcattagagcaatatatgctggaagcagagggctcttgttagnnnnnnnnnnnnnnnnnnnnnnnnnnnnnnnnnnnnnnnnnnnnnnnnnnnnnnnnnnnnnnnnnnnnnnnnnnnnnnnnnnnnnnnnnnnnnnnnnnnnnnnnnnnnnnnnnnnnnnnnnnnnnnnnnnnnnnnnnnnnnnnnnnnnnnnnnnnnnnnnnnnnnnnnnnnnnnnnnnnnnnnnnnnnnnnnnnnnnnnnnnnnnnnnnnnnnnnnnnnnnnnnnnnnnnnnnnnnnnnnnnnnnnnnnnnnnnnnnnnnnnnnnnnnnnnnnnnnnnnnnnnnnnnnnnnnnnnnnnnnnnnnnnnnnnnnnnnnnnnnnnnnnnnnnnnnnnnnnnnnnnnnnnnngccccatattactcactctccatctgagagtgagccgagcacatagcattcttggcatcagtagcacaagggtatgaag

SEQ ID NO: 230870 - DNA, 219 bp, Homo Sapiens
  misc_feature (54)..(104): n is a, c, g, or t
  misc_feature (126)..(172): n is a, c, g, or t
ccctagcacttcctgtacctgggtctataggtgggcgtcaccatactccgctannnnnnnnnnnnnnnnnnnnnnnnnnnnnnnnnnnnnnnnnnnnnnnnnnncgcgcagagatggggtcccacnnnnnnnnnnnnnnnnnnnnnnnnnnnnnnnnnnnnnnnnnnnnnnnaggggtaaaacatgtctctgtcgcgcaagatgtatctcacatattgt

SEQ ID NO: 230871 - DNA, 342 bp, Homo Sapiens
cccgtagcacttccttacccgttgatgtcccttcttactgactttccatccatcagatcctttcgcctctattgctcgatcataaatctccatctgtcttagatgcctttggggacgtagagtccagaactttctcctgattgccataatcctgagtataatgtgtgcttacaacgtttaattaacggggctacttctcttggagcagctagtcctggtgggttgtcatggagtacaacttatccacatggtgctgatgtctgactaaggaggtatctcgttatgttttattaatgcgatctgcagaggatgttgatgggacgatagtgttctcctaactgc

SEQ ID NO: 230872 - DNA, 152 bp, Homo Sapiens
acccttataggaaaggttaaaaaagtaaaaggaaccggaaatcttaccccgcctgtttatcaacaaacatcacctctagactatctacccagatattagaggcaccgcctgcccagtgacacatggttctaacggccgcggtaccctaaccg

SEQ ID NO: 230873 - DNA, 568 bp, Homo Sapiens
  misc_feature (106)..(396): n is a, c, g, or t
gatgcgtctccgactgctcatagtaacactaactagactatcgtatagtttaaggcttcatcatacacaccaccggccaggctacggatggctcatgccggtcagnnnnnnnnnnnnnnnnnnnnnnnnnnnnnnnnnnnnnnnnnnnnnnnnnnnnnnnnnnnnnnnnnnnnnnnnnnnnnnnnnnnnnnnnnnnnnnnnnnnnnnnnnnnnnnnnnnnnnnnnnnnnnnnnnnnnnnnnnnnnnnnnnnnnnnnnnnnnnnnnnnnnnnnnnnnnnnnnnnnnnnnnnnnnnnnnnnnnnnnnnnnnnnnnnnnnnnnnnnnnnnnnnnnnnnnnnnnnnnnnnnnnnnnnnnnnnnnnnnnnnnnnnnnnnnnnnnnnnnnnnnnnnnnnnnnccaactccagcatcacttgcttggttcccaggccaggaagggtgccattcctctggctcctgctgccccgctgctctgcagaagcagtcatgctgctctctagtatttctactttattgactgtttctgctttccccctcttaactgccagttcctggagggttggactagg

SEQ ID NO: 230874 - DNA, 110 bp, Homo Sapiens
aatctgtgacgaagacacccattgtggctgttaactgctgctgcattgtgagctcgtcgcaaattacgaactctgggtagtgtgccgtgtgtcccactggcccgactgca

SEQ ID NO: 230875 - DNA, 206 bp, Homo Sapiens
tgattgtatatacttgggctgtatacttgtcaagtatcagtgttgttaatcatgacgcaggcttatgcggatgataatgttttcatgtaacttatactaacattagttcttctatcgggtgatgaattggtccacttgggatgtgacggagttcacttatatgtttgggatttataaagtagagggtgtagaagcttgaacgcttt

SEQ ID NO: 230876 - DNA, 323 bp, Homo Sapiens
acgcgtagcgacctcgccacgcctgtatatccggtaatgcggattactaagacagtcttgctggccgaaacgatctcatccttattctccagtaattataactgggttgtcccaggtggatcctgtattagataaaactgacatgacatgtagctgtgtgcactgtccgtcgtttgcataacggccccaaaggcattatcccgagtgatacctgctgagaaaaagctccaaacttttaaactttgtatgttttgtggagggtgcacaatttcttctaatatatcttcaggtgttttaaaatttaatttgtttttaatcctaag

SEQ ID NO: 230877 - DNA, 101 bp, Homo Sapiens
ccctacaacgtatcctgtacggtcatggtaccggggtcgttaaacatgatgtcactagtgcaggcgtgtgcctcgtatctaactgggtgatgcgtagacgg

SEQ ID NO: 230878 - DNA, 189 bp, Homo Sapiens
ctgtcaagaactttctactgctgagcttggcaaggtcaagcctgtgttgcagtgcgggcaagctggcccagcctggagctggcgctgtgcagcactcaccccgtggcagtgtgcggccctcagttgtcagtggccccatcctcactgcttgttgtcatatgctccagtcttgtgttttgtactatatca

SEQ ID NO: 230879 - DNA, 364 bp, Homo Sapiens
cttatttacactaattttcaattaggaaaccacagtgactctaagcaacactataactctgacccattgttactaggatctatgcaatgtgggacaccaatatctgaactgacccatctgccttcatccgtgcgacatccaccattgtgctctgaatgccttggattctacgctcatttcgccttcaggggtcccgctcacgacctcgtaatcataatcattgttatgacccgcatgtgcagatgacctgggaggattctgactcagccccacaactggagcaggagagcaccacaccctcctaggcctcctggagcctcgccaaggccttccttagggtatgacattcggatgtcaggagacc

SEQ ID NO: 230880 - DNA, 203 bp, Homo Sapiens
ctccgttattgcgctctgaatccggtacgtcgcgttaagaggaacgggcgcgcaacggcgtgatccttgaggatcttgtccgttgcaatcgaggtccactgcgtgtcgtcgaaaccgtcttgttcgttatcgaagtagagcgcgtcgaccgcctcgcccacccactggtcaagctcgtttttcagcgggccattgggcaggga

SEQ ID NO: 230881 - DNA, 144 bp, Homo Sapiens
cgaattatgcgtcgccctcgcggcagcagggatgcagcgtgctggatcgccgcctgcgaccctgcaatcggcagacacgccgcgcgcatctgatcacgccgtaggtgcgcggaggctgcgcttcgaggccatcgtcttcgggca

SEQ ID NO: 230882 - DNA, 354 bp, Homo Sapiens
  misc_feature (35)..(35): n is a, c, g, or t
gtgagctctgaatcgttccacactcggcagtcaantagcataaaaacccggcaacatgattgccattcgcaacttccagagtgaagtcaatttctcggagattgctttcagcagtaacttttgtacccgcttcggaaatgatccgggcgatttcattttctcgcccaagatcagaaaaagcagcaccctttgtatgatcggtattgagaacgataaacccagcatccttaccatcaaaaacagcatactttcccgccaccagcgcagcacaccacgcatctaaagacggcgactccttccatccggcaaaggccgcgctttgcgacggggaaccgccaaaagagttgacatcca

SEQ ID NO: 230883 - DNA, 162 bp, Homo Sapiens
gtcatccggcaagagaagtggcacctgcctgaaatttggaacttggtgagcaacccagatgtgagcagataccaactgtaatcagatatttcctgatgctctttacgtgagcgggtttgcttatcacagtactcaggcaaatccatggtgtaaggtttttta

SEQ ID NO: 230884 - DNA, 204 bp, Homo Sapiens
gagctcggcccggctgacgtctgaatccctttcttccggcaatcttttcgtcacctcgcatctcctcccccgtctgttaaccgtatcaccaccaccggtgtgctctgtccggtcaacgggatcgccgtatgcgcatccaatacaacccggtatccccttacctgtgtttcatcaaacaataatgtaaagggtttcatttccagc

SEQ ID NO: 230885 - DNA, 215 bp, Homo Sapiens
tgttaggtacacgtcctggacttcgtcaacgatgttagcgggccagcgcttcgatacccaggaggcgcaggatgtcttgcggatcggccgggccgtacacaatcatttcacccttgttcaccacctgaccgtcatgcaccagcacctgcttgtctttggcaatcaggaactcgtgtttttcaccgtccatatcggtgatttccagacgctgctta

SEQ ID NO: 230886 - DNA, 273 bp, Homo Sapiens
gttacgctctgaatccggccgagcagcggggtgaattccacggacgttcagcttgccgagcatcatggcttcaaacgcgcccttcacgccgtcgatcgagatgatggtgatgtccttgcccggcttgagccctgcctcttcaatggcctggatggcaccgatcgccatgtcgtcgttgtgcgcgtacagcacgttgatcttcttaccctcggccttcaggaaggcttccatcacttccttgcccttggcgcgggtgaagtcgccggtttgcga

SEQ ID NO: 230887 - DNA, 129 bp, Homo Sapiens
cgcggtcatacagggcctgttcaggcatcgagcacgaagtctgtactcatggtgttgctcacgcgccagccgacgatgcggcgagcgaatacgtcgatgacgaagccacatacagccagccttgccagg

SEQ ID NO: 230888 - DNA, 156 bp, Homo Sapiens
ttagaggcgaagatgttgtaggtataggcgatacacactgcccggtatcggttagcgccaaccgtcgtccttcgcgagtgaacaagtcttcgccgatacgctcttccaactgacgaatctgggccgagaccgccgattgagaggtatgcaactcct

SEQ ID NO: 230889 - DNA, 225 bp, Homo Sapiens
gaaaacgtcccgcttgaaatctcgtaggtttcgtcgtcattttcttctaacctctcttggttttgtatggctgaatccaccttctccagcccacatagttggatcatatcggcaaccatttcacctggtggtttttgattgttgtcgatataattttcaatcatcttcgaaatattctggtgcccgaaaatcgcaccaacgttatgacaccattcgcgacctttg

SEQ ID NO: 230890 - DNA, 229 bp, Homo Sapiens
gtgcttctgcattcctatttagactggccagccgtggctttggcgtcttgtggcgttgtctgtgtgggtttttggttactacttacgtgctgtgaccgaagagcgtcatctgtccgggactgaccctgattacttgacatatatgcaatctgtgccttaccgttttattcctcgcatcttttgaagattattcatttggaactggctgaatgttttaatcgattcagag

SEQ ID NO: 230891 - DNA, 473 bp, Homo Sapiens
ttcccgcaatggcatcatatcgcgagagtcgtatcccgtagaaagaaatttcttatcgaaagaaaaggaaaccgcaccacggtggtcaacaagatagccgacatcttgcccccaaagcttcaccttgcaagtaaacgtttcagcatgctttgccatacaaattacctctcaaactcaccatgaattcatcaaactaaccattagctcacaacggcttcgcccttcgacaagcgccttgcgattgaaaataatacgttcctttcggcatcgtaattaggtgcatgcttaaattgatcccatccaggcatgctggttttaaagtccggccagatatttccctttggcctcacaacctcaataatctttctgccatcaacgtgcagcaatccccacctttctggcaagtcttctttttcaatcacacctggagggcaaatgaaaaaccgatatatccccagaccaccttcagatcg

SEQ ID NO: 230892 - DNA, 137 bp, Homo Sapiens
atcacaggttggcctcgtacaccagggcccagtggtccacgatgttgaaggggatttccgggtcgtagcaggtgcgcagctgctgccagaccagtttctcgacgtcctcgtcgctggcgttctcgggaaggctcagc

SEQ ID NO: 230893 - DNA, 293 bp, Homo Sapiens
caatacacggttgaactggtaccttgcccggtcgaagtgcgtggtcatcatgtaccactggcgtgctacccagaataaatactgatgtcgaaaccagttaccagcacggagagacgggtggaagtgttcgatgtccggtgtttcttccggccaggccatggtctagaacggtaccagtgcagaagaaaaccaggtgtctgagcacctcgtcatcgcgcttcattgcaccggctataaccggcggaatctcgcgttgggttttggcatcaggggactccctctaaagtcgacct

SEQ ID NO: 230894 - DNA, 491 bp, Homo Sapiens
tcgctcggtaccggcgttgcgctctgaatcctaccggaaaatgtgccgtggtctgttgttactcatgtgttatcaggcagaaagttgatccagcagttgtaaaatctgctgccattcgtcaggcagtgacgggggtgatagacaaccggctgcctttttgcagcacacgcattgacgacagcgacggcaccgcacgttattcggcaagactaagcaagcgggttttacgtacacccttcacatccaccatcatccagcgagggttttcacggcgtcgccttcggatcaaaatagtggctggaggagtcaaattgcgtgtgatccgggtaagccgtgctgacgacttctgccatgacccgcgataccgggcgcaggacaactcgaatggtaaaacagaacaccatcaccaatctgcatcgcatcccgcatgaaattcctggcctgataattcctcacgccaaaccaggggatggaagatgtagccatcacat

SEQ ID NO: 230895 - DNA, 471 bp, Homo Sapiens
tcggaccgcgtgcgctctgaatccagcgagtccaggtcggcaaaatcagatcatctgcccacgcccctgcttcccatttttaacaccacctgcgttgccaacaaatcggataattcttcttcaagacgggtgatatcgcgtgatttttcgaccttatcacgtggttttccggtggtattagattcagcagcggtctttgcaaccagtttttccgcttcacgcaccgacatgcgcttggcgacaatttgattcgccagctgaatctgggttgcgccatcggcagacagcagggaacgggcatggcccatgtcaatatcgcctgccgtcagcatggtctgcacaggctttgccagatttaacaagcgcagcagattggatacggcgctgcgcgagcggccgacggcatttgccgcctgttcatgagtgaacgaaaaatctgtgatcagacgatgtatgccttgcgcctcttcc

SEQ ID NO: 230896 - DNA, 475 bp, Homo Sapiens
ggtacgctctgaatcccgtcgttgcgctaccgtgtaatcagcctgcctttggttttgacagcgaaggcaaagccaaaggcggattcacccgcgatggtcgcgccgacaccttggcggctcaggctgcgacaccgtttctggcagcgcatgagatggcaaacaaagatgcggccgacgtggtcagtaaagtacagcaaggcagctatgccaatgagtttaaagccgctttcggcagcacgattttcagtaataccgacaatgcgttcgaccgcattctgtacgccttgcagcagtatcagaaagaagatgcggattttcatccgtatgattccaaatacgatcggtttttagcaggccaggcagttctcagtgatgccgaattacgtggtctggccttgttcaataatccggtcaagggcgattgtgcggcctgccataccagcagcaagggcgcaaatggtttggcaccgttgtt

SEQ ID NO: 230897 - DNA, 292 bp, Homo Sapiens
tcgatctagaggatcaattgagtatagtagtacgcttggactgggtgaagtcttagcatgtactggctcggaggtggggttctgctccgaggtcgccccaaccgaaattttaaatggcagtgttgggaagttataggacctggtgggtttggttaaggtactggtttggctattatataaatctaaagtctccataagggtctccttcgttcattgcttgttgtcattgccctgccttctttcactggcgcaggttcaattttcactgtggtttaaaagttacagagaacag

SEQ ID NO: 230898 - DNA, 205 bp, Homo Sapiens
  misc_feature (51)..(148): n is a, c, g, or t
tataaataatataacaacaaccacaaataacatataaaccataagatacannnnnnnnnnnnnnnnnnnnnnnnnnnnnnnnnnnnnnnnnnnnnnnnnnnnnnnnnnnnnnnnnnnnnnnnnnnnnnnnnnnnnnnnnnnnnnnnnnttgcatagtcatttctctgctgtggggataaatgcatatgtgattgattgcttcctt

SEQ ID NO: 230899 - DNA, 184 bp, Homo Sapiens
ttcatcgtatcgagcggatgtccatggtagcgatagtagcaacccgctacccgaaagtacagtagcgattcgctgttgatttttcggtagcgactcgctaccatgactttcatcccggagatagtcgggccagccgcaagccttcgatcaggcggcttgcggcttgtacggatacggcggggct

SEQ ID NO: 230900 - DNA, 296 bp, Homo Sapiens
  misc_feature (45)..(163): n is a, c, g, or t
ggccagcttggctggtctcgacgtgaaaaacagaggctggtcaannnnnnnnnnnnnnnnnnnnnnnnnnnnnnnnnnnnnnnnnnnnnnnnnnnnnnnnnnnnnnnnnnnnnnnnnnnnnnnnnnnnnnnnnnnnnnnnnnnnnnnnnnnnnnnnnnnnnnngtctttccacactcagccagctgagtgagttgcgtaaatccgtctgcattattccacgacacgcttgtgccagagtgactggaggacaagctcgagctatactctcgtcttgtgtgatacccgtctgagtcac

SEQ ID NO: 230901 - DNA, 331 bp, Homo Sapiens
  misc_feature (126)..(182): n is a, c, g, or t
cgtcatgtgcagtgttagttcttgtcagcatcgggatgagctgtttgtagtgaagagctgggcctggtgagcccccgggatgatgggtggggaccatctgtgctctcctggaaaggaaattgtggnnnnnnnnnnnnnnnnnnnnnnnnnnnnnnnnnnnnnnnnnnnnnnnnnnnnnnnnnattttatgggaaaggggaaactggtttccaattggacccctggggggttggtttaccaaaagtccccaaaaattttctattgaaattaattatttgcctgattaaagccccaaggggcccccttgggttaatttggctttattgggcag

SEQ ID NO: 230902 - DNA, 156 bp, Homo Sapiens
tacaagtgaggtaggtaggacaaagaaagtatgatatactatatgatgagtaactagattatttcacatgtgataggacatcagaatgaaggcatgaccagagtgatcacgaatccgaaaagatctctcagctcataattgtttcaagtgttgaat

SEQ ID NO: 230903 - DNA, 365 bp, Homo Sapiens
caactgccttggattcaaaccgcattaaatatagtaatgtctcattcttattccataatcactactttaacaaatcactgcatctcactttaccaggcatgttcaagggcaaaacattccatccattattctgcacaactgcatagcacaaaatgccaaaccagcatttctaggttagcaagtacaaacagcccatatgcattcaacggctcaaatgctcacaagggccatttgcatcacaaattctcattccattcctgcatgcaactctctccaatcacaccagcacacgcacacaaattctcgttaaccatgatccactggtcatctgtcagcaaagcaatagctaatcatactccactgcc

SEQ ID NO: 230904 - DNA, 330 bp, Homo Sapiens
gagacagtatggtaacagatgggagcaggaatgtgtccagtgccacgcttgcagtgctcttcagtaagccagagagatgtacaatgtctaccaaaccgatttctccaaggcttttgcaagaaatgggatttggtcttgcaagatgaatgagggaagaggtcctcgatggcttctaagagagtcaagcccaatggtcttccaatactcacttgcataaagtcccatctgggtcccccaaatccaggaaggtccctggtggcaggtccccctcttgctctcagggacctggggctcttgaaggtgctggtccctgggaaggaggatcgagga

SEQ ID NO: 230905 - DNA, 275 bp, Homo Sapiens
cggaaagtgcgctcgcgaaattttggcagtctgggacatgaagcaccgaggtaatggtgttcaccgcgcccatgatctgtgtactgcatctacgtgcaacctttacagtttactgatcgtcgtttatactactgatatctggctgctgaagctatcttctaggtcaatggtgcgtcattgtcccccgctccatcctggccaccgctctccaagaatttcttaaaaccatctagtgtccgctcaccgttgtaatcaatgaccgttctgtctgcact

SEQ ID NO: 230906 - DNA, 203 bp, Homo Sapiens
aggatgctctcgaattcgctccctcgatggtcatagcttggtggcctagatgtgaagatagtcctccgcaaaaaaatctcaataaaatctgaaataagtcaagtgtattgagcttgcacttaaacggaacttgcctgtgaatttcgaggtttggtataaatagcgtgaagtggaaaaccaggctctccaggaatgggaaaact

SEQ ID NO: 230907 - DNA, 219 bp, Homo Sapiens
tctcatctagatgaatccatagctgtagtggccttcgagagtttatactaaagttagcaaaccaagaactctatgatgacgtactatgtatttattagccacagacaattctatttactacaaagacaaaggccagcatttaactgtaatataacacttttccaaatgggaccctaagaggagctgtcagcgtgtagtatcttccttcacagtatcatg

SEQ ID NO: 230908 - DNA, 191 bp, Homo Sapiens
tctcatcttctagaatccagatcagacctaccttcagttcaacaaagccaaattatgacttatatgaagaaatggggaaagtcaagaaaatagatgcttctacagtctgtcggatgaacgttgctggatgaagttgtggcagattttatgacaaggaaaggactaattctaagaccgtgaaaggcatcctg

SEQ ID NO: 230909 - DNA, 560 bp, Homo Sapiens
gatctagaggatcccgtctattactgaatccccatcgaacgatcgctcgaccacccacacctgacgtaagtgacctcttccatttccttcaggttgtggatcgggttggactcctcaaccaccttgacggccggatcctgatggatcgtccgccacacagcgaacggattgagctccaccttggctgccgacgtaccgcgcgaacgatgcacgcggattgccttgaccatttcctggtagaccatacccggccagcgctcgtaaccacggatacgctgataggccatgtcggtttcagccggcgaccagtcgctctccagcagttcgcacgaacggaacaccagaccaatgaaggtctccggctccttcatctcctgcaggatctccagggtgatcggatcgacgaacagatcgaccatcaggtccatctcgcgcaggtagcgcatgccgatcttttcgttctccaagatgttcaggtcaatgtccttcttgtcgaacagaccaatcggatagttacgcagccacttgtcgaactggaggaagcagccagatcagcgtgc

SEQ ID NO: 230910 - DNA, 104 bp, Homo Sapiens
tactggttcaggggtagtccttgctactggttgcagcggtactggtttgcagcggtactggtttgcagcggtactggtttgcagcgccctcacaagaccctggc

SEQ ID NO: 230911 - DNA, 235 bp, Homo Sapiens
  misc_feature (129)..(191): n is a, c, g, or t
ttattggcagaagcaggaagcaggcagaagccttcctgcttctgcccacccgagattgagcaataacaggaagcggcagaagcaggaagcggcagaagcaggaggcagaaccggaagcggcagaagcannnnnnnnnnnnnnnnnnnnnnnnnnnnnnnnnnnnnnnnnnnnnnnnnnnnnnnnnnnnnnnggaagcggcaaacaggaagcggcagaagcaggaagggtaccgag

SEQ ID NO: 230912 - DNA, 102 bp, Homo Sapiens
agacatgagaggtgtaggcagaagcaggaagcagcagaagcaggaagcggcagaaggcttcctgcttctgctgcttcctgcttctgcccataccaccctgaa

SEQ ID NO: 230913 - DNA, 507 bp, Homo Sapiens
  misc_feature (385)..(385): n is a, c, g, or t
  misc_feature (441)..(441): n is a, c, g, or t
ttataaatgagattcattttttgcatcctttctggcttgggaagtgtcttcccgtttcaaccggatatggtgctcattgcagcggatttcaagtcatgctcagacaggggtgttcggatactgcatccgtgtcgttcagtttcgctattcaattcaccccttagttgctttacgacgcaagcactgcctgactttagtctacagggaaataaaagactctgccagcaacagctgatcgtagggggcttgctgtaatgtgtgtttcagattgtcaagatgctcctggctggccacgcccaggtagagaaagcgggcaccttgccgcagcgcccggttcaggctgacgcgcaaaggcaggtggccgatacagcaaaagcagcccggngcaatgcgctgcacatgcactggtgacaaatcactgagaggcatgccgccagtggngagcccctccagaatcacggcagcccgcggatgctgcaggcaattttccgcaatccagcgttctct

SEQ ID NO: 230914 - DNA, 368 bp, Homo Sapiens
  misc_feature (166)..(180): n is a, c, g, or t
  misc_feature (203)..(212): n is a, c, g, or t
ctcttatacttcattgctcatgcagagctttagtttaattcaagtgaaaggtggagtgaattccataggattgcctgcattctcctgtaccaggttattatattgaaaactctttgaaatacataaaatgatagccagagctgagatacctcttccctagagaacnnnnnnnnnnnnnnnggcaaggaattggaacttgcttnnnnnnnnnnaaaaaggacctggcttggttggaatcccgggggttggcccagacttaaccaaaatcttgggcttacagagtgggaaaaaatttttttgtttaaatacccatttggggaaatggggctgcggctaagaaaaaggaagttttttttaaaggcccataa

SEQ ID NO: 230915 - DNA, 486 bp, Homo Sapiens
gtccgtccgccccagccggtaccagaattgctgattaccctgctgccagccctgctcatactgctgcgccgattcaggccggatcttactgctgtccaccgaagaacagaattgcctgcgctcttcataattacgatgcagtccatctgaaccatctttgttaccgataaaattccagtcaccggtctgacagtcattcatccggctgatggtgctctggcaagccatcagcggcaacaacaacaggaacgacaccagacgacaggcgcgctgaagcaactccctggcagttgatgaggtagtcagtaagacaggcatctggtcagctatggcgggcatacaatcactttcaacggaaggggtgatgacataacgtaaagagtggcacggctgttgacgccgtttcacacattacgttacataaagaggcagggattatcgcattccctgcttgattttccgattcaggtcatcatgtaggcgaag

SEQ ID NO: 230916 - DNA, 311 bp, Homo Sapiens
accttgctcagaggagcgacttttttttcgcgcgtaggcgttttcacgtacaaacattttttcccacctaaattccagactgcgcgttcgccaacttctgaagcgtgtcgcctagattgttgtgtattggcttttttcccttccgcttcaagctcagtgggttgtcgcgcagccaagtaatccagtcgtcctctttgagaagcagaactgcaatgaccgccacgacagtaagaaccgcgccgatcagacccagtacagcagctaccgccagcaacgaggcgtttcctattgcaaaaacggcaacgccagtt

SEQ ID NO: 230917 - DNA, 496 bp, Homo Sapiens
  misc_feature (55)..(63): n is a, c, g, or t
  misc_feature (71)..(307): n is a, c, g, or t
ttactatcgaaatgacatggtcatatgtatatataaaatactaaggaaccctctnnnnnnnnnctattagnnnnnnnnnnnnnnnnnnnnnnnnnnnnnnnnnnnnnnnnnnnnnnnnnnnnnnnnnnnnnnnnnnnnnnnnnnnnnnnnnnnnnnnnnnnnnnnnnnnnnnnnnnnnnnnnnnnnnnnnnnnnnnnnnnnnnnnnnnnnnnnnnnnnnnnnnnnnnnnnnnnnnnnnnnnnnnnnnnnnnnnnnnnnnnnnnnnnnnnnnnnnnnnnnnnnnnnnnnnnnnnnnnnnnnnnnnnnngtaaccatgtgcacagcttagaggttttaacactgttaagatggaaatacctgcagagtgatctacagattgaaagcaattactttcaaaatcccagctgacttccttgtaaaaactgacaagctgaccttaaaattcaaatgacatacaagggacctagaatgatcaaaacaaacttgaaaaagaaaa

SEQ ID NO: 230918 - DNA, 360 bp, Homo Sapiens
gaggaggtgctatcagcagctcacaagatgaatcgctagatgtattaaaagcagatggcaacatacaggcagcgtggagaatctgtgactcacagaggtagaagagaggaccccacttccatgactgcaaatcctaagttttatcagagagtacctgatagaacaatgacatgatctaagataaactctgtacgaacaaatgaccgatctagagtaaactaaacaatctgacgataacgattgttaagttatcaagtcatgaagaatgaagttagaaagcatgcaaggaatcgagtctggcattaagtgccccactcgatctcgcctttaggagaagatataccctcgataagttgtcaa

SEQ ID NO: 230919 - DNA, 239 bp, Homo Sapiens
  misc_feature (48)..(48): n is a, c, g, or t
  misc_feature (67)..(109): n is a, c, g, or t
tgtatcatgaggaggtgtgacttagagtgtctactgggaatttcctgnaagattatcacttcactcnnnnnnnnnnnnnnnnnnnnnnnnnnnnnnnnnnnnnnnnnnnagaaagatatatttagtagttacctttgagcagggtgcctggagatttttagttgtggttgggaagaagactttttttaaaaatgagtgttatatatagaatagtgtcagatatagagaaagagttgcaa

SEQ ID NO: 230920 - DNA, 590 bp, Homo Sapiens
  misc_feature (94)..(127): n is a, c, g, or t
  misc_feature (129)..(390): n is a, c, g, or t
gtagctagattcacaacgtcgtgtgagtgtactcagccaggtcgatacaggtcacaagactagttaagttatacagctgaaatacaagcatagnnnnnnnnnnnnnnnnnnnnnnnnnnnnnnnnnnannnnnnnnnnnnnnnnnnnnnnnnnnnnnnnnnnnnnnnnnnnnnnnnnnnnnnnnnnnnnnnnnnnnnnnnnnnnnnnnnnnnnnnnnnnnnnnnnnnnnnnnnnnnnnnnnnnnnnnnnnnnnnnnnnnnnnnnnnnnnnnnnnnnnnnnnnnnnnnnnnnnnnnnnnnnnnnnnnnnnnnnnnnnnnnnnnnnnnnnnnnnnnnnnnnnnnnnnnnnnnnnnnnnnnnnnnnnnnnnnnnnnnnnnnnnnnnnnnnnnntgagccactgtgcccggccagattttacatttagctaagttttgattaattgtgcctttatgcactggaccaatcctacagcttaacttcgtctttgtcacttccctgtgcagttctcaaagaattcaaacgtgtgatattgacaatccaagactcttttccaagcctcattttcttgatacctatctgaggctgaaatc

SEQ ID NO: 230921 - DNA, 570 bp, Homo Sapiens
  misc_feature (84)..(360): n is a, c, g, or t
taggatgtagatgtgagaagggaggtgaccaagttaagtagaaatggagctggtttgaagtggccgatgatgggttcactttgnnnnnnnnnnnnnnnnnnnnnnnnnnnnnnnnnnnnnnnnnnnnnnnnnnnnnnnnnnnnnnnnnnnnnnnnnnnnnnnnnnnnnnnnnnnnnnnnnnnnnnnnnnnnnnnnnnnnnnnnnnnnnnnnnnnnnnnnnnnnnnnnnnnnnnnnnnnnnnnnnnnnnnnnnnnnnnnnnnnnnnnnnnnnnnnnnnnnnnnnnnnnnnnnnnnnnnnnnnnnnnnnnnnnnnnnnnnnnnnnnnnnnnnnnnnnnnnnnnnnnnnnnnnnnnnnnnnnncgaaagagagaaaacgttgcattggcgatggctgaggccttggaatgggactgtgaagcgggcaggtgcctgagggcccagaacagatcgctgggaggtctagttggagacacactgttgtacatctgcatgtggctgttatttcaagctgtgggaatggatgacatcatcagtaaggagatgacagaggactctgccttatggaactcc

SEQ ID NO: 230922 - DNA, 522 bp, Homo Sapiens
  misc_feature (293)..(316): n is a, c, g, or t
  misc_feature (368)..(377): n is a, c, g, or t
tagcgactaccaggagacagtgtctaccaggcaggcatgatcatgaggaggactccgtctcacacaggaaaacagcaataagaagtatgccggctgattagtgtgacaagaataaaacagaatgtccatggaatgtacctgcccggtaaaatgttggatcatttacattcatgtggcagagaatccgacggctattaagagaaagtgaacaaattaagaatttaaaagacaggttcaggcatgtcataagtgaaaacaagaaggcttaatacaaacttgtggggttaggtccnnnnnnnnnnnnnnnnnnnnnnnnataacagagaatatggccagtgctagagttctttctccttctctctctctcnnnnnnnnnnaaaataactcttggggaaagtgggtaaataagcctgtgccaggtgtacgtgtggtgaaatacccaccactaaagttttaaagtaccatattttctcaatagggccttcttatgtatgaacaagattatgcggggcacttaaaata

SEQ ID NO: 230923 - DNA, 140 bp, Homo Sapiens
cctcaccgtttatataaggaggtgcacttactgtacttccccaatattgtcatcaaaggatcggagctccaatcggtatggttgtaaaccattcatgagaaatccatcttcatgatccattcacctccaatgtataaacg

SEQ ID NO: 230924 - DNA, 304 bp, Homo Sapiens
cgtttatattaggaggtgtggcccagagctcaacacagggcctttgttctttgtcctcactttctttgttactgtatcctgtctcatgactttaaatactatttttgtgctgagagactgtcagatttgcatctctcgccatgttcttcttctggaactctagagttcgtgatatccatgttgcctcactatgagcatcttccctattttagatattagaatattctcagcacatatgtctccagcgacaacgatttcccccatctttccaagacttgtctctactatgtaatctcgccttctc

SEQ ID NO: 230925 - DNA, 630 bp, Homo Sapiens
  misc_feature (287)..(407): n is a, c, g, or t
ggcaacagctatacccgtcagacagctgtcccaggaacagcatataacaggagatcagccttgacgtgatacagcttattaaaccgctatagccgtcatacaggcatatacagacatacacgtaaatatagagactaacatttgctaaaaatgctataattgtagacatcttaacagatactgaataccaattttaaaacctgtagtcaaagtagtggatctcagggagaaaggcagggtgggacagaggaaactaggtgtggatatagtgagtgtgcatggacaannnnnnnnnnnnnnnnnnnnnnnnnnnnnnnnnnnnnnnnnnnnnnnnnnnnnnnnnnnnnnnnnnnnnnnnnnnnnnnnnnnnnnnnnnnnnnnnnnnnnnnnnnnnnnnnnnnnnnnnncccctccgaaatgatctaaaaatgaaaagttaaatttcaaaacactgataaataagaatttagaggtatattgctgatacaattatatactgcctcagctttcaaaatccctatgcttttcttaggccaaccagttctgcctcttctgtgtcaaatgtagactttcccaacgtacctccagctaaggaaactcatctatgcaccagaactttgtaattcacgt

SEQ ID NO: 230926 - DNA, 541 bp, Homo Sapiens
tggcagggcaactccaatcatagcagtcatataagataaagtacaaataaactattgtatcaggctcaacaggcagactgtccattagactgactatctattcactgagtcatctgcatttaagtgttctccatatcttttcatggcctgatagctcatatttaatatagtgctgaatgatattccattgtctggatgtgccacagtaatatttatccattcacctccagaagaacatcttggtagcttccaagttattgccagctatgaataaaactgttataaacatctgtgtgcaggtatacgtgtggacatgagttaaccacctcatttaggtaaatgtcctgtccttataacaatatgtattactctcttgttatatataaaactttcctcctcattttagctcctatatcactacaagatttccttagctataaacttgactcaactgaggttaaaattactgctattatggtataccatttctaagaagtataaaggataataagttatctgaacatcccttttaacagcatct

SEQ ID NO: 230927 - DNA, 535 bp, Homo Sapiens
  misc_feature (390)..(416): n is a, c, g, or t
taggaggtgtctaatgttctgagaagacttatagtatcttcagagaatcttttgtaaagtgaatggccgctccctccttttatcagttttgagatctagattgggtgtgcttaaaatgaatccatattacttgctagattacaatgtgaattcctatgtctctatatgtctgatacaaatatcattgtcattcataatgattgataaccttcacttgtagctgcaattatctccatactcacatttatttcaaaatatctttcaaaatatctggtttcaaaaatgtcttttgtatctggtttgttgaaaccagattctagtccagaggtaagtattgcatctggttatgtcccttgtgttctgtctgctaacctagcattgtcccttccnnnnnnnnnnnnnnnnnnnnnnnnnnnctgaggtataacttatataccataaaatttacctgtttgaagtgtacagtgcaaaactttttaatgaatttacaaagttgtacaaccatcaccacagttaaatcttaggacatttctat

SEQ ID NO: 230928 - DNA, 185 bp, Homo Sapiens
tagaggtgcacacgtaattacaatactaacttatacagacatctcatacagttgagacagatctagttctatgaatctgaggaggctactgcagtagacagtcccaccctcacacgattcttctacctttcacttcatcattgcccttcatctattgctagccctgagcagctactcctacctcc

SEQ ID NO: 230929 - DNA, 137 bp, Homo Sapiens
attgacctaggagtcactatttacctgtaaaaagtctatactcggtaaaatctatctggacgaccaaccagaataagagagcagaacagactgcagaaacctatattcaattaaatcaaaagcagaaagggggagat

SEQ ID NO: 230930 - DNA, 228 bp, Homo Sapiens
gttcatactcggaacaactattgttctgaaataacttaaaatcagctatatactgcttgatgcgaaatctctgtctatctgcattcaactgatcacagtctctattacacaaagatatacctcctgaactcactgctctttattagagctttctagtcaagcatactacaaagctgtaaatatactcactcttacaaaaaattctaataaaaaaccacaagtaaatag

SEQ ID NO: 230931 - DNA, 102 bp, Homo Sapiens
cccccctgtgtgctcgagcgcacgtgttaggacccgacagatggtgaactatgcctgggcaggcagagacagagaaactctggtgaaggccgaacagactga

SEQ ID NO: 230932 - DNA, 488 bp, Homo Sapiens
ctgggcggacgtcatacaatcgggcaaggagatgtcacttggatgacggatggacgagccgcgatcgcgacatgatcggcagtcgaggcacccagacaatatattaaaatcagtgctatattactgactcgagcatcatcaaatatcgatgctcggaaagggcaaggcatgaaccacctgaagagaactgaatattcatcaacgagcatactatgtgttacgcagtgatgagtaaacgcttcggaaaggaactataatttgctctctagcagcactgggtccagacggcttagatcagggtagaccatgaggaggaaagtgtatggagttcaaagacacatgaagtaaaagccacataactgggagtgagaaagggagagagagagcgcactggcaatgaccatcttctacttttatgcacatataaatcctgcccaaacatgagctcacatgctacatcctgcacaaaaccttcactttggctcctt

SEQ ID NO: 230933 - DNA, 153 bp, Homo Sapiens
tctcgttcgttatcggattaaccagacaaatcgctccaccaactaagaacggtcatgcaccaccacgagccacacaaggagccacccgaggagccccactaggagccacgccatgagccccgccacgtgccgcacgaagagccacccaaagcg

SEQ ID NO: 230934 - DNA, 120 bp, Homo Sapiens
ctcgttgtgtacggcccggcgcgagatttacaccggctcgtggcgtggctctttgggcggctcagcgtgtgcctaccctatgagccccgcgatgagccacccaaagagccacaccacgag

SEQ ID NO: 230935 - DNA, 164 bp, Homo Sapiens
ttagaggatccccaccagacaaatcgctccaccaactaagaacggccatgctaactagttactcgacccccaagcgccacaccatgagccccagcaactaataacggccatgcaccacgcgccacgtgcctcccgatgagccaccctaagtgccacccgaagcg

SEQ ID NO: 230936 - DNA, 203 bp, Homo Sapiens
aggacggacggacggacggacggggccccccgaggtgccccccaacgagccacgctacgagccacacgaagcgccacgcagagagccccacaacgagccacgcaacgggccacacgaagagcctcatagggtggctcatggggtggcgcatcgggtggcacgtcgagtggctcttcgggtggcccttggggtggcgctaaggg

SEQ ID NO: 230937 - DNA, 202 bp, Homo Sapiens
ctcatcgcgtggctctttgtgtggctcgttgtggggctccttgtgtggcacgtcgcgtggctcatggtgtggctcctggtgtggctcttcggggggctcttagtggggctcatcgcgtggccctttgtgtgctcttcgtgtggctcgtagggtggcgcattgggtggctcttggtgggtggcgcattgggtggctctaggtg

SEQ ID NO: 230938 - DNA, 187 bp, Homo Sapiens
ctctttgggtggctctttgtgaagggcagggcgccctggaatgggttcgccccaagagccccaccatgagccacgccatgagccacccaaagcgccccccaaagagccacccaaagagccaaccatactcccccaagcgccacacaaagagccgcgcgaagggccacgccatgagccacacaatggg

SEQ ID NO: 230939 - DNA, 120 bp, Homo Sapiens
ccccgcccttgtgtggctcgtcgggggcccgtcgggggctctttgcgaggctcatcgcgggctcctggggaaacttcgggggaaccagctactagaggttcgattagtctttcgggaccg

SEQ ID NO: 230940 - DNA, 127 bp, Homo Sapiens
ctcattgtgtggctcatggggtggctatttgggcggcacattggggggcacgagggggtctgatgagccaccccatgcgccacccaaggagccacacaaagagccacacaatgggccacacaatgag

SEQ ID NO: 230941 - DNA, 166 bp, Homo Sapiens
tctagaggctccacgcgcgttgagggagagggtgtaaatctcgcgccgtgccgtacccatatccgcagcaggtccccaaggagccccccaagagccaccccatgagccccacaacgagccacgcaatgagccacgccaagtgccacaccatgagccttgccacgag

SEQ ID NO: 230942 - DNA, 130 bp, Homo Sapiens
ctccttgcgtggctcttcgtgaggctcatcgggtggcccgaagagcggctctttgtgcggctctttgtgcggctcatagggtggctcgtggggaggtggagcacgagcgcacgtgttaggacccaaagcg

SEQ ID NO: 230943 - DNA, 213 bp, Homo Sapiens
cctctcgaggatccccggctcatagcggggcgccttgtgtggcccatggcggggcgcgtggtgcggcgctttgggtggctcattgcgcggctcatggggtggctcgtcggggggctctttgggtggctcatcgggtggctctttgcgtggctcatcgcgtggcccttcgtgtcaattcctttaagtttcagctttggccctttgcgcaacgag

SEQ ID NO: 230944 - DNA, 152 bp, Homo Sapiens
tggagggacagctactagatggtcgaatcgccctataccaggtcggacgacgatttgcacgtcaggaccgctacggacctcctctgtgcttccacctcctctgtgctcctcctctgtgtgtccaccctctgtgctgtcctcctctgtgctgt

SEQ ID NO: 230945 - DNA, 104 bp, Homo Sapiens
aattcccccatacagagctgatatacctgttaactgcatgaagggcttatgattcttgtccctaataataatttccctattctaggtatttcttttaacccccg

SEQ ID NO: 230946 - DNA, 276 bp, Homo Sapiens
  misc_feature (41)..(193): n is a, c, g, or t
caaaatctaacacactagatagttcacttatttcacttgtnnnnnnnnnnnnnnnnnnnnnnnnnnnnnnnnnnnnnnnnnnnnnnnnnnnnnnnnnnnnnnnnnnnnnnnnnnnnnnnnnnnnnnnnnnnnnnnnnnnnnnnnnnnnnnnnnnnnnnnnnnnnnnnnnnnnnnnnnnnnnnnnnnnnnnnnncagacccacagacatattttgtctggcctgctcggtgcatggatgtgtgtgtagttttttaaagataatttcagacatacagg

SEQ ID NO: 230947 - DNA, 123 bp, Homo Sapiens
actgccgtgcacggtctgactctaggaggactccccacgcaatattctcctattctactcgcgcatcttatatagcttcagaggccagatgtcgttcttcaaaaactatgaaattaagaatga

SEQ ID NO: 230948 - DNA, 194 bp, Homo Sapiens
accggccagtagaaatgggtggagatgtctgttcttccctgttcgccgtcatttatgcaggtcacgccgcatcgtggcgatcttcccgctcattaacatctatgtcgacaaccagaccgccaagcttctgctctgcgcctggatcgtcgccttcttcccgatcctgtccaacacgactgcttggattacaagga

SEQ ID NO: 230949 - DNA, 177 bp, Homo Sapiens
tagagttacccaaaagtgcactcttctactatctacctaggaacaggcgttttggcagggtgatgtcccagctttgcgcgcctgatgtctcggccttttcgtcgttcaaaatgcggatcagcaaaccggccttggcgtagttcacgtgttctgtagatatagaagagtgcacttttg

SEQ ID NO: 230950 - DNA, 281 bp, Homo Sapiens
tcaaagtgcctcttctatatctacactgttgtaaagctcatagcacttcacaatctctgtgtacgtggcaccttcgcactgggtgtagttggcggtgtgtgaagctggaactgtggacgtacttttgtcggtgtctctggacaaacctccataaatctggtaatcttagaacggtccacgaatggtacccttggtgtggtgttcataagagtagatatagaagagtggcctttttgggggtaccgaggctccgaatttcggtaaattcttgggttcataag

SEQ ID NO: 230951 - DNA, 100 bp, Homo Sapiens
aaaagtgcactcttctatatctactaaaataacaagcattaacacacaaaaggattcatgacagcttaaaaagacacattacatgttcctttacccaagg

SEQ ID NO: 230952 - DNA, 133 bp, Homo Sapiens
acagacttaagtgcactcttctatatcctggctatctgaatgtcaagtgagaatcatgagcgcggtacacggggagtaactatgactctcttaggtagccaatgctcgtcatctaattagtgacgcgctgaat

SEQ ID NO: 230953 - DNA, 111 bp, Homo Sapiens
aggcgctagcgccttagccaggatcgagcacgctacccttcgtatacgcggtgtgcacgacgtagcgcggctattcttccgtacgtcatcatcgccgagcgaccgggtacg

SEQ ID NO: 230954 - DNA, 123 bp, Homo Sapiens
gcgtgtatggtatgttgtgttggaagaagaggaggcgaggaggtggcctagatcgaatttccgttactgacgctatactgaccgcttactgatgctcgcttactgatgctccgcgtacttaaa

SEQ ID NO: 230955 - DNA, 143 bp, Homo Sapiens
tccattgggctgcttcattgtttagttccagtgtcttcatcttgcacgccaggcttatgcggcaggcagcacatgtttccatgttcattcatactcaaccatgcagttcttctcatagggtgcatcagcattggtccccgcca

SEQ ID NO: 230956 - DNA, 151 bp, Homo Sapiens
gtcgtcatccgcagcagtctgttacaaagtgccatagcactcgatacagccggtcacgcaggagctggtctcaccattaatttggataggtggatcgttcgtgccaagactctatcattcgttacggataaactggtgtacgcgatgcggg

SEQ ID NO: 230957 - DNA, 165 bp, Homo Sapiens
gtatctaaggattcccgatgggtagggttgggtagtgggaggtcagacgtgattacgtggcgtggcatagtgacgagtttagcagttcgtgcgcttgtgcatgcttaactgctgggttggtgatgggtgtgttgacgcgtcaattggatggggttagcgatgggg

SEQ ID NO: 230958 - DNA, 249 bp, Homo Sapiens
  misc_feature (43)..(43): n is a, c, g, or t
tagaggttcccccgcatcggcgtatcgctgattgatgacacgncgcgtcgatctggccggactgcacggcgcgaaaagccccgcgaacggaatgttcgtgaacttgacctccgagccgaggcgcttgccgacctcggtcatgaggtcgacctcgaagccgacgatcttgccgctggcgtcctggaattcccacggcacgtcgccgacattggcgccgacgttgagttccgcgccttacgccgatgcggg

SEQ ID NO: 230959 - DNA, 226 bp, Homo Sapiens
  misc_feature (66)..(66): n is a, c, g, or t
tcgtggtgactagagttcccccgcatgggtaaactaagctaggaactgctcggcagcagcacaggntgctgttgagcgtgttgccacgtaatagtcgagactttcatcgctgaggtctggccggccatagtgggtcgggaacagggcggtggacagcccttgcacgatctggcccatggcttcgcgcgatggcaattcccggatgcgacccttacgccgatgcggg

SEQ ID NO: 230960 - DNA, 241 bp, Homo Sapiens
atcgggtaccaggagcacaggtgagtgagattttcagcaccatgtgcgccatcgccgccccgagtgtcgccccacgcatatcccgcagcaccctctgccgaggtcaggtaaattcgggccaattcgcctaaatcagggtccgacttcacaccgggaagcagcgacttgagacctagagatgtcaacggtgcatcaccgcacgcccctgggtagctgccgcggaatattacgccgatgcggg

SEQ ID NO: 230961 - DNA, 310 bp, Homo Sapiens
tacccgatggcgtacagcacggtggtaactggtggtgcgtgaatcgcagatggccctgtcgtcaacgagggcaaggtggcgatctgttcgggcccggcacgtacaagctgaccacgcaaaccctaccgctgctgaccaacctcaagaactgggacaagctgttcgcctcgcccttcaagagtgacgtgtactttttcagcacacgccagcagctcgatttgcgctggggcaccagccagcccatcacgctgcgcgacaaggatttcggcgccgtgcgcctgcgcgcctttggcaattacgccgatgcggg

SEQ ID NO: 230962 - DNA, 170 bp, Homo Sapiens
ttagaggatcccccgcatcggcgtaggtcagcacctggtcgtcatggtcgaacttgacgtgggtgccgctgtagctgaggtcggtcaggtagaagtggccgctgtgcgattcgacgcgggcatgcgagcgcgacacgcgcgaatcgctgacacagaacgaggcttgcggg

SEQ ID NO: 230963 - DNA, 586 bp, Homo Sapiens
gcgtaacgcagagaggaagcacgaatcttcgagctattatgagtactcctgaacaatgaatatcgagaagtgaatgaatatgaggagcaccggtatgagaaggcatttgaagcaaggaaaagaatatgatcaacacagaaaagctagaattgaaaccaccggagaagaaaaagagtgatgagagacgaacttgaagctccattagaatcttcatgagaatcacctgataagaatattgatagaaaagagtggagagacttcacatcagtaagatggatactcgattaagagatctgaatccttggagaaaaacaaagggcgggagggtggcacaaacaaagacaatttggaatggttgaaaggaaccccgttgagaagaactgatgtttgatcttgcggttgttgaaatgatcggatccacttgaagaacaacacgccggtgaaagaaattgaaatgacaaactcgatgatcgagaaggattagtattcacataggaatatgagaccacacttgggaaaggtatggaatcaacatttgactttgaagcaactcgaataacacatactctctgcgtctggggtaccg

SEQ ID NO: 230964 - DNA, 298 bp, Homo Sapiens
catacagcagccccagcacacttcagcagccaagggcagcatggtcaagtgcaccagggcgcacagcaaactggctcagtggtggtttgctgttttccaaggctcgtctggtgccaagcaaggcacattcatacattgcagctgctcaaaccatcatcaccacacagttcttcctttcttccatcactcgtctcatctggaaatctcacactcatcctctctttcctgagcccaattctcaacgccatcaggcatggggacccaaagggcatcagttcagctctttcccaaggcatgt

SEQ ID NO: 230965 - DNA, 297 bp, Homo Sapiens
aaacgcagagaggacgggaggcagaggctaactcgacacggagcgcgcgcatgccgttgccatcgaggctgtcctacagacagaaccgggtgtcatggatgtgaaccgggcggcggaggctcaacttgaggcggagtgcgcggatgccgctcgcatcgaggccctcctgcaggcggaagcagacgtcttggacttgaaccgggcggcagaggctcaactcgacgcggagcgcgcagattgccattctcatggaggccctcctgcaaggcaggaactggacgtcctctctgcggtttg

SEQ ID NO: 230966 - DNA, 221 bp, Homo Sapiens
ttcaatttctacactatgtggagtacaattgacagtacctccgaaccattcgaagctgtcatcattggcataagaaacctgtacataatctacagtcgtcccgcttccaacacctccgaaagtaagtccattgatctctttatccggcagaaaagcgtaacccgcatattctattcttacgtatttgaaaaccccgctattatctgcgtgtagaaattgaa

SEQ ID NO: 230967 - DNA, 472 bp, Homo Sapiens
tcaatttctacacctgcttaaaatctcaagacatatagaattgttcttatctgactagcaattcctctggtggaaatatactctaataaactaggcagataagaacaattctatatgtcctgggattggagcattgtggagaaaagcaaagacctacaaacaatttaagtgttaaaacatcttttggtacatgtgtatgatggaatattatatagtccctaaaaatacaagcacgtattgccatggaaaaatgtcctattataagagaacacgattacatttacctgtgtagaaattgaacgttcaatttctacactatcatttaaaagttgcagctctttttccttgttctcaagggcacttaaggtttcagcaacaacattctggtgagcagaagtgtcttcctgtaacttactaatgcgctgacttgtttcagccacaaaactttgatgcatctggtgtagaaattgaa

SEQ ID NO: 230968 - DNA, 601 bp, Homo Sapiens
  misc_feature (230)..(291): n is a, c, g, or t
accttctacaccttcattgttaaaatactgattctgactagagttgaaatcttgatgtgtcctatggattgaatcgtatctcaaggcctggagtagatgagacctttgaaagagcccttgagaagatgataattctcccaagattatctttgaaaatacgtgggtgttatttaagtgaggttgtaatctcgtagagtgtaattgtggagtaaatgaaaattaggatggtnnnnnnnnnnnnnnnnnnnnnnnnnnnnnnnnnnnnnnnnnnnnnnnnnnnnnnnnnnnnnntgagccaccgcgcccggccggggttggaattttaaggcaggctctggagtctttagaattgaggtgtaagggtacacccatttgggaaaattgagagttcaaggtgtgtgagaaagtagttggggttatagctggagagattggcaacagtttgattagaaaaagttttattctgaaagaagcatatataagccttatgctgttggtgataagacctactgcaggattttaagtagagtaacacaatatggtttttattttatgatgacaccactgcggtgagttgggggaggtaagtgtagaaattgaa

SEQ ID NO: 230969 - DNA, 604 bp, Homo Sapiens
  misc_feature (253)..(253): n is a, c, g, or t
gttcagtttctacaccccatttcagccataaagcccattttaaagacgaagaaacatacataggaagatgaatattcatttttaatgtattacacaatcaaaacaaaacgcggacacactcacgcttccaagtcttgaccaagcacacatgctcaagctccagttctaaccatactagtgatgtcactattaccactataaactaccatgtaactggcagactcatgttttactggtgtagacaattgaacantgtgtttgttgccagtggtaatccttgctctagtactgagaggaaccgcaggttccagaacattgtggtgtagacaatggaacgtacaatttctacacaattaaaacaaagcatcgagaaggcccgcggcggggtgtatgacgtgatgtgatttctgcccagtgctctgaaatgtcaaagtgtagaaatggaacgtacaattttctacacgcttcattcacaactcacctctgagcacacctccttcaaggaagccttccccgattagggaagccagggtagggattcctttcctcccccagaataccaggaataaaacaccaccccccatattctggcagtccatataca

SEQ ID NO: 230970 - DNA, 146 bp, Homo Sapiens
  misc_feature (55)..(55): n is a, c, g, or t
  misc_feature (61)..(61): n is a, c, g, or t
  misc_feature (70)..(70): n is a, c, g, or t
  misc_feature (76)..(76): n is a, c, g, or t
  misc_feature (112)..(112): n is a, c, g, or t
gacagcacattgctcctggccttgcccacctgaggacgcgctacctgttggactnagtctnacctgcagnaactanatgacataaaccacagtaacaagtgaccaaactctnaggacagtccacccatcaccaccaacaccactag

SEQ ID NO: 230971 - DNA, 382 bp, Homo Sapiens
  misc_feature (27)..(27): n is a, c, g, or t
  misc_feature (32)..(32): n is a, c, g, or t
  misc_feature (37)..(37): n is a, c, g, or t
  misc_feature (41)..(41): n is a, c, g, or t
  misc_feature (45)..(45): n is a, c, g, or t
  misc_feature (47)..(47): n is a, c, g, or t
  misc_feature (55)..(55): n is a, c, g, or t
  misc_feature (58)..(58): n is a, c, g, or t
  misc_feature (68)..(256): n is a, c, g, or t
  misc_feature (269)..(269): n is a, c, g, or t
  misc_feature (278)..(278): n is a, c, g, or t
  misc_feature (281)..(281): n is a, c, g, or t
  misc_feature (288)..(288): n is a, c, g, or t
  misc_feature (291)..(291): n is a, c, g, or t
  misc_feature (313)..(313): n is a, c, g, or t
  misc_feature (322)..(322): n is a, c, g, or t
  misc_feature (328)..(328): n is a, c, g, or t
  misc_feature (336)..(336): n is a, c, g, or t
  misc_feature (353)..(353): n is a, c, g, or t
  misc_feature (357)..(357): n is a, c, g, or t
caccctactttatttttcggggtttcngggcnttttngggncttnangaaacagnctnactctgtctnnnnnnnnnnnnnnnnnnnnnnnnnnnnnnnnnnnnnnnnnnnnnnnnnnnnnnnnnnnnnnnnnnnnnnnnnnnnnnnnnnnnnnnnnnnnnnnnnnnnnnnnnnnnnnnnnnnnnnnnnnnnnnnnnnnnnnnnnnnnnnnnnnnnnnnnnnnnnnnnnnnnnnnnnnnnnnnnnnnnnnnnnnnnnatcctgaactccnggctcaagngancacgccngcncagcatccaaaacactgggatnacaggcatnaccacngtgcccgngccctactcaatttacnctanagaacctataaccccctaaagggat

SEQ ID NO: 230972 - DNA, 151 bp, Homo Sapiens
  misc_feature (34)..(34): n is a, c, g, or t
  misc_feature (41)..(41): n is a, c, g, or t
  misc_feature (50)..(50): n is a, c, g, or t
  misc_feature (54)..(54): n is a, c, g, or t
  misc_feature (58)..(58): n is a, c, g, or t
  misc_feature (72)..(72): n is a, c, g, or t
  misc_feature (79)..(79): n is a, c, g, or t
  misc_feature (118)..(118): n is a, c, g, or t
  misc_feature (135)..(135): n is a, c, g, or t
ctttggatcacaaatcaccgggagtaagcaaggncaagcangtattgacngatngatngacctccgataccngccactnggagatttgggcgattcttaagggccccgttgtgcgtantaagttttgcgtcatanccgccgcccccacaca

SEQ ID NO: 230973 - DNA, 109 bp, Homo Sapiens
tcctgatacaccctatcactctatacaccccgataccactataccacacttataactgcactacagtataagaaaagcactacctggtggtatagcctggtggtatagt

SEQ ID NO: 230974 - DNA, 190 bp, Homo Sapiens
aaggatcgtgaggcccggatcacggatctgtattcgtactgaaaatcaagatcacagcgagctgttagccctatctagctccacgggagggtttctgtcctccctgagactcgccttacggacaccatgcgtaaccgtattgaccaggtgtaaccgcccctagtcaaactcacccacaattggagaccta

SEQ ID NO: 230975 - DNA, 120 bp, Homo Sapiens
agatacaccacagcttgttgaaaatgtcgtgttgtggagatgtggtatagagtggtatagagtggtatacgaggtggtatagcgggtggtatggtgggtattatgctcgaggtaccgatg

SEQ ID NO: 230976 - DNA, 111 bp, Homo Sapiens
ccttatatacacctcactaacactctcccctgtttgcattttacatgtataagaaaagcaccacctccatgagaattcacgtgtggtatagagtggtatcaggggtggtat

SEQ ID NO: 230977 - DNA, 271 bp, Homo Sapiens
  misc_feature (98)..(175): n is a, c, g, or t
ggactccatgatacaccccacagcgaatacatgaggagtggtgtttttaaagcagttaattttttctaattaaaatcatatattaacattcaattacnnnnnnnnnnnnnnnnnnnnnnnnnnnnnnnnnnnnnnnnnnnnnnnnnnnnnnnnnnnnnnnnnnnnnnnnnnnnnngtggtataggctataccaccagtgttttgcttttcttatactgtaaaatggtgaaggtggggagtgttagtgatcagaagtggggtggtatagcct

SEQ ID NO: 230978 - DNA, 138 bp, Homo Sapiens
tgactctacaggatcttactatacacctacactccccaccttcacctatttacagttaagaaaagcactacctccatgagaattcactgtgtgtgtatagctgtgtggtatagacgtggtatcaagggtggtatcaga

SEQ ID NO: 230979 - DNA, 149 bp, Homo Sapiens
tataccagcctataccactctgcataccaccttttaccacaccttaaaactcactaccagtctaagctacacaagttcaccattttacagtataatgaaaagcactacctccatgagaattcacgtgtggatggtatagacctcgtggt

SEQ ID NO: 230980 - DNA, 366 bp, Homo Sapiens
ccttcatcctcaactattctaagacttttgctttaagtgtataataaaataaaatttgtactgagcctggagcacagcaaacactcaggattcccttcacctgctgataccaccgggatgtcctgatccaacatcgaggtcgtaaaccctcatcgttcgatatggactctagcaatacggattgcagctcgttatcccgtaggcgtaactctgttccgctgagtcaagattattaggatcaattgcagtatagctagttcgctattgactaggtgaagtctatagcatgtactagctcgagaggttgggttcatgctccgacggtcgccccataccgacaatttttaatagcacggttatggtaga

SEQ ID NO: 230981 - DNA, 120 bp, Homo Sapiens
tttaccattttacagtataatgaagcactacctccatgagaattcacgtgtggtagtggtatagggtgttatggggtatagggtggtatggtggttatagctcggtggtatagggtggta

SEQ ID NO: 230982 - DNA, 129 bp, Homo Sapiens
aggacttatacaccctatacaccaggctataccctaggctataccaccaggtagtgcttttcttatactgtataatggcacaggggagagtgttagtgatcagaattccgtggtatagggtggtatcag

SEQ ID NO: 230983 - DNA, 160 bp, Homo Sapiens
ttagagttgtgagttgtgtagcgagttgtttagagatgtttagagttgtgtcacggaatatgaccgccagcactaaaataagagtacgagcacgcaaaggccaccccgattatagcgcatcgttactgcctgactggctaacctgtcaaccttctatcaa

SEQ ID NO: 230984 - DNA, 269 bp, Homo Sapiens
ccctgtttctgacttgctggctgactttggctaccgcccgaaccatattaagtacgttactcatacttgaatgtaacacaatttgccataaaagaagtaatttgataagtgagcaggaggatactgatacattagctaattttgggcggaagtgaatattggcgccgtgcctgtagctaaacgagatcatgtgatataagtgctgtagggcgcgcagatgcagtgatatttaaacggacggaccaccagaccccgattatagcgcatcg

SEQ ID NO: 230985 - DNA, 176 bp, Homo Sapiens
tagtgatatgataagtatacttggtgactaagtaagcagctgaagaagatgctgacgactaccgaagaggtaacccgattgggcgaaaaagaagtgaaataccgtaagatattggcgagtgagaagagataaattattgaactaaatgagataatgataaataatacggcgctgct

SEQ ID NO: 230986 - DNA, 265 bp, Homo Sapiens
gtcgtccataggatttgctatgtcaatttagaagcacccacggtggattggtctaaccacggaatactaatgtggacgatccggcgcttcgtgatcggccgatgggggctcgtcatctagacggtctaaccttcttgtggcttgcaagatttcacaccaggttaaagataccgaccagatgccgcccgattatagcgtcatcgttactgtcctgactggtctaaccgtgtaccttcatgcaaaagtggctcatcacgtacccgtg

SEQ ID NO: 230987 - DNA, 302 bp, Homo Sapiens
gcactaccatgattaactgcgggatagaccacaacccttctcttatcatcctttcctgcagtactgcttccagctttgctgctatcttgcctgcaattaacccacccacttgtaccgctgctctgcacaatgaccttcaccactacgatgatgtaccacccttcacttaccctgtactgttacgaacagcacgtggaagaaccctaactagctgcctgttgatttttaaccaccagagcctgctggtgcaggtccgcagccaccagatgcgtataaatcgcctttacaggaaccggacgcat

SEQ ID NO: 230988 - DNA, 170 bp, Homo Sapiens
cgcagcgagccagaagttgcgatgccgatagtggcggcgatactgatttgttataggcgtccgctgttgccactgcccgaccgtataaatacgcaccagcccaccagagcgccccgattatagtcgcatcgttactgcctgactggctaacctgtaccttcatcaaaagt

SEQ ID NO: 230989 - DNA, 134 bp, Homo Sapiens
atcgcaatcatgcaatctaacgtaccacgcataagctgacagtactatccgccaacccaatactattcgccatcttttggttcgggaaaaaggactgcgccaccagagcccccgattatagcgcatcgttactg

SEQ ID NO: 230990 - DNA, 157 bp, Homo Sapiens
acgagttcatgtaatcgtcgaggccagtctttaccagcatacgttatttacgtcgccctcggccgtcggccccaactggagggtaccaccccaccagagcccccgattagtacgcgcatcgttatctgcctgactggctaacctgtaccgttgcatc

SEQ ID NO: 230991 - DNA, 164 bp, Homo Sapiens
tctatcctttctaaagtgtttagagtgttgggacatacggtacaccaattatatcagtacgctgccgaagttgacctggtggtgtgatgatgcagcccaggggtaggttaccgaccagatgtcctccgattattagcgcatcgttacgtgcctgactggctaac

SEQ ID NO: 230992 - DNA, 314 bp, Homo Sapiens
atgcgctgtgcagcccggacgggtgccaaactgcgcttggcgcgtactttagcgcgcgatgcgtggcaccttaagcagagataccgtatactgcattagtacgccacgactgcttgacgaatgaaaatacttttaccgacttgaacgaacacctacaccagattaagacaagggatttttaaaataagggtgcctacgcatgtaaataaaattaacaggatgcctgcttttgggaaccgtgttaggctaaacgattaaccacgaacgcgccgagcacgagttgaacgtgatggcgaggcatggccgctgacata

SEQ ID NO: 230993 - DNA, 140 bp, Homo Sapiens
tctagagttgtttagagttgtacgctagagttgttttaaggggtattttgttaatgttgaaaagtgcagaggcgttttgtctaaatcactgacgctcatgcacaagatttgccccctacttaatcttgatccagaattat

SEQ ID NO: 230994 - DNA, 122 bp, Homo Sapiens
aatcgagctcggcccgtattattgtgaagcagaattcaccaacgcgttggatgtcacccactaatagggaacgtggcgtctgtccacgtgggtgtgtccacgtggcggcacgtggcgtctgt

SEQ ID NO: 230995 - DNA, 117 bp, Homo Sapiens
gtcccggattgacgccacgtggcgtctgtcggacagacgcctacgtcgccacggggacagacgccacgtccagtgtgaagtgggctccactgtctcaggccctaatggagggccagt

SEQ ID NO: 230996 - DNA, 118 bp, Homo Sapiens
ttgttgtgggcgcgtgggttgtgtgggttgtgggctgcggggcgtccttcgttgtgtggcgcgagcgcacgtgtaaggacccgaaagatggtgaactactgcctgggcagggcgaagc

SEQ ID NO: 230997 - DNA, 142 bp, Homo Sapiens
tccttgtactcgggataggattggctctatgggctgggtcggtcgggctggggcgctcgttacggagttcgttacggaggcgtcgttaggatggcgctcgttacggaagcgctcgttacggaggcgtgttaggaggcgctcg

SEQ ID NO: 230998 - DNA, 184 bp, Homo Sapiens
tcaggctagttgatacggaaggtgagtaagtatacacactaccattagcggattcagactatccatggccaccgacctgctgtctatatcaaaccaacaccatattctggggtctgatgagcgtcggcaatcgggacgcctataacccggacgctcgattacgaggcgggatcctactacgagt

SEQ ID NO: 230999 - DNA, 122 bp, Homo Sapiens
accagtgatcccatcagtaacaggctgagtgaacagtgaagagcccagacgccgaatccccgccccgacggacggagacgcgaagacatggaggcgtacggacgttacggagggcgctcgag

SEQ ID NO: 231000 - DNA, 132 bp, Homo Sapiens
tatcagcgctccataaagagcgcccgtaacgagcgctctaacaccctccgataacgagcctctgtaacgagcgcctaacgagccctcctaacagccctccgtaacgagcgtgtggtggaggtccgtagcggt

SEQ ID NO: 231001 - DNA, 271 bp, Homo Sapiens
  misc_feature (63)..(187): n is a, c, g, or t
gagcgtattccccagagcctccatgaaggaatgttgtcctgccaacccttattgaattcttannnnnnnnnnnnnnnnnnnnnnnnnnnnnnnnnnnnnnnnnnnnnnnnnnnnnnnnnnnnnnnnnnnnnnnnnnnnnnnnnnnnnnnnnnnnnnnnnnnnnnnnnnnnnnnnnnnnnnnnnnnnnctgcccaagggtcacttttcttaacctaattacatttgtgtcagtttctgcttgggttctgaatgcatttggcccttatccgag

SEQ ID NO: 231002 - DNA, 214 bp, Homo Sapiens
  misc_feature (65)..(136): n is a, c, g, or t
ggggatccctcgataaggggcaacagcagaaacggtgaggtcagtaagcgaggctgcaataatannnnnnnnnnnnnnnnnnnnnnnnnnnnnnnnnnnnnnnnnnnnnnnnnnnnnnnnnnnnnnnnnnnnnnnntaatgagatgagaagtgatacaggctgggaccagagtggtagttctggaggtagtgaaaaagtgatcatagccaagca

SEQ ID NO: 231003 - DNA, 569 bp, Homo Sapiens
  misc_feature (73)..(73): n is a, c, g, or t
  misc_feature (238)..(268): n is a, c, g, or t
  misc_feature (354)..(354): n is a, c, g, or t
  misc_feature (364)..(364): n is a, c, g, or t
  misc_feature (465)..(465): n is a, c, g, or t
  misc_feature (470)..(470): n is a, c, g, or t
  misc_feature (473)..(473): n is a, c, g, or t
  misc_feature (496)..(496): n is a, c, g, or t
  misc_feature (500)..(500): n is a, c, g, or t
  misc_feature (539)..(539): n is a, c, g, or t
  misc_feature (549)..(549): n is a, c, g, or t
atctgctgtgtgccagggagtgttctagcttctggagctacaactgtggcaaaaacagataacaattcctgcncttaagaattatacctactaggcaggggtgacagcaggtagggcatcagacaataaagaaaataaataatgtgtatagtgtattaggagatgtaaacagagtcatcaaatacagttgtgcagattgctcactgcccaactctgtgtccagtaatgccaatggagnnnnnnnnnnnnnnnnnnnnnnnnnnnnnnngtgtgagccactgaacccagcctaatttttcagattaaaaaaacaaagggacactggttagttcatagaatgtctggagggcctgncagcctgtgnttgtagcacccagctaccctatggggctgtctccaccggaaacacctctacctctgcttctacagccaggacactcaggacctaacatcatgaatgtggcngcttncanccctaaacaactacatagcttgncatngtggatggcaaaagaattgagttccctaattaaacttgntgctttttanaaatcaagtgcttgttaagc

SEQ ID NO: 231004 - DNA, 615 bp, Homo Sapiens
  misc_feature (36)..(36): n is a, c, g, or t
  misc_feature (170)..(340): n is a, c, g, or t
  misc_feature (401)..(401): n is a, c, g, or t
  misc_feature (440)..(440): n is a, c, g, or t
  misc_feature (477)..(477): n is a, c, g, or t
  misc_feature (485)..(485): n is a, c, g, or t
  misc_feature (502)..(502): n is a, c, g, or t
  misc_feature (540)..(540): n is a, c, g, or t
  misc_feature (543)..(543): n is a, c, g, or t
  misc_feature (555)..(555): n is a, c, g, or t
  misc_feature (559)..(559): n is a, c, g, or t
  misc_feature (565)..(565): n is a, c, g, or t
atatggcagaaaagcaaaagagaaggaacccattcntgcaagccctttttataatggcattaatccattaaacatccccattaggctccacctcccagtaacattgtactgggcactaagtgtcaacatcaaatttagagaagacaaaagcactcaaaccacagcgactnnnnnnnnnnnnnnnnnnnnnnnnnnnnnnnnnnnnnnnnnnnnnnnnnnnnnnnnnnnnnnnnnnnnnnnnnnnnnnnnnnnnnnnnnnnnnnnnnnnnnnnnnnnnnnnnnnnnnnnnnnnnnnnnnnnnnnnnnnnnnnnnnnnnnnnnnnnnnnnnnnnnnnnnnnncctaaaaggaaggtaaaaaggttttttttccaaaaaagaaagaagaatggtaagaatggcnagtttggctggggttccagtgagaatgtcataggaccgngaggggcattttgactggcccttagtttgggaagagnaacccatnggggaatttaaagcaanaaaagggggcccgattttacttttttttaaaagccacnctntttttgaaaatnaatnggccanaaaagggaaggccaaaaccaggaaaaaattgttccaggccttttcaattt

SEQ ID NO: 231005 - DNA, 178 bp, Homo Sapiens
  misc_feature (56)..(56): n is a, c, g, or t
  misc_feature (71)..(72): n is a, c, g, or t
  misc_feature (96)..(96): n is a, c, g, or t
  misc_feature (104)..(104): n is a, c, g, or t
  misc_feature (116)..(116): n is a, c, g, or t
  misc_feature (126)..(126): n is a, c, g, or t
  misc_feature (135)..(135): n is a, c, g, or t
  misc_feature (140)..(140): n is a, c, g, or t
  misc_feature (153)..(153): n is a, c, g, or t
gtgttgagtctttcaaaaataaaaacaagaactttggggaaaaagtgctctcttgnggtttgtagggcagnntaatgctacttaaagtgttgaaanctattttnattctaagaagntttaggcatntggatcatnaaagnacatcaacccctngggaaggccttgggggctaaccttc

SEQ ID NO: 231006 - DNA, 550 bp, Homo Sapiens
  misc_feature (134)..(373): n is a, c, g, or t
  misc_feature (459)..(459): n is a, c, g, or t
  misc_feature (501)..(501): n is a, c, g, or t
  misc_feature (518)..(518): n is a, c, g, or t
atcttgggcctgtgttatctggggaatctgccacagcagacagcaaaaggtaaaaagcatccctttaataactacaccccactccagcaattgaggtttattcaggggtgggtcaaagtagtacaagacaaaannnnnnnnnnnnnnnnnnnnnnnnnnnnnnnnnnnnnnnnnnnnnnnnnnnnnnnnnnnnnnnnnnnnnnnnnnnnnnnnnnnnnnnnnnnnnnnnnnnnnnnnnnnnnnnnnnnnnnnnnnnnnnnnnnnnnnnnnnnnnnnnnnnnnnnnnnnnnnnnnnnnnnnnnnnnnnnnnnnnnnnnnnnnnnnnnnnnnnnnnnnnnnnnnnnnnnnnnnnnnnnnnnnnnnnnnnnnnnnngtgtgaagtactttcaaaaataaaaacaagaacttggggaaaaagtgctctctgagggttgtagggcagtgatgctacttaagtgntgagcatatttcattctaagaagttagcatctggacataagnccttaaccctagggaancttgggctaccttactttggaaattttccaag

SEQ ID NO: 231007 - DNA, 165 bp, Homo Sapiens
aggtgtcatgcgagctcgtatcttttcctctaggcagagcacagcaggcgatggggcgatggcatctctcggtgcctggggctgtcctgttgtccagcctctcccgttgctcagccgaggcctgctggagccccagatctccctttcctactacaccatttctgg

SEQ ID NO: 231008 - DNA, 193 bp, Homo Sapiens
  misc_feature (50)..(71): n is a, c, g, or t
actaaatgacctctataaaacactgcacccaacaacagactacattctcnnnnnnnnnnnnnnnnnnnnnnggaaagcctcattcgtcggcccaggttgtagtgcaggggggtgatcccggctcatggaaacttctgcctccggggtccaggtgttcctcctactccagccccccgagtggttgggataccag

SEQ ID NO: 231009 - DNA, 114 bp, Homo Sapiens
  misc_feature (99)..(99): n is a, c, g, or t
ttatgtaatattagaggagtataggctgtgactagtatgttgagtctgaagtaggagagtgatatttgacaggagacgtggtactagccagagagtctnccagtagctactagt

SEQ ID NO: 231010 - DNA, 185 bp, Homo Sapiens
atggtaacccaccgttactcttaaggttcagcctcttgactctctcttcaaagtcttctcactttccttacggtacttgttgactatcggtctcgtgcggtatttagcttagattggagttacacccggtttgggcttgatcccaaagcaaccgatttcgggaagaccggggccggtacatgcaa

SEQ ID NO: 231011 - DNA, 161 bp, Homo Sapiens
tagcctgatcgtactgcatgagatattccttcttcctccaaacgtcagcgagaacccacaacactgccgaggagggggcgtgtaggataaaactctattatcctttcttcaggcccttttgaacatctttaattctgcttgatccccatacttggaatcct

SEQ ID NO: 231012 - DNA, 196 bp, Homo Sapiens
  misc_feature (61)..(82): n is a, c, g, or t
gctgatccgcttaagggggaatgtaatagatcgatcctgatcactgactcttggtccaccnnnnnnnnnnnnnnnnnnnnnnccttaaaaaaacttcacatttaaccagttcctggcaaaacagcctggtaattattgctacctctagggggaacccgggttggtaataaaaatctaagggcccaaatttttggat

SEQ ID NO: 231013 - DNA, 500 bp, Homo Sapiens
  misc_feature (235)..(386): n is a, c, g, or t
ctagaggtcacgctgatcgcttagatctctgttgtatgttatgctggtcagttgtgtctggattccagagggaggaaggtagaatgaggcatgttgacacctccccttcccatcatggcctaagctggtcttttcagtttactttggaatgtccttgctcaacaggaagggtccattcagtcggattgggtggcttagaattttatttttggtttaaatctcaactatcacagcnnnnnnnnnnnnnnnnnnnnnnnnnnnnnnnnnnnnnnnnnnnnnnnnnnnnnnnnnnnnnnnnnnnnnnnnnnnnnnnnnnnnnnnnnnnnnnnnnnnnnnnnnnnnnnnnnnnnnnnnnnnnnnnnnnnnnnnnnnnnnnnnnnnnnnnnctaaaaaacaacaaaagaatatgtcataggtgctgtattctttttgtatttcatcatgaggaacataataccagctaccagcttgtctcatttgtaatcctaatactgagattg

SEQ ID NO: 231014 - DNA, 252 bp, Homo Sapiens
gctgatccgcttaagtcaagctgggagtactgtgtgatgcggactgagtggtcgtgattgaagaagggaagctgggagtactgtgtgagggtgtctcagtggtggcgatcaaagaaatgtagctgggagtactaggtgagatgatagaaggagtgaagcctagaatactgtgtgacatggtctcagtggtggtgatcgcagaagtcaagctgggagtactgtgggatgtggactcagtgatggtgcttaagc

SEQ ID NO: 231015 - DNA, 266 bp, Homo Sapiens
  misc_feature (63)..(101): n is a, c, g, or t
  misc_feature (115)..(188): n is a, c, g, or t
tgatcacttcaagttgaaaggcttctgtaccacaacagaaacaaccaacaaagtaaagagagnnnnnnnnnnnnnnnnnnnnnnnnnnnnnnnnnnnnnnntgtgatagcggctnnnnnnnnnnnnnnnnnnnnnnnnnnnnnnnnnnnnnnnnnnnnnnnnnnnnnnnnnnnnnnnnnnnnnnnnnntaaacaggtcaaagtatccagtgagccccgtaataaatccatgaatctagagccatgggattttcaaacaaagatgtt

SEQ ID NO: 231016 - DNA, 242 bp, Homo Sapiens
  misc_feature (112)..(112): n is a, c, g, or t
ccccaaagtggcaagccaacattccatccaattcatgtgcaagcaatcgttccggcatgcatgcacccaagcaggctcattccaagcatctctggccagtggcaggcaagtnctctttcaagcaacacatcagtttcaacaccacattagttcaaaaccattttccggtcttcatttccatttgctgtacacagttgcatcatctggctggtcccttttacatacatgccagcagtgcagca

SEQ ID NO: 231017 - DNA, 246 bp, Homo Sapiens
catcatcatggcagcaacagcagcaagcatcacagatctcaatcctctcagactgcttccagcaaaccaggcccagccagtcatttctcaggttttcattttccagcttggtttacacccaggtcatgcatccatcaccattatggttaagcacagttcctcactcattcaagcaggtgccatgtggcagtcagggccacaggtcatgcaggtgaaccgtcatttctaccgtcccattcagcattt

SEQ ID NO: 231018 - DNA, 128 bp, Homo Sapiens
tagactaacatttcgtgtagtgagttgtcggtctacctgggttaggtctacctggaggtctacctgggttaggtctacctggaggtctacctgggttaggtctacctggaggtctacctgggttaggt

SEQ ID NO: 231019 - DNA, 256 bp, Homo Sapiens
  misc_feature (60)..(199): n is a, c, g, or t
ccaggtagacctacgtgcacatccgggcacagtacctttccttgaacttattcatgatannnnnnnnnnnnnnnnnnnnnnnnnnnnnnnnnnnnnnnnnnnnnnnnnnnnnnnnnnnnnnnnnnnnnnnnnnnnnnnnnnnnnnnnnnnnnnnnnnnnnnnnnnnnnnnnnnnnnnnnnnnnnnnnnnnnnnnnnnnngctgggtcctctgggcccactgttctttccctatacttcgtcgttaggtctacctgg

SEQ ID NO: 231020 - DNA, 135 bp, Homo Sapiens
actgcccggctcctacgccagccgagccgggcttcttacccactttagcagtttgatgaagtagtgttgagatcgtttcgtcccctagacctctcatcattcgctttaccggatcacactgcgtggctgtgggtg

SEQ ID NO: 231021 - DNA, 405 bp, Homo Sapiens
tcactctaaggatccccggtctgtatacccatgtctgagaaggtaggatctggatctgcctgtgtctgaggaggtagatctggcatgagtatgagggtctcggtctgtccatgtctgcagaggtaggatctggcgcaggtatgaggatctgggtctgtcaatatctgaggaaatacgaatctggtacaggtatgaggatctgggtctgtttatgtctgaggaggtaggatctggtacaggtgtgaagatctgggtctgtctgtatctgaggaggtaggaatctggtacaggtgtgaggatctgggtctgtcagtgtctgaggaggtaggatctggccctggtatgaggatctgggtctgaccatgtctgagaaggtaggatcttgccctggtatgaggattgagt

SEQ ID NO: 231022 - DNA, 134 bp, Homo Sapiens
agtttggaatattaagagaatttccattttacagtgtctccatagctgtggtgcttcttacaaccctttcactttatttcttgtgacgacgagatttcgcatctgttgcccagagctggatgtgcaggtgtgcg

SEQ ID NO: 231023 - DNA, 145 bp, Homo Sapiens
tataacattaagtaatctatagggttctttatgggaattatctggtgctggatacttacaaattgtatctagctgcagactaattttaactaattattactgttttcctggtaaaagtgtgtgctgattagaattgaccaatatt

SEQ ID NO: 231024 - DNA, 133 bp, Homo Sapiens
aatgaatctataaaacatctagctagagagggtactatggtacagagtatgtactatcatgagcgaccgatcatagtgccacttcacacgagtgtgcgtctgatcgattcatccactattcgtaagttatgca

SEQ ID NO: 231025 - DNA, 345 bp, Homo Sapiens
  misc_feature (77)..(304): n is a, c, g, or t
agatggccactgatagacgggaaaggatgttaaacctcactcataataagaaaaatgcacattctaactatagccannnnnnnnnnnnnnnnnnnnnnnnnnnnnnnnnnnnnnnnnnnnnnnnnnnnnnnnnnnnnnnnnnnnnnnnnnnnnnnnnnnnnnnnnnnnnnnnnnnnnnnnnnnnnnnnnnnnnnnnnnnnnnnnnnnnnnnnnnnnnnnnnnnnnnnnnnnnnnnnnnnnnnnnnnnnnnnnnnnnnnnnnnnnnnnnnnnnnnnnnnnnnnnnnnnnnnnnnnnnnnnnnnnngcagtatgaaaagacacaaggttattaattgcagaactgta

SEQ ID NO: 231026 - DNA, 195 bp, Homo Sapiens
gctcgtccgcagttatcatggtaccccgatatgatcgggcacacatcgggtgcatgacggcgaagcacgtccggtttcgtgaccgaatcgatggttgggcacacgctctgatagtctccccgaccagtgaccttcaagggtcgcgttaaggacgataagaaggcgcgcatgtgctgacgagagggatctgattca

SEQ ID NO: 231027 - DNA, 151 bp, Homo Sapiens
ctacgagagccgccgcggttctctgttgttgagatgcgcctctgggcgatctgcacatactagaagctgagaggtttcctcgggtttagtcagagcttgatgcaaacaagggaaggagcctctggagtttcttgacctcctctggcatcca

SEQ ID NO: 231028 - DNA, 480 bp, Homo Sapiens
  misc_feature (322)..(322): n is a, c, g, or t
  misc_feature (354)..(354): n is a, c, g, or t
  misc_feature (372)..(372): n is a, c, g, or t
  misc_feature (440)..(440): n is a, c, g, or t
  misc_feature (460)..(460): n is a, c, g, or t
cagtgccgtcaataaatcatcgtgaatacattgttgagcctgttggagtgcatttgctgatacgtcggttggtgctgacacattcgcctcgaataacaataggataaattaatctggtgctcagtttgcctgagccgatcatttgaaatgatctgttggcatgatactgctttctgcccgctttctctatgccgaaagcacaaacaaggcacagtattctattaatttttgcagacgaggtgataagaatgacttttctactatttcaagcaaccattacacaagcaatcaagctctaaaattcactgctcatgctcttggntatttttagccttcttatcacagacctagagntgacataaaaaaagcctntacagaaagagctttttacatagcgctactccagctttccgctggaatacgccccccaacctttcatnaacacgccggatacacaggncccaagaagaaggggatctt

SEQ ID NO: 231029 - DNA, 464 bp, Homo Sapiens
  misc_feature (85)..(85): n is a, c, g, or t
tcatcttgggcctgtgttatcagcggacaaacggtggatgtttccgacagaaattttttcatggctgctgctaaagggaaaaatnttgttgccgaaccgcttgtttctcgattagacggagcttttgttcttgtatttgccgttcctatttatgatgataatcacgctatcattggtgttttactggcatcagttgaagcgtcagctctttcacatgatatagaagatattattgtcggcaaaacagggtattgctatattctcggtcttacgggaactactattgcggcaaaagactttgccagagtaaaggctatggagaatgtaataaagatggccgagactgataaaagccttgcttctcttgccgcctttgaaaagatggcaagagaaatagatgagccttccatcagcttctatacctataaaggtatacataagattgcgtcttacgctacgatgaa

SEQ ID NO: 231030 - DNA, 126 bp, Homo Sapiens
  misc_feature (21)..(21): n is a, c, g, or t
  misc_feature (31)..(31): n is a, c, g, or t
  misc_feature (42)..(42): n is a, c, g, or t
  misc_feature (78)..(78): n is a, c, g, or t
  misc_feature (83)..(83): n is a, c, g, or t
  misc_feature (103)..(103): n is a, c, g, or t
  misc_feature (113)..(113): n is a, c, g, or t
tggcgttggcgcctcactggnccggtttttncaagtccgggnaaaccctggttcgtgcccaacttggcatttaaatgnaattngggccaaacgccccgggggnagaagggccnggtttttgccggt

SEQ ID NO: 231031 - DNA, 640 bp, Homo Sapiens
  misc_feature (97)..(133): n is a, c, g, or t
  misc_feature (154)..(395): n is a, c, g, or t
ggagaactttatagatgatgtgtaagcagcaagcttaataggatgttacccgacactttgcgagactggcagctgatttgatccagatgtctctaannnnnnnnnnnnnnnnnnnnnnnnnnnnnnnnnnnnngacaaagccttcctccgtccnnnnnnnnnnnnnnnnnnnnnnnnnnnnnnnnnnnnnnnnnnnnnnnnnnnnnnnnnnnnnnnnnnnnnnnnnnnnnnnnnnnnnnnnnnnnnnnnnnnnnnnnnnnnnnnnnnnnnnnnnnnnnnnnnnnnnnnnnnnnnnnnnnnnnnnnnnnnnnnnnnnnnnnnnnnnnnnnnnnnnnnnnnnnnnnnnnnnnnnnnnnnnnnnnnnnnnnnnnnnnnnnnnnnnnnnnnnnnnnnnntcagccactgtgcctggcccagatgtctctaattctaacttgagatgttttgcaggatcatagcagagtgatttgctgatgtttccagaaggaaacgagcttggaacactcacgacagctgtcctgaggagtgtgtgtgtgctgtgcttgaatatctcactgctcatttatacacaggcttcctggtgactgagtaacagtatctgttcctaaataatgtaccctctttctttcttctctctccc

SEQ ID NO: 231032 - DNA, 144 bp, Homo Sapiens
aactgattttcgacgatcctgagccctttgtcactgcctaactctagctgtgcgtgtttgtgttgctaatttttaatttaaaaacgctagccctatgcacgcttggcacatgcctattatcccagtactttgcgtggctgatgt

SEQ ID NO: 231033 - DNA, 177 bp, Homo Sapiens
tggcggtgtgaaggtctcacacagcagtatatgaaagcacctgtgaactataatgccttgatatataatacattgatctattgtctcaatagtcaaatacaattatccagtgcattaagaatgtgatatgactaggatgtcaatacatcttgagtacatcacatctgcatttattaa

SEQ ID NO: 231034 - DNA, 359 bp, Homo Sapiens
gtaggattgtctggaataaaccgttgtaataaataaccggcaaaaaaaggcgccattaaatggcgcccaataaacctttgccaacggagcagaatggcgcagggtgctacggattaagtaagcattaactcagctgttcggttgcgcctgttcaaccgtgtcggccttgaccgacttgccatcggcgctggcaacttgtcgctcagccttgccgtgggttttttcctgaatgaagctgaagttgttgtagaactccttggagcgctctgcgccgccctctgcaaaggcagcggcagaggtcagggtcatcaggctggccagcatcaaggtcgagagtttcatagtggtatccccattaa

SEQ ID NO: 231035 - DNA, 155 bp, Homo Sapiens
cccgtcagtttattcatctacggccggctttttctatgtcatggcggagagatagggattcgaaccttaggtaccggtgaagagtacaacggatttcgaatccgtcccattcggccgactctgtgcatctcatccaacgcgcgcgccatcattac

SEQ ID NO: 231036 - DNA, 117 bp, Homo Sapiens
tgtagaaatcgcttgcaaagaatgctgttaagattgcaccgacaataccaccccaccgtgtaaaccaaacgtgctttaaaagccgatgactctttaatgcgtttggtttacacggtg

SEQ ID NO: 231037 - DNA, 137 bp, Homo Sapiens
tcgatctagacgatcccccgtgagacgacttcctttcgtacagggaggaattgaagtagatagaaaccgacctggattactccggtcctgaactcagcatcaccgtaggacctttacatcgcttgacacaaaacgaa

SEQ ID NO: 231038 - DNA, 338 bp, Homo Sapiens
  misc_feature (122)..(210): n is a, c, g, or t
tcatgagacgaacttccgtgagacgaacttccgtcagacgaccttttatattgctgattcagttagggcaccccaattcaaagacacaatgcagcatgtaaatgcatctacttaaagtgtannnnnnnnnnnnnnnnnnnnnnnnnnnnnnnnnnnnnnnnnnnnnnnnnnnnnnnnnnnnnnnnnnnnnnnnnnnnnnnnnnnnnnnnntactagtccattggagatacaacaaactcaccaatatgtaccggcatcaaacaaatttattacactcctgtatgtcagagtatgatgtgtatctcactgagctaaaatccacgtggtgaaaaggctaa

SEQ ID NO: 231039 - DNA, 118 bp, Homo Sapiens
tgatctcaggcaggaacacctaacagcacacttgtaacaatagcacaatagctgccgtttatggtttctgttgtgatctactgttcttagattctctttgacctcaatggtatacatt

SEQ ID NO: 231040 - DNA, 148 bp, Homo Sapiens
tacatgatacaattcagcttgtacccgccatttccgggggtgtgcccactggaggccgcaggaatcctcgggtcggtttcgcgaatcagcaccccgcgatccagcagcccctggccacacggctgtggcggtccgtgaagcgcccgaa

SEQ ID NO: 231041 - DNA, 239 bp, Homo Sapiens
ttacattatacaagtcgagctcggtaccgattacctttgatgtccggggctgagcgcgacgctacactgagcatggcacagcgtgtgcctacccgtacgccggactaggcgcgggtaacctcgttgaacccgattcgtgatggggatcggggattagtatttattccccatgaacgaggaattcccatatattgcgcgtcataagcttgcgttgattaattcccctgcccactagtaca

SEQ ID NO: 231042 - DNA, 192 bp, Homo Sapiens
gtcgccttgctgcttcagacttgaggctggtctgcttccgactccatctgactgaacactgaagtcgcgttgtccttgaacaactggaccgcgcgcgccatcgcgcccacttcatcgccacggttgagcgacggcaccgagacatcgaggtcgccaccggcgagacccttcatcacgtcagtcatggctgcg

SEQ ID NO: 231043 - DNA, 115 bp, Homo Sapiens
gataatttacgtgcggccgcgcgctgattggcgtccagcaaggtttgccacggcgcgtcggcagtgagcgcctggcgctgatacagtgcgaaatctttaccggcggcgtagcttt

SEQ ID NO: 231044 - DNA, 135 bp, Homo Sapiens
gagcgtgaaactccgtctcagacaaaaaaagtctggttctcgtaggttcatccggtgtcacaaatggacaggatttccttctttttaaaggctggactaaggctggggtatgatgggctcattcctaataatcgc

SEQ ID NO: 231045 - DNA, 207 bp, Homo Sapiens
tatatgtatatatgcggtgagtctatgatggccagctttccgtgctattctagagcgcgtgtgaaagacgtcagccttccatcatgagctcatcgcttacgtcttattctctccagtctacacgcttggtgccctttcctattgcacgtgatttttcccggtttgtccgttttcgtattcgcgcgacgggttctcactctgtcatcc

SEQ ID NO: 231046 - DNA, 125 bp, Homo Sapiens
ttacataatataaccgcggaaaggaccaacagaggagtggagccctgcggcttaatttagacccaacacagggaaaactcacccggcccgggacacgggacaggatttgacacgattcgattagc

SEQ ID NO: 231047 - DNA, 206 bp, Homo Sapiens
tccagtgtgacgcttggtttcccagttcgaatctgccaggatcccctcgcggtttatccccaggtcgcagccagaggagactctggtggagcgtccgtagcgtgctccttacgtgcccatcggtcgtccgacctgggtatagggcgcgaccacgactaactcgaaccatcttagtatcgtggttcctctccgacagtttccactca

SEQ ID NO: 231048 - DNA, 374 bp, Homo Sapiens
gccgatggctgcgttgcgtgaggcgctggtgaaggtgcgcaaggtggtggcgtggtgagcgatcttcagtacttgtaagcctggcgaccaatcagcagccattggccgtgctgtttttgccaaacctgaaagttgtcgatatcggttggtgtgtccacaccgctgttcaccgccagggcatggaagtggttgcgcaccagggcggtatcgccgttgagggtgatggtctggttttgcatctccagggttttgaatgcgctggtatgggtttccaggtcggcaatgaattgcgccttgttttgcaccttgccgctggagtggccgtaggtgagcttgtcggacgtcagtgcatgaagctgcttgaggtccagatg

SEQ ID NO: 231049 - DNA, 395 bp, Homo Sapiens
agtgtgtgtccaaaggtgattggaagatgtgttgtgtgagccaatgttcctagtagctgagttgagatgagtatggaaaggatggaagatcacgcggggtcttatgggccacattgagtaccttggtttttcctgcgaggtgccagccacagaagggcctgaacagagccaggacaggatgaaatgtgagcagcgttggcatacaacctgtgcagtggttccatgtgccgttagggggtgctaaagctggtgttaagatcattcccaagaactatactgataatgaattggaagagatcactaaggaggttcaccatgaagctagcacaagagggctttatcggtcctggcattcatgtgcctgctccagacatccgctcaggtcagcgggagat

SEQ ID NO: 231050 - DNA, 216 bp, Homo Sapiens
gacgggacacagatcgcactcagtgtccgctttatgtgagcaagactcatcctttaacagaatgacacgagcagttctcaataacgactaataacaaattcccactgaatgccaaacatgtttcaatcaacattacctcaggacggaaacatcgcatgctctcaagtcaggagtgttgtgagagacgttgtgggggtacccgcagcctcggaaatt

SEQ ID NO: 231051 - DNA, 196 bp, Homo Sapiens
tgtatcaagaaagcaacacattacactatatttataacagaattactaaatagttaactaaaatgtcaatatatcccaataacattatcagatgactatacgaggtctccctatagaccataccacgcgagaatcaaagacttatggcttcaaacgttaaacgtttacaaataaaaccctaattaccttaaccttc

SEQ ID NO: 231052 - DNA, 300 bp, Homo Sapiens
acgcttattgtgccgcactggtgggtcaggccctgtattcaccatagaggtacggcgttacgatacccgcgatgaagtgatcgaagccttgaagcaggggggcgtggattttctcggttccgccaatggctacgaagcggccgacccgcaactgcttttgtctcgctcctacgccaacgatcaaccgaccctggtgactcgcagcggcgatagccaggtgttgaacgacgacctggcgggcaagcgcgtagcgatgctgtatcactatatgcagcccgacgccgttcgggcgttttaccc

SEQ ID NO: 231053 - DNA, 129 bp, Homo Sapiens
acgcaggacttcgtgcgtcacttatgaactagttactccccactttagtccaaaatagtgagctttcaacgcttagtgccagcgtacttacagcaactacgctcaacagctacttgtactaggcacttt

SEQ ID NO: 231054 - DNA, 173 bp, Homo Sapiens
  misc_feature (52)..(102): n is a, c, g, or t
cgacctagaggatcccatcaacacggtagtattaagttcttaagatcatttnnnnnnnnnnnnnnnnnnnnnnnnnnnnnnnnnnnnnnnnnnnnnnnnnnnaaatgatcttagaaacttaaatacttaccgtgttgaattttcgttggaagtgaattcttatcttaaaaatc

SEQ ID NO: 231055 - DNA, 279 bp, Homo Sapiens
  misc_feature (54)..(54): n is a, c, g, or t
  misc_feature (84)..(86): n is a, c, g, or t
  misc_feature (109)..(109): n is a, c, g, or t
  misc_feature (140)..(140): n is a, c, g, or t
  misc_feature (145)..(145): n is a, c, g, or t
  misc_feature (151)..(151): n is a, c, g, or t
  misc_feature (184)..(184): n is a, c, g, or t
  misc_feature (194)..(194): n is a, c, g, or t
  misc_feature (205)..(205): n is a, c, g, or t
  misc_feature (215)..(216): n is a, c, g, or t
  misc_feature (247)..(247): n is a, c, g, or t
caagcatgcaggaactgggcctatgagaggctgcaaagaatcatgcatcttggncatggtgaggtcaacttgataaaatccatnnnctgcagagaaagctgactaggcnagatctgttctaaagaggctattggaacgantgatntgttcntgttgacctgatgctatgcaggaccctcatctncaggccctanacttacttaanttatgagccnnttccattcggggaactgtgtacagggctccngctagatgctgacttaggtctggaacccaatt

SEQ ID NO: 231056 - DNA, 440 bp, Homo Sapiens
  misc_feature (44)..(235): n is a, c, g, or t
  misc_feature (254)..(254): n is a, c, g, or t
  misc_feature (261)..(261): n is a, c, g, or t
  misc_feature (300)..(300): n is a, c, g, or t
  misc_feature (308)..(308): n is a, c, g, or t
  misc_feature (324)..(324): n is a, c, g, or t
  misc_feature (333)..(333): n is a, c, g, or t
  misc_feature (336)..(336): n is a, c, g, or t
  misc_feature (340)..(340): n is a, c, g, or t
  misc_feature (347)..(347): n is a, c, g, or t
  misc_feature (351)..(351): n is a, c, g, or t
  misc_feature (357)..(357): n is a, c, g, or t
  misc_feature (369)..(369): n is a, c, g, or t
  misc_feature (383)..(383): n is a, c, g, or t
  misc_feature (396)..(396): n is a, c, g, or t
  misc_feature (413)..(413): n is a, c, g, or t
ttgactctgactggtgtggtacttggtataaagaaggttccctnnnnnnnnnnnnnnnnnnnnnnnnnnnnnnnnnnnnnnnnnnnnnnnnnnnnnnnnnnnnnnnnnnnnnnnnnnnnnnnnnnnnnnnnnnnnnnnnnnnnnnnnnnnnnnnnnnnnnnnnnnnnnnnnnnnnnnnnnnnnnnnnnnnnnnnnnnnnnnnnnnnnnnnnnnnnnnnnnnnnnnnnnnnnnnnnctaaggtggggaggaacanccttaancctaaaaaagtgccgggtggaattaaaaaagggattggnccccctgncctccaacctgggggnaaaaaaggnaancctnccccctncccnaaaaanaaaagccccttnaaacgggccccccngggggaaatttgnaattgattgggtttacntcgggaaggaccccttgcccccggggt

SEQ ID NO: 231057 - DNA, 331 bp, Homo Sapiens
  misc_feature (63)..(63): n is a, c, g, or t
  misc_feature (80)..(80): n is a, c, g, or t
  misc_feature (144)..(144): n is a, c, g, or t
  misc_feature (154)..(154): n is a, c, g, or t
  misc_feature (156)..(156): n is a, c, g, or t
  misc_feature (189)..(189): n is a, c, g, or t
  misc_feature (213)..(213): n is a, c, g, or t
  misc_feature (235)..(235): n is a, c, g, or t
  misc_feature (243)..(243): n is a, c, g, or t
  misc_feature (251)..(251): n is a, c, g, or t
  misc_feature (260)..(260): n is a, c, g, or t
  misc_feature (269)..(269): n is a, c, g, or t
  misc_feature (272)..(272): n is a, c, g, or t
  misc_feature (280)..(280): n is a, c, g, or t
  misc_feature (284)..(284): n is a, c, g, or t
  misc_feature (297)..(297): n is a, c, g, or t
  misc_feature (311)..(311): n is a, c, g, or t
  misc_feature (317)..(317): n is a, c, g, or t
actacagaagaacaatgcgaggcgagctcaggcgccgctgatggtggttttccgatcaacttncccactcaaagaacccnggagagctcttgattcatctctcagtagggtcctgaagtccatctgtcttgaagaccagggctncccctgggtntntgccaggacagagggcttgcacaggccaactgnaatcctttaaacgctaaaacggcnggctttggggctatgcccttantcccaccntttggtgnttagcggtnggtcccttnggncggagttnaaanaacttgccaaccnaataaacctttttnttaaancaaattggcggcct

SEQ ID NO: 231058 - DNA, 205 bp, Homo Sapiens
  misc_feature (62)..(62): n is a, c, g, or t
  misc_feature (105)..(105): n is a, c, g, or t
  misc_feature (118)..(118): n is a, c, g, or t
  misc_feature (149)..(149): n is a, c, g, or t
cgcacgccgcgccgcacagagctctcagcgccgttccagccacagcctccgcgccttggttnagcttcaacatggcaaaaatcttcagccctacagagactgaancggggcatcgagnccctggatgctgctttcaaaagtatgctggnaaaggatgggtttaactcacttttttcaagaaagagttcctaagcttatgaatccg

SEQ ID NO: 231059 - DNA, 520 bp, Homo Sapiens
  misc_feature (23)..(23): n is a, c, g, or t
  misc_feature (26)..(26): n is a, c, g, or t
  misc_feature (49)..(202): n is a, c, g, or t
  misc_feature (210)..(210): n is a, c, g, or t
  misc_feature (212)..(212): n is a, c, g, or t
  misc_feature (215)..(215): n is a, c, g, or t
  misc_feature (221)..(221): n is a, c, g, or t
  misc_feature (224)..(224): n is a, c, g, or t
  misc_feature (235)..(235): n is a, c, g, or t
  misc_feature (245)..(246): n is a, c, g, or t
  misc_feature (256)..(256): n is a, c, g, or t
  misc_feature (261)..(261): n is a, c, g, or t
  misc_feature (265)..(265): n is a, c, g, or t
  misc_feature (268)..(268): n is a, c, g, or t
  misc_feature (274)..(274): n is a, c, g, or t
  misc_feature (278)..(278): n is a, c, g, or t
  misc_feature (283)..(283): n is a, c, g, or t
  misc_feature (289)..(289): n is a, c, g, or t
  misc_feature (297)..(297): n is a, c, g, or t
  misc_feature (308)..(308): n is a, c, g, or t
  misc_feature (312)..(312): n is a, c, g, or t
  misc_feature (324)..(324): n is a, c, g, or t
  misc_feature (330)..(330): n is a, c, g, or t
  misc_feature (339)..(339): n is a, c, g, or t
  misc_feature (344)..(344): n is a, c, g, or t
  misc_feature (351)..(351): n is a, c, g, or t
  misc_feature (360)..(360): n is a, c, g, or t
  misc_feature (363)..(363): n is a, c, g, or t
  misc_feature (370)..(370): n is a, c, g, or t
  misc_feature (373)..(373): n is a, c, g, or t
  misc_feature (383)..(383): n is a, c, g, or t
  misc_feature (385)..(385): n is a, c, g, or t
  misc_feature (407)..(407): n is a, c, g, or t
  misc_feature (427)..(427): n is a, c, g, or t
  misc_feature (430)..(430): n is a, c, g, or t
  misc_feature (441)..(441): n is a, c, g, or t
  misc_feature (467)..(467): n is a, c, g, or t
  misc_feature (479)..(479): n is a, c, g, or t
tggcaagtggctcctgactgtantcncagtgagcgagatcacaccactnnnnnnnnnnnnnnnnnnnnnnnnnnnnnnnnnnnnnnnnnnnnnnnnnnnnnnnnnnnnnnnnnnnnnnnnnnnnnnnnnnnnnnnnnnnnnnnnnnnnnnnnnnnnnnnnnnnnnnnnnnnnnnnnnnnnnnnnnnnnnnnnnnnnnnnnnnttcataantnganatgganttncccaggttagnctaaaactgnngggttccagngatcntccnacnttgacntccnaaagngctggnattatggncgtgagccacngcantgggcccaaaancccagnttttaaaantaatnctcaaangtccaaaantantcagtanacntttggaagcntntaactgtaatgaaatggattgnccgaaagaaactagagaggnctncagtaagttancattggaatcataagcgaatttgaanaaacctgttttnattaaatttggaagggttttgcttgaaccttttggaaattt

SEQ ID NO: 231060 - DNA, 121 bp, Homo Sapiens
ctaacgatgtaaattagaattgcgggcatttacagccaactcaatgatgaacagatatttccttgatgcctggtacccgaagctctgacattccgtaatcactgggtcctacgctgatttc

SEQ ID NO: 231061 - DNA, 244 bp, Homo Sapiens
atactactgtagtggcaattattaaactatacttatcctcttaaataaatacttgctcaatcagttaatcagcagtgaatcatcttgcagctatgcacctgataaagaaatatacgtgattaccaatatcaagatgctgctagctgatatatctgttttaacgggtatcttttgtatgttctatccacttaattattacattcgtggctattgcatttccaggctgtactttcatattgtggcg

SEQ ID NO: 231062 - DNA, 299 bp, Homo Sapiens
  misc_feature (133)..(149): n is a, c, g, or t
cgccaaatgtgaaaaaaaggggtgtgtagagagaagagacaatttctaatagaatattaagagtgtaaatgagggagtatatgaaaactgacaaaaatcaagagatttttatattccatttttaagtttgacnnnnnnnnnnnnnnnnnggaaaaaaagtttaattttgtcacccaggttggggggcgggggcaaaatccaggttaattgaaccctttgcctctggggttaaggcgatcctcttgaataagcctcttgagaggctggaattaggggcccgtccccccacaccaagttaa

SEQ ID NO: 231063 - DNA, 473 bp, Homo Sapiens
cgaatccgtacttttgctcatagctcgtcccggtgtgaaaaaccacttccggaaagccgaaccagtggcctgagcgagtcagtgcgaaaaacgcgccgatactgtccgcttcttgactaatgggcttgagcacgagcgaaagtctaaacctgtcaattttgacagtagccaagatcttgttcacaggggttagatatctacacgctcaggaacagcatcctgtaatgctcgcctacgtgctacccggagaacgccatgtctagtaaaaacagcaagccggctaccactaacagcaaaaaggtgtcgtcgataaaacccaagtttcttgacaccccgcggattccagggatgtccccagcgtttaaaggctatgacggtggtatcgcgcagtggttgttgttcggaggattgaccgttgcagtggataaaaactgggcggccaagcccaaggataagatccaagtgcttgtcat

SEQ ID NO: 231064 - DNA, 487 bp, Homo Sapiens
  misc_feature (170)..(391): n is a, c, g, or t
cgaccctccgacgaggatacagctaacttagaatatgagtttaaactgaaacaataactaaactaaaaaagcaaatcctgtataagcccttagttacttgggaagtcatttaaaagataagcccatatcatctcaaattccaaaacttattgcaaggtaaataatcaaannnnnnnnnnnnnnnnnnnnnnnnnnnnnnnnnnnnnnnnnnnnnnnnnnnnnnnnnnnnnnnnnnnnnnnnnnnnnnnnnnnnnnnnnnnnnnnnnnnnnnnnnnnnnnnnnnnnnnnnnnnnnnnnnnnnnnnnnnnnnnnnnnnnnnnnnnnnnnnnnnnnnnnnnnnnnnnnnnnnnnnnnnnnnnnnnnnnnnnnnnnnnnnnnnnnnnnnnnnnnntggctcaaacacttaaatgtaagagctagaacaataaaactctacaaagaaacatagggataaatcttcgggtaaaccctgaaaatctggcaatgg

SEQ ID NO: 231065 - DNA, 682 bp, Homo Sapiens
agtgggtccctgcaggtgtgagcgcagtagcgcacaaaccgggatagtctggatgtactcatggaccgtgatgtcggcactgcatcgactgcactcgccaccgatcgtttccttacatgcaaagcaaatgctcattctccattctcgacataggcgtcggcgctgcattcggggcatgtcgcgatcggtgacgagtcaccgttcttggcggcataataggcgtcgatctcgtagctcgccgacacgaccatctcagcaagctgccgctgatcgtactcatggccacactggaagcatttggcatcggccgcttcgctctcgatattgtcgcggtcggtctgaccgataagagacgagccacaattggtgcaagacatacgatccagttgcccgatctcaccgggccaattcaggcgcagaaggctgtccatgcagctcttctggaccttattgaaggcattcgtctcttcaaggattgtatcccagacgtccgccaagacgtcttgcggatcttctttcagcgtctccaggaagtcgataaccatcggaaatgaggcggcgatcgcctccttcagcgctccaacgggttcggccaggtgataatgctcaagattgtttcggaatcgttgcagcttttcgatgttcaccgtcaggcaggaccagccgaattcttgaatcgctc

SEQ ID NO: 231066 - DNA, 158 bp, Homo Sapiens
gaatgtcgggctcaggcacacctccagaaggcccactcctgccctcttaatcatggactcaggtggtgtggactcaggtggtgtgcacaccacctgagtcctcccagtggcagattgtttcttagcctccctggatctcccagttaatttcctttgtt

SEQ ID NO: 231067 - DNA, 486 bp, Homo Sapiens
  misc_feature (154)..(381): n is a, c, g, or t
  misc_feature (401)..(401): n is a, c, g, or t
gacatagctgtgaacatacggacacaacacaatagtttgagagacagcattttctgaccacagtggtcttcaaagcgaagttggactaacatataatgcagatggagcaattttttttgtttgtttgagacggagtcttgctctgtcaccctgnnnnnnnnnnnnnnnnnnnnnnnnnnnnnnnnnnnnnnnnnnnnnnnnnnnnnnnnnnnnnnnnnnnnnnnnnnnnnnnnnnnnnnnnnnnnnnnnnnnnnnnnnnnnnnnnnnnnnnnnnnnnnnnnnnnnnnnnnnnnnnnnnnnnnnnnnnnnnnnnnnnnnnnnnnnnnnnnnnnnnnnnnnnnnnnnnnnnnnnnnnnnnnnnnnnnnnnnnnnnnnnnnnnntgagccaccacacccagccnccaagttaacaaagttttggaagaaggaatgataccactcatcttagagctagaaatatgtattgcaaaaactgtttaatttaga

SEQ ID NO: 231068 - DNA, 530 bp, Homo Sapiens
  misc_feature (73)..(372): n is a, c, g, or t
  misc_feature (377)..(477): n is a, c, g, or t
ggattctaccttatactcctcctcccttgcttgggtgacagtatgaagaccagagaaggaaagaaaagatggnnnnnnnnnnnnnnnnnnnnnnnnnnnnnnnnnnnnnnnnnnnnnnnnnnnnnnnnnnnnnnnnnnnnnnnnnnnnnnnnnnnnnnnnnnnnnnnnnnnnnnnnnnnnnnnnnnnnnnnnnnnnnnnnnnnnnnnnnnnnnnnnnnnnnnnnnnnnnnnnnnnnnnnnnnnnnnnnnnnnnnnnnnnnnnnnnnnnnnnnnnnnnnnnnnnnnnnnnnnnnnnnnnnnnnnnnnnnnnnnnnnnnnnnnnnnnnnnnnnnnnnnnnnnnnnnnnnnnnnnnnnnnnnnnnnnnnnnnnnnagaannnnnnnnnnnnnnnnnnnnnnnnnnnnnnnnnnnnnnnnnnnnnnnnnnnnnnnnnnnnnnnnnnnnnnnnnnnnnnnnnnnnnnnnnnnnnnnnnnnnngaaggatagagagatagaaagtggggggggaatatgcatgtcttgaggcccta

SEQ ID NO: 231069 - DNA, 326 bp, Homo Sapiens
  misc_feature (54)..(83): n is a, c, g, or t
  misc_feature (113)..(137): n is a, c, g, or t
  misc_feature (139)..(234): n is a, c, g, or t
  misc_feature (263)..(284): n is a, c, g, or t
ggaatcccctgtctggtgatatcatatgtaacatttactcctgtttctgctgannnnnnnnnnnnnnnnnnnnnnnnnnnnnnacatcagctgtaatcattcctgtgctgtgnnnnnnnnnnnnnnnnnnnnnnnnnannnnnnnnnnnnnnnnnnnnnnnnnnnnnnnnnnnnnnnnnnnnnnnnnnnnnnnnnnnnnnnnnnnnnnnnnnnnnnnnnnnnnnnnnnnnnnnnatgggccactgctcccaacctaccctgcnnnnnnnnnnnnnnnnnnnnnnaataaagaatgtggtttatacccagttgatgaggaaaaactc

SEQ ID NO: 231070 - DNA, 148 bp, Homo Sapiens
cggtcctacgcatatcgaattatcatatattcgattttccgtatgcgggagaagtgaacatgagcgagctcatcacccccaccgtcctgtttaaaagcttggcagatgccactcgaaccaaaataacgctactcatcgcccgcgaggg

SEQ ID NO: 231071 - DNA, 432 bp, Homo Sapiens
tactcgatcatacgtgcacggtcacgctgctccggcggcacttgtcccgcaggatcgcgataaacaccaggttgtcgatacccagcaccagttccagcacaatcaaggtcgcaaggccgagccaggccgtaggatccgctaaccattccatttataaattctctgtctttaaagtgtttagaacgccgggcacggcaaagtgcggtcatgcgaccgggacaaggttagttgacggaatacggggtgcttcagcgggaacagcgacagcggttgtcttggggaaagacgactgggaggctccgagagggtgttcatgcaagtcctgaaatgacaaaaggacttgaatcctacattcgaaatacaaatttcccacaacgcaaaactattacaaaacctgtaaaccccccatcagaagcacagcaactcttgtgg

SEQ ID NO: 231072 - DNA, 238 bp, Homo Sapiens
gctgaatcgctctggtcgtaggggatgaggccatgaagattcttcttggacgagtacagtgagcatgagcacgcgcacctcacagtggcgctgtgtggtgtggaatgtgcacgcagccctgcgaagctctgttgcccattgatgctggtagatggccatttgaagagactccatgtgtccttgtttggttgaaattggaacttggacctatctcttgctggatttcagggggagatcc

SEQ ID NO: 231073 - DNA, 194 bp, Homo Sapiens
  misc_feature (12)..(12): n is a, c, g, or t
ctaaatggctgnacctaaatggctgtacctaaattgctgtgcctgtgaagcttcaggcggtttggatgagaatggctgtcactacgagggctatgttgctgattagaagaagattccactgagcgctattagggtctcgtgttgtgcgcaaggcgaatggagcttgtaataataattgcttcaaagggatagta

SEQ ID NO: 231074 - DNA, 158 bp, Homo Sapiens
cagagtctctggaacttataccagcgctctgtaacatctaccagttctacagccatttagtgctaaagtgctgtggctgatgagatcagacatggagagagtcctttctgtatctgtctagataccacaatattggctaggaggtcttggtggtaaca

SEQ ID NO: 231075 - DNA, 192 bp, Homo Sapiens
gtgcgtatggctgttacctcaactggctgttacctacaactggctgttacctacaactggctgttacctcaatggctgttacctacatggctgtcacctcaatggctgtacctccatggctgttacctaaatggctgttacctacctggctgtaggttggctgagaatttaaacatgcccgcaacaaatcca

SEQ ID NO: 231076 - DNA, 170 bp, Homo Sapiens
ttggggtagacgtggacggaactgactggacgggtaggacgacgccttgacgcctgcgacgaagacgtctcttagacatagacgacacgctgacacgttaaacgttgtggaacgagacgtggggactaacctgacgtgaccacgataactcacggacgacagacaaacgg

SEQ ID NO: 231077 - DNA, 128 bp, Homo Sapiens
acatcaggcatgtttccattgtgtctgtcatgccatcgcgggtcatcctgcagtcaacgtcgcgggccattccggcatcaggccgcagcaacagtgtatgtgggcacaggcacagttcagcatttcac

SEQ ID NO: 231078 - DNA, 275 bp, Homo Sapiens
  misc_feature (102)..(112): n is a, c, g, or t
tgaggtgatctacccgatcttatctaaatggctgtcagattcttcttgtaacctttaaggacatgaatttttcttagtcttgaagacatgtgagatctgtannnnnnnnnnnggtaaaaaaggtgaatttttgggtcctctaattggtggtggcccggtgtactccctgggtggtaaagtcatctgaatcctgggttctcttaatactcaccaggtacaaataacgggtatgtttaataacgccgcagctagggtacacagccatttaggtatgt

SEQ ID NO: 231079 - DNA, 178 bp, Homo Sapiens
tcaccagtatgttactaaatggcagttacctaatggactgtcacctaaatggctgttacctaaatggctgttacctaaatggctgtacctcaaatggctggtacctcaaatggcaactcgtgcatcgccaacatccagcggccattaaggtaacagccatttaggtagggtacctgtt

SEQ ID NO: 231080 - DNA, 177 bp, Homo Sapiens
ggtggcccagccccctgtgctgggctgacttgcagcgatttataaactggctgttacctactatggctgctttatttggcgatcacgagttgccatttaggcaacagccatttaggtaacagccactagacagccacttaaggctaacagccactttaggcttacagcccatttagg

SEQ ID NO: 231081 - DNA, 235 bp, Homo Sapiens
  misc_feature (44)..(96): n is a, c, g, or t
  misc_feature (156)..(170): n is a, c, g, or t
ctttattatggcagaaaaaaagtgcattgaaatactacaaagannnnnnnnnnnnnnnnnnnnnnnnnnnnnnnnnnnnnnnnnnnnnnnnnnnnnctggtctttatgtgcttaatttaacgctgaattataattagccacacaaataatgagagnnnnnnnnnnnnnnnctggctcactccaaatcagccggtaaagggaatattccctcctacagccattaaggttgggatac

SEQ ID NO: 231082 - DNA, 188 bp, Homo Sapiens
gcagtatcaacaaaccatctaatataacgcaaataatcactgaaactccacccacatcttaaacctgggctaaactgtcttatacctttagcctatgaacgttgcgggcggagaagaagagatgagtatctcattttgacgcgacaactcaataattcggtcgtgagcctctagcagtaagctctgag

SEQ ID NO: 231083 - DNA, 123 bp, Homo Sapiens
gtatctgttaatttcttattttttttcctaagactgggccatatcttctggtatcttggcatgcttagtttttggtatggtcataaatactgtacatttggaatattatgatgggcaaaaagg

SEQ ID NO: 231084 - DNA, 132 bp, Homo Sapiens
  misc_feature (77)..(90): n is a, c, g, or t
gctatgtcactaaatggctgctacctaaattatgtacaaatggctgtacccgacctttgtatttattgctggaatgnnnnnnnnnnnnnnggctatgaaatctacttgggtataaatacagccattaaggta

SEQ ID NO: 231085 - DNA, 117 bp, Homo Sapiens
ttgctgttactaaatggctgtcacctaaattgctgtcgcatttagatacagccattaagtcacagccatttaggtcacagccttttaggtaacagccatttatggtaacagccattt

SEQ ID NO: 231086 - DNA, 128 bp, Homo Sapiens
cgaagtatctagtaaatttcttttttattttcctatgactgggcatatttctggtacttggcatgctaagttatggtaattgtcattaaaatactgtacattttgaatattatgcatgggcaaaatgg

SEQ ID NO: 231087 - DNA, 264 bp, Homo Sapiens
  misc_feature (50)..(153): n is a, c, g, or t
cacttattcgtgttgcaccaccactactggtgataattttgtttttgttnnnnnnnnnnnnnnnnnnnnnnnnnnnnnnnnnnnnnnnnnnnnnnnnnnnnnnnnnnnnnnnnnnnnnnnnnnnnnnnnnnnnnnnnnnnnnnnnnnnnnnnngagtgagccactgcgcccaaatctcagaactttgttgattatatgttggcagattgcttccagggagaaagtatttaaggtctcccttaaattgaatataccctggtggac

SEQ ID NO: 231088 - DNA, 219 bp, Homo Sapiens
cgcgatcggtgcggctagtccatctatctggtgctagaaccgagcgattgaagcgtgcgaaagctgcgcgtaacgcaagaacctcgagatattctgcggacctacgagcaaagtcgacctcagacgagtggaggatattctgaaaaatgacgatcagatatcgacgctaatcaacaatgctggctacggcgtgagctcttcgtagctcacatctgatgt

SEQ ID NO: 231089 - DNA, 223 bp, Homo Sapiens
  misc_feature (180)..(180): n is a, c, g, or t
ggatgctgcggtcactctagatcctatcgtgtgccggtgtgatgtgcgattctaatacacacacttaagtgtcagtgagataagctaatgtaaccatatcaaacaaatagttctcttgtagcccctttagtctctaagagatccgaatccagaaatattcatagggtactatcatgactnattattaagtctcagtagctgaatctgtacgtatttttcttca

SEQ ID NO: 231090 - DNA, 231 bp, Homo Sapiens
gggtcatccagaggttacttatcgtgttgcaccgcgagcttctatcacaaactggaggtacttcttcaaggtccacccgtgctggccagctgtccagaagggggatcgctgaggaggcagatggagaatgagcccccagttccaggtggccatcatatgcaggctttccggaacagtccttttcttccaggcccggagatccaaccttttttaaacacaaatctccttctt

SEQ ID NO: 231091 - DNA, 131 bp, Homo Sapiens
caggatccatcggtgacatttcatcatgtcatcatgtcatcatcactagcaagttcgttctgcctgaactgtactttctttacagacccaggcgtggcagctttattaccctttcttttctttaatctacg

SEQ ID NO: 231092 - DNA, 516 bp, Homo Sapiens
  misc_feature (119)..(389): n is a, c, g, or t
tatcgtgtgcacgtgcctggactctctcttccccttttaaagatcatccatcattgtatttctcagaaatttgtttctaaggactcttatctctcttatgtcttccccttagggtgtgnnnnnnnnnnnnnnnnnnnnnnnnnnnnnnnnnnnnnnnnnnnnnnnnnnnnnnnnnnnnnnnnnnnnnnnnnnnnnnnnnnnnnnnnnnnnnnnnnnnnnnnnnnnnnnnnnnnnnnnnnnnnnnnnnnnnnnnnnnnnnnnnnnnnnnnnnnnnnnnnnnnnnnnnnnnnnnnnnnnnnnnnnnnnnnnnnnnnnnnnnnnnnnnnnnnnnnnnnnnnnnnnnnnnnnnnnnnnnnnnnnnnnnnnnnnnnnnnnnnnnnnnnnnnnnntgtttgagtctagcctgagcaacattgtgaaactctgctctaattttttattaagtgccaagatgacgagatcctatttggggcaactttgtatacctcgtaatcacctgaagtgcaacacgaataa

SEQ ID NO: 231093 - DNA, 370 bp, Homo Sapiens
  misc_feature (194)..(194): n is a, c, g, or t
  misc_feature (209)..(209): n is a, c, g, or t
ataggacccctgctgctgcgtcgagcgcacgtgtaggacccgaaagagggaactatgcctgctgcgctggcgaagccagaggaaactctgtggaggtccgagcggcctgacggcaatcggcgccgcctggtataggcgaaagactaatcgacccatctagagctggtccctccgaagtccctcaggaagctggngtctcgagacccgancacccccgccacgcagttatccggaaagcgaagattagaggcttgggccgaaacgatctcaacctattctaaacttaaatggtaagaagcccgctcgctgcgtgagccggcgtgaatgcagtcctagtggccacttttggaagcagaactgcctggggatg

SEQ ID NO: 231094 - DNA, 106 bp, Homo Sapiens
actccagaggatgaagtcggttctaccatacttcagagctggtattttgacgtcaactcgacaactatgacccctatctctaagaggaaaaacaagagatatgata

SEQ ID NO: 231095 - DNA, 264 bp, Homo Sapiens
cgcatcacatttgcatggtaagggcagggcaccgttgcccctcgctctgttcatgtacaaggcatgcgtagcgcatgggcagggcgcatgcaggcctcaagcatgcatggcgggccaggcatcagttccagcacaggttgcgtcatattccgtgcagacgtcttgcagcatcgttcagtcattcagattcagtctttgctctgtgcagtgcttcaggcacacacagggccatcaccaggcacctcaggcacagccagcatcaca

SEQ ID NO: 231096 - DNA, 297 bp, Homo Sapiens
tagatttcagcatacgcagatacaatacagcaaatcctaaccacccaggtgatttgacaaacgggcccgtccatggacatagatgacttcatcagatgctacctggattcttcgcagcaggtatcatatttcctaggtattaggaaaacagaaattttcaaggtcacgacaagaaatgaattatgtatgcctcgtattttagaagataatgcttttgcttatttttagccattatttacttgactatctccggttcactactactactgtcgtcaccatctatgataccgcgaagga

SEQ ID NO: 231097 - DNA, 245 bp, Homo Sapiens
ggtcttagggagaacacagctcaaaggtggcatgggggcccaggggcacaggcatgtggaccttgtgaaagagacgacccggaagatgcttccagctgtggaagtgatttcacttttcccacttgaccagttgtccgctaaagcttcagtgctttactaggcattagatcactaaaatgcctattcgttcttgaacaggggtactttactgtttcccagattccttaattttacagcctttatta

SEQ ID NO: 231098 - DNA, 232 bp, Homo Sapiens
gctcagggcagcatggactacacacgcatccatggacaagttgcacaggcacaacagcacaagcagcacaaggtcttcaacatgccagagcgcacattgcacatgctcgctccagcaccatcccgtctgcgtatggctgcatccaaatcatgctgcacatttccccatacaccggttgcaatgactcacatctctctcctcttgcacaacacattgctcagcatgcaccagc

SEQ ID NO: 231099 - DNA, 284 bp, Homo Sapiens
gcctcagatacactttctcattcttccaaacatcaggctgggatgccattctgtcacacattttcccctgccctcaggcatgtatacctgcaggcaatcaaggtcacaggcacagcatgtcagccacagtccagcctcatggctttcacgtagctcagcgtggccatggcatcctttcacaggcacagccaggcagcggcagtatggcgcacagcagcagcgcacagggcgtcgcacagtatgactcatcctcttctcacacagcggcagcagctgcatatttc

SEQ ID NO: 231100 - DNA, 202 bp, Homo Sapiens
gttgagggccggctgagcacgctgatcagggggatttgaactacgccgaagagaacaccaggcgccacgaagaggacaatgataaggtgagagctgcgacggaggactgaggactcgaaatcctgcgcgacaggctggatgtagacttggatgggtgagaggacgagcggctgccatccggagaattggtcccggagaagtt

SEQ ID NO: 231101 - DNA, 404 bp, Homo Sapiens
  misc_feature (44)..(343): n is a, c, g, or t
cagaaaagtggtcaaattagatttaggatcggtagaagacaaannnnnnnnnnnnnnnnnnnnnnnnnnnnnnnnnnnnnnnnnnnnnnnnnnnnnnnnnnnnnnnnnnnnnnnnnnnnnnnnnnnnnnnnnnnnnnnnnnnnnnnnnnnnnnnnnnnnnnnnnnnnnnnnnnnnnnnnnnnnnnnnnnnnnnnnnnnnnnnnnnnnnnnnnnnnnnnnnnnnnnnnnnnnnnnnnnnnnnnnnnnnnnnnnnnnnnnnnnnnnnnnnnnnnnnnnnnnnnnnnnnnnnnnnnnnnnnnnnnnnnnnnnnnnnnnnnnnnnnnnnnnnnnnnnnnnnnnnnnnaataaagagaaagagatagggaattaccctacttccttttctttactctctagcctggaca

SEQ ID NO: 231102 - DNA, 311 bp, Homo Sapiens
agttgatcctcaactcaatttcaagtggagcttgatgctgataagacagggcccttttgtcctattctacctcgcgccggagttgctgcacagctctattgcttttcctgacatcttggcgcgtcttctatcatgacagttggatgaagtgttccatgacacgctgatcaaagacatgctgcagccagatgagaatctccattagtctccacaacttagaagacaccattgtcaatggcagagaagagacacatcgaagtgtccgccacccagaacacacaccaggacgttatgctacccctacctctcga

SEQ ID NO: 231103 - DNA, 536 bp, Homo Sapiens
  misc_feature (201)..(450): n is a, c, g, or t
ccgtgagaaagcacaccccatatctccaaaatgctgtcaattccaccccctaaatatttttcaaatctatctcctcctcttcatccatacaaggacttcccctagtccagtccctcattttaggtctggacgatcttaacagctgtcaagtggtttgcctgcctcctataaactttcttacttatttatttagagacaaannnnnnnnnnnnnnnnnnnnnnnnnnnnnnnnnnnnnnnnnnnnnnnnnnnnnnnnnnnnnnnnnnnnnnnnnnnnnnnnnnnnnnnnnnnnnnnnnnnnnnnnnnnnnnnnnnnnnnnnnnnnnnnnnnnnnnnnnnnnnnnnnnnnnnnnnnnnnnnnnnnnnnnnnnnnnnnnnnnnnnnnnnnnnnnnnnnnnnnnnnnnnnnnnnnnnnnnnnnnnnnnnnnnnnnnnnnnnnnnnnnnnnnnnntggccaaagtactgttttttgatatgagtgagtacatctataagagcagtaactaaatgtggaactgtgaggtcaagtctatatgc

SEQ ID NO: 231104 - DNA, 611 bp, Homo Sapiens
  misc_feature (78)..(359): n is a, c, g, or t
  misc_feature (504)..(504): n is a, c, g, or t
tgcacgaaaggaagaatattcatacttgatcagctcttagcttttgttaactattttattaaagaaaaaactctcttnnnnnnnnnnnnnnnnnnnnnnnnnnnnnnnnnnnnnnnnnnnnnnnnnnnnnnnnnnnnnnnnnnnnnnnnnnnnnnnnnnnnnnnnnnnnnnnnnnnnnnnnnnnnnnnnnnnnnnnnnnnnnnnnnnnnnnnnnnnnnnnnnnnnnnnnnnnnnnnnnnnnnnnnnnnnnnnnnnnnnnnnnnnnnnnnnnnnnnnnnnnnnnnnnnnnnnnnnnnnnnnnnnnnnnnnnnnnnnnnnnnnnnnnnnnnnnnnnnnnnnnnnnnnnnnnnnnnnnnnnngaagcagccgcaacactgtgtggaatgtcatggtggtagattgcgcacttatatataagttcatgggtggtggaactgccaaaaacattataggcagagaaggcaaatctgtatccagaatacatgtctattctagtgaggacanatctcttccctcacccctgcccttattccccataatagaagtccagcgtaatcaacttgccaccaggtggttagctagtttttgggaaatggtgcatattcagggct

SEQ ID NO: 231105 - DNA, 245 bp, Homo Sapiens
agctcggttcccgaaagcacacccatcctgggagcctacagagccagtgcttctgaaacagtgattataatagggagggttgcgcagggccatggatacgtggcgatacgatttacccggtgcgagggattatcccgactgaacggtcgttgggcaatgtctatgtgaacccgtcaggcacataactttcaatgcaccaacgatttcgccgttatcagtcagaaataatacgcaacacctgaacc

SEQ ID NO: 231106 - DNA, 378 bp, Homo Sapiens
tgagaaagcacacccgcacacccctgaccacgtgatggttcagatgaccacactttagtcgagcaatcgcggccttttaggttccgcaaacgcaccaaagccgaagatccacacccgatcgcttaccgacctgacgctcatgaacacaacgccatggcatgaacgctcgccgacgagcacctgggccgctcgcgtcgtaagtgccaatggaaaatacctgctgaccctggataagccgtttctcgaggacctgatcagccaaaccgatgtgggcggcaaatacctcaaactactggatgacaaactcagccccactgccacctccgacgaagccagggtgctgcccgacgcgtggaaaaaccatctgaaggcaaggat

SEQ ID NO: 231107 - DNA, 497 bp, Homo Sapiens
  misc_feature (138)..(424): n is a, c, g, or t
  misc_feature (454)..(454): n is a, c, g, or t
gagaaagcacaccccaaaggagaaatagataatttcaagaggtatttttatgatttaatagtaaaatatattttattaacagtacctatagttatgtaaaataggtagtgccaattaactgacactaaactagcttcnnnnnnnnnnnnnnnnnnnnnnnnnnnnnnnnnnnnnnnnnnnnnnnnnnnnnnnnnnnnnnnnnnnnnnnnnnnnnnnnnnnnnnnnnnnnnnnnnnnnnnnnnnnnnnnnnnnnnnnnnnnnnnnnnnnnnnnnnnnnnnnnnnnnnnnnnnnnnnnnnnnnnnnnnnnnnnnnnnnnnnnnnnnnnnnnnnnnnnnnnnnnnnnnnnnnnnnnnnnnnnnnnnnnnnnnnnnnnnnnnnnnnnnnnnnnnnnnnnnnnnnnnnnnnnnnnnnnnnnnnnnnnnnttaataaataaactagcttccttttcaaanaaagaaagtaaataggtcctaagacctaaaagcccatcctact

SEQ ID NO: 231108 - DNA, 401 bp, Homo Sapiens
cgtggaaagcacaccccccgtgcctggcgagggggacaggccttccagttatagttggatattctggcggactcctcactgattgcgatatgcaagagaaccttcaaccatagtcattaaacacctctgtaatcacgcaccttgcgttagcaatttgaaaagccactgacaagttctgatttcattggaaaaaacggcacccatggtgagtaagtgccgctcggcaagttagccgatagaaatgttaaccgagctcactgtccttgatgttagcgaccgggccgaggatagagggatcgaaatcaaccagcgaatcaccatgggcgaaacggttagggaagtccgggttcgccaacgcgcctttacccagcgcgatgatatctgcgccatctttgatgacg

SEQ ID NO: 231109 - DNA, 301 bp, Homo Sapiens
gtatgccgtgataggggcccagagattatctgaatgaatgccctgattagtgagcgcatgttttgcagaagaggaggctgaccctgatgaggtcaacgtgctcaggacagagattactgccttcccaactgaggggattgtgcgggcaatgacattttaattggcaatgacgtcggtaacgaactggagggcggcgagggcgatgacattctttatgtcaaggcgaactcggattttaaccggctgacaggcgggccgggtaaaaataccttcgttatcggcgcgaacgactcatctgcca

SEQ ID NO: 231110 - DNA, 356 bp, Homo Sapiens
acagcacgttgcctgtgggccatgggttttcaagggttatgcggctggagctttcgcctcctgcagcagttgctgaatcatcttttcctgcgtctcgtagcgaccttctccgaagtgggtgaaacgcacttgccctttggcgtcgatcaggtagtgcgcgggccagtactggttatcgaagttgcgccagatcgcgtagttgttatcgatggctaccgggtaagtgatgccgagctttttcacctcatccctgacattgctgatgatgcgttcaaaaccgtattccggggtgtggacgccgattaccaccaagtcatccttctcgtacttctgcgcccagtccctcacgtacggca

SEQ ID NO: 231111 - DNA, 294 bp, Homo Sapiens
gttgttcagcgaaaacacttgcgacaacctcagctaccttgaacgctaccacgcgatggcgctgaacggcgccaaggatgccttggatgggcggattcgcgaggcgttcgtcaacagctccgacccggaactggcgatcgactggttgatgcactcgttgcagggcacttttttctcggtgtcggtttatagcagcctggatgccctggtgctggcgcacccggatgtggtggtggtgctcgatacccataaccaattgctgacccagcgtaatgaccgggtcgaagcacgctt

SEQ ID NO: 231112 - DNA, 259 bp, Homo Sapiens
accctctgaaccgttaaggtcggttcatcgctgcctgttgttgaagcgttgaaactaaagagcgtcggcatccttgccggtgttgcctggcctccctgccatcgcttcgatggcgtccttgccgatgttgcgtgccttccttgtcttccttggcagcatccttgccgcctccaccaggccttgttggctggcttgagatgaagaatatgcatgtatgcatatacagtcaatgcacaaatgcatttatttttgctatagg

SEQ ID NO: 231113 - DNA, 222 bp, Homo Sapiens
tctccatttgcaatgttttcttacattttttaaagcactttttaccccccttttgcccaaaatttcatgatatccaaatgggtagttacagtcttgtcccgtcgctgcaactcccgtacggactcgggagaggcgaaggttgcactgctttttgacacacggctcgcttaacccggaaaacagccacaccaatggggtgtgcttcacagggtaccgagctcg

SEQ ID NO: 231114 - DNA, 308 bp, Homo Sapiens
  misc_feature (290)..(290): n is a, c, g, or t
ccagatgagtaattcgtacaccgactattcccacgaccatatgttcctggggaaatcacatgaagaagacgccaagcgaaccttgtgggtagtggctctgaccgtcgtaatgatggttgctgaaatcaccgcaggttatctcactggctcaatggcgttgcttgctgatggatttcacatggcaacacacgctggagcacttggcatagccgcagctgcttacggttacgcaaaaagacatgcctcaaatgctcgctacagttttggaactggcaaggttggagacttgngtgtgctttcacagggta

SEQ ID NO: 231115 - DNA, 468 bp, Homo Sapiens
ccagcgcatttcgcagggcggccatttgcgccacgcccctgacgaaatccttgaatgcagccttccactggtgtagctgcaaggcttcggccgagcgcttgaacaaggtgtagctgcgccataccaccagcgggtaggcgagtttgccggccatgaactgcaccgccgtcggtatgtccttgccgaacagacgcgttgcgtgatcccacagggtcttggcgccttcttcgaattggctgcccagcaccttgagcaacatcaatgtgttttcactgaacaggtaatgcagcacattgcccgtcactgccgaagcggccaggcggatatcgggcgggctatgctggttgtttttcagcaagtggcggtaagtggcctgatgcggatcttccaggtgcataagcacccagtcctgcagggcgcctggcccttgtatctcatccagtaagcccgtttcatccgcgtattcct

SEQ ID NO: 231116 - DNA, 328 bp, Homo Sapiens
tctgggatagctaatgttgcaagatttgctgcggcagccgttttggattttcagcttgccattcctgctctttcgtgccgactgccgtcgctgtattgacgatcggtgtggattgtcagggcgcgttgcgtttggatgtcggtggcgttgagaaaatatacagcggtggtgagctaagcctgaggttgcgtgatgattcttgagctcgactgtggaaatagctttatcaagtggcgtgttcttgagtcgagtgatgcaagtgtccgcgccgaaggcatcgcaggttcggatattgcgctgatcgacagtttggtggctttgcctggtc

SEQ ID NO: 231117 - DNA, 128 bp, Homo Sapiens
tcgtaaatgcctcatcacgatcatgattggtttgcgcggcaaggtgagaagccatgaatgcggtatgcagtcccattttccagtaggccggcatatcgatacccagcgttgctggaatcgctttcaca

SEQ ID NO: 231118 - DNA, 497 bp, Homo Sapiens
ccatcctgcgtatcagtggcctctcccactcatgcatgacgtactcgttgccgatgcgcagtgaatcgccggtgtagaccgcctctgtcgccagatagtccttgcgttgcgggtccatgaacactcctcttctcgtcaaccacgggtaggtacggcgatcactccaacaggcagacggcgttaccgcaccagtttcaattcgggcctgccgacgaaggcttgcgccggcgttacattcgatttcagcagcagtgtctggaacccgtccttgaacggaaccctggcgaggatcgcgatactcagctcttcgaggtacagcgaaaagccttggagcatcttcaatggcagaccggcaagtacggcatatgcgatttcgagcagtaactggtcgagatagatcactagggttctttcgctgtaccggtgcagaatcgcttccagttcgatggcaaatacatggtagagagtgttgaggctctggctaccgtagcgaccag

SEQ ID NO: 231119 - DNA, 312 bp, Homo Sapiens
cttttagagctcgcgagccaactgccccatagcgtgctcgacgcttgcacaggccaacgcctccttggaatcaaaatgagcatagaaggctccgtgagtcagacccgatgccttaatgacctccgcgatgcttgcaccggcgatacccttgctgcggaacaaacgtgatgcttcatgcaggatcttttcgtggcgctctgccgtcttgctagctggatatctcaccaaggaatctccaatagttgaacatgacgcattacatgatgatcgtcatacttgcgcgatagtatgacgaccatcatgttagatgac

SEQ ID NO: 231120 - DNA, 153 bp, Homo Sapiens
aggaatgggcctggcgcgtaccgttcctgatcgccgcgcccctgggctttatttccatgtacatccgcctcaagctcgaagacagccccgagttcctcgccctgcaacgcgccgggcaaacttcgcgggcgccgctgcgcgaggtctggcagt

SEQ ID NO: 231121 - DNA, 525 bp, Homo Sapiens
  misc_feature (168)..(168): n is a, c, g, or t
gtggataccaggtactgcttgttttcaccgaggggtatgttacaggctttttccaggacgacccggaactgttcgaaatccaaattacccgtagacaatgatgccgcctcttaaatcgtgtgaccgccaggggaaatcccctagccgtgatctgctgccttgatccgngcgactacccgggatgcgaggtcatcaggacggaacttggccagaaagtcatccgcaccgaccttcttgaccattgcctgattgaatacccccgacaacgaagtatgcaggatgatatgcaacttttgcatgcgtggatcgttacgtatttcggccgtgagcgtgtagccatccatttccggcatctcgatgtcagagatcatcatcaagaattcttcttcaggcctcttgccttcgtctgccagcttgcgcaggtaatccaaggcctgccggccatcattgagcgctaccacctcaaccccgaccgtttcaggcaacgcgtgacctgcttgcgcgctacagaagagtcgtccacgg

SEQ ID NO: 231122 - DNA, 249 bp, Homo Sapiens
actggcacccgcattgatctgggaggctggcgcccggccagaaccctttgctggcacagtgactatagagacagcaacaaccgagaatgaccacgatgcgcccgccagccaacctgcggtcatcaacaaatcatccccggaaggctgggagccactaccacaagccgccgacagcatagcggtctttgctccgccggccgcggcacgggctgagcctgatgtcatggaggacatgttggacgagagtag

SEQ ID NO: 231123 - DNA, 232 bp, Homo Sapiens
atccgaagctcaatgtttcggaatgcctgaccccagcatgagctttgcccgtcgggccgcgttcggatgtatcttaaattcagcggttaaacgtccagggtatctggcgcagatacaaatgaccgcctacgatacgcgccatgttttcagggagcgtgttcatgaagaagtcattggtggtaagtggtttggttgcagcaatgctgctggcgggttgccagtcggtcaatac

SEQ ID NO: 231124 - DNA, 360 bp, Homo Sapiens
agcggtcaacattcatttgaaaagacttggttttgccttcttccagagaattgataagaactttgttcttcacaaaacctgttagatatttcgccagttgcatcatcatagaggattttccattgtaagattttccgtagatgatccaaacgccgcgggcttctggtttgccaaacgatgcctcccattttccctgaaagtcaaaatctttaaactttgtgctttcaatctcatccacagaaaagaagtcgtttgccattgatttaggttttgtttttgagttgatatattgcgtttttgttgacgttgtattctcgtgctatcgcggcgccctgttggccttgtgcctaattttctaat

SEQ ID NO: 231125 - DNA, 387 bp, Homo Sapiens
cttatccatgccctgcgcccagtcatcgaatggtcggacaacttatttgaattttttttgacgtcaaatatctgtagttcatgagtatcaaggaggcctcatgaaacgcaacgaccttttcactatcgagtaccagctgcacggcgagcccaagtccttcatcgtgcgcgcaccgcgcatggacaatgccgaggcttggcattgggccagttgtgacgctgatgtgccggtcatccccaaatttgggcaacacacgttcaagcgtgtgtccaaaccgatggcggagaaatacggcattacccaggtgcgctggagtggcgcggcacagattaaatgggcggagggcctcagaggatgaacagtcagactcttgtttacacaactaca

SEQ ID NO: 231126 - DNA, 299 bp, Homo Sapiens
tggaaagcacaccctctgagaggcgaaccatcccaacaggatacattactacagtatgttctatagaggtgaaccatcccaacaggacacattactacattactacaggatgatctatagaggtgaaccatcccaacaggatacattactacagtatgatctatagaggtgaaccatcctaacaggatacattactacagtatgttctatagaggtgaaccatcccaccaggatacattactacagtattatctatggaggtgaaccatcccaccaggatacattactacattactaca

SEQ ID NO: 231127 - DNA, 328 bp, Homo Sapiens
tgaaagcacaccccagttagctcgccgtcaggcaccacttcctcgacctgccaaccgctgggccaatggacttccggctcggcggccagcacaaacgggctgcccaacaacacgcacacagcactcaacagtggcctacgaaactcgatcattgcaaaaacacccaaggttccagccgcaaagtgtgcggcccggcacgcgctgactgcaagggttgggcgcgctttttcatttggcgcagccggtgcggcttgcgtatcatggcccgcctgcatggacgcaggccgcaagccaatggaccgctcatctcacattttttctggagggc

SEQ ID NO: 231128 - DNA, 424 bp, Homo Sapiens
acccgcaataaaatgagtttccccaaacccaggcgatcaacgagcaccttgcctggatctggccccagcgcagaactccatgcttcatacagccagagcaatggccacactgctgcggctacaaacacgccgatgcgccagatgggatagcgcatcagtagttcttccgcagatcgaggcctgtatataaagaagcgacctcaaccgaatagccattgaacatctgcgtctcgcgcacattcggactaaacaggccgctcggcagacggcgctcccgcgcctgggtccagcgcgggtgatcgaccgtaggattcacatccgcataaaacccatactcatcagatgcaatactctgccaggtcgttttcggctgctcactgaccagactgatacgcacgatggacttcacactcttgaagccata

SEQ ID NO: 231129 - DNA, 402 bp, Homo Sapiens
catgcctggcgggtcgactctgaagaatcccttgtgaaagcacaccttcatccagcgatacctcgccaatcggcgcgccatcagcgctgtaatgcagcggccgcatacacatgggcaccggtgtgcggcgacagggtgacgcgccccacatttaccggacactcggggccgaactgccacacgcgctcctcctggaacggcgtatcgcccggccaggtcggggtggccgtgctcaagggcgggctgatatcccaccacgtttttattgggttcattgcaaggctctcactcgttactgaggtgaatgatacgagggagggatgtgaattttcttgcgaattctggcgcgacacgggaaatctttcgcagttactgcgaggaaacatcggtttgatgcacaga

SEQ ID NO: 231130 - DNA, 352 bp, Homo Sapiens
tcccgtctgacgggcccttgagcctttattggcgaggcagaagaagaatgttgtgcaataaaaagaaatattccgacccttcgtcgaataataaccgacggcaacaggcggtcattctcaccaagggattaaacctttcctctgtgcagggcacatcatagctggctttgccctataaaaggggcgaataaccatcccagcttatggctatagcatcgttatcgttacgtgcttatgacaaaacgatcattgaatacatgtgacctattggttagaactctacacaggttggcgccgtaacggtgccgacacatcggctcgccacgccggcagcgagcctaccaacggcaga

SEQ ID NO: 231131 - DNA, 327 bp, Homo Sapiens
tgtgaaagcacaccttcgcagctatgggccttaagatcggttgataacacggccttcgccggtgtggtttcggctatgcaaagtggttccatcagtgggcctactgacggcaacgccgagcgtgcacaaggggtcggcaatcgtgcgatgcaggtctctaacaaccccgggggcaatgtcgcaaatgcagacattggcatgccttcaactaacgttccgggcgttagcgcagatcaggttggacctactggtgcaccacaacagcaaactctcgataatctctccagaggaatggatccttgggataacagcgggctccgagatacg

SEQ ID NO: 231132 - DNA, 345 bp, Homo Sapiens
tgggaaagcacacccttgaggttaacctgccttagtgcaggagtgaaaataaggcttgccctgccatctctctcgatttgtagaacgcgaacctctctatagggcctactatattagaaataccatagctgtgcacatggagtagagatcttctttaaactcgggaccgtatatatctgctcagatcgcccaagcagtacatatgctcgactccatcaagtgtcaggccacattctatcagcacagcgagactgcctatcagtgacaatataggggagctctatgtggatccctcttaccctacctttgatatttatgacagcattatcataaaactccaatatt

SEQ ID NO: 231133 - DNA, 352 bp, Homo Sapiens
tagagttcgcagctgctgccatggcggaggccctgtcgaatacctccagcgggtttaagtgggaagacttccagcgcatcgcaaacaagcccggtgttcattacgcattggccggattctccgcggactcaaccggcgacaacggtgtaggggttgtacaggcagtcattaggcgctgaacaatccccagtccaccaccagcccctgcaacgagtgtcacggcgctggcttctgcatgtcgatcgtgcaggaagaaatgcgctgtccatgcaatgcacctattcagctcagcaagggaacgccatgaataacctctgtagcggatacctgtcgcgagaaaccctaaccgggt

SEQ ID NO: 231134 - DNA, 327 bp, Homo Sapiens
tgtgaaagcacaccttcgtgtgcgccgtgttccaagcgaccgggggactatctgcttacggctgccaccgtttgtttagtccaacaaatgaccgcttcaattagcgagtggaactttgctatggataacgttggtttggattcgatgtcgtgactcgactaactgttcagtgacatagcaattttattgagtggcagcttttcaagcgttggtggtagttgcggaaaatactcaattcgggcaggccggttctactcgttgtctaagcgtattgggacgagcgagaggtcacgatttttcgggttgctctcccgttttgcttattca

SEQ ID NO: 231135 - DNA, 307 bp, Homo Sapiens
tgtgaaagcacacttggcgtaatcacacaaaaggttcgcgagcaattttacgaactgacccgtaaagctttagcccagtttctgaatgatcaaatcaacgatcgtctgaagtccgcaatgagcggcgttattcaaccctcgctagcatcaatacccgttacaaacagcgcgaaggcagacgcacaagaacgagatgaagcagaagataaaattctgacgacgctggaagagctggagggttatcacattgtccgggctgttgtacgctcagtggtcgatgcaaaacgaatcgtacaaagggggtgtg

SEQ ID NO: 231136 - DNA, 304 bp, Homo Sapiens
tgtgaaagcacacctttggtgatgtcgcgacacatctaaaacggacattttcgagcggacgcagcaaggcaggcagaagtgatcccggccccttcgtccctccggttgcattgcaaatagacggtccgcatggcccacacctgttggcactgggtcgaagaaaatggcgcagccaggtcggttacccgacgctcacacatggtggcttgtcgctgttggaagttctgtcgcctttcatagaactatcgaagtaggcatatagccttcgtagagaacatgcgcgaacagtcgtgcacgcaagaaa

SEQ ID NO: 231137 - DNA, 314 bp, Homo Sapiens
tctggtactgaacgctttcagccacggcagcagcaatgccggcggcaccttcttgagccattacgcggttcaccacacttcttcctttagaggtgacgcggagcgtcacagggtgcattcccatgcggagcgtgggaacgatcaatgacgagcaccacttgaacaggccacataaaaaagccgccttataaaaggcggcttcggatttcgctacggttacgcttgcggccgcatgtgcgggaacaggatcacgtcgcggatcgacggcgagttgggcaacaacatcaccagacggtcaatgccgataccttcac

SEQ ID NO: 231138 - DNA, 353 bp, Homo Sapiens
acaggtccagcgacactccataaatgtgtagatacccatggccatcttagacaagccagctcccatagttctagcctttcagggccttgagcttggccaacaccccttccgctgtctgctcacccatcaactgctcacgcaccttgcccttgtcgtcgatgatgaaggtcaccggcaaggcctcactgcgcggaatctcgaagatcccgtccgggttctgggccagtaccgtgaacttgatccccagcttgtcgctggcggccttcagttcctcaccctgcacattgtcgaagttgacgccgaacaccccgacattctggcctttcaactgttctgccagggcattgagctcg

SEQ ID NO: 231139 - DNA, 421 bp, Homo Sapiens
ccgcatggtagcaacactacatgtgagcagcatcacatggtagctttaccacatggtagcaatatcacatggtagcaggaccacatggtagcaacaccacatggtagcaccacgtggtagcaataacacatggtagcaacaccacatggtagcaacaccacatggtagcaatgacacatggtagtatcatcacatggtagtaacaccacatggtagcaacaatacatggtagcaatatcacatgtgagcaacaccacatggtagcatcatcacatgtagtaacaccacatggtagcaacaccacatggtagaatcatcacatggtagtaacaccacatggcagtaacaccacatggtagcattaccacatggtagcaatatcacatggtagcaacaccacatggtagcaacatcacatggt

SEQ ID NO: 231140 - DNA, 197 bp, Homo Sapiens
gtgcgcggtgaccttgttcagcggtggtttttctcgcatgatgatgaccgcttgaaactcaccgtctacttccctcgcatcgccgtggataataaattcgccaatatcaaattccgtcacgtatggctttcccttcaaggtaactgcgttgatgaaacctgacccgcggggggcaaacttccatgggggtgtgcttt

SEQ ID NO: 231141 - DNA, 255 bp, Homo Sapiens
atagctcactcacatggacttccgtcatgaaatgcctgcacgggtatcctcgtcttatcagcgcgtcggtagggacgcgcggcaatgcccgcaacttgcccgccgatgttcagtgcatccagtatttattcaatttgatcattcccaagatggggtttgccttgctggaaaacggcaagtgcgacggccagttggtgcaatgcatcagccagtatcagtttcgccatctcaagtacgcccatgggtgtgctttca

SEQ ID NO: 231142 - DNA, 336 bp, Homo Sapiens
  misc_feature (41)..(96): n is a, c, g, or t
  misc_feature (100)..(251): n is a, c, g, or t
gaagcacaccctcgggctctgtctgtctgttagtagaacannnnnnnnnnnnnnnnnnnnnnnnnnnnnnnnnnnnnnnnnnnnnnnnnnnnnnnncttnnnnnnnnnnnnnnnnnnnnnnnnnnnnnnnnnnnnnnnnnnnnnnnnnnnnnnnnnnnnnnnnnnnnnnnnnnnnnnnnnnnnnnnnnnnnnnnnnnnnnnnnnnnnnnnnnnnnnnnnnnnnnnnnnnnnnnnnnnnnnnnnnnnnnnnnggctgctagtagaacacctctctgtctttctctgtcgctctctgtctgttagcagaacacctctctgtctatctctctcggtctc

SEQ ID NO: 231143 - DNA, 379 bp, Homo Sapiens
ggaccaggatgtacaccacaaactctgcgcatatggttagctagacgaacaggcgcttgaacatctgccggtagctttgatactcatcgatcaaagcgggacgcagaatatcggtttccaggatgcagacgcgtagcgacataaaaaatacctgacacggcgatgggaatattgcacacccagagcctgccttgaaatacctccccaaagcaagccctcaatggccgcccacactccctgtaggagcgagctagctcgcgaaaaacgtcaacgataacgcaggtggcctgaataaaagcgttgcctgtgcgttcttcgcgagcaagctcgctcctacagtggaacgtctaaaacagcgcgccttttgcggctttttcca

SEQ ID NO: 231144 - DNA, 404 bp, Homo Sapiens
aggaccagacgttgctgtaggtcagagcctacctgtccgagttgtagccgaagctgcgtgcccggctgcaggagagttacgacaattccgcctcggacttcgtgaaggagaatgtcgccgcattcgtgaacatgacaccggaaaccttctctggcgtttatgcgaacgcgatcaaggaaacgcactggctgagctacacgaatttcggcgcgttagtgtccggctccaacttttcaaccgatgctctggcgaacggcgatacggacgtcttcataaacatcgacctcaagaccttggagacgcatgccggcctggcacgcgttgtgatcggctcgttcctcaacgctatctacaaccgcaatggtgctatgaagagccgaacattgttcctccttgatgaggcc

SEQ ID NO: 231145 - DNA, 204 bp, Homo Sapiens
gttgtatctgttctcacgccaagtaattggttgggcaatgaagtcaaggatgtgcagcgacctggctatcgacgcgatgttgatggctgtttggcgacgcaagcctcagcagcaagttatgattcactcagatcaaggcagtcagttcagtagctcggattggcaaagctttttgaaggccaacaatgtaatcggcagcatgag

SEQ ID NO: 231146 - DNA, 500 bp, Homo Sapiens
  misc_feature (51)..(353): n is a, c, g, or t
  misc_feature (371)..(371): n is a, c, g, or t
  misc_feature (446)..(446): n is a, c, g, or t
  misc_feature (472)..(472): n is a, c, g, or t
acctttggaagccacccagagtgaggtacaaagacaaacatataaaccatnnnnnnnnnnnnnnnnnnnnnnnnnnnnnnnnnnnnnnnnnnnnnnnnnnnnnnnnnnnnnnnnnnnnnnnnnnnnnnnnnnnnnnnnnnnnnnnnnnnnnnnnnnnnnnnnnnnnnnnnnnnnnnnnnnnnnnnnnnnnnnnnnnnnnnnnnnnnnnnnnnnnnnnnnnnnnnnnnnnnnnnnnnnnnnnnnnnnnnnnnnnnnnnnnnnnnnnnnnnnnnnnnnnnnnnnnnnnnnnnnnnnnnnnnnnnnnnnnnnnnnnnnnnnnnnnnnnnnnnnnnnnnnnnnnnnnnnnnnnnnnnggcatacatacgtaacanaggaaaaaatatacaagttggactttatgaaaattaaaaataattgtatatcaaaagatactctcaacagagtanaaagacaccacacataataggagaanaatattgcaagtcatctatctgataagg

SEQ ID NO: 231147 - DNA, 202 bp, Homo Sapiens
cggaaccccgggaaagcacacccctttctggcagatttgggtctactgtcttaatcaggcaggctaagtcgcccagggagacttctccattctttctgtctgccttatctcagcattaccatcttcctaggctacaggatagcgaactcgatcatctctgacttcttttcttcaaagccaggaagttatccagtcctcctga

SEQ ID NO: 231148 - DNA, 289 bp, Homo Sapiens
ataccccgtgaaagcacaccccatgtgaagtgtgtgtaaaatctggtcaagtaagaccctctcagcacgtgtaaggtgccaaccaagcttaacctgagtgcaggtcagacagctgtgaactagccaatcggatcattcggatgtgaccggtcatatgtagagccgttgttgccgatgagcagtttcaccaggaccctgttaattgcctcagcacctagtgtacctaccactagccacttccagcctcaccgagatgagtcgcagaaagagaatgctctcacacatatag

SEQ ID NO: 231149 - DNA, 378 bp, Homo Sapiens
  misc_feature (71)..(273): n is a, c, g, or t
gcgaaccccgtgaaagcacacccattcatgacaagaaatcatgacatttttcaaaacccacaaaacaatcnnnnnnnnnnnnnnnnnnnnnnnnnnnnnnnnnnnnnnnnnnnnnnnnnnnnnnnnnnnnnnnnnnnnnnnnnnnnnnnnnnnnnnnnnnnnnnnnnnnnnnnnnnnnnnnnnnnnnnnnnnnnnnnnnnnnnnnnnnnnnnnnnnnnnnnnnnnnnnnnnnnnnnnnnnnnnnnnnnnnnnnnnnnnnnnnnnnnnnnnnnngagaacagactcctgtagcaataagataccaaattccaacctgactctagtatagcattatatgacagataacagccctgaaagaaatcgaagtattttacctca

SEQ ID NO: 231150 - DNA, 393 bp, Homo Sapiens
gcggaacccccggaaagcacacccactttgcaaccgctcatagagcgactgcgcgattcggccaaactcgggctcaggattaaacccttcccagtaaatgttcgcgaacacggccgcagcggtattggcttcgtccgcactcgggctgaacgctacaccctgagcctgcccatactgggctgtgagttcgtcattgcggctcgcggagcagatgaaaagagtgtccttgccatccttcagcgatctgttcaacgcctcgttatgcgtacgccaagcaatatggcccgtcacttggagaccatcagtttggctggccagcctgagagctgcctgcaacaaagtaagtgacgacatctgttatctccttagcatttcaggcaagcaacgttgaac

SEQ ID NO: 231151 - DNA, 311 bp, Homo Sapiens
gcgctgcgacctggggccatgtactccactgtccgcacaaagacaggccttcttctcgggcaatggcctctttgctcagccaaagcagtgaattgatgtgccctcctcatccagaaggatgcctcaggcttgaggctctgtaacgatacccaggctgtcaggtgatccagcccagagccagctcggcaggtaaaacttacatcctcctccggaacatcacctttttgagaccggtgaagaggccccccacgcaggaagccagatgagatgagcttccctcggctggaaggcatatgagcttaccacgatgg

SEQ ID NO: 231152 - DNA, 468 bp, Homo Sapiens
ctcgataccccgtgaaagcacacccgcattcgatgaacagccccgccgatagacgaccgcaacggatcatcttcgccaccgcgtccgcgatttcagaaaccggaccgccgagtgagcccgccagcccggccgcggtcagcaggccttgtcgcagaatcgccaactcaatgcggtattccagctcgtcaccgtcgaacaacaatgctgcgtcctggcccaccagctcggccacgttggcgaacgcccccacgctatactcaacggcgccgaagtcactctctggttcacccgcaatttccagagcagcccccccgatttgtttggtgctgttcgaaaccgccacagcctcggtaccgactcggccaacggtctcgcagtagcggacgatcgcaagaatctgctcattcagctcaattgcccacttcgcccgggtcagtgccacgtacagcaagtgcagctcctgacgca

SEQ ID NO: 231153 - DNA, 211 bp, Homo Sapiens
gctcgataccccgtgaagcacaccctcggtggggcttgtgtgatcttcgctgataggcgggcgctttgcgcttttcttaactatctcccatcatctctatcaataggactaagctcagctttttttcgtgacggtcgcgattgcttgcaacttttcgagattgtttgcataatggcgtgtcagttcaggctcggtcagggtgtgcttcaca

SEQ ID NO: 231154 - DNA, 182 bp, Homo Sapiens
ctcggtaccctcgtgaaagcacacccatttccaccgtatttggatcaagcataggcatcgtcacatgttcgactgactcgttgaccggaaccgactcttcatccttataagacgtacctggaacgttttggctgtattcgtactcatcctttcttcggcgaccgcttttttaaacaagctca

SEQ ID NO: 231155 - DNA, 340 bp, Homo Sapiens
agatggtcatcaacgtataagcgccactgtgggacaggtagtctgttgcgaccgttcgctcgccagtttaaccgtcgaacttgactgcgccctaacgccacgctgatgacatgcaggacttctcccgtcgccgtatcgctgtgtatctccaaacccggcagatacatgacctgggccacatgctcaacagactttgcctgccacactcgtaccttgcgtccacgctgcccagtgccatggtagaaataccgatcgttatccgcaggccccgccttgcgcagcacctgggtgacttggtgcaattgattacggtcgtcccatgtcatcctcgggttgcttt

SEQ ID NO: 231156 - DNA, 451 bp, Homo Sapiens
aatacagaaaacaggtacaacacatgcagtgactaaaagcgaggaggaaactgctcagaacacatgcaggggcaacccacatgcctctacccacagcatctctctcctcgatttttgttcattttatcaacagaggcccaagctcttggtggcctcttgcccaccaggcacacccctagaagtgagttcccattctggacaggtgtggaagggagggtgtgcaagcacaccccaaaatgttcatcagcattcaggtcatttgtttcacccttagccaagaagaactcattagaaattcagttataatttcaatttaagcctgtctatgataagcataatgattggcatgttatatagcctgttgaaaataactacagaatgaccttccagagcactgtttttggcctcgcgcccgctctgttcaggctctgcttgattttcagaatatgat

SEQ ID NO: 231157 - DNA, 238 bp, Homo Sapiens
ccgaccagcaggtccacgtcaacaaattcaccaatgtgcaaacgcggcccagcctgccaggcctgttcgccgccttcctggccataccgctcgccaatcagcgtgagcttctctgccaactgatattcgaaccccgtgccccaggtcaggcgatgttgttgatcaccgtcgttgtaggcgtggctccagccggcgttcaggttcaggcgcaatgcatccaggggttgccatgtcaggg

SEQ ID NO: 231158 - DNA, 367 bp, Homo Sapiens
  misc_feature (92)..(271): n is a, c, g, or t
ataaataaacaacactgtaatcttccacacaggattctgtcacctggagaagggcaaatgaatagtccaatacacaaaaaaggctgttttgnnnnnnnnnnnnnnnnnnnnnnnnnnnnnnnnnnnnnnnnnnnnnnnnnnnnnnnnnnnnnnnnnnnnnnnnnnnnnnnnnnnnnnnnnnnnnnnnnnnnnnnnnnnnnnnnnnnnnnnnnnnnnnnnnnnnnnnnnnnnnnnnnnnnnnnnnnnnnnnnnnnnnnnnnnnnnnnnnnnnttttaaaaaaagttactttggctggcctgtaagacaaatggaatatagaccaattcctaaccctatatctgtgaagcctgccctacctctgaactt

SEQ ID NO: 231159 - DNA, 167 bp, Homo Sapiens
gttagttgcaaatcgatccgcaattgcagctgcatctgtagcagcaggccaaagcctagaaccttagtggtgccccagtggtcatccactgggcgcgatcgtcaatcaggctgcgcccgacctgcaggcccacgccaacaaattcaccaatgtgcaaactgcggtcc

SEQ ID NO: 231160 - DNA, 434 bp, Homo Sapiens
accaagtgcttcccgcaggacgggcgcatgcgtacaagcctctgtgcgactctgcgacttcatcgtcatactgatggttgttcacttgaggatttccaatcatgatcagccatagaacccgttactcgctggcccagtttctatcgatacaggaggcctccgcttccatcgcactcttcagcaaatacggtgtcgagcatttgtccctgtatccgtcccagttgctgacgggcatcatgaacatcgtgcgtgaccaagacgaccgaaccttgctgctggtgctccaggaaattgttgcaacgcccggcaatctccgtgccaaatccacgcaatgccgtgatcaggtcgtcttcaacaggtgccgcgtcagcgatggaagggtccgcctgcagcaacttcttgtcctgcgcgagatagccgtcgatcagcaggca

SEQ ID NO: 231161 - DNA, 374 bp, Homo Sapiens
tgtaaagcacacccgatgctgaaccgatgactgatcgagaacggtatccagaaagtccagtgcctgggtttgagctgctgttaaaggcactcctgccttaaggtgagctgactcaatgtagactcgaaagtatctgatcagtggaataccttcactggaaaagctgaggatgggggctttaaacagtttttcatcctctgacatgccgcgattctcaaaaaagaagtcgcatttgagcgcttccaatacttctgggaacgccatcagctcggcgtataccgcgcttgcatcgatgagaatgctctcacctcctaaaagtgctttctgtccacaggccaagatcaagtaatcgataggcaacgggtcgctcacac

SEQ ID NO: 231162 - DNA, 367 bp, Homo Sapiens
cagttttaatggtgatcctacgcggccgctacagacgcttttgggtagaggggtcacagtacttaactgtgagggcgttgctatagctgaatgagcacgtggcgtgatgaccttcatgcgttaagttttcaatccataatgtgatggtgaacttatgaagcgtttaattgcgttaccctttagtgcgttgatggtggtgtctgttcaggtgtctgcgctttgcttgaatatttcagagagcttcaccgggataatcgggcctggaggtgatagtgtcgcccatggtcccttcacgataagtggtgcgaacggttgctccggcgcaagtataaatgccatggtttccgctggcggtgcagggagaagt

SEQ ID NO: 231163 - DNA, 416 bp, Homo Sapiens
tgtaaagcacacccggcccggacatcgtcgcggccaaccgcctgatgatccaaggcgaccggcactatgactacgacgccttcggcaacctcatccgtgaacggcgcggcaaaagccagcaactcgtcactgaataccgctacgactgccggcatcggttaatcagcatcacaaagcccaacggcgaaaccgccagttatcgctatgacccatatgggcggcgcatcagcaagaccgtagacggcaagaccaccgggttttctggcaaggcgacaagctgattgccgaacaccatgcagagcgccatcgcagctacctctacgaacccgacagcttccgcccattggcgctgttggaaggtttcggcccaaaagaaaccacgccctaccactaccaacttgaccacctcggcaccc

SEQ ID NO: 231164 - DNA, 365 bp, Homo Sapiens
gagccggaaacccagtccgaagtcgaaagccacggtcatgctcacgactaagagctgaaacgctttgatgtcacgcgcgaggagagctagttgcgcgtgacaatcagcattttccttttcttctcggctaccgctacatcatgcagctgaagtgttgaatggctgcttttggccggtttctgcctgttgcgtttctgctgcccactggccaagtcgtatgcacgcggtgttcagcaccaatgcaattgactggtcaaatgggtgcaattgcgcaggtatggactataagcctcaatttcctgggaaagaggttctttctatggacatccgacatcagagattgagtatcggtatgtctgagctga

SEQ ID NO: 231165 - DNA, 162 bp, Homo Sapiens
atcaccgagcagacctatgacagccgctcaaggctcaagcccgaggcgattcgtcaaagcttttaccaggattgcctgcgctacaaggtcgcgcgcaagtaatccgtagcccgcaccagccgtggggcctttacaaatccacgacaaaccccgtgtgagtat

SEQ ID NO: 231166 - DNA, 175 bp, Homo Sapiens
catcgccgacagacgcgtggttgccccggcgtgatcgtgcgcagctcggctaacgcccaggccggggcaaccacgcgtctgtcggcgatgttccatggcctatggctgctggatttcgtgctctggctgtcgagcgtgctgcagagcattccggtcgcgagcctggcggttgtgc

SEQ ID NO: 231167 - DNA, 375 bp, Homo Sapiens
tttcctggccagtgccttgctgttgatcgtcggcctcgcgattcgcctgggtgtgaacgagtcgccggagttcctcgaagacaaggctctggcggaaaaagcgcgagcgatcaagcagggccaagcccccgtgctggaagtgatgaagaccgcttggcgtccactgttgttgtgcattggcgccaatacgttgggaattccggcgtgtatttcaccaacaccttcatgattgcctacagcactcagcaacttaatctgccgcgctcgttgattctggaatgcctgttcttcgtcgccataattcagttctgcgttcagccgctggccgcctgggtggcggagaaggtcggcgctacacagtttctgtgcgccatg

SEQ ID NO: 231168 - DNA, 373 bp, Homo Sapiens
ccggcaagcgcctgccggcctgtacgctgaaccattggtccatgaccagcggtttgtccttgaagttttcggcaaacaccgcgagggcctgggctttctctgcttcgaacggcgagttcaccaacaccgccaacgccgccaggcgtacggtcatgttatcgctggtgtcgaactgatccagggtggccgccaatacttcaggcttgccgctgagcatcaagtaagacagcgcgacgttctgcagcgcacggcgggcgaagcgctcggcctctgccacgtaaggcgtttgcttggacagctagcggttgttctggtagcccatgcacaagcctttgaacaggttgtcggccagctgcttgcgggctaactcgcg

SEQ ID NO: 231169 - DNA, 361 bp, Homo Sapiens
tgagagcacacaccctacgaagacatgtacgccaccttgacccaaacctacagtgccgtgcagataggcgacaccctcaaggagaacctgcgggccagccagcaaatcgttttgtctggcggggtggatgacgatgggctgttcactttcagtttcgacgatgagcgttatttgccctttgagggtacgggcgctatttcaagctgggcgttggaattcacctcgactgacgtcgcggcgcggaaccgcctgttcgaatcgctgaccgacatcatccttaagctgcactacacggccaaggcttgctaggaggaggcatagtgaaccatgacgagtcgttgcatatcgccgcgccgtccct

SEQ ID NO: 231170 - DNA, 211 bp, Homo Sapiens
tgtccttatccaacatcgaggtcgtaaaccctattggtgatatggactctaaaataggattgcgctggtattcctaagggaacttggtccggtgggcaaggtaatggaaccaatggagaatagaagttcgtttggactggggaggcctaaccatgtcctgttcgaaggttgggttctgctcggaggccgccccacccgaaatttttatggc

SEQ ID NO: 231171 - DNA, 165 bp, Homo Sapiens
ccgttttacggaagccacaatggcactcccctatactactacccacgctcagcctgacgttttggccttgtgtctgctcaatgggaactactcacctcctctgtcggcggcatgtctgtcatggcagagtcttccccctccgtgcccgactcattctccatcttc

SEQ ID NO: 231172 - DNA, 222 bp, Homo Sapiens
tcttacatattccacttacagtaagggtgaatgcattaaacaaggctgactgcaaattggatgtagtcagattgaatgctcttgtcatatttctattggttagaaaacagaacaagccacatcatttgaggcatgcctcatgttccatccctcaatgctctaagactagaaaaaattgttgttctgaatatactattaggagatcaatagtctatttatcac

SEQ ID NO: 231173 - DNA, 174 bp, Homo Sapiens
  misc_feature (20)..(20): n is a, c, g, or t
  misc_feature (61)..(61): n is a, c, g, or t
  misc_feature (72)..(72): n is a, c, g, or t
  misc_feature (86)..(86): n is a, c, g, or t
  misc_feature (103)..(103): n is a, c, g, or t
  misc_feature (106)..(106): n is a, c, g, or t
  misc_feature (118)..(118): n is a, c, g, or t
  misc_feature (146)..(146): n is a, c, g, or t
ttcgccaagcttggcggtantaagccgaaaaaaaggccccgcaaccgaatcgcccttttcnaaaacaagttngcgcaaacccttgnaattggccgaaattggncgncccttgaatggncgggaattttttttcctttaacccaaanttgttgccgggaatttttaacaacccgc

SEQ ID NO: 231174 - DNA, 197 bp, Homo Sapiens
  misc_feature (22)..(22): n is a, c, g, or t
  misc_feature (48)..(48): n is a, c, g, or t
  misc_feature (65)..(65): n is a, c, g, or t
  misc_feature (67)..(67): n is a, c, g, or t
  misc_feature (75)..(76): n is a, c, g, or t
  misc_feature (79)..(79): n is a, c, g, or t
  misc_feature (107)..(107): n is a, c, g, or t
  misc_feature (119)..(119): n is a, c, g, or t
  misc_feature (125)..(125): n is a, c, g, or t
  misc_feature (127)..(127): n is a, c, g, or t
  misc_feature (131)..(131): n is a, c, g, or t
  misc_feature (136)..(137): n is a, c, g, or t
  misc_feature (147)..(147): n is a, c, g, or t
  misc_feature (159)..(159): n is a, c, g, or t
  misc_feature (170)..(170): n is a, c, g, or t
  misc_feature (178)..(178): n is a, c, g, or t
aaccctgtccgtggccaacctncaattaaatgaaatccggcccaaacncccccgggggagaaggncnggttttgnnttntttggggcggcttctttccgctttcctnggctttaaattnactttngnttgngcctnnggtccgttcnggctttcgggcnaagcggttttnaactttanttaaaaagggggggtaaat

SEQ ID NO: 231175 - DNA, 121 bp, Homo Sapiens
ttagctactgtaagtacattcaacctttatgactaacatagatacgatggcgatcacagctattccacaatcataatggccctcagacagtaaacatatccttgtcttaaacttagtgcca

SEQ ID NO: 231176 - DNA, 224 bp, Homo Sapiens
tatacagaagatacataataaaataactactaagaaattactagatacactatatattagatcacaagtgtataaattaacttacatatacatgtaaaatctgagccttatcctctattacatcttatgaaccctacagtactgtactacttatttctaaaatagagtaactcatctacaatatctcatatcattatagtcactaaatgaatgtctgctggata

SEQ ID NO: 231177 - DNA, 340 bp, Homo Sapiens
ggacaccccggcgtgcgcagcccaggcgtctgcacctttcaccggagccgactacagcgggcgctatgaatgtaccggtccaggataaacatataggcagctataagggtgttgttgatatggcactcgacgccaagcaaagtactggcaagtacgccgcctacaccttcaccttcaccttgtaccttggaagacaagtcccgttatgacggaatggccaccgggacttcggacgcgctgggcgtttattttgctcacaccgaccctgtcttgaaagacttcggcgtgggggtcgcacaaatgacgtccaccccggagggcaaagtgtctttcgttaagt

SEQ ID NO: 231178 - DNA, 181 bp, Homo Sapiens
aatgttacgacataagataaaggcttatgataaacatacaaggagttatctgtattcttgagcgaaaaagactttgtggctaagcagataagagcctgatgccatactccccatagtgagatcatattttctaaaaatggtgtcactcaaggctgtggcttacaaaagatatttttagagg

SEQ ID NO: 231179 - DNA, 376 bp, Homo Sapiens
ctctcaggatttggtataataggacccggtgtataaggtagaatattccttccctattgctgtaagcttcaccttcagaacaagacttctctcttttctatctacagtatgaaagtttcattctatttaccagccttaaaagatagaaatttttaagtgtgtagcttcatctgtgttttgacccagttagaaaactgaggagaaattacccctctcattttttctccccctgagttttcaggacagtttgtcgtgctttgccttggggactttctttcttggctcaccttttatttctttccaaattgacgagacgttgtctactagttccagtgttggttccggtcccatttccggggttcccggagcctcgaat

SEQ ID NO: 231180 - DNA, 106 bp, Homo Sapiens
aaatggcacgaacagtgagttagccggctgcccccaggagctcatattacatggaacgattgattggtatgatgtacaggcatgtaaattaaagatagattgtgat

SEQ ID NO: 231181 - DNA, 350 bp, Homo Sapiens
tgagcacctgctcctggccccaaccatctctttctacatacacttgcgtagacggcataaacatgcactgtccaatcatcatagcacaacacatgcaaattttccaccatcatttccgcatcagcagcaatcaccaagcagcagcaacatgtggtttccatccaagtgggcacagcacacagccagcaatttcaaaatcaacttttagggcacactgcacatcgcagtactcaatcaaaacttcagtctttcgctcaataatcaatcaataataatcatcaatcaacaacttcatagaatgtggcccagctccactaacatgcaggcacagaggccaggcatttactagc

SEQ ID NO: 231182 - DNA, 280 bp, Homo Sapiens
ttgtacgcgtgtacactcggtgtcgctgtatgacgacagcagcctcacgcccttgcagataccggatgcacgtgtcgaacaactgggcgaatcacgcacctatgagaaggtcatcaacagcatccgccatggcgtgatcgaaacccgctacgccctctacccgcaacacagtggcgccgtggtgattccggcgcagaccttcagcgctaccctggtggaatcgcgaccgccccaggaaaacaccctgcagggcaccaagccgggcaagatgattcatgtc

SEQ ID NO: 231183 - DNA, 257 bp, Homo Sapiens
  misc_feature (63)..(164): n is a, c, g, or t
tcccttggagagcatcaagacacacagtctttttttactagagatagagtctctctgtcatcnnnnnnnnnnnnnnnnnnnnnnnnnnnnnnnnnnnnnnnnnnnnnnnnnnnnnnnnnnnnnnnnnnnnnnnnnnnnnnnnnnnnnnnnnnnnnnnnnnnnnntaaagaagaccacaaaggaaagacaagaactctaaacaataaagtaacaccctggatagacgtagagagcactttcagaggacacctgaaagt

SEQ ID NO: 231184 - DNA, 105 bp, Homo Sapiens
ggaaaccagctatgaccaggaaacagctattaccaggaaacagctttgaccaggaaacagctattgaccaggaaaccgctataatcaggaatccgctttgaccag

SEQ ID NO: 231185 - DNA, 141 bp, Homo Sapiens
tgggcatcattacatcacaacaattaacaatataaaaccccctggccatacccaattaccaaactgcccctacttctgtctaaatcctgtcctaaatcacatgcatgtcctcacttactacctatactactacccatgtcc

SEQ ID NO: 231186 - DNA, 395 bp, Homo Sapiens
tgcacagacaagtattcactattcacacacagataggatgggaagtagcatctacttgtggacaactgatgtctgatcaacaaaaccttaactggacctgtactagaaagtcacatttgatcccaaaaatatccatgaaaatactgatatagctgcactatatatgtggtgtcaaggcaagtgcaaccccggttactcgacagcgctgactgtagtctagatgctagactggtgggtttcatcagttcatccagtacatcataaaatggatccttatacgacggtatttatatccggatggccagggtgaagagctgactgtaagatgtgggagttccagttcatgtttaggtcccagaaaagaaacagggacgtaatggcaatactgcaaggtg

SEQ ID NO: 231187 - DNA, 213 bp, Homo Sapiens
ccggaacgtagattccttctggccacgcctctctgccggtgtaaatcttggagtatcgcctggagccgacttagaactggtgcggaccaggcgaatccagactgtttaatttaaacacaaagcatcgcgaacggcccgcggcggtttgttgacgcgtatgtgtatttctgcccaggtgctcatgatatgtctcagagtgcaagaaccttcaag

SEQ ID NO: 231188 - DNA, 390 bp, Homo Sapiens
tgatgaaagggagtcatgaccagcaaacctttcttctggtcatcgggcatgtcgcgtagttcttggcgaggctatccagcaatgcctcattcacacccgctgccagggcccctgtgcggaaatctcctccagaagcctcagctgccaacccgcccatcaaggcatgtagcccaatcttggtaatgccaccttctgcaaaccggttcttggaaacatccccgaccaggttgaatccataagccgcaaatgcgttagccaaactactctacaacgcgtcgccaagacgggcttcgcccccgagcgcccgatctaccaatagtgatgttccgttttgcagtacttggttggccgtgaactgccccacaccttgccaagtgctcaacggactta

SEQ ID NO: 231189 - DNA, 295 bp, Homo Sapiens
tgtagcaacaaggcggcagcgacatgctggtccagctcgacaacggttcgagcatcaccatcaagcaaggtgagaccatgggcacggtgaccgtcccggcgcctaccgatgacgtgttcatcgacaagagcacccagaccgtcaagatcaccggcaccaccggcggcaatttcgagggtgtgaccatcacacctgcgggcgccacgaccaccatcaacgacaccatcgacgacgtgaccgtggtactcaaggccaccggttcggtcagcgaaggcgggcagatcgtctacaccgc

SEQ ID NO: 231190 - DNA, 502 bp, Homo Sapiens
ggcactatctttgccagtacatcaataccagtgttgagccagagagcctgcagttgtgatacttacagaacaagctattaacctgaaataagaagcgtggtccaagagaaacgtcaggtaataatacgctagttcatgtgctcacaagagccatattttcttttactatggcagaagatatcccacagaaaagtacaaaagggaagacaagcaaccttcttaaggcattttcttgagtttattaggggtctgaagtcatcccccgatcatatccatgctcacatacatatgccatgaggttagatcttggcctctgtctttaaaatggaagaccaagaatactctaatgtttgcccagatgtcaccctgactagggtcatgaagtcatatctagcaattaaagagaaccaccactatagtgtaaaggctttgatgtggatacctggcctgatggctctttcttggtcttttctagcaaaagacatcaatgaggaaaataatg

SEQ ID NO: 231191 - DNA, 370 bp, Homo Sapiens
cgctacagcaggataagggaatgacggcgatggcgccgcgggtgaaggcgtaatgaggtaatgcagtgggcatggaagcggctcatcgacagacagtcgacaagcatgccagcacgaacgaaatcttgtcttgaacgatcttgctcaggcgagctttaccgaaacctgctccaccgaatcccgggcttcgcgcaattcatacgcatcctggttcagccggtggatggtattgagcaggcgctggcgcagcacttcatcgccgagtttttccacggcgcgcatcaggtcgaaggccgcggtttcgttattttccgcgacggaatccagggtcttgcgcaggtttcggtaaagctcgcctgagcaagatcgt

SEQ ID NO: 231192 - DNA, 206 bp, Homo Sapiens
ttgggatgctttcccagaatggcggatgtgcgcggcgatcaggtcgacgtgcttgtgcccagttgcgggttcttttcccagcatgtgcccttgctcggaggtggtcaccgggactttcacggcggcgcgcacgcggtcgagctgcacgatcaggccttcgggggtgatttcttcccggaacaccgcttcgttgcccaccactacgc

SEQ ID NO: 231193 - DNA, 153 bp, Homo Sapiens
acacgcactttgcacacgcacttggtcatgtatatcgggacttcttacgtctgcacgatgctgatgtcacgactaaggagtcttgtctctaacgtgaagaagtcattaagagctgcttatgtaaagccctgtgtcttgcgagacagtggcgtt

SEQ ID NO: 231194 - DNA, 235 bp, Homo Sapiens
actaagacctgcattgtactcgatgtgtgtagtggggccctatagtccccgtatgaggtctcactatagactttcgtcgagcgaagtctcaatcatgaaatattatatactgtgtagagaattgatgacctacagatgataggatatatcatgtggtgtactgcatcgggggtagtccgagtaacgtcggggcatccggatagcgagaagtgtttatatgtatcggttactctaa

SEQ ID NO: 231195 - DNA, 152 bp, Homo Sapiens
tgtgcatattggtatctctagatagtcagttctgaccgtcttctcagcgctccgccagtgccgtgagccgaccccggtggggccaatccgagggcctcaattaaaacccatccaatcggtaagtagcgaacgggcggtgtgtcccaaagggg

SEQ ID NO: 231196 - DNA, 163 bp, Homo Sapiens
  misc_feature (66)..(66): n is a, c, g, or t
  misc_feature (130)..(130): n is a, c, g, or t
gattggtaggatctactgaataagaatgagttatctatttacattatctcatttcagaaacttaancttttttgtgaactatgtacactaagcagattataggtacactactgtagagtatgatacttcncaaaataatttaaatatcggcaagaaaaagagt

SEQ ID NO: 231197 - DNA, 123 bp, Homo Sapiens
tctatatatgcttggttaatttttcatctttcccttcggactatatctatgcgcaggttcaattctatcgctatacttatttgggtaatggttagctaaggtgtctgagatacaaaatgccat

SEQ ID NO: 231198 - DNA, 135 bp, Homo Sapiens
aatcaaatccctaccttagaaggcgatctccagagaaaattggtcaggcagatcttctactgatgattagggttaaattggagattaaagtaatccaaagatagggaaaaattccccatttttaattgacagtag

SEQ ID NO: 231199 - DNA, 115 bp, Homo Sapiens
ctggagtatagagtgtcaaagcaggccgagcgcctggataccgcagctaggaaggaatttataggaccgcggttctatattgtggttatcggaactgaggccatgattaagaggg

SEQ ID NO: 231200 - DNA, 138 bp, Homo Sapiens
atgctcatccctcctttatataaatgcttaggggtatagttcccctgtcttctgaagtatacttgatgccggtagacgtggcggtgtgtacactgctaatagcgctgttcatctacgcactctactctcaatgtactg

SEQ ID NO: 231201 - DNA, 108 bp, Homo Sapiens
accgcggtctattcattattcgagcgctggatacgcagctaggatatggcataggacgcggtctattttgttgatttcggaactgaggcatgattaaggagggatgag

SEQ ID NO: 231202 - DNA, 277 bp, Homo Sapiens
cgggtattaagatccatctatctcttagcaccgcagcagttatcggtaagcgatgataaggtctgggcgaacgatctcactatctcaacttaatggtagagccggtcgtgcgtgagcggcgtgatgcgagtgctagtgtgcactttgtagcagactgcgctgcggatgaacgaacgcgtgttaggcgccgatgcgacgctcatcagacccagaaaggtgtgttgataagacagcagacggtggcatgaagtcggatctctaggaggatgagctggta

SEQ ID NO: 231203 - DNA, 131 bp, Homo Sapiens
agaggacagcccacagacttgctaaagagacagtatgaaagttcctgagtcaatgagcatcctacactgtgtatatgatggaagctggagagaaagctaagaaatggtctagttcagatggtctcatttat

SEQ ID NO: 231204 - DNA, 208 bp, Homo Sapiens
cctattttggtttattacacaggaaactcaataatatactgtaaaacgtagttttttttccctcaaaaatgctttttaatgtcaactccccatggggccttggtgaaaagttagttttgcaaagaataaatcaatcacttgtttgactcctccagctaacagagagcgtgtgaccggccgaatgtccttacctgttgggaagcttggg

SEQ ID NO: 231205 - DNA, 125 bp, Homo Sapiens
  misc_feature (50)..(50): n is a, c, g, or t
gggagtcaatatctctctggaggtatgatctgtatctaacaacctaagancactaaagatctagactgataatgacttcagcaagtctcaggattacaatccagtacaaaatcagcagtactttt

SEQ ID NO: 231206 - DNA, 240 bp, Homo Sapiens
aatgctccaacaagatttcctagtgtccaagagctgttctctttggactaacagttaaattacaatgggattagagggtctgtgggcaattaaagttgactatgatctatcttggacaccagctatcacaggctcggtaggtttgtcgctctacctataattcttcccactaattttgctaattagaaggggtgttgctctttaggctgttcttaggtagctcgtcttgttggggagccg

SEQ ID NO: 231207 - DNA, 285 bp, Homo Sapiens
  misc_feature (18)..(18): n is a, c, g, or t
  misc_feature (42)..(102): n is a, c, g, or t
agatcccaagctccaacnaagagcgaaactctgtttcccccnnnnnnnnnnnnnnnnnnnnnnnnnnnnnnnnnnnnnnnnnnnnnnnnnnnnnnnnnnnnntgtttggaggtatacttccaattttagtaccacataaagaatttgatattttgaaaaatgttgagtctgattcatttgtgtttcaagactcactcatggagaatgattttctgcattcacgtttgaattggataaggtatacacatgtataagcatctgctagatttctgtttcctcacagcc

SEQ ID NO: 231208 - DNA, 188 bp, Homo Sapiens
ctggtcactctaaggaccagctccacagagcatacttattatgatagaacagtacaacttcaacagctgcgtactcttgagacacaaaaaagtgctccatatagttacttgttaattccctaatcgcattacaatatcattactgttgttcttccagggctcggactagcctttagctctcgacacat

SEQ ID NO: 231209 - DNA, 118 bp, Homo Sapiens
cggtcgctgaaacaggtgtagacgtacaggccattgaattggtcatgtcacaccgcacctgtgtcgagagcaacggccgtccgcgccctgaagaacaacagtaatgatcttgtaaatg

SEQ ID NO: 231210 - DNA, 206 bp, Homo Sapiens
ggtggctggagcatcagaaagtcacctcacagatcttactttactatctagcttcatattggctagcagactcactctatctgacgaacggatcaacaccctagaatcactccattcgataaatcacttcaccttatacaaatcaaagagcctcggttatctcttcttctctcttatgcataacactattctcaccacgacagggg

SEQ ID NO: 231211 - DNA, 171 bp, Homo Sapiens
tcaacgcaaggcttatgacccgcacttactgggaattcctcgctccatgggtgaataatatgcactcccctgatccccatacacgaatgggtgttcaactgtggttaccctgcgcctgcctggcgtagtgcgtaggcacacgctgatcccagtcttgtgtagctgcgcgtg

SEQ ID NO: 231212 - DNA, 116 bp, Homo Sapiens
tgtcagtgaggcgttgctgtggtgtacgatttgtctggttattcctgataacaaacgagatctggatgctaactagttacgcgaccccgagtctcgttcgtatcggaatagacaga

SEQ ID NO: 231213 - DNA, 231 bp, Homo Sapiens
aagaggacgcaggcgtgtcaggcaagacatagtcggaagggctgaaggtacgagactggagtacaaggaagagcaggactacaagaagagtgtccccggctacaggatatacgtacgcataccaaatgtagctcccagtgctacaggtgcctagccagtctaccacctagctacctacatcctaactactacatacaccagactaggaatagtccatcataggatacccta

SEQ ID NO: 231214 - DNA, 264 bp, Homo Sapiens
tattgtcgtgctgggttactgcgtggttacgtgccctcctaagttcttaatacacttttaaaagtacactttagatttgggagtagtttccaatttctggaaaagtgcaaagatagccaagagtgttccctgggtgccctcacaccactatcctccatgtgttgatggtcttatgtctacctcaggtacgttgtgttgtagcgtaagaaacccacgtgacaagcggcctcacgtgacaagcggcctgggctaccgacgctcgaa

SEQ ID NO: 231215 - DNA, 132 bp, Homo Sapiens
tgttatagcgtttagtcctctcggatgacctgattcccgtaccgtgtcacatggtatgcacgggatacatcgaagtgataggcagagtcgaatggtcgtcgcgcacgggggcgtgcgatcggccattcgaag

SEQ ID NO: 231216 - DNA, 393 bp, Homo Sapiens
cctctagattgaggatggggggaagaacgtcaatggtgaagcttctctgggaaattctgcaggccttgtagttctctaagacccctctagcaacatgtgagatatgggctattgatattcatggagtccttggatgaggctgttgctgcagctctgtgagagagagagctcttacgatcaatagaacttgaagagcttcatgccagatatcaacctccagagaacaaaacacatatcccagaggccaacatagatagcgtgaacgtatctgaggaccacatgtgtcaaacgaagaaagttacagacccaatatccacactgcatatataaactccagagtgctatagcttcctgagagtcagatcaaatgacaatttctcagattgaaaggta

SEQ ID NO: 231217 - DNA, 137 bp, Homo Sapiens
cggcccccttgttatttgctacagaaccctctaaatccccttgtacatttaactgtatagtccaaagaggaacagctctattggactaacagttaatatacaaagggataacgagggtacatagtaggcacaataaa

SEQ ID NO: 231218 - DNA, 229 bp, Homo Sapiens
tagtgacaaatttacttggaaagagataggatagctattaatggaactgcaagatttttttactatttatgttggaagaaaccaagcaatattatgtaggaacaaattctaaggtagttcatagtcaccagaggcaaggtcacttaatcattaggacaacagctaggaccttcacccagcagtcatttcagcatactcattcgcacattcagtctccgtagcaccatca

SEQ ID NO: 231219 - DNA, 355 bp, Homo Sapiens
gacgatgagtctcgacaccatgacagagttcatgctcggcgcgatcgagccacacaaagcatgatactcaaagtaatagagagctcgacacgaagacccagacgcctagctcttcacgcagacgacgagaggaggcatccaagaatagtctctccaggtgccggatgactgcagcaggcatacgaccagaaacctgcccagagcattttatccgccgcccgactctgaagcagatgacgcccacggctgtcactcaagtgcactgaaaaagcgcgatgaagctgcccagctcccaggtgagcctcgcgtttatcgcacacgccaatctgtacatcctgtgcgtcgactaacacta

SEQ ID NO: 231220 - DNA, 398 bp, Homo Sapiens
tttgcggcgcatgcatgggactcatccatggagtggcggatggtagccatcacccagtgagggacaaggcggatatccgccaacattgtaggacgagacaggatgagtgggcggaaatccgccactgtgtagcactctccggagtcgcccgtgaaccccaagccctgatgtctaaaggccttcagagcgtttaagcaaagtggcacgctgtatgcgactaaggatatacagcgcaggctatgtccataacaggcttcgcaaacaacaaatccctccaggccgaaaacagtatactgtttgcggaggaagatggtcgggtctgagagagcgccagcaatcctgaaggaaaacatcgaaaggaaccagttaataaatggtacgcataagtcatacgccct

SEQ ID NO: 231221 - DNA, 106 bp, Homo Sapiens
tctcccttgttttaaatttcatgtcccgctgggttgttatagccttggtttttggggtgtgtttagttctttggttcctggtccttttttatcatttaggtggttg

SEQ ID NO: 231222 - DNA, 379 bp, Homo Sapiens
  misc_feature (83)..(127): n is a, c, g, or t
  misc_feature (129)..(185): n is a, c, g, or t
ccagctttttcagcagagcaaaatcaaagcgctgttattacaggcatgagccaccacgcccagcctttgtgggtatattttcnnnnnnnnnnnnnnnnnnnnnnnnnnnnnnnnnnnnnnnnnnnnnannnnnnnnnnnnnnnnnnnnnnnnnnnnnnnnnnnnnnnnnnnnnnnnnnnnnnnnnaatggcttgacacaaattccactcaatgagctttacataccataggtgtaattggtgtggcctactaatttctctgtggggaggatcatcacgtataccaaaaggtattgagagtcatgttcttctcattattcaggggtgcaccgaaaatttttacagtgcttttagaatgcttttaaaatatttttggccat

SEQ ID NO: 231223 - DNA, 115 bp, Homo Sapiens
  misc_feature (64)..(64): n is a, c, g, or t
  misc_feature (69)..(69): n is a, c, g, or t
aggaacaacatatgacgcactcctcccctgaactctacacaacaaattttgtcaccaggaaccntactnttggactccttgttcttaatgaattcgaacgggatacccccgattc

SEQ ID NO: 231224 - DNA, 115 bp, Homo Sapiens
gggaggaagagccgagaaactgtgtgaccggggcctcaggcggagtgcattttcggggtcccttttgcagatgccgattggcatcaccggtgcaggccatttgagggagcgggat

SEQ ID NO: 231225 - DNA, 222 bp, Homo Sapiens
acgatctctgcaggatcccccttcgttatttgcaaacggcttctctgctgttccccgtgtgggtgtggctaggctactgcgtcttgaagcgtgcattgctgcgtgctctatgcttgtcccttttcgactcgtggtgatttacgcgtgtgaactcactggaacgggtatgcttgcctttgtaatcttactaatagctaatagaaaggctaggaccaaacctat

SEQ ID NO: 231226 - DNA, 222 bp, Homo Sapiens
tcatcctcgtggcgtggaatgcgagtgcctactgcgccacggtttggttcgcagaactggcgctgtgggattaacctgaacgccgggttaaggcgccctgatgccgacgctcagtcacaccccagcaaaagcgtgttgcgttgatactagacagcagcgacaggtggccactcgaagttcggacatccgcataagtgatgtgtgcgagggtacccgcacctc

SEQ ID NO: 231227 - DNA, 287 bp, Homo Sapiens
aatgcgtcacgcgttcgcgattgttcaccccctcctagcggaatcgtgagctgggttttagacccgtcgtgccactcgttatttttaccctactgatgatgtgttgttgtcatcgttatcctgctcattacgagaggcaaccgcggtcttcagacatttggatgtatctgcttggcttgagtgagccaattggggcgaagctaccattctgtggcattatgactgaacgcctctaatttataatcccgcccatgtggaacgatacggtatcgccgcggagcctcatg

SEQ ID NO: 231228 - DNA, 221 bp, Homo Sapiens
agatctcatagcacgatcccccatgagggctcctgttagtcaatgctgagatcatcggagccttcaggcagtgtcctactgaatattcagtgtcagcatcagatccctcatgttttagtactcagagtgctgcgtgtgacatgttccagataccacctaccagagacctctatgttgggtaccgcagcctcgaatttcgctaatcagtcgttcactagcct

SEQ ID NO: 231229 - DNA, 337 bp, Homo Sapiens
cgtcgccttctattttgttggttttcggcactgacgccctgattcccagggacggtcgtggccattcgtcttgcgccgctatcggtgcaattcttggaccggctcacgacggaccatagcgaaagcatttgccaagaatgttttcattactcaagcacgactctcaagaggttctgacagactatcatgataccgtcgtagttccgatcctaacacgatgcctcccggcgatgcggctgcgttattcccatgacccgccgggcagtttccgtgccaccaaagtctctgggttccggtggccgtctggtcgcgaagctgacacttacaggccttgacg

SEQ ID NO: 231230 - DNA, 161 bp, Homo Sapiens
cttcgtttattgctaaaggtacactgctgttcccgtgtgggtgtggctaggctaagcgttttgagcgtgcattgctgtcgtgctcttatgcttgtcccttttgtatcgtggtagatttagacgggtgagctcactgagtacggggtatgcttgccatgtgt

SEQ ID NO: 231231 - DNA, 127 bp, Homo Sapiens
tacacatgtcggctcctacacataggctccctcagcttcacacttactccggcagtcccctgcgatggcaacactcgtaggtgtcttgaaatcccaaacttgtctggactcccccgtactccctgcg

SEQ ID NO: 231232 - DNA, 107 bp, Homo Sapiens
ttacacattaggctccattgtgaagcagaattcaccaagctacacatgagggtgccgtgactggtggcggtacacctgtcaatacggtatacgcacgattcctagag

SEQ ID NO: 231233 - DNA, 134 bp, Homo Sapiens
cgacgctcatcagaccccagaaaaggtgttggttgatatagacatgcaggacggttgccatgcgcaatgtcggaatccgcaatgaagattgcggcatatctttgtggtagtagcacatattcaaactcagaact

SEQ ID NO: 231234 - DNA, 256 bp, Homo Sapiens
attatttctggttctctgttctgttccattgctctgtatctctttttatgccagtatcaggctgttttggttactacatttttgatttatattttgagatctggtagtgtgataactccagtctttgttctcttttagctccagttattggctgttcgtgactatttgggtgtcttgtcggttccatcataaattttaagaatttatatgtgaaccagcaagtgggtaccgagtctcgacattccgtcatccttgg

SEQ ID NO: 231235 - DNA, 167 bp, Homo Sapiens
cttcgactttcatggtcaccgtcctgctgtctatttcaaccaaccaccttttctcgcggtctgattgacgcgtctggcatctgggctgccttaacccggcgcttctggttcttcccgacagcgctagattctcgctttccataatgtggcccacttatggcactcgc

SEQ ID NO: 231236 - DNA, 100 bp, Homo Sapiens
aagctgtcattcttgtggtcgatctctagcaggatccccgcaatctatgctcgcaaggaactcatctcctgtcaacaatcttgagacgagctcttacaac

SEQ ID NO: 231237 - DNA, 158 bp, Homo Sapiens
cactatagcctcatccattgggaataattgcaatccccgaatccccatcacgaatggtgttcaacggcgttacccgcgcctgtccggccgtaggagtacgcatcacgctagagccagtcgagaactagtagcctcttcccatgtgggaataatttgca

SEQ ID NO: 231238 - DNA, 181 bp, Homo Sapiens
cactatgcctcttcatggggattaattgccctccccgtatccccagtcacgagtggcgttcaacgtggttacccgcgcctgccggctgtacggtacgcacacgctgcagccagtccgtgtagcgcgcgtgcagccccggacttctgagggcatcacatacctcttatcgaggctattgttg

SEQ ID NO: 231239 - DNA, 331 bp, Homo Sapiens
tccccacttatagccttctggcaggtcgaagcctagaggaaactctggtggaggtccgtagcggtcctacacgtgcatacatcggtcgtccgaccatggagtatagcgggcgaaaggactacatcgagaccatctaagtagctcggttccctcccgaagatttcacctcagggatagctcggcgctctcgacatacccggacgcacccccgcgcacgcagttttatccgtgtaaagcgcaatgattagcagttcttggcggccgcaaacgatctcccacctattctctaaacgtttaaactgggtccagaagccctgtgctgggtacccgc

SEQ ID NO: 231240 - DNA, 146 bp, Homo Sapiens
tgtgatagaggatccccttcatatcttgcagaacctgagtaaagcgccaccaagggtttgagtcatcagtaggtgtcacttgggggtgcatccacttctgagcaaactctagagtgagcccacttcgtgcatgtggctggtgacag

SEQ ID NO: 231241 - DNA, 488 bp, Homo Sapiens
  misc_feature (228)..(392): n is a, c, g, or t
cgtcactgtccagaccacacagaagtctggtcacctctgaccgagttcccattctgttctagctcactgaagccacaggctgaaacagggggctacatctcccagcaagctgtaacttcagaaggcgaggtgcccagagtcctaaacaaaaatccacagactattttccatcatggtatggggagttttgtttgttagctgttttattttttctgaaacaggttctannnnnnnnnnnnnnnnnnnnnnnnnnnnnnnnnnnnnnnnnnnnnnnnnnnnnnnnnnnnnnnnnnnnnnnnnnnnnnnnnnnnnnnnnnnnnnnnnnnnnnnnnnnnnnnnnnnnnnnnnnnnnnnnnnnnnnnnnnnnnnnnnnnnnnnnnnnnnnnnnnnnngtcctactatggaactcggtcagaggtggcctgcccgactgcttgctctctggctgtgctcctgcttaaagaaatcagtccttcctttccgactta

SEQ ID NO: 231242 - DNA, 351 bp, Homo Sapiens
  misc_feature (75)..(304): n is a, c, g, or t
aacaaatgattgatacccacaataacctggacgaatctccacagaattatggtgagtggacgaagggtaatcccnnnnnnnnnnnnnnnnnnnnnnnnnnnnnnnnnnnnnnnnnnnnnnnnnnnnnnnnnnnnnnnnnnnnnnnnnnnnnnnnnnnnnnnnnnnnnnnnnnnnnnnnnnnnnnnnnnnnnnnnnnnnnnnnnnnnnnnnnnnnnnnnnnnnnnnnnnnnnnnnnnnnnnnnnnnnnnnnnnnnnnnnnnnnnnnnnnnnnnnnnnnnnnnnnnnnnnnnnnnnnnnnnnnnnnttgcaaattttatttatttattcattcattcatttttctgagacgga

SEQ ID NO: 231243 - DNA, 362 bp, Homo Sapiens
  misc_feature (72)..(290): n is a, c, g, or t
ataaaaaggtatttaggaaagtaaaccaagggtgtgaccaagtgactttctgatcagagtgtggctagaaannnnnnnnnnnnnnnnnnnnnnnnnnnnnnnnnnnnnnnnnnnnnnnnnnnnnnnnnnnnnnnnnnnnnnnnnnnnnnnnnnnnnnnnnnnnnnnnnnnnnnnnnnnnnnnnnnnnnnnnnnnnnnnnnnnnnnnnnnnnnnnnnnnnnnnnnnnnnnnnnnnnnnnnnnnnnnnnnnnnnnnnnnnnnnnnnnnnnnnnnnnnnnnnnnnnnnnnnnngccgtagttgtggctccagtgggcccaggtgcagtttagtccctgctctggagggcaaagtggtgaacctca

SEQ ID NO: 231244 - DNA, 443 bp, Homo Sapiens
  misc_feature (75)..(313): n is a, c, g, or t
  misc_feature (351)..(351): n is a, c, g, or t
aatgtatttatcttcattgaacagtcgtcttcagaactgttctttttttcttgagacagggactcatgctgtcannnnnnnnnnnnnnnnnnnnnnnnnnnnnnnnnnnnnnnnnnnnnnnnnnnnnnnnnnnnnnnnnnnnnnnnnnnnnnnnnnnnnnnnnnnnnnnnnnnnnnnnnnnnnnnnnnnnnnnnnnnnnnnnnnnnnnnnnnnnnnnnnnnnnnnnnnnnnnnnnnnnnnnnnnnnnnnnnnnnnnnnnnnnnnnnnnnnnnnnnnnnnnnnnnnnnnnnnnnnnnnnnnnnnnnnnnnnnnntcatgagctactgcaccccatccagcggaattgtcagntctgaggtgacaaatgttccccaaaatcactatgctatgcaaagacatgcattaaaaaccacagggagtctaggcacagtaactcatgcctg

SEQ ID NO: 231245 - DNA, 494 bp, Homo Sapiens
  misc_feature (72)..(211): n is a, c, g, or t
  misc_feature (213)..(229): n is a, c, g, or t
  misc_feature (290)..(290): n is a, c, g, or t
  misc_feature (331)..(331): n is a, c, g, or t
  misc_feature (366)..(366): n is a, c, g, or t
  misc_feature (376)..(376): n is a, c, g, or t
  misc_feature (395)..(395): n is a, c, g, or t
  misc_feature (409)..(409): n is a, c, g, or t
  misc_feature (435)..(435): n is a, c, g, or t
  misc_feature (474)..(474): n is a, c, g, or t
acctcctgggttcaagcaattctctgtctcagcctcccaagtagctgggattacaagtacctgccactacannnnnnnnnnnnnnnnnnnnnnnnnnnnnnnnnnnnnnnnnnnnnnnnnnnnnnnnnnnnnnnnnnnnnnnnnnnnnnnnnnnnnnnnnnnnnnnnnnnnnnnnnnnnnnnnnnnnnnnnnnnnnnnnnnnnnnnnnnnnannnnnnnnnnnnnnnnnaaggagacagggtctcgcctagagtgcagcgatgcaatctgatacaatcatacctcactgnagtctcaaagtcctgggttcaaagtgatcctcccatcttancctttgagtggctgggactacaggggcatgccatnacaccctggntcaaaatttaaatttttgnaaaaaaccggggtntaacaacgttgcccaagctggttttnaaactcctaagccttaaacgatcctatggcttaagcttnccaaactggtgggaatacag

SEQ ID NO: 231246 - DNA, 308 bp, Homo Sapiens
  misc_feature (66)..(230): n is a, c, g, or t
  misc_feature (241)..(241): n is a, c, g, or t
acatcattaggaaatggctaaaggtgttattgcacatccatgcaatggcctttttccttttaagcnnnnnnnnnnnnnnnnnnnnnnnnnnnnnnnnnnnnnnnnnnnnnnnnnnnnnnnnnnnnnnnnnnnnnnnnnnnnnnnnnnnnnnnnnnnnnnnnnnnnnnnnnnnnnnnnnnnnnnnnnnnnnnnnnnnnnnnnnnnnnnnnnnnnnnnnnnnnnnnnnnnnnattcagtgcanagggtccttgacttatgatgggattacatctcgataaacccattgtaagttgaaaatattaatgttt

SEQ ID NO: 231247 - DNA, 557 bp, Homo Sapiens
  misc_feature (207)..(258): n is a, c, g, or t
  misc_feature (331)..(348): n is a, c, g, or t
  misc_feature (358)..(470): n is a, c, g, or t
  misc_feature (507)..(507): n is a, c, g, or t
  misc_feature (521)..(521): n is a, c, g, or t
cctactagagcaaaccattcagaaaatgagtaccaaaggcattcattatgtaccaaatatggaagaaagtactaatatacattgtgcctctgtggacatcacactatgatcagttaaaaataggcacttggcttaaaactttaagaatttcccactgcaaaaggtatcagctctttaattttttttgaaacagtcttcctctgtctnnnnnnnnnnnnnnnnnnnnnnnnnnnnnnnnnnnnnnnnnnnnnnnnnnnntgggttcaagttattctcgtgtctcagcctcctgagtagttggggttatgggcacatgacatcacgctcggcnnnnnnnnnnnnnnnnnnagatggagtnnnnnnnnnnnnnnnnnnnnnnnnnnnnnnnnnnnnnnnnnnnnnnnnnnnnnnnnnnnnnnnnnnnnnnnnnnnnnnnnnnnnnnnnnnnnnnnnnnnnnnnnnnnnnnnnngcccaacaccacgttggctaaattttggatttttggnaggcatgaggttcnccatgttggcaagctggtctcaactggcccgtttgg

SEQ ID NO: 231248 - DNA, 432 bp, Homo Sapiens
  misc_feature (47)..(210): n is a, c, g, or t
  misc_feature (231)..(347): n is a, c, g, or t
  misc_feature (407)..(407): n is a, c, g, or t
  misc_feature (420)..(420): n is a, c, g, or t
gtatgagccaccgaacccagccagcatcaagagttttaaaattaagnnnnnnnnnnnnnnnnnnnnnnnnnnnnnnnnnnnnnnnnnnnnnnnnnnnnnnnnnnnnnnnnnnnnnnnnnnnnnnnnnnnnnnnnnnnnnnnnnnnnnnnnnnnnnnnnnnnnnnnnnnnnnnnnnnnnnnnnnnnnnnnnnnnnnnnnnnnnnnnnnnnnatgagccatcacacccagccnnnnnnnnnnnnnnnnnnnnnnnnnnnnnnnnnnnnnnnnnnnnnnnnnnnnnnnnnnnnnnnnnnnnnnnnnnnnnnnnnnnnnnnnnnnnnnnnnnnnnnnnnnnnnnnnnnnnngacttctaagcatttctgagtcagcctactttttctccattttaatgggcctatctatcnatttttggttggnttgggttggttt

SEQ ID NO: 231249 - DNA, 587 bp, Homo Sapiens
  misc_feature (154)..(277): n is a, c, g, or t
  misc_feature (314)..(522): n is a, c, g, or t
  misc_feature (551)..(551): n is a, c, g, or t
gtattttagtagagacagggtttcaccatgttggacaggatggcctcaatttcctgacctcatggtccgtccaccgcagcctccaaaagtgctgggactacaggcgtgagccaccgcacccaggcactagcgttattacaaggaggccatgtgnnnnnnnnnnnnnnnnnnnnnnnnnnnnnnnnnnnnnnnnnnnnnnnnnnnnnnnnnnnnnnnnnnnnnnnnnnnnnnnnnnnnnnnnnnnnnnnnnnnnnnnnnnnnnnnnnnnnnnnnnnnnggaatgccatgtgaaggccacacagacacatagggtnnnnnnnnnnnnnnnnnnnnnnnnnnnnnnnnnnnnnnnnnnnnnnnnnnnnnnnnnnnnnnnnnnnnnnnnnnnnnnnnnnnnnnnnnnnnnnnnnnnnnnnnnnnnnnnnnnnnnnnnnnnnnnnnnnnnnnnnnnnnnnnnnnnnnnnnnnnnnnnnnnnnnnnnnnnnnnnnnnnnnnnnnnnnnnnnnnnnnnnnnnnnnnnnngtccttactctggctatgggttacacatncaacaagtgggagcccaagggatttgaatcaggccc

SEQ ID NO: 231250 - DNA, 397 bp, Homo Sapiens
  misc_feature (44)..(66): n is a, c, g, or t
  misc_feature (69)..(69): n is a, c, g, or t
  misc_feature (79)..(238): n is a, c, g, or t
  misc_feature (327)..(327): n is a, c, g, or t
  misc_feature (336)..(336): n is a, c, g, or t
  misc_feature (364)..(364): n is a, c, g, or t
  misc_feature (371)..(371): n is a, c, g, or t
gtgtgtgctgccatcctcggctaatcttttgttttctgtttccnnnnnnnnnnnnnnnnnnnnnnnganatggagtttnnnnnnnnnnnnnnnnnnnnnnnnnnnnnnnnnnnnnnnnnnnnnnnnnnnnnnnnnnnnnnnnnnnnnnnnnnnnnnnnnnnnnnnnnnnnnnnnnnnnnnnnnnnnnnnnnnnnnnnnnnnnnnnnnnnnnnnnnnnnnnnnnnnnnnnnnnnnnnnntgggtttcaccatcttggccaggctggctcgactcctgacctcatgatccgcccgcttggcctccaaagcgctggggattacaggtgtnaaccactgngcccaaccattttggaatttttttgganacagctnttggtccgttgcccaacttgaatcca

SEQ ID NO: 231251 - DNA, 140 bp, Homo Sapiens
  misc_feature (45)..(45): n is a, c, g, or t
  misc_feature (59)..(59): n is a, c, g, or t
  misc_feature (76)..(76): n is a, c, g, or t
  misc_feature (112)..(112): n is a, c, g, or t
  misc_feature (129)..(129): n is a, c, g, or t
ttcgaagtagctgagattacaggaagtggtaccaccatgcccggnttaattttttggantattaagtaagaagacngggctttcacccatggtttggccggggttgggcttnaaacttcctggagcttnaagtggatcca

SEQ ID NO: 231252 - DNA, 536 bp, Homo Sapiens
  misc_feature (63)..(134): n is a, c, g, or t
  misc_feature (264)..(488): n is a, c, g, or t
gagacagggtctctctctgttgcccagactgaagtacaccggcatgatcatagctcactgcannnnnnnnnnnnnnnnnnnnnnnnnnnnnnnnnnnnnnnnnnnnnnnnnnnnnnnnnnnnnnnnnnnnnnnnattgtacctggccagtcaaccattgcttaaagcgaaatatttctctacattgctcatatatagttcacaaatttaaagcaatactttcaaatgtaaactaatgcaaaatatgaaaaaaatgttttcattnnnnnnnnnnnnnnnnnnnnnnnnnnnnnnnnnnnnnnnnnnnnnnnnnnnnnnnnnnnnnnnnnnnnnnnnnnnnnnnnnnnnnnnnnnnnnnnnnnnnnnnnnnnnnnnnnnnnnnnnnnnnnnnnnnnnnnnnnnnnnnnnnnnnnnnnnnnnnnnnnnnnnnnnnnnnnnnnnnnnnnnnnnnnnnnnnnnnnnnnnnnnnnnnnnnnnnnnnnnnnnnnngcggaaatgcaacatatctggcattagggtcatagcagtatcccatag

SEQ ID NO: 231253 - DNA, 338 bp, Homo Sapiens
  misc_feature (98)..(293): n is a, c, g, or t
atctagaaaataacattttaaaaaatgaaaatattttacaggaaataacatttgtacatactcataacagtctcaaagagaaaacgattcctctaccnnnnnnnnnnnnnnnnnnnnnnnnnnnnnnnnnnnnnnnnnnnnnnnnnnnnnnnnnnnnnnnnnnnnnnnnnnnnnnnnnnnnnnnnnnnnnnnnnnnnnnnnnnnnnnnnnnnnnnnnnnnnnnnnnnnnnnnnnnnnnnnnnnnnnnnnnnnnnnnnnnnnnnnnnnnnnnnnnnnnnnnnnnnnnnnnnnnngacggtgggccccggggaccccacgacccccttctcaggttccaa

SEQ ID NO: 231254 - DNA, 559 bp, Homo Sapiens
  misc_feature (67)..(133): n is a, c, g, or t
  misc_feature (154)..(284): n is a, c, g, or t
  misc_feature (435)..(435): n is a, c, g, or t
  misc_feature (474)..(474): n is a, c, g, or t
  misc_feature (518)..(519): n is a, c, g, or t
  misc_feature (523)..(523): n is a, c, g, or t
gagacagggtcttgctctgtcacccaggctgcagtagtagggcagtggcacaattatagctcactgnnnnnnnnnnnnnnnnnnnnnnnnnnnnnnnnnnnnnnnnnnnnnnnnnnnnnnnnnnnnnnnnnnnctacaccaccatgcctggctnnnnnnnnnnnnnnnnnnnnnnnnnnnnnnnnnnnnnnnnnnnnnnnnnnnnnnnnnnnnnnnnnnnnnnnnnnnnnnnnnnnnnnnnnnnnnnnnnnnnnnnnnnnnnnnnnnnnnnnnnnnnnnnnnnnaccatgcctggcctcatcctcctccttctctctcccaagttgcccagctacctctggaaagcattccactggctgtggctgcccctaaaccattaagcaagtgaatggtagtactacagaccttggatcaagacaaagaatgtcccagatnggggaatcaggaccaaggacttaaggttgcattatcagncccaaacacctaagtgggcagggttggaaattctggattactgnnaagngcttctggaaaaggatggcaaggttgcaagcctact

SEQ ID NO: 231255 - DNA, 250 bp, Homo Sapiens
gagcttgccttggcttgtgtgcctcctcaagcaggctttcaaacatattggcatagagcttcttttcccgggcaatgtgccttcggatcccctggtggcaaacaccaattgggtcttggcggctttgtttgtggggtaaagcttgacgacctctgggaatcagcccgtccaagttaaagtcatctccgccacggtggcttttcccgggggaataggccctctcgttggtgctgccaagtttagggctctt

SEQ ID NO: 231256 - DNA, 141 bp, Homo Sapiens
tgaggtgaaagatgagctgtaggaccgcaataggggtaggctcctgtggaggtagggtaagaggcaataggatgccaaggagtcaggctgggacttaaggagcatggtggggggaatactccctctagagtctccgctgtt

SEQ ID NO: 231257 - DNA, 139 bp, Homo Sapiens
ttcggagaaagggggctcagtccccggggttcttgggaaagcaaaggaaaaaatggtcggctcgaagctgcccctcagagaaccccaggagaactgaaaagcggtccttgctccccggggaaaggcgccgcccggaaat

SEQ ID NO: 231258 - DNA, 102 bp, Homo Sapiens
ggcaggcccttggggaccaaacccggaaaccagaacccccacatttcccccaaaaagggccaggacaccgccaagggggaaaaagggtgggaattcccggcc

SEQ ID NO: 231259 - DNA, 298 bp, Homo Sapiens
gagtgtcattggggcgctggtgcctgccaagggccgacactacgtagaaaaagcgccgagtgcactgcatacggcagttagccgcgaccgccacctgcgtgctcatcccccgtttgccgacttgaagagtctggactctgacttttccagtttggaccaggggaccagggaccttaccgccaagcatgcggcctgcggcctgcaagttaggcaggagctttgcgccgcaattggcaagatgggcagcgaccgtcagggtcgcgcctgccagtggcaaggggtgggaatcagggggcac

SEQ ID NO: 231260 - DNA, 211 bp, Homo Sapiens
taaatattacacgaatcggggcttctagcgggagtacttcgcgattgccaacgtcaaggagtcgcaggtcgcctggtcctaggactaattgggccgttattcagcagttgaaaattagtccgccgtagtcggtgcactcgtacggtcagtaccatgggtggccaatggatctgatggtcagggagtgatagttgacctcctccggcacgaa

SEQ ID NO: 231261 - DNA, 187 bp, Homo Sapiens
aatggaaaatggaaaggtattcgttggaaccttaataggggaaacattgcacggccccatcatgaacatgaccaagtacagagtggcggatgtctggatgatgtagtcagacaaggggcatcgacagtcacagatgtctccagaacagatcaacatcgagctgagcaggaaggatgcgtgccgtatc

SEQ ID NO: 231262 - DNA, 149 bp, Homo Sapiens
aacacctccagcttaataggcgtggttagatactaagaggtactcgatggcagcagctccaccatgacatgttcgagtagtacttccttgacaggcaaatctgttggccatcggtcgcttgaacatactcctcctgtgcagtcttcagg

SEQ ID NO: 231263 - DNA, 220 bp, Homo Sapiens
aaacctcccccatttacaaaatggggacaatttaatttttccgcttgcccaagaaacaaagcttcttgggaaccctggaagaagttgaaaatgggactggcaaaaaacaaatgctggattctctaaaagaggccaaattttgggaaaaaaatccgcgaactttttattgggggaaaaagtggggaaaatttgggggccaaatcccaatttttttaaaaaa

SEQ ID NO: 231264 - DNA, 130 bp, Homo Sapiens
tcgagaagctgatggatgggaacgtgttcatgaattcgttgaaattgagccggtagagcaccgcggtcttgacgaacgagtacaagcccaacatgacgataagcagggactggaaggcagagatggtaga

SEQ ID NO: 231265 - DNA, 231 bp, Homo Sapiens
accatccaaaggacaattctctaaagtaggaaaccaacccaaggctgcaactgaatggtgataagagcacacagatcagtccctccataaggaaacagtttcctccctgaagccctcttgggtcaccaagcagattcggagtgcagttcccaatgtacacgtctaacgcagccacagaaatggagacatctttcaccagccgaatggtattgtccagagaacagcggaaca

SEQ ID NO: 231266 - DNA, 142 bp, Homo Sapiens
agagtctcagaacggcaggaacccagggaaacccctgaacaaacaacaggtccctagggggagagggttcccccagccccctcagagccccccacgccctgtgggacacaaagaggaaaacacccccagggggcaacccgga

SEQ ID NO: 231267 - DNA, 169 bp, Homo Sapiens
tgcgtctgcgtcctgcacctgggccaattccggcggctggctggtgcccatgttcgcgtagtgctcgaagtaagtcgctcatatattctcgtaactcgacggcgagtgacatggatttactaaggaggctcgcgtttcctcgctctcctacctctgcgatcttcaggaa

SEQ ID NO: 231268 - DNA, 242 bp, Homo Sapiens
atttataactttaattggtcttaccatcagcgggtagttctcatccacatttgctgtccgtagaatttttaaaatggtaacaggttcacggggatccaaagtatatggcttatttgggggatcttcagccccattagattttctcgggaacgcacaaggggttctggatatcacattccctattcccttggcccacacagctttttttagccccgggtcaaatggcgcatctcggggttccc

SEQ ID NO: 231269 - DNA, 184 bp, Homo Sapiens
ttggggctgaccccgggggaaaaaaagggggagccccccccgaaggggaaccgcattttggggaaaacttgcatgtgacttttcccccccggacgggtaagagccccagggggcaaaaaaccccccggcaaaaggcccccccaacctgggggcgtcccacctcaaattaaaaagggcgtttttt

SEQ ID NO: 231270 - DNA, 124 bp, Homo Sapiens
cccccaggggggacgcccaattccgggacccaaaggccccaatggcccccaaaaaaacaggggctcttggcagtggggaaaaaaccccggggtggctatcagaccagccaggctggggccgcgg

SEQ ID NO: 231271 - DNA, 139 bp, Homo Sapiens
ggagggcggtttctagatcgaatagtgggagggtagtagctactgaggaggggtttatggagaaagggacgcgggcggggggtatggggtcgaagccgcactcgtagagggtggatttgtctatgtggccggtgagttg

SEQ ID NO: 231272 - DNA, 335 bp, Homo Sapiens
ttatcagtcacaaacttttattcaaaaaataaaactattatttcattttattattcccaaaaaatcaagcccatcatcaataccccacattttttcttttcaaaactactcaaaaaagacccattttgtcaccattacccatcaaacaactctttacaagcataagttccaaatccttcactgctcctctcttatcattcaatgacttcagtttttccccaaaacccatccaagattaccaagtgctgacccatccttaactcatacctacatcaaacaactttctcacaaaccctcgtcctccccactaaccccttagcatcatattccaatac

SEQ ID NO: 231273 - DNA, 187 bp, Homo Sapiens
tgaccccaaatttggtggcaacatccaaagcatcggaaacaggagccagtcgaacaaaggccctcatctcgccaacaggccgaaaccaggggtagacctcggacacatcaaagacacacagcctcttcacaacccggtaaacaaggggcgggatggcgtaaacagccccaatgaacccaaaggagtc

SEQ ID NO: 231274 - DNA, 279 bp, Homo Sapiens
ccaagtgcagagtaccggtgccagacaacagctgtgttcccgggtgcgcgaggtagtggtccagattcgctataatgatctgcggagccagtgggaagtggatttccgtcagggttagggaggagggtatcggttaccagctacccatggaaactgcttgggtcctgatgcggagagtggggtaggctatgctctcggggctctcgtgctgtccggggtggcgacttcgggtagcacagtggactagcgtgcatgctacacctgggagcggtacgaaga

SEQ ID NO: 231275 - DNA, 196 bp, Homo Sapiens
ggggggatgtgtgaagtagatgagaccgtgtggaagggttgagtgatagaggcgagaggtgcagcaagaggtggagggggcggaggtgagtatgcgctcaagggctgtggagtgggggagagtgagcattagggggagagaggtgcgggggattaggggcggtgggggagggcggaatgtcgctatgtgtggcaga

SEQ ID NO: 231276 - DNA, 133 bp, Homo Sapiens
gagaggccccaaagaaaccggggggtgtgcactgggaaaaggtggcccgggaagacgggcggaagagggaacgggagggcccgagggccctgtggcagagacagggcccgagggcaaagccgcagaggagggg

SEQ ID NO: 231277 - DNA, 151 bp, Homo Sapiens
agtcaccaggggccactgtcctctccaaagggcacccctcatgcgcgacctgctcgctgtcgcacgtgtcggaactgcattgctcatctctaaggcgcagatagccggcggccaagtacctgctgtgtgactgcctgaagagtgtggtgat

SEQ ID NO: 231278 - DNA, 178 bp, Homo Sapiens
ccagccccaggggaacccccggaaggccccccgtcttcacagtgagggagctgtttgagaaccggaaaaaacccctttgaaaccccccgaaaatgccactgggacggaaggcccccatcaagaaccagcttggaagcccccccaatttggcccccaaaagtttcctggcgctcaacgg

SEQ ID NO: 231279 - DNA, 286 bp, Homo Sapiens
ccagcagggctttatttttcctgtgcaaaacccggtccgtgggcttcccttgctcttagagccccgtaagcggaaaatgcgggcgttgccaggggccgataggggagcatggagaagctgggaaatacttcctccccgcatggaggactcggcgttcaccctgctgaaacacgttccgcaagggcatgtaccggtcaggtaaggggctgggagtttaaggctttcaggagaataggccccctatggtgggggtagaggcgttccaatgggaaaaggatgagtgtgg

SEQ ID NO: 231280 - DNA, 544 bp, Homo Sapiens
ttaacattaatttcaatttaaaatcaagtgtcaaaatttccaaaattaaattatatccaggtggattccccaaaccccaggccttaaaggaaaaagtggagaactttaaaccacatggaagaaggaatggacggggtaaggaagttggcaatggaccccagttacaaagaacacagagagaccaacagggcgcatgggaaaaatggattgaagattggtcaggggtcacgttaggaaagcgcagggatttcggaaaatcctaaggttgggaattgtaacggttgtggcaccaagatttacctgaaaaggtagagagaagtcaaaaagcgggacccaattggggatttttcaaggctgctctctaacagagttttaaatatccgtaaacctaagtggctctggtgccttcccctggcttcaggatcttggaaacacctttgaaactttaaccactgttagcatggtcagaatgttgaaaaggccgtagggttttccttctcgccaattgttccccaagaaaaactctactgggaattgtaacatg

SEQ ID NO: 231281 - DNA, 157 bp, Homo Sapiens
ggaagggacaccccgggggaagcccgggcctcccccccgaaggccggcaggggacgggggggcagccaacacacaaaaccaccgggggggcaaggcgaaagaccggggggaggggaaagcacccggggggatgcaaacccaggaagagggaaatggg

SEQ ID NO: 231282 - DNA, 199 bp, Homo Sapiens
attcactttatttaatcattctcctccaacattagcataattaaagccacggtggaccaagagggcgaggtgaaacatgagatggaggaccccaataagggtaggtcccatgtggaaaaaggagtcagaggccaaaggatgggatggggtcatgcctgaactgaggatcagctaggagcacttctccatctaatactct

SEQ ID NO: 231283 - DNA, 100 bp, Homo Sapiens
cagataacgatttttagctgcggatgtggattagtgtggacttcttgggatcaagggtatattgcccatccatgatagcatttaagttgtcatcttggag

SEQ ID NO: 231284 - DNA, 193 bp, Homo Sapiens
gcatcattaggtacataaggttcattcctgtggtggtcctcacccaagccaaagatgtgaggcgagttatcacaagatgtgtttttaaagttacagttaaatgggtatctctgagaggtgatttcttctgtaggacaagatggggtagtatagggggtgtgtcggtagcggatgttgtctgctggtgagcctt

SEQ ID NO: 231285 - DNA, 169 bp, Homo Sapiens
ccctgtagtaagcccaatcgatagcgtgtggattctcaggtaaagcaggcaacctggaagttaggggtctcttccaggatttcagtgagctatgcatggccttttggtcttggggtatgatttctgcaaaagcgtaccagttaagaggttttgaagccagtgttcgccc

SEQ ID NO: 231286 - DNA, 121 bp, Homo Sapiens
agttgaagattagtccgccgtaggcggggtactcgtaggttcagtaccaggggtgggccattgagttgatggtaaaggtgggatcgttgaactcgtcgtgtgagtaaaggaggcgtaggga

SEQ ID NO: 231287 - DNA, 282 bp, Homo Sapiens
ctcccaaagtgatagaattacaggcatgagcaccacgcctggcctccaattcattttccaagctcgaaaagtacagatacccaaacctatccgggataattacagttcaggcaaattcatgaattccggattcaggaaacctaaaccaattgtaggtaagctgaatcccttgatgaataaaaaaggcaattatcatgaggccaggtatttatagaatgtgagttccattgaacctaaaggtaattacctccaaaacggttataggtaaaccaagggttatcc

SEQ ID NO: 231288 - DNA, 124 bp, Homo Sapiens
gacccgcaaccggggggcgggaacccccgtggggggcaccccgaaagccgcagcctgtgggggaaaaaaggggggaccgcccccgagggggttggagaggaacccgcagcggggcgcacgcccc

SEQ ID NO: 231289 - DNA, 494 bp, Homo Sapiens
ggggcctgaaggcttttatttgaagggatcataggatggggggtgcaccactacagggccaccttggggtccaattccccgggtcccaggccttggcaacttatgccgccttcttctcccgccgcttcttcagctggagcagccactgctcccgttaaaactcgttcatgtgaatcacatagtctaggtgcactcaatattcccagtagtgcggttactgtatgtaggccaggaaattggggaatctgtcacgcttgcatttgagcacccggataagattataggcacaatagtcccgcagctggagccttagctgggcgtccatcagcgcctgctgtgtgggcaccatctgggggtccttgctttcggggaagccgtagtctggggtgaaagtatcaatcttcagggggtacgggctccacgaggcattcgccagttacctccggacaaggtgcctcccattgttacagtccctcagattcctgaacagccga

SEQ ID NO: 231290 - DNA, 572 bp, Homo Sapiens
cggcaaaggagctttatagctgaggcgagcgagagaacactgcgtagggcgtaggggacggcgaaatgacgcgcggtcggagagtacgaacgcctcctgcagggcgcgactctgcggagccgtgaacgcgggagcgtcccggtgcacgcggacacatggggacacacggcgcacatctgtcccacgtcgaccagctagctctgcgccacccccaggcggagggcatcccaagcacggctgcgccggacccagagctcgtgcagcaccagcgcccgactagcccacggacctgctccacggtgcaatctgagggaccacagctcctcatgcttccgaggcagggcagcagatgcaggcgttcatcggaacttcacgagcacagaggtcggaccagaaacgggatcacagccctgggcagcaagaatccgctctgaagcgccaaagggcaggccggtcgtcaaacaccagaggcaacccgggcagaacctaggagcttgaattcccacagtgttcgctttagcaagtgaagggaacccccaagcgttgttacaaggtcctttagaattgggggc

SEQ ID NO: 231291 - DNA, 585 bp, Homo Sapiens
gcatttttaaaaaaaataagtttatttacatttcacttactttcaaaaggatgaaaatatatttataaaggaagtagtctcattttatttaacccatttgcatttgacttagaatcagaggtctaagggtacccaaagaatttatccagttcaactttccagttttaactaagagcggaattattaccatggcggggggtggaaaaccaactcccttttgtgggaaacatcgcctaggatgtttgtggtataaacatgggcttgagtgaaatctttcgtaatctcccatgaatctgccataaatgagtggagcttgtcgcaatagttgggcattatataatttatgtggagccataaagactgggatttgataccgggggaatggttagttgggctactaagtccattgcgtcacagtaagaggaccccgggggttttcttattcaaggtgaatcgcgtgtttttggacttaaaatttgggctataggcggtataaggatgccgtgcctggggggtgtacccatgtttgattggcgcctgagaagtaggccgcggtgaaattcccgcattttggggtgtgttcct

SEQ ID NO: 231292 - DNA, 119 bp, Homo Sapiens
tggtcttgtggatctgctcgagggaggagatgatcttgtgatcctggacactcttccagaatggtatgcaactgatgcgtggtcaacaggtactatcttgtactgagtaatgtgggcat

SEQ ID NO: 231293 - DNA, 115 bp, Homo Sapiens
ccacccaatttatttttaagcagttaaaggggggaatttaagagccttccatttggggggaatttagatcccccccttcaaatgcggaaataaacaccatccaaagtaaaactgg

SEQ ID NO: 231294 - DNA, 153 bp, Homo Sapiens
gacgggaaagttgcgggaacaagaaggcctcgggaaactttaggctagtccccaaattttcaccgggaaagggacggactctggggagactgggaaggccctcgggtattcagtaccatgggagaagaacccttcacaagttgctatgaccat

SEQ ID NO: 231295 - DNA, 121 bp, Homo Sapiens
agcactagacttggctatcgattatcacgagactcccaagggtagagcttgtaccaagaatgttttccgccaaagcagattctggcgatgccatcttgcgacagttgctacgtggtcccca

SEQ ID NO: 231296 - DNA, 109 bp, Homo Sapiens
gcaactctgcatcattgagttgcagctcaatcatggccctggatgaatcgaaggttgagttgattgaattccacttgagccctgctttggcaaagttctcccggttata

SEQ ID NO: 231297 - DNA, 142 bp, Homo Sapiens
caaagtgtgcagagaggagcgaaaaatcctctcgggccatgcggcgggatgtgttctttcagtcaaaagacgctgtgaagccgccccgaaggaatttggagttgcccgggcataaaatctgaactgcaggcaaaattccccc

SEQ ID NO: 231298 - DNA, 110 bp, Homo Sapiens
ggtgtgagcactgcatgtgggaatgtgcgtttagcgaagtcagtgcctgtgaagcattcttcgcaatattaggtaccattgatggaggaggcccggtcgaggcagtcatt

SEQ ID NO: 231299 - DNA, 193 bp, Homo Sapiens
aggggggaagaggccgggagcgagccccgcccggggggccgaccccaaaccaggcccccgggggaaaacccccccaagagggccaatgaccgagaggccgggggccaaagggcgcggccgagggaaagggggaccccaggaaaaagaggcagccagcgaaaagggcaaagaagggagtgaccccgaggggaaa

SEQ ID NO: 231300 - DNA, 148 bp, Homo Sapiens
taagaaattccgagaaaaccaggggacccccccttttgggggccaatttcctcaaaaagggggcaaggaacccagggtccccttgggtccttttgaaaggcgcacattccgttattccgaagctttggaaccctcgcctggggagagt

SEQ ID NO: 231301 - DNA, 139 bp, Homo Sapiens
cggccttttcccccccaagggggtccttggggttctaaaccccaagggggcccttttgccctctgtaagcaaccaaggggttttggctggaaaccgcggccttccaacccgatggggcttgaaggccccccgttgaagg

SEQ ID NO: 231302 - DNA, 190 bp, Homo Sapiens
  misc_feature (41)..(125): n is a, c, g, or t
cgggcgcgccgggggcggccacgaccagggggagcccccannnnnnnnnnnnnnnnnnnnnnnnnnnnnnnnnnnnnnnnnnnnnnnnnnnnnnnnnnnnnnnnnnnnnnnnnnnnnnnnnnnnncagagggagacgcggggcggcggccccgagagagagcgggcgcccggcggagggggcaaggcggg

SEQ ID NO: 231303 - DNA, 364 bp, Homo Sapiens
  misc_feature (208)..(208): n is a, c, g, or t
aatataaaatagaagatccaagtggcttcttcaggttttgtactaaagaagattgactacattaagtatgactcaatattggaagactcataaaaattctcaacaagatctggaacttcataatcatcataatctccagtagacagtggtgcattacaatacacagattgtatgggcagaacttaggacagtataattaaacaagtcngactataagacaaaagctggtttaagatgactgggtgactttcagtaggctgctttgtctaagcaaggactgtaatggtgaaagtgtacgctgaaagagatacatgaacattagggatgtataagtggaaacagttcctaggtttgtaaacttatt

SEQ ID NO: 231304 - DNA, 241 bp, Homo Sapiens
catctgatccacggcttgagtcatgataaccttcgttaatgaagtcatgtacaaggtcattaactagaccttgagactcatggaatgcgttttccactgaggatctgatcgccacatcctcccgattgaacaacatggaggactctaattcattgcccagactgcgtagtcgaacacaagagaagggactatgatatctaccagcctgttttgccctgatgttagtagagctagtaagatc

SEQ ID NO: 231305 - DNA, 106 bp, Homo Sapiens
gatctggagagttgtagcttgcgtgggagtgtaagtgctcaggcgtgagggtcaggtagctgttggtcgcgaacatgtagtcgcttagattggaaggtgtggtggt

SEQ ID NO: 231306 - DNA, 267 bp, Homo Sapiens
acaactcatcatgatctgctgtaacttgggcaccagttgggggacggcctgcacttgccatagagtttgccgataattggatggacaagtccgtccagttacgtcttcatagcgttgaagtctgcaatgtcagcatctcggagagcttgcagccatccaatcgtctgttctacagcttgttaaatggtctccttagcttcagaggacagttggccgcccagcgtatcgatatctccaatcagaatggatagagaataggcacagctt

SEQ ID NO: 231307 - DNA, 216 bp, Homo Sapiens
ggccaagactcgtttgaaccccgtgatgatagaaatgggaactgatgcaaaaaaattgggaacccaatcctgcaagacaagacactgggaaacattgcggggacaccctccagggaagccaggaatccagagtttcctctggggaaaccaagcacttcgaggtttgaaaaatgcggccattgggcaaaaaccctgcttgatggaccagcccaaagg

SEQ ID NO: 231308 - DNA, 124 bp, Homo Sapiens
cagcagcagcgaggaagtcatctatggtttaagcagccgacggggcagcagctacgaaggcagatgcgatcagcctacaaggccgtgaccttttcacccaagtgggaaatgtgtaatccgtctc

SEQ ID NO: 231309 - DNA, 285 bp, Homo Sapiens
ttttcattgttaaagcgattagttctgttgcctttaggggggacgggatgtcggttggataggcatgttaatgtgggattcctgggattcaagcccaggacatcagagtccccaggttggaaatctagacacacagcccagggatgtcccagagatgtcttctatcctgagaggagattccgggcacgatttgagaaatctgagcatcctcgggtatggaattgccgaagctgcttggaatcaaaactctggttctggggagaatcatgtcacctgagtctaggc

SEQ ID NO: 231310 - DNA, 130 bp, Homo Sapiens
attctcctataacattgggtttgtgatgggacgttgtaaaaatggggaaagaagcagttatatgcagcaggtgttagttactaggaatacagagcccgggagagctacgagctggatcgattcagacggc

SEQ ID NO: 231311 - DNA, 100 bp, Homo Sapiens
aaactggcaaggaagtccgtgattggtacagcagccgctgtcacagaagggattactctttctggtctctgttctgcaaatggcccttggagtgatttca

SEQ ID NO: 231312 - DNA, 334 bp, Homo Sapiens
aaaatggaaccctgattgaactgcattacagcctgcagggcaccttgggccagcttggttttactctgggtttaacggtcggcccatcccactttctcgaccccatttcttcctggaccaacatgcaagttctttccttccccggcagccggattaatagacagaggggaaagtgcagcgggccatcgtttgtcagtagttccttgatgttaaagggggaacaaagtcatttaaacttggtccaacccctttggaacttacaaagttaaaccgggtaaaaggaggttaataaagaaggccaatgctttttggaaattggacagtggcatattgg

SEQ ID NO: 231313 - DNA, 174 bp, Homo Sapiens
aaccccttgactaagcaggtcttgcagacacgattcttggttaattcattccgggatgggccaagggtaaaaacctgtggattctcagggctgccctttgcttatggaaatggtttccacgatggagggcagcaaggctttgttggaagacctaacacttataaaccgtgccat

SEQ ID NO: 231314 - DNA, 136 bp, Homo Sapiens
ggagtatgcgagatctattcgttaagaaagcacgatccagctatgaagtttgccggagcagcgcttgtagggagccacaggggcagaaaagatgagatcaaaagtgcttgttagaaataacaggagggcaatggtg

SEQ ID NO: 231315 - DNA, 167 bp, Homo Sapiens
aatgttaagctaagatgtttgaacgatgagttaagatgtctggattttacattagatctgcatatataagacacttgaggacgaatttcaagattagtaaagacggtttcaagctgcatatatgatgagtacaggtttcactaatgcagatatatgatgttagacta

SEQ ID NO: 231316 - DNA, 334 bp, Homo Sapiens
ccaggtggaaggagggagctgcgactaggaggacaggacgctgcgaagcgaaggctgcgcaaatcatgaaaaggagtaagaggactgctgttagagaaaggaaagaacctacagaagagaggatgaagcaggtggagtaggcaacggggaagaccgagtaacgacggggcagtccggataggccgagaaagtgatgagggaagaaggcaaggaggacgccgatgaagaggatagggaaaaggattgtggcggaggcaaggtcgagggtggagccagagaaaaggggaaagcagggaaagaagccaccgatgaaggcaaagacagcgccgaagga

SEQ ID NO: 231317 - DNA, 178 bp, Homo Sapiens
ggtcccccttcccccctccgggggagggaggaagggaacccttggggaagggaatgtccccgggggggaaggccgccccgggccaaattcggggcccggggggacaaatcccccaaagggggccgaaaaaaatccgaaaccagggcaaaggggatccccggaggaaatggtaacccgc

SEQ ID NO: 231318 - DNA, 125 bp, Homo Sapiens
agcatagggaggataagaggggctcctcctatccccgtcaaatggcatcactgcaccacttcccaaggggcaggacacagcaggggagacaagaggtagcccagtggttagcaaggcaggctgga

SEQ ID NO: 231319 - DNA, 229 bp, Homo Sapiens
  misc_feature (97)..(124): n is a, c, g, or t
gaagggctaacctaaattaaagaaaaaagaagtcggggacaccaggggttccaaacgggcccgagggacacgggatttgaaaacagccaaaattcannnnnnnnnnnnnnnnnnnnnnnnnnnntgaaatttgaggtacggggccttaaaaagggccaacctttcaaaccccaggggaaaccgcccccccgggccttggaaaagggggggcccaagggccaaaccccct

SEQ ID NO: 231320 - DNA, 197 bp, Homo Sapiens
aaggtccccaggccttaattggcccccccaaatcccagaaatggacttattaaaaaaacccacaaaccccccaaggcaaatattggggaaaacaaatttaaatccagatcccaatttccagtagggaagtaaaaatttgcaccccagggcacgaaaagttgaaacaaaaagggagacacccagccccacctctctgg

SEQ ID NO: 231321 - DNA, 389 bp, Homo Sapiens
agtcaaagctgttttataaacagtcaactttcctcatagataaagctttgtagcaaacggtctggtcatggtcgtacatcataaatccaggtttgtggacgtcgcgtccttaacatctgggtgcggggttgtcccagcaacaggcgcacagatggggcttgtccgacgcccctttggagatggagccctgggcactacttggcacagcacacagcgatgcaggaagagaagattgtcgtgaaggaggtgaacttgcacacttgacattggcaggacccggcgcatgtgcaggaatccacggcggcgagggaccagttgggatgcctgagccacgtgaagaggcgtctagagttcggacacgtttgcacgcgggttccctagagacttgg

SEQ ID NO: 231322 - DNA, 180 bp, Homo Sapiens
ctacctggggagcagcctgctcaggtacttcgaacatggaaacagcacgcagagtggagttattaagaagatactgtcgcggggaagcatattgaaaacctacatttggtgacaaaagtgtaaggttatagagctatcttgttaaacagcaggcagccaaatttggattcaccagtcaaa

SEQ ID NO: 231323 - DNA, 102 bp, Homo Sapiens
  misc_feature (27)..(27): n is a, c, g, or t
  misc_feature (56)..(56): n is a, c, g, or t
tttaaaaactggaattgaagaaagggnatctctttcttgcgcgctggggtgaaagnagggttttttttacgggtgatggcgaacggtggggttagggcgaga

SEQ ID NO: 231324 - DNA, 207 bp, Homo Sapiens
  misc_feature (56)..(56): n is a, c, g, or t
  misc_feature (81)..(81): n is a, c, g, or t
  misc_feature (125)..(125): n is a, c, g, or t
  misc_feature (188)..(188): n is a, c, g, or t
tggatttgagaatccatgatggctgaatttccttccttgtgaaacaaccgaagtgntttgacataatcctcataggtgcantggtacttgttattcggaatgtctgcagcatggcgagaaagtgntcaaagtggagcaaattgacattcatatgactaatcttggggttcccaggaaattgagatatnggtgttggtagggtttggc

SEQ ID NO: 231325 - DNA, 255 bp, Homo Sapiens
  misc_feature (50)..(50): n is a, c, g, or t
  misc_feature (126)..(126): n is a, c, g, or t
  misc_feature (134)..(134): n is a, c, g, or t
  misc_feature (186)..(186): n is a, c, g, or t
  misc_feature (195)..(195): n is a, c, g, or t
taaatgatacgccctgtgaaaactttgtagtatttttcgcatgggggggnaagttcaaaattattgcaaatggagtggcggacaaagttttaggaaaacacagaacagtaatttattttagctttntcaaaagngggggagttgttagggaaaactgaaaatttcgtttcgctttgtttgattatnttcagagtntgtttgtaaaaaggaggtattcttaatttttaaaaacgagttggagttagagttgatcga

SEQ ID NO: 231326 - DNA, 142 bp, Homo Sapiens
attctactttgggttagtttgtatgaggcattaccacataaagaggaaccagatcttctgagcgactgtctgccttgacaaattgtggactttggtcagtgaacaaagccgggtgaatgcagctgagaaaaagactgaggtt

SEQ ID NO: 231327 - DNA, 310 bp, Homo Sapiens
  misc_feature (101)..(143): n is a, c, g, or t
cccccccgggggatctttatttttctacaggggatgtgaaaaacgtgaacaggggccaaaaaagtcggcgggagaaaaacactttggccaatttaagcacnnnnnnnnnnnnnnnnnnnnnnnnnnnnnnnnnnnnnnnnnnnaaacaaaccttcccgggaaagggcccggggtccaagcccaaaacaaaggggtggactggggggtttccaggaaaatggatgaccggtcccggggaggagggccgggaagagaaaggggagttacagaggaggcttccgggtgacccgagtttatgtggtctcgggcc

SEQ ID NO: 231328 - DNA, 249 bp, Homo Sapiens
agttgggaagaatttattatcactatgtggcacttacagatgagggaagaaagggtgacactaacgaggcagatacggatcagctcccctagaggcagggattaggggctcattaaccgctgtggtcgacggtagcctaggtataggcagcgtgcggggggattaggctaggaagtggggcagtgtacaaggacgaggacgtggaccccccatgggagtccaacgaggcctgacctttagcgagtgagg

SEQ ID NO: 231329 - DNA, 350 bp, Homo Sapiens
gccaattttgagtagtcaaagtcagatcagtcaatctgttgatgtgagccgaggcatagctgtagtagcttgtctgatgtgtccgttggaggtggtagccgagctcttgtacgaagtaccgtgctggggacggtactcgcgtcaggatgcaggcagttccctgtagaattgtctataattcttactcctcttctggtgtgacggctatggtattatgatagatgcaccaggggaccccactaacggttgtttcgaaacagcagcccttattggcacactatgatggctgtgtcaccagtataatcacaattctgttctttcaatgtgtggccactgtatacttctttgtc

SEQ ID NO: 231330 - DNA, 367 bp, Homo Sapiens
gaagccgcatggtaatcctgcgctagtagatgtgtggatactggtggaccatgggctagactagaggagcagacggcgtcatcggtatggtgtatcgcacataggagacctcgacatccacgccgcactcgtcgtaagcagtaggctcaagcaccagcgcgcgcacgtagcggcccagcgttcgcttcggcagacaggtcacaatgtctgtcatcggatgatgaaccgttcctagcgttgtgagctggcatgaagaaggagtacagcatggacaggccctgtggcaagatgatgatgtctaatgtgcgctacgtcttaggatactcgaaaaactgtttgatggtcatctcgtcaccattaggctgca

SEQ ID NO: 231331 - DNA, 294 bp, Homo Sapiens
tccagttttatttgggttgctcaagtttaatctgaaaccacagctgtcctgggatcaggcaaagaagctggacttttctagacgtcccttttcaaatccggccctgggaacatttggcaaagcccaaagggggacaggagcaggagctctttctggaaggaggtccatttgaaccctttgccatttaagggacccggaaaagggacaggaagccataggggatccagtacaattttgggtcccatttcgaggcaagaagaacttggggttcccgttaaaaagtaaaaccggcag

SEQ ID NO: 231332 - DNA, 199 bp, Homo Sapiens
ccttaccaacaacattgcttcctgatgctcttagaaccatgtgaatgtgttcaagggcacgttttacgcgttcacatagtactcggggatggagatcctgtccgggatgattcactgtgctctgccatgatgcatatagctaacttgatctcttacccgtatagcattctgcgatatctcgggctgaaacaccgtcaat

SEQ ID NO: 231333 - DNA, 124 bp, Homo Sapiens
tcagactcagccggtgatatcagcaccgaaagcacctacaagggcctaaaggagaagatggaagttgtggaataagcaggaaatgggagagacgcccccgccaacgggaatgccaatgaggaaa

SEQ ID NO: 231334 - DNA, 106 bp, Homo Sapiens
cctcctcgcccgaaaaatccacctcgaacgtataggccgtgaaccaagagtcggaccccttggggacaaggggatgccccaggctcaagaatgcaaaacccaaaaa

SEQ ID NO: 231335 - DNA, 224 bp, Homo Sapiens
tttgaaaaactttaaaaaatgcaatgtggggcacaaggggggaacaaaggcccggggggcaggacagtttaggtaaagggaaccacaaaagttgaaaagggggcactcccaccaaagctgtggggcttcaggccaaaaacaggggctaaggaacccccaaggggggaaattttccgcagagttgctgaaccaataaaaacctggccctgacaaagcccttgggg

SEQ ID NO: 231336 - DNA, 154 bp, Homo Sapiens
aagaacggggatcggtccagcttttggccacttccccggacctcggacccggttgacagatggagaatgtggagcagagccttgcccacatgtcaatgctgcgtcccgtttttgtttgtctggccagaggggagaaaaggccaggcaccgggtc

SEQ ID NO: 231337 - DNA, 322 bp, Homo Sapiens
gtacaatccctaatcacgccacacaggtgttccctaaactcatgcttattgctaccacttacacgacagaggtttcagccagtctatgatcttactattcgtgtacacttcggtgctcgaaccctgactattgatgggaagccgataacacttcggatatgggatacgggaggggaagaatcctttggcgttgataggaaggtcggattaccagggtgcagcaggagttttactagttttacgatattagaagggagagatacctttaaacaatttgagaaacctggtttaggagattgagcgggagcattgccaatttcaa

SEQ ID NO: 231338 - DNA, 172 bp, Homo Sapiens
ttttgcaaagccccatcaatcacggagcagaaaaaaacttcccccagctacaaactacacttgtccacggaaagcttacggaaaaagaaaaaggagccgccgaatccaaccacggaaagcgtagtcttaaaattgttccccggcagcccattgcccccccagtcacaggcga

SEQ ID NO: 231339 - DNA, 127 bp, Homo Sapiens
aagaaaacccgggaatgatgtcggggttaaaggataggatgataatgggggaaaggggtattaacattatggaggtttctcgtgagaaagagggtattatgtcgtaaatgtggtgggtgattaagcc

SEQ ID NO: 231340 - DNA, 326 bp, Homo Sapiens
gtctctggtgcctatattcctccctgtaggcccgagagtttgagtgtgtataggcggtgatatacaggtccttgcacctctgggccacatcctggggcagccaacgtagcaggcataaggtgaggattcatctccgggctgcctttagacttatcccagcagtcacactgcagatagtttgccttccagaaaattaatgacattgacaaaagtgttcttgtagagttccaagatttggccgacaccaaagataattcttcctttaagcacactagggtcccaggcctatgaaccggtcttccctctttgcccttccccttttgagg

SEQ ID NO: 231341 - DNA, 113 bp, Homo Sapiens
atataatataattcctttatttgattaaaatcattctgaacctcatatatcatttaaatctactcctgaaatttcaattctttctaaaccttcttgtatcctctcttcaaaca

SEQ ID NO: 231342 - DNA, 172 bp, Homo Sapiens
taagtgagccccattgggttggggaaaaaatggagagggggtaaagggcttgggctaatatgaaaatccctgtaagtaggagagggaaatttgatcaggggaacgtggatacaggcacggaggtaacgcccagtgtgttaatggttggggtgaacgcgaggttagcgaggct

SEQ ID NO: 231343 - DNA, 104 bp, Homo Sapiens
ggggcctgaaggtttttatttgactggtccaaaaggtggggggttgacccctaaagggccaaccttgggggcaaattccccgggtccctgggctttggaaattt

SEQ ID NO: 231344 - DNA, 169 bp, Homo Sapiens
caaaaccatcttttattgcgcaatccaaccgagaaacgggggctggcccgggggccccaggcgaaaaagtgtaggatggcatgcctcagggccggaacctccaggaggccttccagggagcccccgtgggtgagacccgtggcaccccagcgcagggaaatcatgcccg

SEQ ID NO: 231345 - DNA, 304 bp, Homo Sapiens
actgagattcttcagccctgttgaaatccgaccatttccattaactgttgaagtttctcttgattattgaagaataagggacggtgagaaaaggagaacatgctaaaacttatgatcatctccaaatgtgaggaaagaacgaccgaattcccaagttcagatttttgccatgttaacaactttctaaatccacctcttgatttgggcctaccgggagaagaaagcctggaagtccccagaggccccgagaaagaccccgggttcctccaaaaggacagatgtaggaaaaaggcccggcacggat

SEQ ID NO: 231346 - DNA, 186 bp, Homo Sapiens
caggtcatcatcctcatcagggaaaacagaagtcagagcaaactctaaatcgagctcataatgtgctgaccaagacgggtcgatgaccacctctggtgaagcgagagcacgcatggccacaaatcccaagatagggtctccaaagagcgtcctagcaagccagacgaaagggcgtgcaaagttgta

SEQ ID NO: 231347 - DNA, 135 bp, Homo Sapiens
agcaagagcgagcaccatctctggacgcacaggccgtgccgggcatcaggcatcaccaccacactggtacagcagcccgactggtaggcgcccacagtgcgcagcttgacataaaagtacagggacttgccgtac

SEQ ID NO: 231348 - DNA, 137 bp, Homo Sapiens
ctacctttacgggttggaaaagacgacagaagggtcaaaaagctccaccccaaaaggcccctgttccaaaggcttttggcagaaaaccttaagtggcattcttaaaaggtattaagggtctttttggccctgctgcc

SEQ ID NO: 231349 - DNA, 145 bp, Homo Sapiens
aagacgacagaagggggttggcccagatgttccatgtcgcctccatcgatgtggcgggcaacctggactacaaggggcctcacttcttgatcacccccgtgaggagaaaggggagtgagacccaccgggtcaataacctggacgc

SEQ ID NO: 231350 - DNA, 205 bp, Homo Sapiens
gcctactactactatccggttgcaaaaaaacaacaaaagggcatgcctaatgataggtcaactgaaagctacctcttgctctgttcactactgctgccttctattctgcaccaccatctgccttgtttcaaaatagacatctgtcccccccatcctgtcaaacatgagagcactcgtaattgaatggtatcagaactatagtccc

SEQ ID NO: 231351 - DNA, 169 bp, Homo Sapiens
gatcttgtgaacgaaatccatgccttcgactgtatcggtttgtctctttgacccttcccttcctgtttccctcatagttcaaaatggccggatgtgctgttgatctctctggagacccagcgcttacctagacttactggaatacgttgaacggcgcaataaataaaat

SEQ ID NO: 231352 - DNA, 116 bp, Homo Sapiens
aagacgacgacaggggggaaagcttttacacctctaccccacgaactcactgggctagctgggccggggaggggcggactgccctcatgtcatttctattatacgcctccggcagc

SEQ ID NO: 231353 - DNA, 101 bp, Homo Sapiens
gaggccggagtgggatgatcattggattctaggaattgggaaatcactttggtccacttacctcgattccatttttaccaataaatgaaaagtagctgggc

SEQ ID NO: 231354 - DNA, 118 bp, Homo Sapiens
aagacgacgacaggggggtcaagctgctccagacaaagcagctgctgctccagcggcttctggcaagacatcataggtggccatcataagtagtaatggaggttcttgacgtgctgtc

SEQ ID NO: 231355 - DNA, 152 bp, Homo Sapiens
tatacggctgcgagaagacgacagaagggactaggacgtgtctgctttccctgccttattccattccgatcttgtgccatggtgctagctgtcctgatgaacacgtacctttcctaaatgcatgtcttggggccctaaaaatgtggactgtc

SEQ ID NO: 231356 - DNA, 124 bp, Homo Sapiens
tatactgctgcaagacgacgacagaagggacactgagatctgtacagtatcgacggacaggtggtatctgccaacaagatgccttatagccaaccatgctgggttaataaattgcctcattcgc

SEQ ID NO: 231357 - DNA, 139 bp, Homo Sapiens
gacaggagatgctgacagagatacctacatacggagtgctgtgccaactgtggccaacatgaaagcccaggatgtggctgccgcaacatccgagtttcacattataggctgttttgagcgtggtcatagctagccacct

SEQ ID NO: 231358 - DNA, 120 bp, Homo Sapiens
ctttgtccccttttcttgaaaaaaccagcccaccaggaaataccgacccgcacccagcgttggttccggattcgaatataaagaggggcataatcgatcgctctgttcttgtctttgcca

SEQ ID NO: 231359 - DNA, 109 bp, Homo Sapiens
gagaagacgacagaaggggcactatgatatgggcacccttgcctgacaagcggaagttgtccgcgccacctattacaccccgccatgctgggttaataaattgcctcat

SEQ ID NO: 231360 - DNA, 147 bp, Homo Sapiens
gggggttgtggcaaaagccacattacatgctggcatcctcttcccgtttcaacggaccctgtggccagatgctcatacctatacacaggggtgtaagagtatgtgcgcgtgtgcattctaataaagttggtacactttcagaaaaaa

SEQ ID NO: 231361 - DNA, 152 bp, Homo Sapiens
gagaagacgacagaagggtgttcatttacaagacagcatcactaatgatgcagacagcttcctgaataataattatgagttgccttactgaaagccttattatacatttcatagttctaattaatttaccaagataatgtaattacatttgg

SEQ ID NO: 231362 - DNA, 198 bp, Homo Sapiens
gagaagacgacagaagggagcactgcggagaatacagtgggctctacagaatgttcatacgtgatcaaaacttatcctgaccactgcatactacagttgctctaacctattgaaagtatctctgctgccacccaaaggcctaaagccatttccactctgcttaataaactctaaataaatattctcattgtcaatcac

SEQ ID NO: 231363 - DNA, 185 bp, Homo Sapiens
  misc_feature (24)..(24): n is a, c, g, or t
tactactatcgtggagagacacanagtagagaggcgatcgatgcgacgatcatgatgatgatgcacccggaattcgaccgtcctgagcgaccacttcttatggcgattaactgcgatcatgtatagtgtctgggaaatgtatccgtacatccccacatcaccgagcataggtaagcctggggcta

SEQ ID NO: 231364 - DNA, 118 bp, Homo Sapiens
gagaagacgacagaagggtcaaaaagctccagcccagaaagcagctggtccagatggatcgggcagtaaggcgtaggtggcgatcataaaaagtaataaaggttgttgtggagctgtc

SEQ ID NO: 231365 - DNA, 116 bp, Homo Sapiens
cgagaagacgacagaaggggcttagagatgtgttcttatattttgcctgtggccaatcttcctgcaagatacaatgtgctgatccttcctcagatgattcattgcctgtttaccgt

SEQ ID NO: 231366 - DNA, 213 bp, Homo Sapiens
gagaagacgacagaagggatgacccatctgccaacatactcatcgctaggctcatgattaagtacaaagtatgatgcaattcctacctttactccctgaacgtcactgtcatagagaatattgagaaactgaaacactccttgcccaccgatttgtcacattatgagctactgttcaccttatacactgattggaactgtattatattaaaat

SEQ ID NO: 231367 - DNA, 109 bp, Homo Sapiens
ttttcctataatgagagccattataacttggcggaatccagggcattactgttttctttgtgaaaatgtgtttcgctctcacatttccacaacattccagcccggagcc

SEQ ID NO: 231368 - DNA, 102 bp, Homo Sapiens
gagaagacgacagaagggaaaggaggcctccaattttattgaggccccacagcttgttcaagcccatgcaaatctttgtgatctatgtgaattcatcagttc

SEQ ID NO: 231369 - DNA, 117 bp, Homo Sapiens
tatacggctgcgagaagacgacagaagtagtagtaggtcgtatcgatgtcgagcgatcatgatgatgatggtcgtatcgatgtcgagcgatcatgatgatgatgatggtcgtatcga

SEQ ID NO: 231370 - DNA, 130 bp, Homo Sapiens
agctgacagatatacctacatacggacagctgtgccacctggtgcccacgagaaatgcctggcttgctctggctctgcaaccgaattacaggttacaggcggatccggtagtggacctggtcacacacct

SEQ ID NO: 231371 - DNA, 130 bp, Homo Sapiens
tggaacgttatcgtttggaaagcgaaaaactaagactcacacgttgggccgacggtgtggctctaaagcctaccaccttaagatgtcgacctgtgcctaatgtggctaccctgccaagctcaagagaaag

SEQ ID NO: 231372 - DNA, 107 bp, Homo Sapiens
tggttggatgcagttgcgtagttttttaggactattgcttggattctcaagccaagtgatgtcattgaagaggatttgaaatgcatgacatgaagaaataaatcttt

SEQ ID NO: 231373 - DNA, 148 bp, Homo Sapiens
gcctactactactactctactgctgcaatacgacgacagagcggccaaattgctccttcccaaaaagcacctgctccacaggcatatgtcacgaaagctttattggcaatcgtcaaaagtaataaaggttctttttgacctgtcaaaa

SEQ ID NO: 231374 - DNA, 126 bp, Homo Sapiens
gagaagacgacagaagggaaagccaaatctcgccaagtaggaaaggaaaagggcaattccaaggaaaaaccctttgaaaaaatccaggattaaggtattcttattccaggctttgattaaacctgg

SEQ ID NO: 231375 - DNA, 119 bp, Homo Sapiens
gagaagacgacagaaggggatagaaggacgacaccagactgcacctgctaccatggcatttggcaagagagtcgttgtcgccaatcataaaaagtaataaaggttctttttgacctgcc

SEQ ID NO: 231376 - DNA, 149 bp, Homo Sapiens
tatacggctgcgagaagacgacagaaggggacttgcggtggggtctattattttgtcttagccctgtttgctgcgtggtactgtgtgcttgtgccgccatgctggcttccctccatgtttacagcaggatcacaaaaccttttagctat

SEQ ID NO: 231377 - DNA, 374 bp, Homo Sapiens
  misc_feature (21)..(22): n is a, c, g, or t
  misc_feature (52)..(140): n is a, c, g, or t
  misc_feature (161)..(244): n is a, c, g, or t
  misc_feature (284)..(334): n is a, c, g, or t
ggtctaagtagcgaggctggnntgcgattcggcacgagaactagtctcgagnnnnnnnnnnnnnnnnnnnnnnnnnnnnnnnnnnnnnnnnnnnnnnnnnnnnnnnnnnnnnnnnnnnnnnnnnnnnnnnnnnnnnnnnnccccaaaaaaggggttggttnnnnnnnnnnnnnnnnnnnnnnnnnnnnnnnnnnnnnnnnnnnnnnnnnnnnnnnnnnnnnnnnnnnnnnnnnnnnnnnnnnnnatggggccctttgcccccttgaaggggagggttcccggtnnnnnnnnnnnnnnnnnnnnnnnnnnnnnnnnnnnnnnnnnnnnnnnnnnnttttccccaaacttaccgggggggttccgcccgggaaggg

SEQ ID NO: 231378 - DNA, 1258 bp, Homo Sapiens
  misc_feature (56)..(107): n is a, c, g, or t
  misc_feature (111)..(146): n is a, c, g, or t
  misc_feature (587)..(596): n is a, c, g, or t
  misc_feature (677)..(685): n is a, c, g, or t
  misc_feature (718)..(726): n is a, c, g, or t
  misc_feature (985)..(993): n is a, c, g, or t
  misc_feature (1066)..(1074): n is a, c, g, or t
gccccctcgccccgccgtacgcgggcgggcccacctggagtcctatatggcgctannnnnnnnnnnnnnnnnnnnnnnnnnnnnnnnnnnnnnnnnnnnnnnnnnnnccgnnnnnnnnnnnnnnnnnnnnnnnnnnnnnnnnnnnnagtcgacggtaccggacatatgcccgggaattcagccattacggccgggagctgctcctgcaacaacagcaaacacttagtcacctctcacagcagcaccatcacctgccacagcatctacatcagcagcaggtgctagtggcccaatctgctccttcaacagcgcacggaggtatccagaagatgatgagcaaaccacagacatccggcgcatatgttcttaacaaagctcctgccacacatcgtcttggacatgcacgtggtaaccagagtgatgcctcacatttgttgaatccctctggtggcgctggataacacctgccagatattttccacctcaggccaccccccaacgatttacagtgtcctgacactcaaagacaccccccaaagcctctgcccagggtcccaaatcctcctgccgcctcaagacaccgcttnnnnnnnnnnctaggaatgccccgcaagcttcgacaaggatatccccgcacctttcccgctcggcaccccgattatctgaccttcctaggnnnnnnnnngggtcccctcgaacaagctttccctcgacccannnnnnnnngggccgcccggagccccctgccgggtaaacccgtatcctcgcctcagcagacccgtcccccctaacggagaccctttgcctctttccaccccacttgcttgtgggaccccccctccaaatacaaaccaacgtcctttttggccccccattttttccccccttccgacaataaactccgaatacagcgacaatctcctggccgggaccatctcattcggggatcccttatccacaccgtggcagcccccaaaacgtaaannnnnnnnntatatcccagatatccccaccccacctctttccctcgcgccctccattgcctcgtaattaacgccccgtgttnnnnnnnnnaccacaccatattcgccgtcttttcccccgccgctcatgtgggtaaaatccattgtatcataacacccgcctagtgccgaccacacacatcgtttacaacgcctcctcatttggtgccctctcctccgcaccaccatgtggggcgcgcctctcttggtgtgttcccaccacacacccgctgggt

SEQ ID NO: 231379 - DNA, 1022 bp, Homo Sapiens
  misc_feature (41)..(76): n is a, c, g, or t
  misc_feature (225)..(305): n is a, c, g, or t
  misc_feature (552)..(561): n is a, c, g, or t
  misc_feature (711)..(759): n is a, c, g, or t
  misc_feature (850)..(907): n is a, c, g, or t
acgaccacgcgcagcgagtcagtgagcgaggaagcggccgnnnnnnnnnnnnnnnnnnnnnnnnnnnnnnnnnnnnagtcgacggtaccggactatgcccgggaattcggccattacggccgggattccaaagagattctgaaatttcttttcttggggaaatgacggtacattaaatcaaaattgaggatggatgattaaaaacatttgactttttaataatannnnnnnnnnnnnnnnnnnnnnnnnnnnnnnnnnnnnnnnnnnnnnnnnnnnnnnnnnnnnnnnnnnnnnnnnnnnnnnnncaaacttgccggccgccccggccctcaaaaatttttctaaaccattcgtttggcccgcgggccccttaggtaattgaacctggccacacctgtttcccaagaaatcctggtcatgactagcgcttggattcttaccaataaaaaacccccgcgggcaaccgaacgtcctgaacaactccaaatggacccctgaggcccctactggatctttcaacagggaccccaagcgagctccaaatcaaactannnnnnnnnntgccattcatttcaagactggcggaatccattaagcactctgcccacatggaacccctcaaaaacgggactatgaacccgaatttccagcggtttcattaccttcggccccttggcggacaaatatttctgtccccgggtgaaaaacgcnnnnnnnnnnnnnnnnnnnnnnnnnnnnnnnnnnnnnnnnnnnnnnnnnggggacatttcaccccaggattgggttaaaaccaaaaaattatttccctttaaaacccttttcaggaaaatcgcgccgcttttttatggtnnnnnnnnnnnnnnnnnnnnnnnnnnnnnnnnnnnnnnnnnnnnnnnnnnnnnnnnnntggtattatcatccccgccaggatcgcaaaaccctttccccctttgtttctccgggccacaccgggtgtactatggggtgtaacccatacccgcttattcaccagggtttacagg

SEQ ID NO: 231380 - DNA, 702 bp, Homo Sapiens
  misc_feature (50)..(308): n is a, c, g, or t
  misc_feature (313)..(470): n is a, c, g, or t
  misc_feature (478)..(516): n is a, c, g, or t
  misc_feature (535)..(653): n is a, c, g, or t
agtcgacggtaccggacatatgcccgggaattcggccattacggccgggnnnnnnnnnnnnnnnnnnnnnnnnnnnnnnnnnnnnnnnnnnnnnnnnnnnnnnnnnnnnnnnnnnnnnnnnnnnnnnnnnnnnnnnnnnnnnnnnnnnnnnnnnnnnnnnnnnnnnnnnnnnnnnnnnnnnnnnnnnnnnnnnnnnnnnnnnnnnnnnnnnnnnnnnnnnnnnnnnnnnnnnnnnnnnnnnnnnnnnnnnnnnnnnnnnnnnnnnnnnnnnnnnnnnnnnnnnnnnnnnnnnnnnnnnnnnnnnnnnncatgnnnnnnnnnnnnnnnnnnnnnnnnnnnnnnnnnnnnnnnnnnnnnnnnnnnnnnnnnnnnnnnnnnnnnnnnnnnnnnnnnnnnnnnnnnnnnnnnnnnnnnnnnnnnnnnnnnnnnnnnnnnnnnnnnnnnnnnnnnnnnnnnnnnnnnnnnnnnnnttttgggnnnnnnnnnnnnnnnnnnnnnnnnnnnnnnnnnnnnnnnggggcgggggccccccaannnnnnnnnnnnnnnnnnnnnnnnnnnnnnnnnnnnnnnnnnnnnnnnnnnnnnnnnnnnnnnnnnnnnnnnnnnnnnnnnnnnnnnnnnnnnnnnnnnnnnnnnnnnnnnnnnnnnnngctccgggggccttttggggaacctacacagggggccccaggggggccc

SEQ ID NO: 231381 - DNA, 1194 bp, Homo Sapiens
  misc_feature (52)..(103): n is a, c, g, or t
  misc_feature (107)..(142): n is a, c, g, or t
  misc_feature (365)..(676): n is a, c, g, or t
  misc_feature (684)..(716): n is a, c, g, or t
  misc_feature (985)..(1024): n is a, c, g, or t
  misc_feature (1089)..(1144): n is a, c, g, or t
ccgccctcggatccctacacacacccgcaactacaatcctatagggcgctannnnnnnnnnnnnnnnnnnnnnnnnnnnnnnnnnnnnnnnnnnnnnnnnnnnccgnnnnnnnnnnnnnnnnnnnnnnnnnnnnnnnnnnnnagtcgacggtaccggacatatgcccgggaattcggccattatggccggggaggaaagcagctcagtgtccatttgacaagacagcttcaaagctgactcattctgatttttttgttgtatctattccaaaagctagtaaaattagttctctctcctatacacacacacatgcacacatggacagaaatactatttcttgggacatggctggcatataggttgnnnnnnnnnnnnnnnnnnnnnnnnnnnnnnnnnnnnnnnnnnnnnnnnnnnnnnnnnnnnnnnnnnnnnnnnnnnnnnnnnnnnnnnnnnnnnnnnnnnnnnnnnnnnnnnnnnnnnnnnnnnnnnnnnnnnnnnnnnnnnnnnnnnnnnnnnnnnnnnnnnnnnnnnnnnnnnnnnnnnnnnnnnnnnnnnnnnnnnnnnnnnnnnnnnnnnnnnnnnnnnnnnnnnnnnnnnnnnnnnnnnnnnnnnnnnnnnnnnnnnnnnnnnnnnnnnnnnnnnnnnnnnnnnnnnnnnnnnnnnnnnnnnnnnnnnctctccannnnnnnnnnnnnnnnnnnnnnnnnnnnnnnnngcttcggccttcgaaaaatctcttctaaaaccattcctttcggttgcccgggccccccctagggtaaactcgcccctggtccttccccctcttttccttggccaattttggcccccctgaccccgtggctctggaatcccccacccaactaaaaaaatccccccgggggcgaaaaccccacggtgtctccttgaaacaaaccccccccagtgccagctccccgcacggtttttttaccgcgaaaccttctccaaaaagggggcgtttannnnnnnnnnnnnnnnnnnnnnnnnnnnnnnnnnnnnnnnatccccggccaacatctcatccccgcctttacccgggccctccaaatctccccctcaaagaattnnnnnnnnnnnnnnnnnnnnnnnnnnnnnnnnnnnnnnnnnnnnnnnnnnnnnnnntgggaaacccctcgtaatatttgccccaagcagggggcgacaacaaccca

SEQ ID NO: 231382 - DNA, 1227 bp, Homo Sapiens
  misc_feature (76)..(115): n is a, c, g, or t
  misc_feature (119)..(154): n is a, c, g, or t
  misc_feature (514)..(633): n is a, c, g, or t
  misc_feature (673)..(754): n is a, c, g, or t
  misc_feature (801)..(896): n is a, c, g, or t
  misc_feature (937)..(1046): n is a, c, g, or t
  misc_feature (1146)..(1156): n is a, c, g, or t
cgcgcatactcagtgcgggcggccttaaaggctcctaaaaatacgactcactatagggcgctagctcgcttccgannnnnnnnnnnnnnnnnnnnnnnnnnnnnnnnnnnnnnnnccgnnnnnnnnnnnnnnnnnnnnnnnnnnnnnnnnnnnnagtcgacggcaccggacatatgcccgggaattccgccattacggccgggaattttgacccaaggcacagcagtgaaatttatagttctcaatttagttgccattattgacaggcattggcattattactcattgctaagcaactaaaacttcatcagttcaaataagttttaattgtcaaatgaagtataaacacatgaactttctagaaatatttcctcttttggataggtctttaaccagttcatatatatactttgtcaaatatatggatgtgcatgtgtacatttataagaaccactatggatacctccattcactgcggtacattttaaaataaaatattttagcagcgcaccgnnnnnnnnnnnnnnnnnnnnnnnnnnnnnnnnnnnnnnnnnnnnnnnnnnnnnnnnnnnnnnnnnnnnnnnnnnnnnnnnnnnnnnnnnnnnnnnnnnnnnnnnnnnnnnnnnnnnnnnntctccctattcttttattccaccacccggccccgccttannnnnnnnnnnnnnnnnnnnnnnnnnnnnnnnnnnnnnnnnnnnnnnnnnnnnnnnnnnnnnnnnnnnnnnnnnnnnnnnnngcgcttagggcagcctcatcgttttcccgctcttttttcccgccctnnnnnnnnnnnnnnnnnnnnnnnnnnnnnnnnnnnnnnnnnnnnnnnnnnnnnnnnnnnnnnnnnnnnnnnnnnnnnnnnnnnnnnnnnnnnnnnnctttcctggccgttgtcgtcccttccaccattcctgatctnnnnnnnnnnnnnnnnnnnnnnnnnnnnnnnnnnnnnnnnnnnnnnnnnnnnnnnnnnnnnnnnnnnnnnnnnnnnnnnnnnnnnnnnnnnnnnnnnnnnnnnnnnnnnnactttctttccgacccgccggtgcgcccttctccctccccctctccgctttcccgccccccacctttccccacattccttttttagagcgcgcccttatnnnnnnnnnnntttcccccgtattttcttccatatgacccccgccggtttttgcagccccataccccgctgtaatttatttt

SEQ ID NO: 231383 - DNA, 205 bp, Homo Sapiens
gtagggaagtgacatggtcatagctgtttcctagagatcctggtcatgactagtgcttggatcctcccaataaaaaaccccggggggcaaccgaagggtttctaaacaaaattccagaagggaggttcctgggggggccttttcctgggaatctatttccaacccggggagttccccaagcgcggggctgcaaatattcaaattt

SEQ ID NO: 231384 - DNA, 981 bp, Homo Sapiens
  misc_feature (701)..(741): n is a, c, g, or t
  misc_feature (790)..(839): n is a, c, g, or t
  misc_feature (928)..(928): n is a, c, g, or t
cccaactccacactaaaatcccccaaacactaccctcagacactcgcaaaaaattccctctgatcacccgaccccctcgcgcttctcccaaaaagcgctccaactcaacctccttcctgtggccccccgcccgccccctcaaaccttctccatacctttcctatggccgccgggcaccccccccgtacataccccaacgggaactaaaccccttcccctgagcccactcgtccaccccaaattccgtctcgtatacttttcccctaccacgaacgaactccaccctgtgcacgccgccccccccataataatcggttaacagcccaaccgccccgagacggtgtggcgcatggccgatccgcccgtcccttgcgcccgctttgaacgcacccctaccggtttataccggcgaaacgcccggccgcacctaatatactccacaggcgcgtcgcctcgctacggccgggtgagaaagaataatatatcgctgttatttccccaccagccgccccgtttctcatccatcatctccgtgagataccattgcgtcttgtcctcccatacccagctaagcgcgcgctgtcctactaattccccccactatccgctgtccccttagtcaccgtaccgatatcccgtaacccagcccccccggccagatcacgcaacaaacaaagaccacctcccgcgatcccgcgcannnnnnnnnnnnnnnnnnnnnnnnnnnnnnnnnnnnnnnnnatgataagacacaaacgcgccgcatggccggaaccacatacgacgtatnnnnnnnnnnnnnnnnnnnnnnnnnnnnnnnnnnnnnnnnnnnnnnnnnntgccgtccacaatcgaaccaaccacgcgagcgatctctgacccacgaccccgccataaaccctatgctatcccgcagacacatcatttnatccccaaaccacacatccgcccacttattcctccccccggcgtaatcaccca

SEQ ID NO: 231385 - DNA, 727 bp, Homo Sapiens
  misc_feature (118)..(133): n is a, c, g, or t
  misc_feature (163)..(167): n is a, c, g, or t
  misc_feature (202)..(202): n is a, c, g, or t
  misc_feature (233)..(241): n is a, c, g, or t
  misc_feature (247)..(266): n is a, c, g, or t
  misc_feature (273)..(273): n is a, c, g, or t
  misc_feature (281)..(285): n is a, c, g, or t
  misc_feature (298)..(299): n is a, c, g, or t
  misc_feature (303)..(306): n is a, c, g, or t
  misc_feature (310)..(322): n is a, c, g, or t
  misc_feature (328)..(338): n is a, c, g, or t
  misc_feature (344)..(345): n is a, c, g, or t
  misc_feature (347)..(348): n is a, c, g, or t
  misc_feature (350)..(351): n is a, c, g, or t
  misc_feature (369)..(369): n is a, c, g, or t
  misc_feature (409)..(411): n is a, c, g, or t
  misc_feature (444)..(444): n is a, c, g, or t
  misc_feature (450)..(450): n is a, c, g, or t
  misc_feature (477)..(489): n is a, c, g, or t
  misc_feature (493)..(493): n is a, c, g, or t
  misc_feature (496)..(496): n is a, c, g, or t
  misc_feature (528)..(528): n is a, c, g, or t
  misc_feature (531)..(542): n is a, c, g, or t
  misc_feature (556)..(556): n is a, c, g, or t
  misc_feature (585)..(659): n is a, c, g, or t
tcccgtggcggtcgggcccctctctctcttctttgggggttgctccctgtccccctccccccggttgtcgggctctcttcttttctttcgttcttcttccccggccgcgggccctttnnnnnnnnnnnnnnnntctcccgtgccggttctccccgcttggccnnnnncggcgtgcggtttcgcccccgccccccgggccttntccctctttcccccggtggcctccttttttnnnnnnnnnttcccnnnnnnnnnnnnnnnnnnnnttggggnttagcaannnnntctatgtttgggnngggnnnncggnnnnnnnnnnnnncgtgannnnnnnnnnnccgctnncnncnnatggggtggggggcgtcnttgtctctcccccgggtggggggggtcccagttccctccnnncccccacccccgaggtggttctttgtgggaggncctccnctccttgtcttttttgggtgggctgcnnnnnnnnnnnnncccnccnccccggtgtgtggcgccgcgggggtgggctcntcnnnnnnnnnnnncatcttccttttcntttctccctccatccgccgtgggtgaggnnnnnnnnnnnnnnnnnnnnnnnnnnnnnnnnnnnnnnnnnnnnnnnnnnnnnnnnnnnnnnnnnnnnnnnnnnngggtccttgcgtcctttccttccgaaactccactctgttttttcccccctcttctcggccgctgttcc

SEQ ID NO: 231386 - DNA, 925 bp, Homo Sapiens
  misc_feature (308)..(393): n is a, c, g, or t
  misc_feature (395)..(396): n is a, c, g, or t
  misc_feature (398)..(398): n is a, c, g, or t
  misc_feature (400)..(400): n is a, c, g, or t
  misc_feature (407)..(407): n is a, c, g, or t
  misc_feature (409)..(410): n is a, c, g, or t
  misc_feature (412)..(414): n is a, c, g, or t
  misc_feature (416)..(416): n is a, c, g, or t
  misc_feature (421)..(434): n is a, c, g, or t
  misc_feature (438)..(438): n is a, c, g, or t
  misc_feature (455)..(457): n is a, c, g, or t
  misc_feature (473)..(473): n is a, c, g, or t
  misc_feature (476)..(534): n is a, c, g, or t
  misc_feature (648)..(726): n is a, c, g, or t
gggggacatgggcacctcgggaggcccgggccctgcccagctacagttccacccctcagcttgaggaccaatgactgaggtctatgccagttcctgatcccatctcactctctggacctaccaggtgactgctgctgggtgactcccctgaggcggctatacccttaagccagcccactacttccttccctgcctcccaactcagtatttaaacatcatctcccttctctttctcgcataactccccacccctttctccccgatccacccaggcctttctgtaaataaaagctcccaagttgggtacnnnnnnnnnnnnnnnnnnnnnnnnnnnnnnnnnnnnnnnnnnnnnnnnnnnnnnnnnnnnnnnnnnnnnnnnnnnnnnnnnnnnnnannananaaaaaanannannnanaaaannnnnnnnnnnnnnccanaaacaaaaccaaaccannnccaaaccaaacccccncannnnnnnnnnnnnnnnnnnnnnnnnnnnnnnnnnnnnnnnnnnnnnnnnnnnnnnnnnnagaccgccacccacaccttaaaaccgcgccctccgcgcccccgacaaaacaaccaacgggccccggaaacaaaaccgaaatcctccacaacaaaaaccgcaaccgggtggctcnnnnnnnnnnnnnnnnnnnnnnnnnnnnnnnnnnnnnnnnnnnnnnnnnnnnnnnnnnnnnnnnnnnnnnnnnnnnnnngcgctcattcgatttagaccccccagagcgtgggtcgctcccattcccccatccctccgccctcagcccccacggtggcgcggggcacccgccgaagccgcgggaaaaggcgtaaccacccgcaaattgggcgcagtacaaacaaaacacacccgtctcgtgggcccgattactacaccacacgcgggagccgacaaaa

SEQ ID NO: 231387 - DNA, 925 bp, Homo Sapiens
  misc_feature (419)..(513): n is a, c, g, or t
  misc_feature (580)..(640): n is a, c, g, or t
  misc_feature (799)..(799): n is a, c, g, or t
ggacagcaccagaatggacagcacaagccatggaagcccagatggctcagtgaatccttgcagaacttctgtgcacatgacatctttttccatgttgtgcagatcagtttcactatctccaaagcatttgcatcatgaccttatacatttcaatcccttttatgctggattccgtttaaagaagacattattagagcaggaagtacaagcatttaaaatatgtagttcccatatatttcagggtctctgtgtattaagctaactcagatgttttgaaagctttttctttaaacagaggtgaaatatctgtggctaaaaagtttgagatttgtgataactttgtagtcatgtaaaacttaagtgcttcatgcctctccaaatgtggttattctaataaatggagaaatgagccaaaaccnnnnnnnnnnnnnnnnnnnnnnnnnnnnnnnnnnnnnnnnnnnnnnnnnnnnnnnnnnnnnnnnnnnnnnnnnnnnnnnnnnnnnnnnnnnnnnnggtgggcccgccgccgcgggcgccgtcccgcggcgcgcccattttttttcgcgcccctgcgcgcgannnnnnnnnnnnnnnnnnnnnnnnnnnnnnnnnnnnnnnnnnnnnnnnnnnnnnnnnnnnngcggggccaaccgcaccaccccgccgtgctgcttccccgcccctcgacgtgtatgcgtgcctaccattttcccgcctgtttgtcttccgcccccccttattataatcgcgcccgccgggcgccccggcctagcttatacctctagggacccttactaantagttgcttcatccccgctgacccccttatcgacggccgcacaacggtggcgcgcgcccccaagcgccgcttctcctccctctttctcgcgcatccggccgcctccctaccgccccggacacactg

SEQ ID NO: 231388 - DNA, 366 bp, Homo Sapiens
  misc_feature (125)..(262): n is a, c, g, or t
  misc_feature (264)..(267): n is a, c, g, or t
  misc_feature (276)..(326): n is a, c, g, or t
gggttagagtggagacggaggcccaggcgcaggggtcacacctcatctggtttccttcccatctcacagcttagcttgtgcttctcaacgccaagtctttaagagcaataaaaactacaccatgnnnnnnnnnnnnnnnnnnnnnnnnnnnnnnnnnnnnnnnnnnnnnnnnnnnnnnnnnnnnnnnnnnnnnnnnnnnnnnnnnnnnnnnnnnnnnnnnnnnnnnnnnnnnnnnnnnnnnnnnnnnnnnnnnnnnnnnnnnannnntttgttggnnnnnnnnnnnnnnnnnnnnnnnnnnnnnnnnnnnnnnnnnnnnnnnnnnnccccccaaggaaaaagaaaaagggtgctaatttgttcctc

SEQ ID NO: 231389 - DNA, 883 bp, Homo Sapiens
  misc_feature (130)..(243): n is a, c, g, or t
  misc_feature (247)..(283): n is a, c, g, or t
  misc_feature (487)..(495): n is a, c, g, or t
  misc_feature (643)..(684): n is a, c, g, or t
  misc_feature (807)..(807): n is a, c, g, or t
ggatacaagtgtttcttgccaaaactcgcagccccagctgccctagatgaggagcaccgtgctggaaaagtgcacaggctgatcacagagacaggtaggaagcaatggactgttaaaatgcatgttccgnnnnnnnnnnnnnnnnnnnnnnnnnnnnnnnnnnnnnnnnnnnnnnnnnnnnnnnnnnnnnnnnnnnnnnnnnnnnnnnnnnnnnnnnnnnnnnnnnnnnnnnnnnnnnnnnnncttnnnnnnnnnnnnnnnnnnnnnnnnnnnnnnnnnnnnnttcatattcctgatcagctctgaatgtgactattcaatgaagacagtaaagttacagtgtaaggcacacatgacctttggccttgctaaagaagagtggctgaaggtctagcaaattaatgcttgtcttaggttacctgttgatttaaaaaccacaacaacaaagacccataaaaatagggacccccccttcccctccctcccnnnnnnnnnggcggccgccctcggcccctaaaaaagctttcctagaacattccgtttggggggcgcggggcccaagtagggaaaggtggaacatggggccttagcctggttttctcaaggaaaatcccggggacatggacaagggggcttgggatannnnnnnnnnnnnnnnnnnnnnnnnnnnnnnnnnnnnnnnnngaacggcctcttgaaacacaatcccagaaggggaggttcccggaagggcctttcactgggggtccttattccaagagggggcgctccacggagggagttttcggataatctaaaattacaccnccccgcggccttggggaaacctattttgccacataattgggtttggcaaccccccataattaagagcgctctctcc

SEQ ID NO: 231390 - DNA, 384 bp, Homo Sapiens
  misc_feature (136)..(274): n is a, c, g, or t
  misc_feature (281)..(340): n is a, c, g, or t
cccacaccactacctcactgatgccataatgtttaaccatgcctttcacttaaagaattccaggaaataagccaggtgtgtggctcgtgcctgtaatcccaaagtgctcccaaagttgcaggcgtgagccacctcnnnnnnnnnnnnnnnnnnnnnnnnnnnnnnnnnnnnnnnnnnnnnnnnnnnnnnnnnnnnnnnnnnnnnnnnnnnnnnnnnnnnnnnnnnnnnnnnnnnnnnnnnnnnnnnnnnnnnnnnnnnnnnnnnnnnnnnnnnnagaatgnnnnnnnnnnnnnnnnnnnnnnnnnnnnnnnnnnnnnnnnnnnnnnnnnnnnnnnnnnnntacaatagatattggggaagttggggccctaatggggagggtct

SEQ ID NO: 231391 - DNA, 532 bp, Homo Sapiens
  misc_feature (268)..(377): n is a, c, g, or t
  misc_feature (379)..(379): n is a, c, g, or t
  misc_feature (383)..(383): n is a, c, g, or t
  misc_feature (385)..(387): n is a, c, g, or t
  misc_feature (389)..(389): n is a, c, g, or t
  misc_feature (395)..(395): n is a, c, g, or t
  misc_feature (401)..(448): n is a, c, g, or t
ggagaattttgtgttacgtttttacctcctaacatatgacacttcatcttatattaaggaaggtttagaatatctaatacgacttgaattcatttgttactaagccttctcaggcaagctgtatactagttactggtctccactgccatgccttttcaaggttcccatggtccagagtgatgtttgattcttaatttttctgtcccttttataatttgttttaatgattttgctacatttggaattcaataaaaaatgtgaacaatannnnnnnnnnnnnnnnnnnnnnnnnnnnnnnnnnnnnnnnnnnnnnnnnnnnnnnnnnnnnnnnnnnnnnnnnnnnnnnnnnnnnnnnnnnnnnnnnnnnnnnnnnnnnnanaacnannncnaaaaanaaaggnnnnnnnnnnnnnnnnnnnnnnnnnnnnnnnnnnnnnnnnnnnnnnnncctagtagccaattccccccggagaattggcaccctatcaaaaacagacccggggtaacatccctggggtttgagatcttccgc

SEQ ID NO: 231392 - DNA, 1063 bp, Homo Sapiens
  misc_feature (185)..(187): n is a, c, g, or t
  misc_feature (189)..(248): n is a, c, g, or t
  misc_feature (259)..(259): n is a, c, g, or t
  misc_feature (267)..(279): n is a, c, g, or t
  misc_feature (285)..(285): n is a, c, g, or t
  misc_feature (288)..(288): n is a, c, g, or t
  misc_feature (451)..(461): n is a, c, g, or t
  misc_feature (848)..(848): n is a, c, g, or t
  misc_feature (863)..(863): n is a, c, g, or t
  misc_feature (910)..(910): n is a, c, g, or t
  misc_feature (983)..(983): n is a, c, g, or t
ggtccataattgatgcctgcagtagtgtaaggcatttcatactagtctcctctagtagacctgtgacttactgtgttggacatattatttagacttagtcatacaaagaaacttagctcttttttcatctcacagtaaagcctatttccccaggaaaaaaataaatgcctttgaatgaaaattcnnnannnnnnnnnnnnnnnnnnnnnnnnnnnnnnnnnnnnnnnnnnnnnnnnnnnnnnnnnnnngagagggaagnggggagcnnnnnnnnnnnnngagttnggnccgatggggcacgcgaaaaagcctcgaaagcccacccggggccggccgagagcctcttaaagacattttaatcttggcccctggggttgccttctccggaattctcctcggggcccagcccgggcggctccgcaacccccctccccgggaccaaaacccctcnnnnnnnnnnnagtccgccccgcaacttataaaaaaccccgcgccggaggtggattccccgggagggccgtcacgatacaaccttgctctctttagcttaaataagtgcggcgcccgcgagcccccttcccctccgatattacttaacacatcaagggggcgggttcgcgaatatcagtggagctatccctgtattctgcgcagaaaatggtgaggccggcgggaaatctcctctactcccagcggctatcttctctcgagggagagagggtggtgtttgaaaacccctggcccaacaagaggcggcctcgtccgggccgagaagctggtggaacacgctgcctccccacgaacacttcgtttcgtgtgggcgccttgagaagctcgggattgccggnggagaggggaaattntacatcgacccatcgcttgggtgccacgcgctcggcgaggtcataanaattatctgctgcccgctgactggtgctagcagcccgtgcgcccgtgtccagacaattcaagagcggtgtgcnaccagtataccccaccccctccctcgttgtcacttacagagcagtggcgtggagcatgaaagacacgacccggctgaacg

SEQ ID NO: 231393 - DNA, 260 bp, Homo Sapiens
  misc_feature (118)..(132): n is a, c, g, or t
cgaaatgaaatatcctgaaccaaacaatcatcctagaactcaatcaaacctcccatccctacacaatcctttacataacaaacgaaggtcaacgatccctccacttaccttggcgtgnnnnnnnnnnnnnnntggaactgttttctacaacttcccggtggggcggcggccccaaatctgtgaagtggcaacagtgcttcacccctgttatccaagagaaccaccggggacgtgacgaagcgcttggacttttcaccaat

SEQ ID NO: 231394 - DNA, 528 bp, Homo Sapiens
  misc_feature (72)..(279): n is a, c, g, or t
  misc_feature (396)..(396): n is a, c, g, or t
atgagccactgtgcccggcctcaatgtgcatttttaaaatctcaattcattagaacccttacaaaggtttcnnnnnnnnnnnnnnnnnnnnnnnnnnnnnnnnnnnnnnnnnnnnnnnnnnnnnnnnnnnnnnnnnnnnnnnnnnnnnnnnnnnnnnnnnnnnnnnnnnnnnnnnnnnnnnnnnnnnnnnnnnnnnnnnnnnnnnnnnnnnnnnnnnnnnnnnnnnnnnnnnnnnnnnnnnnnnnnnnnnnnnnnnnnnnnnnnnnnnnnnnnnnnnnngttgagagtttactgttgtcttacccctggctctgctaattaaatagctgcaggatatagccattgaagtatttttctgtaaacagggaaaactgggcatttgcatgtgtttttccnggtcattccaatttctagcatccctgtgatttcataaatttatggtcacctagccaaaaagccctatggtcctgggggcaccagttaggggattggcctggacttcaggggttgccttgccttgccccggaa

SEQ ID NO: 231395 - DNA, 1114 bp, Homo Sapiens
  misc_feature (362)..(362): n is a, c, g, or t
  misc_feature (729)..(729): n is a, c, g, or t
  misc_feature (810)..(810): n is a, c, g, or t
gggttgccaggaagtgggagctgcagattgtcttctgcaatgtatcatggctctgatcatcaaaagtgaacgtggaaactctgaggcttatttctttaagcgctggaaaagaaaatctgacacatactttggtcttcttttggcttgagtctatgtgttgccacttcaggaaatgtaaggggacaatgcaggctgtcttttaagaaaatcctggtttcaaagtgtttaacactttttgtattcaatagcaatgaaacgccacttaaggcgcacgatacagggcgcggagtactcacgacgacgcgacgactaccgacactaatcaccttacactccataaccctctgcatcctcctctccgnaatagacgacctggtgccctcggccctctccctgctgagcgcaaactttgtcacgccacgcatgacctttcggtgggccccggctcccttagcggccggcgccgggcccccaaggagcgcacaccgtgcggaacctccgcggcgcgcaacatgtccgcgtcctcccctataagcgaagaaccggcgcgcgtcggtcgtctctcttcccggcgcgttaccacgcgagagacatcccgcgcgacgctcgatcggatccaaaaacatctacacccccccacgccctttctccgtacaccaccatcaccacggctcgtccacgtccctcgttggggatgaacacgcacgtgtaatacgggcacgcgcggantaaatagcggcgaagcggccgcgggatgctatcgtacacggctcgcgcgtacccctaccgcgccccggcattctatgtatncccgtccttacgccgctgttatacccccgcgcggcatttctcgcgcgcgctaccgcgttcccttctacgccgccgccgcgggatattctgcgtttatatcgccgccagagcgcttttcccccccgccctagatttgcagccaactttcccgcgccccatagcgcgggtataccactctccccccggatcccgctatgccccgccctcttttcgaccttccccctgcgcccacctcccccatccttacggcgttcgccccgcgccgaaataacacgccagccccgcacaaaaaccgcccccaata

SEQ ID NO: 231396 - DNA, 1108 bp, Homo Sapiens
  misc_feature (189)..(189): n is a, c, g, or t
  misc_feature (191)..(215): n is a, c, g, or t
  misc_feature (328)..(336): n is a, c, g, or t
  misc_feature (391)..(411): n is a, c, g, or t
  misc_feature (871)..(871): n is a, c, g, or t
ggcagactggctgcgccgatagtgctcagccccgcacctcctgagcatacatttaatgttaggcaaagagcaagtttcctatctaccgtttgaccacagtttctcacagtatttctaattgattcaacgtgtattagattgaaacaaaaatgatcttggttggaatatacacgggcaacctgtatttangnnnnnnnnnnnnnnnnnnnnnnnnngaaggccaagcaacaacaaaaagcaaatagaaaagcccaccaccactgcaccaagaaaaaaagttctttcgacctgttcagcctcgcccgatggcagacgaggccggaacaannnnnnnnngactggtgccgcccccgcctccagtaaaaagcattcactggcccgcttttggtgnnnnnnnnnnnnnnnnnnnnnaggccggcgtgataccgggcgcgcccaccccaaagcgcccccgaaagaaaacctccgcccatagatagcaacgatgggggccacaacggtcggcccccgaaacataaaaaaaggggccttggcggacgagaaccccggaccgtggcctccggaaacaaacacccccccactttatagcgccctccggcgggggtcccccacttcccccgttttcggatccgtatatccccccagcgcgggaaattcccggggcggggtggccgcacgccctatgagtatacgcgcgcgtacgggccgcagaacacccccgctattatgggcggcgtacacggggcccgaccggagaaacataggcggcccttggtttcgcgccatttgtgtagagcgccctcacacgttcgcccgaacaggacggggcgtcaatccccctcagaggccgaggggcccggaggcgcccaantcgtcggttagggggcggcgcccgcccgtgtataacgcgcccccccttgtcccgccccgctctccgaacaagcgcgatccgtgggtcttcggggcgccgaaaaaacccgtcgctgctgaacaaaccgccccgcccggatgtggaaccggcgtccccaaaggagaaacgccccgggcaacaccccccccgcgttggttacgcctaagacaccgcgaaatatctctgccccgcgaattc

SEQ ID NO: 231397 - DNA, 931 bp, Homo Sapiens
  misc_feature (68)..(169): n is a, c, g, or t
  misc_feature (210)..(382): n is a, c, g, or t
  misc_feature (732)..(732): n is a, c, g, or t
  misc_feature (877)..(877): n is a, c, g, or t
gggacgggcgtccgagccggtggccgagctccggcaagggcgggaaccttcaggattaaatagacagnnnnnnnnnnnnnnnnnnnnnnnnnnnnnnnnnnnnnnnnnnnnnnnnnnnnnnnnnnnnnnnnnnnnnnnnnnnnnnnnnnnnnnnnnnnnnnnnnnnnnngtatctaggactacaggcggactctcgctctgtcgccaggnnnnnnnnnnnnnnnnnnnnnnnnnnnnnnnnnnnnnnnnnnnnnnnnnnnnnnnnnnnnnnnnnnnnnnnnnnnnnnnnnnnnnnnnnnnnnnnnnnnnnnnnnnnnnnnnnnnnnnnnnnnnnnnnnnnnnnnnnnnnnnnnnnnnnnnnnnnnnnnnnnnnnnnnnnnnncgctgcgcccagttggaaaaaagttttcgctttttgtctttacaactaagtgccttcctggaccatcatgatgtgtacacgcactttgcctccttacgccgcgacgcgcggtgtccttgggcacacgccccgccttggtcggccgcgcctcgaggccctcgaggaagcgtttcctctgaccacttcctttttgtccgcccccgggccccatcttggccgaacgtggaccctgggcccctccacctgcgtttccctccggggaagaccccctggttatcgcccactagggggcctgggggctctcctccccgagtacaaaaaaacggtcctgggttggggcgaagtcgcanggccgttctggggaaatcgattcgcccggttggtgcgacgtctcgcgcgcgcgcctctttactcgggggcgctcttttcgccacaccgcccggaggtggccgcatacgcatccgccgcgcctcatttttgcgtacacagttgaangtgccaccggcactgacactgtgagtggacctcatataatcgccgtgccgcgaa

SEQ ID NO: 231398 - DNA, 1044 bp, Homo Sapiens
  misc_feature (196)..(263): n is a, c, g, or t
  misc_feature (640)..(653): n is a, c, g, or t
ggagtttcatttatttgttattttatttgtaagaaatagtgatgaacaaagatcctttttcatactgatacctggttgtatattatttgatgcaacagttttctgaaatgatatttcaaattgcatcaagaaattaaaatcatctatctgagtagtcaaaatacgagtagaggagagcaaataaacaacatttggnnnnnnnnnnnnnnnnnnnnnnnnnnnnnnnnnnnnnnnnnnnnnnnnnnnnnnnnnnnnnnnnnnnngaccagacacggaaactcctatccacataaacttcctcccatgctccctagacccgccgactcatcgttgcacaaccctccctgcacccactatatttcccccccgggattgtggcgggcagtccactctcggacacaaccgccgttgtgcacgccgccgccccgcgaggagaccacaccgggagtggccattaaggcgcttccggcgataagggccccgagggttgccaccctggttggcggcgccacctataccccgtccccctcggggaacgatttttcgcgacccacgacgctgttgccggggtaggtgatagctctcgcggccggggccttgtaaagaagattgtcttcgggggccgttaacgaaaacccgnnnnnnnnnnnnnnaaggcttccgtcctcttcgcgatttcgcccgatggcgcttaacccgcggccggctcgcggcttctgttccgcccggcctcgcgttacgccgcccggtgtgcgcctttttcgcctgccggcagttggtccctcgaacgatgcttgcctgtgcacgcccgtcgtttcgcgcggtatttaccctgctgccgctgttatgttccgcacggagtcgccggtggtgcgcgcgtatcccgctgccgccgtttccccccgcacgggggtatattacccgcctgttcccttttatcgggcgcgcggtattcgccggtccacgcctgtattcggcagacaactgtgcgcccgccgcgcggttcgtccccccggatattccgcgctccgccgccgctgtccg

SEQ ID NO: 231399 - DNA, 913 bp, Homo Sapiens
  misc_feature (711)..(711): n is a, c, g, or t
gggtttgtatcatggggtgcctactgctgtctaaactctgctctcctaattagctgactcttgaaaatgaaatcctaacctctttcctgcctcttttctttctcttttcaggaagagtgtgggtagaaagtccggagggcaacttccaatttaattctgctctgtccggcgcataggctgaattccaaaagaactttcttcctaggatgtggcgcttaacgcaccgtcatgtgggtggatcagataattgctcctgtggggccctggcttccttctctgtttgtgcagtatttgtttttgctgtccttgttgagaaatatcccctgtgcaacccacccttggttgaggatcacaaattgaggtgccttacttgtacgctttctgttagtatttttcgtttctgttccttacctgctgagccttcgccagcgtgggtcctgggcgcaataccattccaaagggaacccatcccctacggcgacatttgcctcccctgcggtaaaattaaatacctcttattccttgccccgattcccttccttcctacccggccaccatacatgccgaaccatccatcaccttttccgcccgccccgggaaatttcccttccgtacccacgctttactttccacaattccaagccgacgcgttctataccctatgccgcttcctttcccccgttgcccgtcccttaaagacgacgcggatgntcactcgccgcggccttttccataacccgaatcgaacccaacctcgcacctatcccaaattttccgacattcccatcccggccgagtaacgcgcgcccgcctcccgctttagccagcgtgcaaccatatgctgcgcgcccacacgagttttttgcccgcgtgtatgattctcccccactacgcgcgccccccttttctcccc

SEQ ID NO: 231400 - DNA, 919 bp, Homo Sapiens
  misc_feature (870)..(870): n is a, c, g, or t
gtggcgcgcacggcgtcaccgtctagacgcaggcttgcagcgggcggtgtcgttcacgctcctgagcagagccttccggtgctttactcgacgccacaaatagtgcagggttcctcccaggggctgtcgcgagctagaactcttccccgcccctgtgagctcgggctgttcttcctcctccgcgtggctcactccagcctcggatgtttcctcgctgcacagacctgctcgggaagactcgagaaggccaccccaggactccagctctccccggaagggcttcccctcggattgcgtcttggcccctggaaccctccctctgtatcctctgctgttcctctcttggcctccatttgggttgtggcctggatactctggctcgctgcttcccttctcttaaggatcacagccctgcactgcctgtcgtccgggtgcctgggaacccattgtatttttctgcgcctgactccgtaactcgtctgcgaaaacttaacttctgggccccctcacactccatggccccgaaggcggaaattgagccaaaggttcgcgtttatcctttttcctccgtagccgcgtgccggtatcaaccccttgggtccgcggagtgtcggctgggcgggggcgaggccttcgggtgccctcctcataaatcttctccctggcaccctttccgcctttcgcgcagcttgtgcggtacccaggtacggggacgcgcgccatgatgtgagcccacctaagctgtggttctcctcaggcgaaaaccccctggggcccactgagacataacggctgcgtggcatgtttttctacgcaccgctaacaaagcgcccccccctcgcgggcgcaatagcctgcgaccccggacgncgtgaaactgacgaatcctgcgagggggggagctcttctctggccggtg

SEQ ID NO: 231401 - DNA, 761 bp, Homo Sapiens
  misc_feature (650)..(650): n is a, c, g, or t
  misc_feature (661)..(661): n is a, c, g, or t
gggggggctcctgaaactcacatggtaagcgctgcagaaacgcagcaggtggtgactttaggggaggacaggccaaatgggagaatccccttaagcttcggtttctctagttctcaacttcttttgaaataatgttcatagagaaggagggctgtctgagattcgagggaaacaagctctcaggacttccggtcgccatgatggctgtgggcggtaaacgcggttagtgcaagcatctgggccatcttcaatggtaaaaaagatacagtaaagacataaataccacatttgacaaatggaaaaaaaggagtgtccagaaaagagtagcagcagtgaggaagagctgccgagacgggacagtggatccagtaggaacatagatgcatccaaactcattagactacaaggatcacggaaactgttggttgacaatagcatacgggaactgcaatacacaaaaactggaattttttttcaggctgaggcctgtgtgacaaatgatacgtaagggacatctatttggtggggaaaaaattaaagatttggaattttgctccattggtttatgtacattcataagaagcaaagacatgcagggttatttgcataaaaaattaatatatatgtttggaagcgaccccatacaaaanaaatcccaaanaaaaattggtcgggccggccttcgggccccttcaaaaaagctttttccaaaaacccatttccgttttgggcgcgcccgcgggggcccccagttaaggggc

SEQ ID NO: 231402 - DNA, 919 bp, Homo Sapiens
  misc_feature (183)..(183): n is a, c, g, or t
acccccccaacacacgcgccggcccgacgtcgcacacgacccagcgcgcgcccgcggtgcggacgccccccggccacctccaccggccacacagacacgccaccaccacgaggcgcccgcccgggcggccacccacggcagacacagccgacggccggccagaccgcggggcccgcgcgcccngccgttccccacgccccccctatgtcgtgcctgtatgccgtcccggtgcccccagtgccgttcccccacatagtttccagtccggatcgtggccccccgtctcaccatagttaccccacgccacccccttgcgcccaactctgccgccccccctctacgcacgtgccgccccgccatgtcgcccactcctgttgtgtgccgccccgtcgatgattgcgccgcgaacaatagacccgcgcattgagcgcggcccgtatcgtcgcggcggcatgtcggtcgcccagcaccgattcacatgatgccccccgagcatcttgtgatacctccccctccgcgttacgcgacccgatctgggtggtgcccggcaccacctccgctccctcgatgtgccccccgcccgtcgtcttcatcaacgcggaccgcgagacgctcaacgccccggcgcgcgccttgtctcctcgtgactttgcccatccgccgcttctctccgagcgcccgagtgatgacaccacgccgacgctgttggagtcgccgcctcgccgcctacgaatgtacattctcagtcccataccgttaacccctccaaccattcgcccacccgctctgctcaccttcatactccgacctgccctcgtcacgcagattaaacctgcgctcgccacgccgcgggcgtcactccacgaacactgctccacgcgcgccctatctcggctctctcttatgcgctccagccgcc

SEQ ID NO: 231403 - DNA, 154 bp, Homo Sapiens
acctgtccgcccgcctccgcccctcgaaaagctttctaaaccatttcgtttgggggcgcggggccccagaagggaagggaacatgggcccaaaactggttccccaaggagaaccccgggccatgacctaaaggctgggaattccccccccaaat

SEQ ID NO: 231404 - DNA, 998 bp, Homo Sapiens
  misc_feature (170)..(348): n is a, c, g, or t
  misc_feature (350)..(350): n is a, c, g, or t
  misc_feature (353)..(353): n is a, c, g, or t
  misc_feature (366)..(381): n is a, c, g, or t
  misc_feature (390)..(390): n is a, c, g, or t
  misc_feature (402)..(418): n is a, c, g, or t
  misc_feature (493)..(502): n is a, c, g, or t
  misc_feature (516)..(529): n is a, c, g, or t
  misc_feature (583)..(608): n is a, c, g, or t
  misc_feature (637)..(647): n is a, c, g, or t
  misc_feature (798)..(798): n is a, c, g, or t
  misc_feature (801)..(801): n is a, c, g, or t
  misc_feature (846)..(846): n is a, c, g, or t
gggactaaaaacctaaataaactgattaggttttaggcgttctttcaaagaggttcttgagaagattgagaactatcctatttggtgcttagtgaaaagattttgaattactgtacgtaccagttgttgccatttctttattaaattcagaagtttttttgccaaataannnnnnnnnnnnnnnnnnnnnnnnnnnnnnnnnnnnnnnnnnnnnnnnnnnnnnnnnnnnnnnnnnnnnnnnnnnnnnnnnnnnnnnnnnnnnnnnnnnnnnnnnnnnnnnnnnnnnnnnnnnnnnnnnnnnnnnnnnnnnnnnnnnnnnnnnnnnnnnnnnnnnnnnnnnnnnnnnnngnggngagaaggggccgnnnnnnnnnnnnnnnnaaaagaatnctccaaacaccnnnnnnnnnnnnnnnnnccccccccacggagaagaaagaaaggcgacacacgacgggcgccccaaggaaaacgcccggcgcgggcaaagacnnnnnnnnnnctactcccccaccnnnnnnnnnnnnnncggcggaccggggcacaaccaaagagggggcgtccgaagaacaagcctctgaannnnnnnnnnnnnnnnnnnnnnnnnnctctccgtggtggcggcccctccaccccnnnnnnnnnnnacggcgacccgaagcggcccgcggatgaacaataatatcgcgcgccgcccccgccgcgccgaccgctccgagaaggaggacgcgggtggggctcgatccaccaatagaacgcctccctgccccgggggagatgcgcggcgcgccccccagnggngcgggggatcgggatagcgtctgggggggtcccgcccgcggcggngagacccgcaaggcgctgggtggcgccctgctaaacaaagaaaaactattcggccccgccgcgccgccgaaaaaagcgggagggaggcgcagcacagacgggagcctgcctcactgcgggggtggccccctcgttatcaataacaacaagag

SEQ ID NO: 231405 - DNA, 1092 bp, Homo Sapiens
  misc_feature (60)..(242): n is a, c, g, or t
  misc_feature (554)..(554): n is a, c, g, or t
  misc_feature (667)..(667): n is a, c, g, or t
  misc_feature (692)..(692): n is a, c, g, or t
  misc_feature (849)..(849): n is a, c, g, or t
  misc_feature (880)..(880): n is a, c, g, or t
ggcgggtggattttgaggctctgtgatcgatttatacctatgctaaagttatcggtctgnnnnnnnnnnnnnnnnnnnnnnnnnnnnnnnnnnnnnnnnnnnnnnnnnnnnnnnnnnnnnnnnnnnnnnnnnnnnnnnnnnnnnnnnnnnnnnnnnnnnnnnnnnnnnnnnnnnnnnnnnnnnnnnnnnnnnnnnnnnnnnnnnnnnnnnnnnnnnnnnnnnnnnnnnnnnnnnnnnnnnnnttaaaaagtcctaaaactacacccacgcactcaccactaacatcacccatgaactcgtatcacaccacccgtcacactactaacctccctcacagtgccaagccgttccgtgccccacaggagatacgattaaaaggcgaacgcttctgggcggcggcccccttccgcacccccgaaaaaaacgctttataaaaaaaccctccttgtttgggggccccgcggtggccgtcctataaaggtcgccacgggcggaacccctgggcggcacttttgcgccgcgtcttctcccccaaggaaaacaacttccgcgcngacaacagtgaatcacatagaggcgcggttggggagatttctctacccaccccgccgcatataaaacacaagcccccgcccccgcccggggggcggtgtcccaccgcgcggcnacaccttggtctttcgttaacgcancaaactacttctccgaacaatgtggggcggcgctctcccattagggtgggccccccccgtccacgtgggcgcgaccgccttctcccgccccgggctgggatagtctctcctaccacgacgaacgctctccgctgtctataccaacaagtagtatggntccctcgccccccgccggtggagcgcatgtntattgatgggagacatacccgggggcgcaaccttttcttattcaaacgtgattctctggcgcccgctcggttggacagcactcccctacccaccacgggtatttggatactggcctcggtactgcccgcgcggggcaaatctcaccgaccttcctgccaccccccggaactaatataaaatttcgccgaggcgcgaaaaaaccgcgcgcaaa

SEQ ID NO: 231406 - DNA, 883 bp, Homo Sapiens
  misc_feature (342)..(494): n is a, c, g, or t
ggactcagagaatctccagagagtgaagggccccaaagctttgactctccttgcttctcggtgaatcccactctgagatatcactggaggacggacagagaggaaagacatttggaacaggaaataatgacaaggaaaaaagtctggaggatggagcaagatggcagaatagaaggttccactgatcatccccctgcaagaacaccaatttaaaaactatctacacaaaaaacaccttctcaagaaccaaaactcagatatagaagacactatcctaacatttgtatgaaagcacaaaacacccagaagagccaaaattattctaagcaaaaccaccaaccnnnnnnnnnnnnnnnnnnnnnnnnnnnnnnnnnnnnnnnnnnnnnnnnnnnnnnnnnnnnnnnnnnnnnnnnnnnnnnnnnnnnnnnnnnnnnnnnnnnnnnnnnnnnnnnnnnnnnnnnnnnnnnnnnnnnnnnnnnnnnnnnnnnnnnnnngtgaaactcatttttctaacaaaggtgcaagggaacataacacccaggggaaaaagatcggtcctctttcaataaacctggtactggggaaaaaggggaatatccaataatgaaggaaaaatcggaaactaagtccccggccgtcttcgccactaaaaccaaaagaaaatatccccaaaaatgggacctaaaaggaactttaaaggaacctcaacacttagtgcgaacgttacccagcaaggaagaaagcgtttggggaagaaaaattcctcccacgggtaaatttctggctcgggggacgacaaataactttctcttgagaggaaaatacacttccatatagacaccgagggggacaccctctaaggtcactagtagttgggcgagaa

SEQ ID NO: 231407 - DNA, 1048 bp, Homo Sapiens
  misc_feature (127)..(242): n is a, c, g, or t
  misc_feature (504)..(514): n is a, c, g, or t
  misc_feature (875)..(875): n is a, c, g, or t
ggatatggttatttttctttccataaaaatggtattaaactgtatatactgttttgtagcctacatatttcatatagaagtatattgttaacattttccatgtcaataaatattcttctatggcttnnnnnnnnnnnnnnnnnnnnnnnnnnnnnnnnnnnnnnnnnnnnnnnnnnnnnnnnnnnnnnnnnnnnnnnnnnnnnnnnnnnnnnnnnnnnnnnnnnnnnnnnnnnnnnnnnnnntaaccgggcggccaccatcgccccccaaaaaaagtcccaaaacctctccctttcggggcgcggcgcccccaaaaccgacgagagaacttctccttaccttcccctcctaaccggccgcccccggcacacacatctcacgtcgggttctctccttccacaaaaacaaaacccgcctcggcgggcccccccgacttcccctttccatccaactacctcaaatcggagcgtccccacggttatccctcactgcggggctctgttnnnnnnnnnnnggcgatgcctcagggcggcggcgatcgcaaatgcaaaaatttctccccaccgcccccccgtttgtaactcccttgttgcaaaaaacgcggggggggtgcgaagcaaatcgcggtaaaaaatagctgattgtcgcgggggtaactggtgcacaccaccccatggtccccgccgggagggcatccatgcaagaagccacccccccgactttgtccgccccggcgcacgcgactgtcaggagagcggaccttcccgcccctctgcttgacgagagagatatacatcttcttgccgcccgcgtgagaccaacaacaaccgcgcgagccccaaacaacaacgagtgccgtttcccttcgtattggntgcatccgccgctatttagaatctatcacgacctagcgggcgcgacgatcccccctcgccaaattaggtgcgcgtcgcgtacgatattaccaaccatagacccttattgtctccccgattatagcccgcctcctctttatcgcggataacaagagtgcgcacattgcgccctc

SEQ ID NO: 231408 - DNA, 815 bp, Homo Sapiens
caagcaaacaaacaaaaagatgaataacagaattgatctatgtgaagaacaaaattgttaattggaagattacacgagaatatttcacggggataccaggacaacgaaatacgcaatatcaaagaaaaattgacagctttcaaatacagaaataaaggtactgacctcccgaacgtacgactctacgaagggagcaactcttttttaagtggagaatatatacctacacggataaaagggcacagtctccttctacctaccgcgacaccataccccagagcaggtgcacaaccttccgacttaacagggtcctccacacctccgacgagacagactgtaacctcccctcctccgtttcaaagcctcacaactactaccgacttgtcccccattcccccttttccccgaccctttcgcttcttcctacccgattgccccgcgcccagacccttctgggttccccccgtataaccacgctttctttccatagacaccattttccccttttcggcgcccccgccgcgggccccattgcacgggacacaagtgaaataaaatggcccttacaaatctgcgtttcccccttatggacgatccctcgcggccccctgcattcacggggctccttggatatcccccacccccaccaccaaaaaacgcccttgccgcccgccaacccggagccggttccttataccgaaaccccctcatcgccccggttcctccgcagggcccccccacccgggccattcctttccatatcggcggtccccacgccgaccttccttattctccacatttcacgcccccgccca

SEQ ID NO: 231409 - DNA, 1457 bp, Homo Sapiens
  misc_feature (354)..(380): n is a, c, g, or t
  misc_feature (650)..(650): n is a, c, g, or t
  misc_feature (971)..(971): n is a, c, g, or t
  misc_feature (1166)..(1166): n is a, c, g, or t
  misc_feature (1297)..(1297): n is a, c, g, or t
  misc_feature (1362)..(1362): n is a, c, g, or t
  misc_feature (1431)..(1431): n is a, c, g, or t
ggggaatcagcctcctgccacccccccggaaggacctcactgtctccagctatgcccactgctgcatgggacccatgtctcctgggacagaggccatctctcttccagagagaggccgccttggcccacacgatacgcctcaggccctgggaaacctcccgacccctgcaccttcgttggagcccctgcatcccctgggtccagccccctctgggtggcgcggatttgagtcagaactggaaagcgtcgcccaccgctactaccctcgagcggcgctcccctcattgcacggatggcgcaggaccccccacgctgctggccgagatggtttgagaccgcatcgcgcgccacgtnnnnnnnnnnnnnnnnnnnnnnnnnnngcgtcctaaactgcgtggcctattcccgcccgctccacacggggccccccacggccccccggaggaaccactccgttgctgctcgcccagtctagcgcgtaccctaacgacccccccgggcaacgtgcaaccccttaacgcgatacaccgcgtctctcgctgcgccacttgaacacacgttgtttgacgcccagagcgttacggcagcggcaagatttcgcgccgcatagccttctccttcgggtctctcacgtcgcgtttggcagcgcnacacccatgtctcacatccgcgctcaaccgccaaagactgccggcgatccggggcaaattaataagggggggaaaacggggcgcgaaccaccccctcgataatattcggtatagttcgatcgccacccgccggctaacgcagcgggaaaatatggggccggcatagcgcggccccttataacatctttccaaaccgcccggtgtgccgacacgcagatttataaatacgggggacgggggcgcggggcgccaccggagaatccgactacacgccccaagttggccacaaacaagcccggcgcccccgcgggcccccgacgncataataggcatatattgtacccgccgaatcgctgcccgctcaaaggaaaatgcccggcccaggcccacatcgggtgtaacgatatctacttggtcaacgaggcccctccaatagacgtagcacggtcgaactacataatcctcctcttgttttcgccggggccgctctcctacgtgagccccccccttttatantgcgcggtcggggtcaccgccccctctcggggacgttctggccaccaaccctccgtcgtgagacgtgcttatacagggacgcggcaggacagcggtggggtaatgaggacggagcggctaaaaaaatcggngagcgcccgccttgagggcacactcatcaacgtgggatgctttacaccagacgacgccacccagncgcgcctgcgaaacactcgccttatatcccgaccaaatctccctacgtcgggaccctcaccaacgcgcnttctatcacgctcgattcacaatatc

SEQ ID NO: 231410 - DNA, 507 bp, Homo Sapiens
  misc_feature (231)..(244): n is a, c, g, or t
  misc_feature (341)..(369): n is a, c, g, or t
tggctttgtgtttcttaaacaatgtaaagtgcttattatatgatagtcttgtcaagtcttcacagctaattactttgaaaatcattttcatgccaaatattgagggagaaaatttgcagcaggagcagtaattcttgtttcacataaatatctaaaatgatgcctggaaaccaataattctttttaattcctggaaaacgaaaaccattttataaatggtttacattcttnnnnnnnnnnnnnntgcctatccccttacaaagggcctcttcatttaaacataaaaacacttgcccgattcctttgttgggccccccctcttggcccccttcaaagaaaannnnnnnnnnnnnnnnnnnnnnnnnnnnnggcgctccgcgggggctccccaaaaagggtgaaagcggaaaaacaggggtgccaaataaggctggttctcccaagaaagaaaatccgctgggtctagagaacataaagggcctatggggaatatttctccccccaaat

SEQ ID NO: 231411 - DNA, 812 bp, Homo Sapiens
  misc_feature (285)..(297): n is a, c, g, or t
  misc_feature (302)..(310): n is a, c, g, or t
  misc_feature (401)..(409): n is a, c, g, or t
  misc_feature (501)..(518): n is a, c, g, or t
  misc_feature (532)..(532): n is a, c, g, or t
  misc_feature (585)..(585): n is a, c, g, or t
gggggttcatttggggtcaaagccagtttttcttttaaaattgaattcattctgatgcttggcccccatacccccaaccttgtccagtggagcccaacttctaaaggtcaatatatcatccctttggcatcccaactaacaataaagagtaggctataaggggaaaattgccaatatttttggggtaagaaaaagctaaccgtcatttttttctttgccctttgtggaaggctaaaaatttttccctgggaacaaaacccccacttctaaaataaagggggaccnnnnnnnnnnnnnctggnnnnnnnnntataccccttaaaagggggcggggaaaaacaaaacaattttttcttttctttcgagaaaaagaggtgttagccccttcttccattttgggnnnnnnnnntttatatttgtcggtaaaaacaaccccccctctttttggggggaaaaaataaaattttttggtggggaaaacaacaaaacgcgtcaatcccnnnnnnnnnnnnnnnnnnctctccccgccgcncgcggccgggcgcgcgtcacggcgcctgccgaaataacgcacccttcacgagnggcgagtctccgtttgttgggtgtggggcccccgtgtttcggtgtcgcgccgcccttcccctgaaacaaaagaagatttcttcttttctaagaacacccaaccacattcctctcccctggaagaggccgccgagtgcgcgccctctcctctctacttcattataatgtgaacgacaaacacccggaggcgccgcgcatatcgccctctcgcctttttctgtttcgac

SEQ ID NO: 231412 - DNA, 980 bp, Homo Sapiens
  misc_feature (285)..(413): n is a, c, g, or t
gggctcctggttcaggcagctatttctggcccagcagaggtagcctagtctgtgattactggcacttggctacagagagtgctggagaacagtgtagcctggcctgtacaggtactggatgatctgcaagacaggctcagccatactcttactatcatgcagccaggggccgctgacatctaggacttcattattctataattcaggaccacagtggagtatgatccctaactcctgatttggatgcatctgagggacaaggggggcggtctccgaagtggaatnnnnnnnnnnnnnnnnnnnnnnnnnnnnnnnnnnnnnnnnnnnnnnnnnnnnnnnnnnnnnnnnnnnnnnnnnnnnnnnnnnnnnnnnnnnnnnnnnnnnnnnnnnnnnnnnnnnnnnnnnnnnnnnnntttaaaaaaaagtgtaataaaatgataatatcattacgacaaccaccaaaacataacgacaaaaccttggtcgggccgcctccggccccttcgagaaagccttttctaagacccatttcccttttgggccgcgcggggggccccaagtagcgggtaaagtgcgaacaatgggcgcccataagggctcgcatttctcccataagggaagcaattcccttggcgccccattggcaactctaacggtcccttctggtgcatttccttccaatccaaaataaaaatagaaacggcgcccggggggcggggtgcataactcgggtaccccggttccttgtgaaacacaaaattccccgggaatgggggaacgtgttctgggaggggcgcgctttaacgtcggcgactctttaattccaactcagggggacattccacaacgaccgaagccccctccgacaacactcacgaaattcaaccgacctcgccggggaccccggcggaaagcttctgtacccgaccccagagacactgggcgttggcccaagcctccccctcaagacaccctctttc

SEQ ID NO: 231413 - DNA, 746 bp, Homo Sapiens
  misc_feature (91)..(273): n is a, c, g, or t
  misc_feature (481)..(564): n is a, c, g, or t
  misc_feature (574)..(575): n is a, c, g, or t
  misc_feature (661)..(661): n is a, c, g, or t
  misc_feature (667)..(672): n is a, c, g, or t
  misc_feature (687)..(702): n is a, c, g, or t
gggacaggcaagcggacgagccagttatccctcagagctcctgctgcctcgcccgctttctctcggaaacgtgaagtgtggcctcagctgnnnnnnnnnnnnnnnnnnnnnnnnnnnnnnnnnnnnnnnnnnnnnnnnnnnnnnnnnnnnnnnnnnnnnnnnnnnnnnnnnnnnnnnnnnnnnnnnnnnnnnnnnnnnnnnnnnnnnnnnnnnnnnnnnnnnnnnnnnnnnnnnnnnnnnnnnnnnnnnnnnnnnnnnnnnnnnnnnnnnnnnggcagtggaagaagactgctcagagagggactggatggccattttggtggaagctcagtggtttagacttgaatcttggatttagaccgcgtgaccttcaggtccacattaaagctgaaactttatgactctgaattggaatggaagaccgactggaaccccaaatggatgctcagaaaatttgggaaggaagcttctttttacgggnnnnnnnnnnnnnnnnnnnnnnnnnnnnnnnnnnnnnnnnnnnnnnnnnnnnnnnnnnnnnnnnnnnnnnnnnnnnnnnnnnnntccccccccnnggcacccgcgacagcagcaggcgaaggcacaagcgacggacgcacgaaacccggcacgtggggggggaggcaacaagtctaaatantatatnnnnnnggggaaagccggggnnnnnnnnnnnnnnnnaacacccaaaaaacaaaacttctgttatgggggttccgcgcgcg

SEQ ID NO: 231414 - DNA, 961 bp, Homo Sapiens
  misc_feature (199)..(199): n is a, c, g, or t
  misc_feature (375)..(375): n is a, c, g, or t
caccgaatcgcaatcctcacacaacaaaaaacgtgtcggccgcctcggcccgtccagaacctttcctacaccattccatttgagcgcgcgcgccccaatacgggtacacggaaccctgggccaccagcctggcctccctaaacaaaatccctggggccactgaactcacccggctttgggtatttcctcccgcccagantaaagaaacaattggcccccgggctggggcagaaatcgcaggatcggcggatgatccgttgggaatcggcaaacaattcctgaacgaaaagtgcgccgagcacgttatccttccaggaagggggggtcgcgtcacttctcaccccacttgggggggaacactttcgttttaacacntgcagatgaagcccccccaccgatgtgggtcacgtgtcagccctcccgaaggaagtcatcgtcggccgccagggagcgcccctctcggcggggaaattataaaatcgttcgccggcggaacgcctttcttataaacccgagggccacagcccgcccgccctgggaccaccactcctggggtgggtgttgacgcagcgcctttttcaagtagctccgcgccgagcgacggcgtagtaccaccccccgcgcggatcacgcacgcaaggaactcatcccccccctgttttttgataataggtagcgacactcttctttcttgttgtcaccccgtctaaaccgcgcctcggtatgtcgcaccccccaccccctcttttttccaccaccgcaaaacacgcgggaacgcagcttggacaaatggcgccacaccccccgcgaaaccaattcccgcagagcgcaagccatcgctcgagaatttctgcggcggtggcgcctgttttgctgtgggcagcgactcttttggacgcgccgtctcgcttgtattatcctctcccgcgagcgccatactttgatgagcatgacaacaaaa

SEQ ID NO: 231415 - DNA, 905 bp, Homo Sapiens
  misc_feature (423)..(481): n is a, c, g, or t
  misc_feature (512)..(512): n is a, c, g, or t
ttttggcttatttaaaaactatactaactttggatttttctgttacaagacttttaacaatctgtatttcgtgattgtgaactcgtattcattttacttttccaaaacagacttaacataccattccctcacctaggagtactaccacaataatgctttcatggtgccagggaattacaattggaattcttttaacctcttatggttcgaaaatagaatgtgaatttcttgagcttgtttatccgacccgaatctccacctccttctcgctctgcgcacctctgagctactttttggttgagtatttcctttcagccgttgtcccttctctgccctcttccccctgtcccccgcttttcccctttctcgtttaccatgttttcttccccgttactttccctgtgcctgtctcttcgagtctcnnnnnnnnnnnnnnnnnnnnnnnnnnnnnnnnnnnnnnnnnnnnnnnnnnnnnnnnnnngcgcgtcccttttacgctttctcccctcccntattttctgtctctctgtttggctaacccggtgtttctgtccgacgtttggctcccccgtgttttccgatgccccgttacgctcttcgtcgctgccgttgttgacttatctcgctgtgtagctccctcttttctcggtccttccccgttcctcttgatgtccgcgttatcacacccttctattcgcccgttgcctgctcttcacctcctttttttcgcccccttgttatgccccaccccgttatccccgccgtcttgcccgcttttctttttcgtgtttgcccgctccccctgcgcctcttcgtttgcccctccgtttcgccccctccctgtgcccgtctctgttttcccccacctttgtttcgcgcctcccggtttgctgttccctccccgc

SEQ ID NO: 231416 - DNA, 1313 bp, Homo Sapiens
  misc_feature (136)..(177): n is a, c, g, or t
  misc_feature (768)..(768): n is a, c, g, or t
  misc_feature (1220)..(1220): n is a, c, g, or t
  misc_feature (1225)..(1225): n is a, c, g, or t
  misc_feature (1296)..(1296): n is a, c, g, or t
ggctttctgtgtttggttgggtgtaatgaggaaaatacctgataaaatgtctgaagacactttctaatgttatcttggtgcataagctgtaatttttattcaaaattaaatttcaaatgtttgcagttttggctannnnnnnnnnnnnnnnnnnnnnnnnnnnnnnnnnnnnnnnnngcagcccctcgcgccagatgtgggtccaccgcacccctccctgggagggagtcttcccttcacccttgcatctgggattgccggcgcaacttcggttaagaacccggtggcccaaagaaggatttccccaagcacctacgggcctcttggaccccagcccgtcaacacaacactccctcgtagaaaaacggggctcgcggggagaaggaagagacccccctgcagatgcacgccggacagagctctgcccggaacgcccgctccgccgagggatgtctctctagcggcgcccctcccgccacacgcgcactatccccgtcctgggcacggcgagagcgcgggtgacgccgcccccagagcactcgttgtttaccagaccttcaccgtctcgcgtgcagattctcttgcatttcggacgcgggcgtgataggttgccgctagaaccgcgcgctatgtgccccgtctattcatctacagtcacccgcttaccatttgcggcgcccggcggcccgccctatacttctcagccgcccgacccatgtgcttgattacataccgcgcctcatggccggtgtctcgtgtaccgcctgnccgtgttgcgccctgagctctatgcaaagagagacaatatctctcccctcccgccgtcgtgtggaggactcacaaaaccagcaccatctgggtcgccggcgccaaagaaaatccgccggcgctcgcagcataacagcgcataacgtgaaggtgtcaccaccacgacgcatggaggatggtagttgatccctcctctgacgcggtcgttgggtgcggtgcatatatcggggccatcgctttcgtgcgcgacataataacagtgacgggcgtctatatacttccccccccgaacagcacactcaccgcccgttctcccttaaccggcggcgccaccaaaccacgcccgatccaaggcggctggtctaacctgcgcggcaccgcgcgacgcgcatgcggtcggcacccccgcccctttctgagcacgaggacgctcgacgattgtgatctacggngcgtntactaaatcgcggtcgcgggctacataaagacactcttctctccagacgcacgtcgagtcagtcggacgtnaaactagatgaaaacta

SEQ ID NO: 231417 - DNA, 921 bp, Homo Sapiens
  misc_feature (735)..(735): n is a, c, g, or t
ggcatctctctattggcactgggttcgattgcccctggctaatagagttcaattagttctatccctgggtttcctttcttagctatggggtggaagataggagggggagatctacaatttgaatatgtgttacttaataaggctaggctggccatcagttgcttatttcagatgtgtcactaaattttccttctagatggtccttgagcaaaacttaataattactgttttttatttccactgcctttataaaatcaaaattttctccttttgataaaaactgttgaatactattgatgtagagaatgtgtatatgtgtatatttgcattgattaaattattggaaaacttccaaaaaaggagctctgacccaaatataaaaacatgtgtggccgccctcggctcctccgagaagcctttctaggaccatctcgtttggccgtgcggggcccccgcaaggtaacgtgaacctgggtcctagcctggttccctaaggaaaccccctggttcaatgactagggcgcttggcattctccacccatataaaataccgcgccccttgtggtgcaacccgcacccgtctctggacacaaaccccccaggattgtgaggttccccgcaggcgccttttacctcggggattctccacccccccagggaggttccatacgccgcagccctgcggattttcctccaattcaccggtactcctgtgcccgggggacaatttgcatngcgcaggtagcgcggcgggggacagcttccatgtgagagccgactccctggccccgatatgtgtgccaacttctttcccccacacaggggtgatgtgggttggaaaacccttgaaaattcggcgccgaccgcggctctctctaatcgacccccttggtatcagcctctcgtgacgcgccagtacac

SEQ ID NO: 231418 - DNA, 940 bp, Homo Sapiens
  misc_feature (207)..(352): n is a, c, g, or t
  misc_feature (361)..(361): n is a, c, g, or t
  misc_feature (382)..(395): n is a, c, g, or t
gggggcttgagtatttatatattgtgcatcaactctgttggatacgagaacactgtagaagtggacgatttgttctagcacctttgagaatttactttatggagcgtatgtaagttatttatatacaaggaaatctattttatgtcgttgtttaagataattgtgtgaaatcatgtagttgcaaataaaaaatagtttgaggcatgnnnnnnnnnnnnnnnnnnnnnnnnnnnnnnnnnnnnnnnnnnnnnnnnnnnnnnnnnnnnnnnnnnnnnnnnnnnnnnnnnnnnnnnnnnnnnnnnnnnnnnnnnnnnnnnnnnnnnnnnnnnnnnnnnnnnnnnnnnnnnnnnnncaacccaancatctgcgccgtggacccacnnnnnnnnnnnnnncgcgcggcttcgtccttcccgcgcagaaaccaaatccacaacacaacgctctggggtctctccccccgaaaaaaaatcccgggagggtccaaacggaaggcgccttgtcacccaatcacaaaaattggacttctgcgcccgccctcctccgcgggacctgtcctgacaaacaagaccgaaaccccctctgtgcccccagattttggtaatttccattctccacacacctgcggggcggcggtatcgcggaaacgatgtgtgcctgaataaatacccatccaacgccctggcttcgcccttctgtggggataaaaccacctgtgcacctacgggcacggtaataccttcccgtgccccaccgcactcgtgcgctatacactcaaatacccttggcgcccccttgggcgtaataaattaattctgcccccgccgccgccgataaacaaatccgggattggctcgacggaatctcgggcttacatttcctgtggctggcgcgttctgatacagaaacaaatggtgggccacaacattttgccccccgg

SEQ ID NO: 231419 - DNA, 1108 bp, Homo Sapiens
  misc_feature (74)..(119): n is a, c, g, or t
  misc_feature (144)..(154): n is a, c, g, or t
  misc_feature (182)..(252): n is a, c, g, or t
  misc_feature (555)..(555): n is a, c, g, or t
  misc_feature (1031)..(1031): n is a, c, g, or t
gggaagagcagtggagccttgcccacagggctgctgcttcatgcgagagggagatgtgtgggcgagagccaatnnnnnnnnnnnnnnnnnnnnnnnnnnnnnnnnnnnnnnnnnnnnnnacagatacatagtttcattggtcannnnnnnnnnnaacaataaagtatctttttttactgttnnnnnnnnnnnnnnnnnnnnnnnnnnnnnnnnnnnnnnnnnnnnnnnnnnnnnnnnnnnnnnnnnnnnnnntggccgccccgcctccggccccaaaaaatccttccaacgacctttccctttgggcaccccgggtgcccggcgcgacccccgccccttgggaaatagttttttatcccaaatacacattctggcgccgcgggccccacagggttggggtgatctccccaacccgcccatgaaaaccccgtccccccccagggaaagaacaccacgccctaccccagaaacaaaaaagggcgggggggcggtcgcgccccacccaaaaagaaataatcccggcgcggggtggctcaaacaaagactggggggtgntcttcttgagcgcaaaacccttcccctagaggttgtcgaagattattgtcggcgggcgccggctctcctcttagcgggggtgagttcttattaccacccataaagagagggggggttgtcccaataaagagatgagacgccttctgatggcggatcatttgtttatgttccgtgaacgttctcggcgcgaagcgcgcctattttcactcactatatatagcgccgccagtttggcacggtgcgcgccccgataataatatattttcactctcatggagagccgcactttttctcgctgaccatcaaattgtttgggggagaaaccttccttctcatccgctcgaataacacagtatgtgtttgtggtgcccctacacgccggcgcgggaataaacaccgcccccgcgggcgccggacacataacaaaaagatatacctgtgcgtctcccaacccgttgttgcgtggtgagagacanaatagagtaaagcagctccgcccgcgcaaccacggtgggggtggagagaaaaacacatgtccgcggggccaagaaag

SEQ ID NO: 231420 - DNA, 1013 bp, Homo Sapiens
  misc_feature (274)..(461): n is a, c, g, or t
ggcttccctcccaggctacacccctgtagccccccaacccctgcaaacttgttatttaagcctcctcattacaggggtttggagccgaggaagccctgctgccttttcgtaaatgctctccctagacagcaatctttgatggaggctctgggaggagttgttcagtgatgtgcatttgtcgagcacctactgtatacctggtgccagtatagggttgggtggaagggtcttgcccactcaacacccctttttctgccctattattgccttcccnnnnnnnnnnnnnnnnnnnnnnnnnnnnnnnnnnnnnnnnnnnnnnnnnnnnnnnnnnnnnnnnnnnnnnnnnnnnnnnnnnnnnnnnnnnnnnnnnnnnnnnnnnnnnnnnnnnnnnnnnnnnnnnnnnnnnnnnnnnnnnnnnnnnnnnnnnnnnnnnnnnnnnnnnnnnnnnnnnnnnnnnnnnnaaaagaaggcacgacaatcactttgagcccaggtaggtcccagccctgccagcggagctaatgatgaacacccacttgtcccctcccattccccgggagccaacagaaagggaagtgccccctgattttcctgacaatacgaaactccggaaagaagaccacacacacccttgtctcaggtaccggtaccttctcggacccttcacgagcaaaggtttttcgctaacgaaacactctctcatttttgggcgcgtcatgtggcggcactcctgttaaaggagtaaaccgccggaccaccggggacgacaataaaacctcagcgttatgccctataggagacaaacacgtggggaacacctgggataacttaagaggtcacttggcgcatttgccttacagcctacattacaggaataaccgtgaccccgaggaaaacgactaccaccgatcgtctagatctctataagatgtcgataacatcgtcccgccttgagtagctcatccctccaacgggtattctgtatatccatgggggactctgtaaagcgacag

SEQ ID NO: 231421 - DNA, 1008 bp, Homo Sapiens
  misc_feature (154)..(213): n is a, c, g, or t
  misc_feature (217)..(218): n is a, c, g, or t
  misc_feature (221)..(221): n is a, c, g, or t
  misc_feature (425)..(434): n is a, c, g, or t
  misc_feature (953)..(953): n is a, c, g, or t
ggggggtaaagtgagccctgaaatacatgctaaacaagacatgaaatgcagaaaggtacatagtgtttcaagtgcatggtagtttgatctgtgttttactttattgtgttttcttgagtgtaaagaaagaataaatcaaagttcttcatacccnnnnnnnnnnnnnnnnnnnnnnnnnnnnnnnnnnnnnnnnnnnnnnnnnnnnnnnnnnnncttnnccnacaaccccggacgaggagaaggataccaaacccatgcgaccggggccccgagccgaaaacggaaaaggacctgggcctgactctgtgcccgaacgagaccccggtaaagaactagcgtttgcatcccaacaaataaaaaccgcccgagcggaaacctagggtaccaaaacaaatccatatgcgagggcaaagcccggtgactgnnnnnnnnnnttgggagccccaccccgacatctaatttccagtctcgccccggcccctgtcaaccaattgtggggtattgtgtgaatccccttataggcgcccaggcgggaaacgctaactccatccgcaaagggtaataattgaactcggacatcgcccaacggaaattctgccccttggttggcacttggggattaaacccatggccccaaaaaaggggggccgggaggtaaaaataaccattcttggccacagggccacccaatttagaatctggggggaagagcggaacaactctgcgctccgggggtataagccccgcaataacccgaatattttttgattcctgccctttcaccccggtttaaagaggggaacaaaggtctttggtgatttttcaaccggggaaacaaaaacctttgtatcccatatacaaagttgtgtggggaattctctcccacgctagcacgcggaaaacgcgggccccgttgcgccctctctccaccctcccaaggacaaaaacgaganacgcgcttttctgggcgttttggggccccacaggggggaacaaaagacccgagag

SEQ ID NO: 231422 - DNA, 524 bp, Homo Sapiens
  misc_feature (121)..(121): n is a, c, g, or t
  misc_feature (123)..(123): n is a, c, g, or t
  misc_feature (129)..(187): n is a, c, g, or t
  misc_feature (304)..(313): n is a, c, g, or t
  misc_feature (321)..(329): n is a, c, g, or t
  misc_feature (396)..(404): n is a, c, g, or t
  misc_feature (414)..(418): n is a, c, g, or t
  misc_feature (420)..(420): n is a, c, g, or t
  misc_feature (428)..(428): n is a, c, g, or t
  misc_feature (432)..(432): n is a, c, g, or t
  misc_feature (435)..(437): n is a, c, g, or t
  misc_feature (439)..(441): n is a, c, g, or t
  misc_feature (460)..(473): n is a, c, g, or t
gggaaagaaacagactgcaaggaacagagttgagtgtctggagtcatcaaaggcattaaaaactccagtaaaagctggggccgtagcaaaaatcatgaaaaacacttcaacgtgggtcctntnttcccnnnnnnnnnnnnnnnnnnnnnnnnnnnnnnnnnnnnnnnnnnnnnnnnnnnnnnnnnnnggggtggggttagatttaaatggaaaaaatggggtttttaccttccaaatattaacctcctccttaaaccccttttggaaatccttgggagagcccggaaacccccaaccaaaaaannnnnnnnnnaaaaggannnnnnnnngcgattgggggggctaaataaaaaactcccagggggaatttcccccacaaaaaaagggccccccccnnnnnnnnnggggcccccnnnnnanaaaaaaanaaanaannnannnttgtgtggggggccccttnnnnnnnnnnnnnnaaaaatttttttaaacaccctttttttgggggggccgggcgccccccaacc

SEQ ID NO: 231423 - DNA, 1009 bp, Homo Sapiens
  misc_feature (178)..(178): n is a, c, g, or t
  misc_feature (183)..(200): n is a, c, g, or t
  misc_feature (354)..(399): n is a, c, g, or t
  misc_feature (485)..(548): n is a, c, g, or t
  misc_feature (619)..(619): n is a, c, g, or t
  misc_feature (699)..(699): n is a, c, g, or t
  misc_feature (705)..(826): n is a, c, g, or t
  misc_feature (830)..(830): n is a, c, g, or t
  misc_feature (837)..(837): n is a, c, g, or t
  misc_feature (860)..(860): n is a, c, g, or t
  misc_feature (866)..(866): n is a, c, g, or t
  misc_feature (884)..(885): n is a, c, g, or t
  misc_feature (896)..(896): n is a, c, g, or t
  misc_feature (902)..(903): n is a, c, g, or t
  misc_feature (916)..(916): n is a, c, g, or t
  misc_feature (923)..(925): n is a, c, g, or t
  misc_feature (929)..(929): n is a, c, g, or t
  misc_feature (931)..(931): n is a, c, g, or t
  misc_feature (933)..(933): n is a, c, g, or t
  misc_feature (957)..(957): n is a, c, g, or t
  misc_feature (967)..(967): n is a, c, g, or t
  misc_feature (983)..(983): n is a, c, g, or t
  misc_feature (985)..(985): n is a, c, g, or t
ggctaaaaataacatgtaattcagtaatatctagttttgcagttacttttaaatgcatttaaaagattcctcatgtagagtgatatcctaatatccttgcattgttttctgagatgccggtttttagtatttcttatttttggtgttatgttttgctgtattccagcagagctcttanagacnnnnnnnnnnnnnnnnnntcataaatcttattttgtcccaagcttactgttttagctattcatgttaaattaagaaaaggcttagtgggttaaaattcccctggttttactggtaaacttgattttgactttaaaaaaagcaagggtatgggctgggggttaagtttggctnnnnnnnnnnnnnnnnnnnnnnnnnnnnnnnnnnnnnnnnnnnnnncgggattttccctctttaaacggacgcgcacccgagaagaaacaaagaaacccttttgtggggccgcgccttcgggccccccccgnnnnnnnnnnnnnnnnnnnnnnnnnnnnnnnnnnnnnnnnnnnnnnnnnnnnnnnnnnnnnnnnaaagaggtggaacacgtgtgggcccacataacccgtggtttctcccccaaagaaagaaaaatctcctgggngactatgagaaacacaaagcgggccgttggtggaatctttctccccccacaaaacagaaaaagagggctggtgggagtgnagatgnnnnnnnnnnnnnnnnnnnnnnnnnnnnnnnnnnnnnnnnnnnnnnnnnnnnnnnnnnnnnnnnnnnnnnnnnnnnnnnnnnnnnnnnnnnnnnnnnnnnnnnnnnnnnnnnnnnnnnnnnncggncatggcnccgtgtgtgtgtggtggtggtgntgctgntgctgcagtggtgttggnntggggctggcntggtgnnaggttgtctggcntggtggnnntgcncnantggtgccttgtgggtggctgggcntgggtgaccntggtggctgcatgcancnaggcatcacctggagaaggtctgt

SEQ ID NO: 231424 - DNA, 1019 bp, Homo Sapiens
  misc_feature (115)..(132): n is a, c, g, or t
  misc_feature (161)..(161): n is a, c, g, or t
  misc_feature (168)..(212): n is a, c, g, or t
  misc_feature (289)..(352): n is a, c, g, or t
  misc_feature (369)..(377): n is a, c, g, or t
  misc_feature (385)..(436): n is a, c, g, or t
  misc_feature (460)..(471): n is a, c, g, or t
  misc_feature (477)..(479): n is a, c, g, or t
  misc_feature (492)..(495): n is a, c, g, or t
  misc_feature (502)..(536): n is a, c, g, or t
  misc_feature (600)..(601): n is a, c, g, or t
  misc_feature (604)..(604): n is a, c, g, or t
  misc_feature (612)..(620): n is a, c, g, or t
  misc_feature (627)..(627): n is a, c, g, or t
  misc_feature (631)..(631): n is a, c, g, or t
  misc_feature (664)..(664): n is a, c, g, or t
  misc_feature (671)..(671): n is a, c, g, or t
  misc_feature (710)..(710): n is a, c, g, or t
  misc_feature (754)..(754): n is a, c, g, or t
  misc_feature (840)..(840): n is a, c, g, or t
  misc_feature (930)..(930): n is a, c, g, or t
  misc_feature (1000)..(1000): n is a, c, g, or t
ggggagccaaggggaggaggagaattggaggaaggggagataatgggaagaggatggcgccttcctgagttggctagagggccaacctttgataacagtttgacgaaatcaatcnnnnnnnnnnnnnnnnnngagacagagtctcactctgtcacgccagngcatggnnnnnnnnnnnnnnnnnnnnnnnnnnnnnnnnnnnnnnnnnnnnncaggttcatggcattctcctggccccagcctctcttgagtagctggaactaaaaggggccccgccacccacggccannnnnnnnnnnnnnnnnnnnnnnnnnnnnnnnnnnnnnnnnnnnnnnnnnnnnnnnnnnnnnnntgcgagatttcttaatnnnnnnnnnggggggtnnnnnnnnnnnnnnnnnnnnnnnnnnnnnnnnnnnnnnnnnnnnnnnnnnnnttctgcctcctttttccccccctnnnnnnnnnnnnccagcnnncctacgaacgggnnnncgcgcannnnnnnnnnnnnnnnnnnnnnnnnnnnnnnnnnnttttaccaccggggggcggggaggtagtttaaacaacggccagcggggcggcgcccggcgcccnnccntcataggnnnnnnnnnggagaanaccncgccggaggcgcgtttttctgtgttttggatcnctgtgcnacgaggccaagggaagagatagtttatttttattattancctcccccacacccaccgcgtgcgggtggagagggggagaatgngcgtggctggcctccggctgctgggaaaaacagagaaaaacacgctcggtcgctgccgttcgtgcccgcgccaccccctgtctgtngtgggtttagggagaaggagagggaccgcttcccacccttatgtgtcctcgccctcaagaggagaaagggacataagcatcactgcctcncgcgccccccccactcgaccgaacacgccgcgcggccgacggacgccggcgcgcgggcagggcacgagcnaagacgagggcaaatctca

SEQ ID NO: 231425 - DNA, 727 bp, Homo Sapiens
  misc_feature (325)..(552): n is a, c, g, or t
  misc_feature (554)..(556): n is a, c, g, or t
  misc_feature (558)..(560): n is a, c, g, or t
  misc_feature (562)..(570): n is a, c, g, or t
ggggagcagaatggtgccattgcagatcaacacgcactttaaataatcaaaacccctatctttcccctgggaaggaggaagccgaggaaggctgtgtttctgactcacacgggggagtcgggggagtcgtaaacaaccctgaagagaacagccaggcctgttcccgcaagcccagacaatgccggtggaggaatttgtggctggctggatctctggtgagacatttttcttccttctgtcacatcacacccaatggtaggtcacttcctcgggaagatgggtgacatgggaggagcagagaccaaagtctgagttccggcctgcnnnnnnnnnnnnnnnnnnnnnnnnnnnnnnnnnnnnnnnnnnnnnnnnnnnnnnnnnnnnnnnnnnnnnnnnnnnnnnnnnnnnnnnnnnnnnnnnnnnnnnnnnnnnnnnnnnnnnnnnnnnnnnnnnnnnnnnnnnnnnnnnnnnnnnnnnnnnnnnnnnnnnnnnnnnnnnnnnnnnnnnnnnnnnnnnnnnnnnnnnnnnnnnnnnnnnnnnnnnnnnnnnnnnannnannnannnnnnnnnaacatgtcgggccgcctccgggcctcgaaaaacttttctagaccctttcgttttggcgcgcggggccccctaaggtaaagggaaactgggccataagctgttttccaaaggaaaatcctgggcccatggactagagggtttgggattccccaccaat

SEQ ID NO: 231426 - DNA, 780 bp, Homo Sapiens
  misc_feature (57)..(201): n is a, c, g, or t
gggagagaagaggctgtgcttcggcgctccggctcctcagagagcctcggctaggtnnnnnnnnnnnnnnnnnnnnnnnnnnnnnnnnnnnnnnnnnnnnnnnnnnnnnnnnnnnnnnnnnnnnnnnnnnnnnnnnnnnnnnnnnnnnnnnnnnnnnnnnnnnnnnnnnnnnnnnnnnnnnnnnnnnnnnnnnnnnnnnnnggttgctccttgagggcaggacagttcttatggctttatccgttgcgtaagcacagagaggtctgcgaggtcaaaactattgtcatgatagcaagatgcctgtctttttcatttattctcacggtgtgcacaggctacatgatgtgtgatgacatcctcattgatgttaatgaatggggctatacttgaattttctaaggtgtcattaggtagggttaggtatgcatacttgtttttagaaattattttgttcctttttcccatttttagaaatcaactcattttttaggttatgccttccgtaatctttgcaacctcaatattggggaatggctactttaaaaaactgcagttttctttgcgcctaaagtattaacataaggtaaccatttttggctgcttggttttgcaaaaagggggtttaaaatatttttccccaaaaatatccccacaatttaacaaaaatttcctaacaactttttagcaaatctgtaattaaaaatttaaattcctgggaaccatcccaatgtagggacctaataccggctggcacgcgacatcacctcctttgggttcgcc

SEQ ID NO: 231427 - DNA, 1282 bp, Homo Sapiens
  misc_feature (704)..(704): n is a, c, g, or t
  misc_feature (882)..(882): n is a, c, g, or t
  misc_feature (995)..(995): n is a, c, g, or t
  misc_feature (1005)..(1005): n is a, c, g, or t
  misc_feature (1023)..(1023): n is a, c, g, or t
  misc_feature (1035)..(1035): n is a, c, g, or t
  misc_feature (1140)..(1140): n is a, c, g, or t
ggggtgtctcttttgacctttaccccttcacctcctcctctcttcttctgattcccctcccccccttttttaaagagtttttctcctttctcaaggggagttaaactagcttttgagacttattgcaaagcattttgtatatgtaatatattgtaagtaaatatttgtgtaacggagatatactactgtaagttttgtactgtactggctgaaagtctgttataaataaacatgagtaatttagcaccaggacctgcaagaggcgacgctccactggacaaactcctcgcaaacgcaaatatgccaatcgccacgattcacgaaatgaacctgaacctcggaacctcctgtgctgcaagagcctttgggttcccggcatcgccctgtggcgcgatctccatcccgtcctcgccggtccgccctcgcccgggacggacctgcatacaagcgcgaagtacgagtattcatgaaacgatgttccgcttacttcgccgccgccgggctccccctctatacgaggtgggagcctactgttacggtccaaattcccccaattcctaggggaccatcccgcggaaacgtgctttggcaagcagcccttgcgccggggcgagtccactgtcatcgtccccctagaatgccacgcacgcacccattctctgtaatccacactgccggcccccttccccacattaccaatacgntcctccccgaaactcttcccctctatgatggcgggctgcgtccttctgcggtaaaaccccgagggacgcgcaacacacacacggcgcccaccgtctgttatccccacctctttggtacccctctttccgcagaagcacgccttgtgagccttctccggtacgccgccagtgtctgtantaataagaattgctagccacacccatgctcgttgacagcgctgcggaacccgccacactatagttggctaacaccggcgctgccgggccatagatgatataagccccgcccgntcacacaagncggaggttataggtgcgngagactcactcntcaccgctcccattgcgcgcgcggctcggccgcctccccccaacacttatcccacgctcccccgccgcctccctacttataccccccgtgaccctgggcatacgntttccgcgacgctcaaacaacaaagctctgactcagaggaaattaacccaccacagcgcccccgcggatcgaacggtcacgaaggctttacatgatcagcgcatcggccgcggcgacgcagcctgtgatcgagaccacgcgg

SEQ ID NO: 231428 - DNA, 879 bp, Homo Sapiens
ggtaggaagcctaaagtctgtggaagctattctagaagaaagcactgaaaaactcaaaagcttgtcactgcagcaacagcaggatggagataatggggacagcagcaaaagtactgagacaagtgactttgaaaacatcgaatcacctctcaatgagagggactcttcagcatcagtggataatagagaacttgaacagcatattcagacttctgatccagaaaattttcagtgtgaagaacgatcagactcagatgtgaataatgacaggagtacaagtccagtggacacggatattcttagctccagtcatagcaatgatacttcggtgcaatgcacactatgctcagatccctttggctaatggacttgactctcacaggatcacaaggtaggaccgccctgcaacacacggctcccaccccctcctgtcgggccgcttctggaccttcaaaaaagttttctaaaacccatccgctttgggccgccccgcgtccccatccaggtaaacttggacacctgggaccaataaggcctggttggtccctaggggaagaatccccgggggcgcattggggcgtacggggggcgtggcgcatttcccccacccccattcatagcccgccgttcgcgcggtgggcgcaagcccggcagggggctcgttaaaacccaattccccgttagggcaagtttctgtaggggacctattcaccgggaaaccgtcctgacacgcgtgccgtcccaaacggggaggcaccatatacgcaatattgtaggcgcgcgcgcgctggagaagagccatggacagaaaaggggggggcacattctctttaccggtattccgcgccgagaattgggtggccccctcacccaacgggg

SEQ ID NO: 231429 - DNA, 723 bp, Homo Sapiens
  misc_feature (263)..(677): n is a, c, g, or t
gggactacagcccaagtgacgatcaaggaaggtgtctgtaaggaaatgtcctgaagaggtgacatgagtgagggagatttaactgtgtaacaatttgggggaagaattccagatggatgccaaggccttaaggcacatccccaagaacttcacaatgttctcatgtgctgctcacaacaatcctatgaggcggatactgacctcactctacagatgaggacatcgaggcttagggagttcatcggccaaggcaaccagctgtnnnnnnnnnnnnnnnnnnnnnnnnnnnnnnnnnnnnnnnnnnnnnnnnnnnnnnnnnnnnnnnnnnnnnnnnnnnnnnnnnnnnnnnnnnnnnnnnnnnnnnnnnnnnnnnnnnnnnnnnnnnnnnnnnnnnnnnnnnnnnnnnnnnnnnnnnnnnnnnnnnnnnnnnnnnnnnnnnnnnnnnnnnnnnnnnnnnnnnnnnnnnnnnnnnnnnnnnnnnnnnnnnnnnnnnnnnnnnnnnnnnnnnnnnnnnnnnnnnnnnnnnnnnnnnnnnnnnnnnnnnnnnnnnnnnnnnnnnnnnnnnnnnnnnnnnnnnnnnnnnnnnnnnnnnnnnnnnnnnnnnnnnnnnnnnnnnnnnnnnnnnnnnnnnnnnnnnnnnnnnnnnnnnnnnnnnnnnnnnnnnnnnnnnnnnnnnntagaagaaaccaaataacttcatcacacttccccctaaaaaccctg

SEQ ID NO: 231430 - DNA, 715 bp, Homo Sapiens
gggggaggaggaagaggacacagaggccctgtagccaggcaccaagatccctcccaggtggctgggtctgaggggaactccgagcagccctaggtcctcaaagtctggatttgtgtggaaaaggcagctctcacttggccttggcgaggcctcggttggttgataacctgaggaccatggatgctgatgagggtcaagacatgtcccaagtttcagggaaggaaagcccccctgtaagcgatactccagatgagggcgatgagcccatgccgatccccgaggacctctccaccacctcgggaggacagcaaagctccaagagtgacagagtcgtggttacatatggggctgatgactttagggatttccatgcaataattcccaaatctttctctctgttggaattgtgactatcttctcacacaagcggctacttggtcttgatgccttcccccgcaaaacagcaaccaaactgttctgggccaatatcaccaccttgtggtcatgatgaagaattgccccctttgccctcaacacctcttttcttcttgaaaattaaaaacaacccctttcaccccctctactgtccttattccagtttgtgtccgtagttgctggaggaaagaaaatgcctattgctcttttttttattctctttatctggttactcttctgcctttcttttctctccctgacttcatttccattaaaggct

SEQ ID NO: 231431 - DNA, 464 bp, Homo Sapiens
  misc_feature (221)..(333): n is a, c, g, or t
  misc_feature (341)..(354): n is a, c, g, or t
ggctatgtacttttttttataaacttagttttagactatgttgtaaaaatgggaaggttgtaaactatgttgtaaaaataggaaatgtggcttaaaatatatacattatattgtttcaggattttgtcagtgtttaaagaaccaatgttcatctttgtatttatatacatgatttaaattttgtctaaaattttaaataaaactgcagtgatttatccttnnnnnnnnnnnnnnnnnnnnnnnnnnnnnnnnnnnnnnnnnnnnnnnnnnnnnnnnnnnnnnnnnnnnnnnnnnnnnnnnnnnnnnnnnnnnnnnnnnnnnnnnnnnnnnnnnttggcggnnnnnnnnnnnnnnaaaaaatttttaaaacctttttttgggggccgggcccccaaaaggaaaggaaaagggccttaattttttccaaagaaaatcggggcaagaaaaagggttggatttccccc

SEQ ID NO: 231432 - DNA, 768 bp, Homo Sapiens
  misc_feature (130)..(166): n is a, c, g, or t
  misc_feature (631)..(631): n is a, c, g, or t
tcccccacccctggcaacaaggaaaaaacgggttctcgtggtgggcgtggggccctccccacaagaaaaacactccgaacgaaactttaacccggggcggcccggcccccgaacgggaggggttaaaatnnnnnnnnnnnnnnnnnnnnnnnnnnnnnnnnnnnnnaagccttcgtgatgctgggttacgtccgccaaacaatgcaacgctccctcgcccggaatccgggtcctcttttgctaaccacccaacagaagggccggctgatccgagagggtcccctccgcgccacccgggctcgaaattaaaagccggcgaaaccgggcgaatggccgcaatatcttttaaaccctctcccgcccccccctcctgtggaacaaacatctgttcggccagcggcgcgggggataaaaaaacgtgtgaacacaagcgccggcgggcggcgcagcagtcgcgcccacgacctccccctaccgtacgtgacgcgatctggcgggccacgaaccagagcggacgcggagcactcccccacccaaacgcccccccttgtgctccctaatacccaccgccttcactaccgcgccacccagggtggcccccccttatcgccggagatctattccccacggntcgcaccccacggcgagaaactatcccgccgcgcgagagaaaggcctcctccgcgaccaaacggtggccgggggccgtgtttccaccgccacagaacacccgtttccatgagagcattttccaccgtgaagaagggg

SEQ ID NO: 231433 - DNA, 1015 bp, Homo Sapiens
  misc_feature (227)..(237): n is a, c, g, or t
  misc_feature (294)..(350): n is a, c, g, or t
  misc_feature (502)..(525): n is a, c, g, or t
  misc_feature (899)..(899): n is a, c, g, or t
  misc_feature (975)..(975): n is a, c, g, or t
ggcagctccctggcttctgtggggcccctcacctacttacccaggtgggtcccggctctgtgggtgatggggaggggcatggctgactgtgtatataggataattatgaaaagcagttctggatggtgtgccttccagatcctctctggggctgtgttttgagcagcaggtagcctgctggttttatctgagtgaaatactgtacaggggaataaaagagatcttannnnnnnnnnnatacttggcgttttttgatgaaaaaccttttgtcttaacaaagaaaacaaaaccccnnnnnnnnnnnnnnnnnnnnnnnnnnnnnnnnnnnnnnnnnnnnnnnnnnnnnnnnncatggtcggccgcctccggcccttctgaaaactttttctaaaccctttctttttggccccccgggccccacgtagggaacgggaacacatggcccttaccttggtttcccaaggaagaaccctggcccagtgactaaggcgtttggaatctnnnnnnnnnnnnnnnnnnnnnnnngcggcgggcaacccgaaggggttttctgaaacaaatttcccaaatgggacgttctccggaggggcctcttcacgtgggatacttattcaaaacggggagttctccaaggccgaggcttcccaatatatcaaattttagcgccccccggcccggtggccactctttaatcgcacacagaactgggctggcgtaactcccctttagacgcccattccttgcgccgaaaatggggaaaacccccttccacaaaacccgccaagtggattgacacccttgaactccgcccgcgcggagcattccagcccaccccttgtttgccctctctggccatacataaatattctttccgccctaggtgggggaaaaacacgggngggtcgtcaacaaaacactgctggcttccattcatggaggccccacgcgtttataaaaatccacacacttgtgggngagaacaactctcctcccaagcgattgtctggttttgaaa

SEQ ID NO: 231434 - DNA, 368 bp, Homo Sapiens; identical to SEQ ID NO: 32810

SEQ ID NO: 231435 - DNA, 663 bp, Homo Sapiens
  misc_feature (288)..(288): n is a, c, g, or t
  misc_feature (321)..(321): n is a, c, g, or t
  misc_feature (506)..(576): n is a, c, g, or t
ggactctcacaaggttaaatctttaacaagagcctcatgtttgttaggagaaggtgggaccccagcccaagcacttccccattgcagcctggcatgaaatctttgccttttagtggggatcactcctgcccgagtcctggctgtggtggggactctgcaagttgctaacccagcgtccatttctctttcctccgtactaacagaaccccggtgcctctgcccagttccaatagcgggcagacgagagccatgtcccggggctccccttgccagccgggggtgtgcaancttgtggcctggaaggtgggttgggtgcttggnaaaaaactttgcagggaaagcctcccttgtgaaaggggaactcaacttgccccaattgagggacccctttcccccttttggcctttttttccctgcccggggaaaacatggaattgtgaaaggggcttgggggccctgggaaaaaaccttgttccctttaaaaaaccttgagggaaaaaggggtnnnnnnnnnnnnnnnnnnnnnnnnnnnnnnnnnnnnnnnnnnnnnnnnnnnnnnnnnnnnnnnnnnnnnnnggccctttttggtttggaaccccaaaaaacccccggggaaaaaagaaaaccccttggggcccctcttttggtttggaaccaaaaaaa

SEQ ID NO: 231436 - DNA, 292 bp, Homo Sapiens
  misc_feature (114)..(173): n is a, c, g, or t
ctatcctctctctctcgctctcttgttttgtgttgtctctactcgtgtgtcctttccacctgatgttttttttgcctccaccagtttttacttctgcctccctcttcttttgtnnnnnnnnnnnnnnnnnnnnnnnnnnnnnnnnnnnnnnnnnnnnnnnnnnnnnnnnnnnnatatgtacgtctttgtctaccacttctactttatcatttcttttcttactgtcgcttgcgccgctgtctctgatatttctccctttgccgcgctctatttctttccgtctcctcttttg

SEQ ID NO: 231437 - DNA, 866 bp, Homo Sapiens
  misc_feature (283)..(308): n is a, c, g, or t
  misc_feature (489)..(489): n is a, c, g, or t
  misc_feature (717)..(717): n is a, c, g, or t
tatgcgtaacttccctcaaagcaacgaccatttacccctccttttcaaactagagaataaagatttggttttagaaaaccgaaaccccatatgaaaacaacagaacaagaataaacgcccgcagatctaaacaaaaaaaacatagaggattgactcgtccggcgccctcactttttgacatcgcttttttgggccctctgccccccccaccaaacctcaacccgggttgaagtgcgggtgtccaagggacgatccactatcataaactcgggccctaggcctnnnnnnnnnnnnnnnnnnnnnnnnnngggaaaaatcctctggggcccccacaccccacatgccccgagggacagatcccgaagggcgatctccccgagagatcatcataaaccggggatttctagagacccagacgccctggtattgttaactgtaccggctgctgcaattatggcgcccccccagtcaaagcgaaccggatggggnaatatcattttagctgccccactggccgccaaactggatagcccctattattgggaacctcctctcatacccaacttccacatctgccgctaaccgtgaaacaccaccacccgtggttcgccccagttcgccacctcccgcccttttgcctccacgcgctgtacccacgccgtgtggcggaacaaacctcgccgacattgacacaaagtgcctccctcttgttgatcnctcccacgcgccggacaaactagcctcgcccccagtgaacatccaggccccgcagggcggatcatggaccatataccttctctgcatcaccggcctccctatagacacacactcccgctctgctgagtgatatacacgcccgccagggc

SEQ ID NO: 231438 - DNA, 231 bp, Homo Sapiens
  misc_feature (68)..(188): n is a, c, g, or t
gtgacagagggaaacaatatttgcaattcatagagcagatacagggttcatattcctaatattaaaannnnnnnnnnnnnnnnnnnnnnnnnnnnnnnnnnnnnnnnnnnnnnnnnnnnnnnnnnnnnnnnnnnnnnnnnnnnnnnnnnnnnnnnnnnnnnnnnnnnnnnnnnnnnnnnnnnnnnnnngagtcttactcctaagaaaaattcacatttaaactactctggg

SEQ ID NO: 231439 - DNA, 1239 bp, Homo Sapiens
  misc_feature (502)..(502): n is a, c, g, or t
  misc_feature (608)..(608): n is a, c, g, or t
  misc_feature (624)..(624): n is a, c, g, or t
  misc_feature (628)..(628): n is a, c, g, or t
  misc_feature (630)..(630): n is a, c, g, or t
  misc_feature (635)..(635): n is a, c, g, or t
  misc_feature (644)..(644): n is a, c, g, or t
  misc_feature (648)..(648): n is a, c, g, or t
  misc_feature (659)..(659): n is a, c, g, or t
  misc_feature (751)..(751): n is a, c, g, or t
  misc_feature (759)..(759): n is a, c, g, or t
  misc_feature (775)..(775): n is a, c, g, or t
  misc_feature (777)..(777): n is a, c, g, or t
  misc_feature (779)..(779): n is a, c, g, or t
  misc_feature (781)..(781): n is a, c, g, or t
  misc_feature (887)..(887): n is a, c, g, or t
  misc_feature (918)..(918): n is a, c, g, or t
  misc_feature (946)..(946): n is a, c, g, or t
  misc_feature (951)..(951): n is a, c, g, or t
  misc_feature (1017)..(1017): n is a, c, g, or t
  misc_feature (1062)..(1062): n is a, c, g, or t
  misc_feature (1066)..(1066): n is a, c, g, or t
atgagccaccacgcccggcctctcctagtcttttacgatcgtaacaccactataaagcacataagactagagtctacccccactgtgtacgacctcattgcagaaacgacccccttcgatcccctacactagacggacaaagatcacccgtgcatgtctgaacaaactgagcacgtgtatgtgcaagctcacctccctccagatcccacacaaccccccgttgggccgttgtccgtccacccgccttgcccatcatgcacctcccctccccgtaaactcggctcccccacacactcccacgccacgtacatattgtgcccgcgatatattaatggacaagtgtgctagaatctcgcccactcccctatcacatgccaccacaccagacgccacgtactaatccatggaaccgcacgcgcgcactacacaccactctcactgggagatcccccgccactaacacaactgtgactgtacccgcgccgccacacacacctcgtgncatgcgcacctgcggtcatacacacacagcgcgcgcgcgatatattgcggccacccacactctcttgctgttcacgccacactgctatataaatacagtgcactcncttgagcgacgcatcnattnancgtanatgatgccnccgnttcatacatcntctgtctacatcggcaacatccgactgagactcctgcgagccacacaacactagagcgtagctcccatcgcacgtgctccggatcactaatntcagcctntcgctaggcttgttangnanangagagcaagatacgtactgcgaatcaccgcgcgctgtcatcatgtctcacgccgtgaccagatgcgagtgagccaaaccatgtacctcgcccagacgtgagatagngagggaacagaacctcgtcatacactgcacncacacgcgcgcccgagcaagatcaacgntatgntagcacatctctgaagtacctgaccatcattcaatcagatctctgtacgctatctcgcgatgtgcnctcgctcacctatgacatacacacgcacgcgcacagatactgaancatncacgctcatagacacaccatagagtagctgacggaatctctaccccccccatcacccgcatgtactccggcccccccacgcgtgcagtgcaccccctctatctgacacaccacaagtggccgtgaccagtgcagcgcacacacgatcgaggcacctacaccaccgccctcccc

SEQ ID NO: 231440 - DNA, 295 bp, Homo Sapiens
  misc_feature (41)..(49): n is a, c, g, or t
  misc_feature (73)..(94): n is a, c, g, or t
  misc_feature (111)..(206): n is a, c, g, or t
  misc_feature (221)..(230): n is a, c, g, or t
aaaaaaatttttaaaaacttttgttgggggcccggcccccnnnnnnnnngggaagggggccaaggtttttccnnnnnnnnnnnnnnnnnnnnnnggggttggtttcccccnnnnnnnnnnnnnnnnnnnnnnnnnnnnnnnnnnnnnnnnnnnnnnnnnnnnnnnnnnnnnnnnnnnnnnnnnnnnnnnnnnnnnnnnnnnnnnnnttaaaattaaaatannnnnnnnnnggccccttttggggagagggggggaattctttaaaccttccgcgcaaagggaacccctcccaaaa

SEQ ID NO: 231441 - DNA, 567 bp, Homo Sapiens
  misc_feature (180)..(358): n is a, c, g, or t
  misc_feature (471)..(497): n is a, c, g, or t
gggagaaatcgatgatggagaaatagacgatgatgacctggaagaaggtgaagtgaaggaccccagtgacaggaaggtgaggcctcgtcccacctgccggttcttcatgaaagatgttgtgacaccattatccactcttcttccaccaatatccaattccataccattcagaggccaggnnnnnnnnnnnnnnnnnnnnnnnnnnnnnnnnnnnnnnnnnnnnnnnnnnnnnnnnnnnnnnnnnnnnnnnnnnnnnnnnnnnnnnnnnnnnnnnnnnnnnnnnnnnnnnnnnnnnnnnnnnnnnnnnnnnnnnnnnnnnnnnnnnnnnnnnnnnnnnnnnnnnnnnnnnnnnnnnnnnggagcacagaaggccacaggtccacagagacagaaagcagattgtgactcacgccgcaacgtggacgagccttgaagacgtgctgagtgacagaagggagcacggaaggccannnnnnnnnnnnnnnnnnnnnnnnnnngtgactcatgccacaatgtggacgagccttaaagacgtgctgagtgacagaaagggagcacagaaagcca

SEQ ID NO: 231442 - DNA, 1014 bp, Homo Sapiens
  misc_feature (827)..(827): n is a, c, g, or t
  misc_feature (908)..(908): n is a, c, g, or t
  misc_feature (921)..(921): n is a, c, g, or t
  misc_feature (935)..(935): n is a, c, g, or t
  misc_feature (946)..(946): n is a, c, g, or t
  misc_feature (953)..(953): n is a, c, g, or t
  misc_feature (960)..(960): n is a, c, g, or t
ggggcagccagcctgggaaaggaaacactcaggccactaggtcagagaggctgctttccttgctttgctacccaaatcctgtgtggcctgaagcaagactgggcttcaactaactccctcaaaaggagcagatctgatctgtttcaatgccactttgatggtgatgggaaggtaggaccggagctttactgggaaagcggctctctataggtaaggaagaggctgtggtaatttgtggtttaacaagaatttttattagttctcagaaaacacagatgcttatcagaaaacatccacgaaaactggctatattaggaggggagctgtcaatctgaaggcttttcaacaattgtgacaatggtgcacctacgactgctgtggaataaaaaaaccacacccagcctgggccgggccgcggtgggctcaccacctgtaatccctaacacctttgggaagggccgaaggtgggtgtgaatggcctggagctccgggagttttgaagaaccagccttgggggcaacccggcggaaaaattcccttcttcctacctacaaattaccacccaaacattttgcctcaaggccgcgggccgcgcccaggctccccctggaagtcgcccccccctacccttggggcaaggcctggaaaccaccaaagaacttggcctttgaaacccctggcaaaattggaagggctgcgcaacttgaaacccccaagattgggcacccacactgggcacctccccaagcccttgggcgcggaaacagggggaagaatctccggggtccctcctcgcccgaccccagcggaccccactgcgcccacgnatagaaacaacaagcctgtggtcggggcgccgctctccttcggggggccctcttgtaagaagaaacctttttctctgaaanaccctgtttccgncttttgggagcgcnccgaggagggnccccccncctcagngtgctacatgcgggaaacacccggtggggcgtcaataagagcgttgagctatcg

SEQ ID NO: 231443 - DNA, 844 bp, Homo Sapiens
  misc_feature (517)..(517): n is a, c, g, or t
  misc_feature (733)..(733): n is a, c, g, or t
cccggggcgaaacttttttttacaccctctttcttttgtgcgcgggtgggaacctccgtgggtgttctcgtgtgtggattggtccgggtcgccggtccattccgtttctgctgccttccgttttttctggcgccgtcttcgtttctttcttgtcctcttgttttgtttcgggcggccttctgtttgtcctgttcgtgtctggattctccttggtttttttcttccttttgccgcgccgtgcgttttcccgtctctttctttccgtttttctctagcccctgggtttgctgtttcgggttcggcctccgggtcccttttctgttttccctttccgtgccccgtgttgttctcgtgtcttccccccccttgtattttctttgctttttcctcgccgggcctcgcctgcttctttccgcgtctttttgttttgtgccttcctcttcgtgtcccctctgtttgtttcgtttcccccgccctgttttttttctttcttctgtcccttgtgcgcccactgtcncgttcccgtttactgcttttgtcgtttttgtcgcgccgctttttgttctcctcctcccggtggtccttttgtttgctgttgtgtggtccgcccgttcatattgttttcttttgcttcgtccttcttcccccctctctggcgccactccgctggttttttctcttgtgcctgatcgtcctccgtcgctgcctggttatccactactcttttgtcgcncccactcatcgttttggtaccctctcctctcccccgctctttctcgtccctctcctttcgccttctgtggcgtttcgcgcgcgtttctttcagtatgtcctccgcgccccc

SEQ ID NO: 231444 - DNA, 1025 bp, Homo Sapiens
  misc_feature (181)..(248): n is a, c, g, or t
  misc_feature (268)..(473): n is a, c, g, or t
  misc_feature (476)..(533): n is a, c, g, or t
  misc_feature (609)..(659): n is a, c, g, or t
  misc_feature (737)..(777): n is a, c, g, or t
  misc_feature (802)..(813): n is a, c, g, or t
  misc_feature (868)..(868): n is a, c, g, or t
  misc_feature (874)..(874): n is a, c, g, or t
  misc_feature (895)..(895): n is a, c, g, or t
  misc_feature (967)..(967): n is a, c, g, or t
ggtggggtctggaatttggccccaaaccagagaatgtaccttaagggggagggctagtgtgggggagggaggcttccccagccttaagagaccctctcagcccagtgactgtccccaaacccaagtctcctggcaggaactaaaacctcagccccactctctcacaccatgtggaatctcnnnnnnnnnnnnnnnnnnnnnnnnnnnnnnnnnnnnnnnnnnnnnnnnnnnnnnnnnnnnnnnnnnnnacgggtggtgggggggagtnnnnnnnnnnnnnnnnnnnnnnnnnnnnnnnnnnnnnnnnnnnnnnnnnnnnnnnnnnnnnnnnnnnnnnnnnnnnnnnnnnnnnnnnnnnnnnnnnnnnnnnnnnnnnnnnnnnnnnnnnnnnnnnnnnnnnnnnnnnnnnnnnnnnnnnnnnnnnnnnnnnnnnnnnnnnnnnnnnnnnnnnnnnnnnnnnnnnnnnnnnnnnngcnnnnnnnnnnnnnnnnnnnnnnnnnnnnnnnnnnnnnnnnnnnnnnnnnnnnnnnnnnagttcgatttgaggtttcttcttccaggaagaggttgcatcctgagcaattttctccaagtttccccaaaaatggnnnnnnnnnnnnnnnnnnnnnnnnnnnnnnnnnnnnnnnnnnnnnnnnnnnccgttttcccccaaacccccttggtcttggtgtttcccaccccccattcccccctcccttgggcgtccttgagaaaannnnnnnnnnnnnnnnnnnnnnnnnnnnnnnnnnnnnnnnntctccaataggggttttctgacatnnnnnnnnnnnngcgtggggccccctggagaaagggccccttccccccttgtgggtaaaaaagaagntcttgnggacatcccccccaccgcganggcgaaccgcgccacaccccctcacaaaccaaacggttatgctcctggttggggcgacgcgcccccccttcngggccctcttcttaaaaaaagaagttgtttcttttataaaacaaatataattctttcg

SEQ ID NO: 231445 - DNA, 802 bp, Homo Sapiens
  misc_feature (79)..(144): n is a, c, g, or t
  misc_feature (175)..(307): n is a, c, g, or t
  misc_feature (310)..(310): n is a, c, g, or t
  misc_feature (385)..(448): n is a, c, g, or t
  misc_feature (566)..(577): n is a, c, g, or t
  misc_feature (641)..(736): n is a, c, g, or t
ggagcaacagcaaatcacgaccactgatagatgtctattcttgttggagacatgggatgattattttctgttctatttnnnnnnnnnnnnnnnnnnnnnnnnnnnnnnnnnnnnnnnnnnnnnnnnnnnnnnnnnnnnnnnnnntggttgccataaaaataaatcagttcatttnnnnnnnnnnnnnnnnnnnnnnnnnnnnnnnnnnnnnnnnnnnnnnnnnnnnnnnnnnnnnnnnnnnnnnnnnnnnnnnnnnnnnnnnnnnnnnnnnnnnnnnnnnnnnnnnnnnnnnnnnnnnnnnnnnnnnggngggcgccccaggcccccgaaaaatttttttaaacctttttatttggggcggggcccccagagggaagggcaccgnnnnnnnnnnnnnnnnnnnnnnnnnnnnnnnnnnnnnnnnnnnnnnnnnnnnnnnnnnnnnnnnaaaagacccgggggggaaaccgaagggtgtttgaaaaaacccccagggggggtttctgggggctcttttggggtatttatacacaggggctcccaagggaagtctcaaaataaaattnnnnnnnnnnnngtgacacttttttccaaagaggggtgggaaatttttaaaaagcttttttcccccacatgggggnnnnnnnnnnnnnnnnnnnnnnnnnnnnnnnnnnnnnnnnnnnnnnnnnnnnnnnnnnnnnnnnnnnnnnnnnnnnnnnnnnnnnnnnnnnnnnnnccggggtagaaacaaggggggggagaaaaaaagtgtgttccactatttggcgccccccgttataac

SEQ ID NO: 231446 - DNA, 829 bp, Homo Sapiens
  misc_feature (50)..(268): n is a, c, g, or t
  misc_feature (270)..(362): n is a, c, g, or t
  misc_feature (417)..(493): n is a, c, g, or t
  misc_feature (526)..(585): n is a, c, g, or t
  misc_feature (767)..(767): n is a, c, g, or t
  misc_feature (802)..(802): n is a, c, g, or t
gggtgtgcgcttgcctttcttttttcgtttaattcacgggctcctggcgnnnnnnnnnnnnnnnnnnnnnnnnnnnnnnnnnnnnnnnnnnnnnnnnnnnnnnnnnnnnnnnnnnnnnnnnnnnnnnnnnnnnnnnnnnnnnnnnnnnnnnnnnnnnnnnnnnnnnnnnnnnnnnnnnnnnnnnnnnnnnnnnnnnnnnnnnnnnnnnnnnnnnnnnnnnnnnnnnnnnnnnnnnnnnnnnnnnnnnnnnnnnnnnnnnnnnnnnnnncnnnnnnnnnnnnnnnnnnnnnnnnnnnnnnnnnnnnnnnnnnnnnnnnnnnnnnnnnnnnnnnnnnnnnnnnnnnnnnnnnnnnnnnnnnnnngtttccccctcctgtgttctttctctgtttctgtcttggctatctttataaatcnnnnnnnnnnnnnnnnnnnnnnnnnnnnnnnnnnnnnnnnnnnnnnnnnnnnnnnnnnnnnnnnnnnnnnnnnnnnngcttgctccccccttgcttcttgtttgtgctcnnnnnnnnnnnnnnnnnnnnnnnnnnnnnnnnnnnnnnnnnnnnnnnnnnnnnnnnnnnngttctctatctcttactgctccttacgtcggtcttcgtcgttttcgcttccttctaccgcgcttcctgtttttttgttttcttctcctcctcgctcctccctctcttacgctctttctgatattgtgttttgtactgtctcattagctcatttgtactgttctcggccacggtccacacgtncgtgagtatcttttttttattgtcttctccgtctngctctctcctcttctcctcttgttctt

SEQ ID NO: 231447 - DNA, 295 bp, Homo Sapiens
  misc_feature (49)..(183): n is a, c, g, or t
  misc_feature (187)..(211): n is a, c, g, or t
  misc_feature (213)..(215): n is a, c, g, or t
gagagatcaccttggcaagccaacctctaataaaggtgggaagatgggnnnnnnnnnnnnnnnnnnnnnnnnnnnnnnnnnnnnnnnnnnnnnnnnnnnnnnnnnnnnnnnnnnnnnnnnnnnnnnnnnnnnnnnnnnnnnnnnnnnnnnnnnnnnnnnnnnnnnnnnnnnnnnnnnnnnnnntccnnnnnnnnnnnnnnnnnnnnnnnnnannnccaatagtggtggcccctccggccccccaaaaagaatttttaaaaacattttgttttgggggcgcgggcccccctagggg

SEQ ID NO: 231448 - DNA, 715 bp, Homo Sapiens
  misc_feature (131)..(257): n is a, c, g, or t
  misc_feature (292)..(311): n is a, c, g, or t
  misc_feature (397)..(405): n is a, c, g, or t
  misc_feature (507)..(516): n is a, c, g, or t
ggcaccctgtgaagcaatcatttcccctcccgtcttcctcctcccctggcaactgctgatcgactttgtgtctctgttgtctaaaataggttttccctgttctggacatttcatataaatggaatcacacnnnnnnnnnnnnnnnnnnnnnnnnnnnnnnnnnnnnnnnnnnnnnnnnnnnnnnnnnnnnnnnnnnnnnnnnnnnnnnnnnnnnnnnnnnnnnnnnnnnnnnnnnnnnnnnnnnnnnnnnnnnnnnnggttttttggtggttcccctgggccccctgaaaannnnnnnnnnnnnnnnnnnnggccggcgggcccctagggaaaggaacgaggggtaatgccttttccaaaggaaacctgtgaaaacatacggtttggatccccccgnnnnnnnnncccccgggggatcccaggggtccggaacaaaccaaaagggggatcccaggtgaaatcccggtaagaatacaggggacccggaggccttcaaaaacaaaatgnnnnnnnnnnttccaattatgcaaaaaagggttgaaccccttaagtattttgcccggcggggaagccacaccaaagggaagaaataacccaaatcggcccaggttaaaaccccctttggcggcccggaaaaaaatatttcccctgggaaaaaacggggagtaaaaaaattttccctttatggccccagtaaaaaattaacgcgggaaaa

SEQ ID NO: 231449 - DNA, 594 bp, Homo Sapiens
  misc_feature (188)..(533): n is a, c, g, or t
gacagggtggagagaagcagggaccattgtcttcctcaggagcgtgacagctgaccccacagaccatgcttgctggtacacactggtcccagacccaggcctgtcggacatcagcagtgtgctaaaaacgtgtaagatgtggtcactactcaccgtgtgtcctatctagttgacatgggtggagtcannnnnnnnnnnnnnnnnnnnnnnnnnnnnnnnnnnnnnnnnnnnnnnnnnnnnnnnnnnnnnnnnnnnnnnnnnnnnnnnnnnnnnnnnnnnnnnnnnnnnnnnnnnnnnnnnnnnnnnnnnnnnnnnnnnnnnnnnnnnnnnnnnnnnnnnnnnnnnnnnnnnnnnnnnnnnnnnnnnnnnnnnnnnnnnnnnnnnnnnnnnnnnnnnnnnnnnnnnnnnnnnnnnnnnnnnnnnnnnnnnnnnnnnnnnnnnnnnnnnnnnnnnnnnnnnnnnnnnnnnnnnnnnnnnnnnnnnnnnnnnnnnnnnnnnnnnnnnnnnnnnnnnnnnnnnnnnnnnnnnnnnnngagtccatgccgagtttttgaaataaatgtgaaattcggatggaacaccaaaaacaccacc

SEQ ID NO: 231450 - DNA, 687 bp, Homo Sapiens
  misc_feature (48)..(149): n is a, c, g, or t
  misc_feature (193)..(223): n is a, c, g, or t
  misc_feature (243)..(255): n is a, c, g, or t
  misc_feature (268)..(329): n is a, c, g, or t
ggtactctgtttttttcatagcacttaacattatccaaaatggtattnnnnnnnnnnnnnnnnnnnnnnnnnnnnnnnnnnnnnnnnnnnnnnnnnnnnnnnnnnnnnnnnnnnnnnnnnnnnnnnnnnnnnnnnnnnnnnnnnnnnnnatattagatatatatattacaattccagtcaaaccattatattnnnnnnnnnnnnnnnnnnnnnnnnnnnnnnntcagtaggtctgtgttctcnnnnnnnnnnnnncagacagggtctnnnnnnnnnnnnnnnnnnnnnnnnnnnnnnnnnnnnnnnnnnnnnnnnnnnnnnnnnnnnnntggtctcaagtgaccttcccacctcacactcccaggtggctgggaccacgggcatgagctaccatgtccagctaatttttattttttgattttccgtaaagatggggtctcactatattgtccagcctggtccttggactcctggcctcaaacaaccctccccccttaactttcccaagtaacctgggattaaaggcattgtggcctcatgccccgctcccggaaattgggcccgagtggtaatttattgacttgggggttcggctccccttcaaaaaacaatgagcaacttccgggtaaccttaataaactgctggaatccccctcagggttccgaattctccaacagggcaagtcc

SEQ ID NO: 231451 - DNA, 946 bp, Homo Sapiens
  misc_feature (107)..(129): n is a, c, g, or t
  misc_feature (133)..(417): n is a, c, g, or t
ggagaagacatatgtggcgtggtggaatggaatggtgactagattcaagaaagagcttcccaggaggaaggctaccaagagaccgaagtagaggcttcagtttcttnnnnnnnnnnnnnnnnnnnnnnntcgnnnnnnnnnnnnnnnnnnnnnnnnnnnnnnnnnnnnnnnnnnnnnnnnnnnnnnnnnnnnnnnnnnnnnnnnnnnnnnnnnnnnnnnnnnnnnnnnnnnnnnnnnnnnnnnnnnnnnnnnnnnnnnnnnnnnnnnnnnnnnnnnnnnnnnnnnnnnnnnnnnnnnnnnnnnnnnnnnnnnnnnnnnnnnnnnnnnnnnnnnnnnnnnnnnnnnnnnnnnnnnnnnnnnnnnnnnnnnnnnnnnnnnnnnnnnnnnnnnnnnnnnnnnnnnnnnnnnnnnnnnnnncccccctcccttcctaacatataccctcaccttggcgggccgcctcggccctcaaaaacgcttttcaaaaccattccgtttgggagacccgggcccccaataagggaaagtggacactggtttcataccttggtttcccaaaggaaaaccctgggactatgaaccctaggggccttgaattcctccacccaattaaaaaaaccgcccggggcgcggaaacccgaagcgtgttcctggaaccaaaatcccaaaatgggagtttcctgaaggcgcctttttactgggcattctttcctccctcggggaaccgccccaatccgactgcctctataatctgaaatttacccgtccccgccctttgcgccacttcaatatccaaagaacttggtctgtaacatttacaccaaagcctttccccgccccaacaccgtgggaaatgccctctccccacacacgcattcttggagagaaccctcttaaaatcccgcaggagcgggatattatgagaaccactgtgccgcagcacttg

SEQ ID NO: 231452 - DNA, 1050 bp, Homo Sapiens
  misc_feature (430)..(510): n is a, c, g, or t
  misc_feature (887)..(887): n is a, c, g, or t
ggggagaaagaaaaggaacgggagctgagagctgggagtggagtatgaagaccaaggaattctcttaaagacctgagcagttatctggaactcctcacaaaatcacagtaatggatattatttcccagttcctactctacactgggcatagatgttatggacatcttctgagtcccacaacacccctgcaaggcagatatgatacactcctttcacctatggagaacggaggctcaaagacgctaggtgaccctcacgaaacccatatgagaggtccccgcccagtctgcccagcttctgaaatcttccatgccaactccccttagggcgacccctgagtcccaggctggacacgcccgtttcatggtggcccgcatccgcaatacaaatgccttttccctccccagccgtcgggtgcgtatagctttannnnnnnnnnnnnnnnnnnnnnnnnnnnnnnnnnnnnnnnnnnnnnnnnnnnnnnnnnnnnnnnnnnnnnnnnnnnnnnnntcttcggtgcctctgtggccaatgttccccttgggctaccccccggatacccccggggtattccccacgtttgtgttcttcccccgtactcccgcctattttatcggcgccgccacattgcacctctcccatttccgcgccttgtgagccacttgctccctatcctcctcccgtctctcaaatgccatatcttcccccctcccggtcagtggggccccccacactcccggaaccggtggtttattcttgtgcgcgcccccccgccgctgttcatctcctcgcccgggggcggcgagtgtcttaccggctcgaacgggacccaccccgcccccgcccgcgcgcacatattttatattacctcgctctcccgaggtgtngccccctcacggcccctcgccccatatcccgccgctcgcccccatttatattacacgcccctattcacgccccgccccgcccgattctatgtatacccccccatgccccacggatttatagatgcggccacgagcggatgtcgcgggaccatctaactactca

SEQ ID NO: 231453 - DNA, 1059 bp, Homo Sapiens
  misc_feature (374)..(387): n is a, c, g, or t
  misc_feature (551)..(560): n is a, c, g, or t
  misc_feature (739)..(739): n is a, c, g, or t
  misc_feature (802)..(802): n is a, c, g, or t
ggaacaaagagatggcattataacccagctcactgctaatttacaacaagcaagaagagaaaaggatgacacaatgagagaatttttagagttgacagaacagagtcaaaaattacagattcaatttcagcaattacaggctagtgaaactctgagaaacagcactcatagtagcacagctgcagacttactacaagccaaacaacagatcctcactcatcaacagcagcttgaagaacaagaccacttattagaagattatcagaaaaagaaagaagacttcacaatgcaaattagtttcttgcaagagaaaattaacgtatatgaaatggaaccagataaaaaagtagaaaacccgacccactaaccaattnnnnnnnnnnnnnntatgtcggcccgcctcgggccctcgaaaaagcttctctaaaaccattcttttcggacgccgcgtggccccactaacgccaaggtggaacaccggtcccattaactctgtttcccctaaggcaccatccttgcgcccttggaacttacggtgcccggggcacttnnnnnnnnnnacattaaaacaaaagtctcgcggggcgccgccacccctttattcgtgtctcctcgcacacccaaattctctaccccaatcgggagagttctccctcggacaggggctacacatctaaccgcgggggaattcctaatgcgcccaaccgaggggaacatttccccgcagagtccgagaggnctttccgaaaataatccaaaaaaattgttaaagtgcgctccctcgccccttgtggccctcacncattctattccttcgaggtaaaaccggtgttctggccaatcactttccccattacacggtcaaatttcccccggacatataaaaaaggtggccaaaagcccccctatctacataaagctccgggcactcgcgcgaaggaaaaattcctcacagaatccgcgctacgacccggatcttctcacacaatacctcttgtgtgtagacacccctttggcgcggttaataacaccactttttgcgcccccctggagatgtgg

SEQ ID NO: 231454 - DNA, 900 bp, Homo Sapiens
  misc_feature (255)..(255): n is a, c, g, or t
  misc_feature (418)..(418): n is a, c, g, or t
  misc_feature (659)..(659): n is a, c, g, or t
  misc_feature (810)..(810): n is a, c, g, or t
tcactcgtctgccagtccaccaccttgttggctccccttcggccccacgacaagtttctcccaaaaccattcattctgggcggcccacggccccatcataagatacaaccgcaacactggaaccatacaccttgtttcctccaactaccaaacctccccgccctactttgaaacccacccggtttttgggcattgtccccccgtctccacacaaacacaatcgctttcttgtgagcggcgcccaccatggtaatnctgtttccgtattataaccgcacaattctcctcccgcacttgttccacgctctctatctttatacgcgcgtattattttttcacatctcgccgcgctctcccacctataatataattatcgaccgacgcgaatcatcctctcgcattacgcagataacacaantctctcctcatacatattgtgagtagtattcttatataagacacaccaccccctatttctcctcggcacctatgccgtcgcacatctcgatgcatgagtcacacattgtatttatatcctcacgcgctccacttatgttacacaaccactctcttctcttggtcacctaagaacaaagcgcgcgcacccccacacccccaccaactagttggtgtctggtctgtatgatatagcgcaagtntctcgtcaacatatactcacactactggcgttcataagtccaccccacataccacgcctcctcacgatagagaataatttagcgcgcgctcgcgaattatttattccgctccgcactatggcgctatgacaaaactctcgccgcgccccantcataccaccacctcgtttttaacgttgctcacgcctcacacccacttttatatttactccatccgcgggcgcgcgttacttatttatgt

SEQ ID NO: 231455 - DNA, 1150 bp, Homo Sapiens
  misc_feature (105)..(113): n is a, c, g, or t
  misc_feature (258)..(317): n is a, c, g, or t
  misc_feature (488)..(573): n is a, c, g, or t
  misc_feature (612)..(629): n is a, c, g, or t
  misc_feature (674)..(674): n is a, c, g, or t
  misc_feature (683)..(691): n is a, c, g, or t
  misc_feature (846)..(868): n is a, c, g, or t
  misc_feature (890)..(890): n is a, c, g, or t
  misc_feature (948)..(948): n is a, c, g, or t
ggagcaaatgaaaacagaataacttatttttcgttaaagtttgactgaaacacgcttctaccaaatacagtataaataattaggtagtcttaatgcctttcctannnnnnnnnccttttcacacaaaatgtacacaaagatcgcgtaaggagtatgtatttttaataaaaatttaattgtattttttcaatattacccaaaaaacaacaacgaccactacaagcccgcaaacgtgtcgtgccctcctccactgtcgtnnnnnnnnnnnnnnnnnnnnnnnnnnnnnnnnnnnnnnnnnnnnnnnnnnnnnnnnnnnntctccacggctaccccgttttcactccccttcatatcccttctctgattcacaccacgtctatttcccccccttttttcttacacgccttctagcccacgtctgggatcttttaaaccatccctccccaccccaatcgggcacccatttttcacttcctctgccttacttnnnnnnnnnnnnnnnnnnnnnnnnnnnnnnnnnnnnnnnnnnnnnnnnnnnnnnnnnnnnnnnnnnnnnnnnnnnnnnnnnnnnnntctatttcttatttcccttatacgccccgccattctctnnnnnnnnnnnnnnnnnngccctattatttaccgccgcttatatatattgccgctcgcccgtnttcacaccnnnnnnnnnatcagcgcccccctcgctctcgcgcttcaccttttccactacaacacctcccctgtcggcggtgcgcgccacgccgcctctctatcccctatatctctccgcaccccctgtctgtgccgcttgtataccgatcctgctatattataatccctcgnnnnnnnnnnnnnnnnnnnnnnnagtccacggagcataatatcgnatatcaacaccccccgccccacccggtttagtgagactaactgacaatatcccacctntccctccacttatccgccaccccctttatttctccccgtttctagcctatacaaaatacaaatacacctgcccgcgaatatgtgccccccaccattcgcctccctctttttaccgctcaccgctctctacccccacattaaatatgtccgcgcgcacgcccccgtttgttttattctccacgccccctgatcctatttattc

SEQ ID NO: 231456 - DNA, 662 bp, Homo Sapiens
  misc_feature (119)..(212): n is a, c, g, or t
  misc_feature (216)..(216): n is a, c, g, or t
  misc_feature (219)..(219): n is a, c, g, or t
  misc_feature (222)..(222): n is a, c, g, or t
  misc_feature (238)..(238): n is a, c, g, or t
  misc_feature (259)..(259): n is a, c, g, or t
  misc_feature (349)..(357): n is a, c, g, or t
ggggctggctctgcgccctgcctacctgtccaggggtgggggctgccctttgaagctatcaatctgggttttaagtgtggattcattattgacaacaccatgacattatgctgacatgnnnnnnnnnnnnnnnnnnnnnnnnnnnnnnnnnnnnnnnnnnnnnnnnnnnnnnnnnnnnnnnnnnnnnnnnnnnnnnnnnnnnnnnnnnnnnncccnggnggnagccctcggaacaaanaaaaatttccaaaaccctccntatggggcccgggccccaaaaggcaagggaccagggcaatcctggtttccaaagggatccggaccctgactaggggtttgcaccctcacnnnnnnnnngcgcccggaggaaaccgagagtaaataaacaaatccatatggggtcctaaggccgtaaccgaaaccagccccgggatcccattcgatctcaatttgaaattaccccccgccctgccaaaattcggagaaatgttgtaataaatgaaaccccccggcggaagggaaaccaatcccaaagggcatgtggaaccggaaaaccgcaagggaatcagaaccttttggccaaggaaataaaccgggcccaagaagaacccgaaaccaaacaccttttacccatcgggcccgataaaaccgaggggggtgca

SEQ ID NO: 231457 - DNA, 818 bp, Homo Sapiens
  misc_feature (49)..(185): n is a, c, g, or t
  misc_feature (205)..(317): n is a, c, g, or t
  misc_feature (322)..(323): n is a, c, g, or t
  misc_feature (325)..(326): n is a, c, g, or t
  misc_feature (450)..(459): n is a, c, g, or t
  misc_feature (638)..(651): n is a, c, g, or t
gagcgcaggagttcaagtggaggaatgctggctttgagccctctacacnnnnnnnnnnnnnnnnnnnnnnnnnnnnnnnnnnnnnnnnnnnnnnnnnnnnnnnnnnnnnnnnnnnnnnnnnnnnnnnnnnnnnnnnnnnnnnnnnnnnnnnnnnnnnnnnnnnnnnnnnnnnnnnnnnnnnnnnnggaagtaaaagtgctgctannnnnnnnnnnnnnnnnnnnnnnnnnnnnnnnnnnnnnnnnnnnnnnnnnnnnnnnnnnnnnnnnnnnnnnnnnnnnnnnnnnnnnnnnnnnnnnnnnnnnnnnnnnnnnnnnatttnnanncccctcggccccccaaaactttcctaaacctttcttttggcccccggccccaataagtagggggacgtggccatgcctgttccaaagggaaatccgggttttgtttggggctggggtccccccnnnnnnnnnnccccgggataaaacccaccggatggaaccaaatccaaagggagttctggggccctttacggaaaaaaaccccggggggcccaaacaagttccttaaaaaaatacccccgcggccctgccgaacgattcgaaggaggggttgcaataccgtttaaaaattgggcgcgaaaaagggaaaannnnnnnnnnnnnngggttgtgatgatacaccggaaatcggcgggggggatatatttaacaccttttccgcccctgggcgagtaaaaatctctcccccatggggtgaatataccgcgggaaaatacaacacggggacataacggggccccgtggtttttctccggccaaatatttggttat

SEQ ID NO: 231458 - DNA, 759 bp, Homo Sapiens
  misc_feature (237)..(326): n is a, c, g, or t
  misc_feature (573)..(581): n is a, c, g, or t
gggggcagaatccaggtgactgaggaagtccaccggctgctgagaaggtgcccctaccactttgtgtgccgaggcaaagtcagtgtcaagggcaaaggcgagataactgatccccagcaaggaaataaaatgttaggctttaaaaatccctactttgtcatatcagactatattctaaaactatatttgagcgaaacctgtcattgcgtctaatttcaaatatacagaatctccttnnnnnnnnnnnnnnnnnnnnnnnnnnnnnnnnnnnnnnnnnnnnnnnnnnnnnnnnnnnnnnnnnnnnnnnnnnnnnnnnnnnnnnnnnnttgccggcccccccggccctcaaaaaagctttctaaacctttctttgggcccgcgggcccagaaggaaagtgaactgggccatagttgttccctaggaaaccctggccataaaaagggcttggattctccccaataaaaaaccccccggggaaaccgagggttttaaacacaccccaatggaatcctgaggtctttactgggatctataaaaggggatctcaaccaagctcgaaattcaattttagnnnnnnnnngtgcctttcttcgcgaaaccgggcggaaattcaattaaacttttctggccccccttgggaaacccctccacaagcgggagttgatggacaccttaaacccccccggggggatacaacacaccttggccccccttggcgaaataaatatttcccccccggggggtaaaaaccgcggggc

SEQ ID NO: 231459 - DNA, 725 bp, Homo Sapiens
  misc_feature (146)..(263): n is a, c, g, or t
  misc_feature (374)..(383): n is a, c, g, or t
  misc_feature (409)..(417): n is a, c, g, or t
  misc_feature (489)..(497): n is a, c, g, or t
  misc_feature (580)..(588): n is a, c, g, or t
  misc_feature (641)..(660): n is a, c, g, or t
ggcatgtcaacttctggctcctcaaacagtaggttggcagtaaggcagggtcccatttctcactgagaagattgtgaatatttccatatggattttctattgttactctggttctttgttttaaaaaaaattctgaatgtacacgnnnnnnnnnnnnnnnnnnnnnnnnnnnnnnnnnnnnnnnnnnnnnnnnnnnnnnnnnnnnnnnnnnnnnnnnnnnnnnnnnnnnnnnnnnnnnnnnnnnnnnnnnnnnnnnnnnnnnntttttaaaacaattacttttgccccgagaaccccttaaggaaaaagaactgggcaaaaaggggttcccaagaaaattcggggcccagaacaagggcctggaaattaaaccnnnnnnnnnnccccggggcggaaaccgacccctttnnnnnnnnncccggggggaaatccggagggccttaaaaggaattcttataaaaaagaggggccaggggaaacctccaaatnnnnnnnnncccgcccgccccagagaacacctctctccaaaaaaatgggtcgacaattcctttaaagccttttttgcgccaactggggaaannnnnnnnnaaaaaagggggaatgcggaaaccccttgaaatgggttaggggggcccttccgnnnnnnnnnnnnnnnnnnnntttagggggaagaagaggaatttctccgccccactgggaggagaaacacccgcgcgcgcggaaag

SEQ ID NO: 231460 - DNA, 542 bp, Homo Sapiens
  misc_feature (268)..(392): n is a, c, g, or t
  misc_feature (394)..(395): n is a, c, g, or t
  misc_feature (401)..(401): n is a, c, g, or t
  misc_feature (403)..(403): n is a, c, g, or t
  misc_feature (415)..(428): n is a, c, g, or t
  misc_feature (436)..(454): n is a, c, g, or t
ggtggagttttttttcattcatatttttgttgtttccaggaatttatttgatattaatgggcgtaaaacagcatcattgtacttaagctatggatgtttttattttatattttctttatttataactgtgccaagtattattttgctacttaccgtgttattctgtggaaagaaaaacctgtaaagtgtttaataaattagccctccttacataaattaaatgtcaaaattttgtaaaatattaatcagaataaatactgactcttannnnnnnnnnnnnnnnnnnnnnnnnnnnnnnnnnnnnnnnnnnnnnnnnnnnnnnnnnnnnnnnnnnnnnnnnnnnnnnnnnnnnnnnnnnnnnnnnnnnnnnnnnnnnnnnnnnnnnnnnnnnnannaaaaananaaaatttggggnnnnnnnnnnnnnnacaaaaannnnnnnnnnnnnnnnnnngggcgggggggccccaaaggaaaggaaaaagggccaaacgtttttcccaaaaaaaccccggccaaaacaaaggggttggatccccccc

SEQ ID NO: 231461 - DNA, 305 bp, Homo Sapiens
  misc_feature (75)..(152): n is a, c, g, or t
  misc_feature (162)..(170): n is a, c, g, or t
  misc_feature (181)..(193): n is a, c, g, or t
gggggttttctctattgcaatactctccttcctcttgttgcaatgatccttgtgaataaagtctctctttacctnnnnnnnnnnnnnnnnnnnnnnnnnnnnnnnnnnnnnnnnnnnnnnnnnnnnnnnnnnnnnnnnnnnnnnnnnnnnnntattgttagnnnnnnnnncccttgtaggnnnnnnnnnnnnntcaaaaatttttcaaaaccattctttgggcgggcggccccttaaggaagtgcaaaaggaaaatacctgtttccaaagaaatccggttcacaactagggatggatttctcccg

SEQ ID NO: 231462 - DNA, 505 bp, Homo Sapiens
  misc_feature (75)..(135): n is a, c, g, or t
  misc_feature (205)..(205): n is a, c, g, or t
  misc_feature (273)..(284): n is a, c, g, or t
  misc_feature (430)..(440): n is a, c, g, or t
tggctctagcatctttccaccccagccttctgagtagctgggaacacaggagcgtaccactacacttggctgatnnnnnnnnnnnnnnnnnnnnnnnnnnnnnnnnnnnnnnnnnnnnnnnnnnnnnnnnnnnnngggagcaatctgcccatcttggcctaacagtgctgggattacaggcctgagccactgtgccccagccggnttcctttatttcattccaagggaattttgaatttatcttagaacctttattttgaaggaagaaagtcnnnnnnnnnnnngagctggaagtttcccttttgttgcccaagcctgggatgcaatggcatgaatctcaaacccaccaccaaacttccggcctccccaggttccaagggaatcttgcttccgccttcttgagaaagctagggattaacaggccatggtnnnnnnnnnnntaagccaaatttttggaatttctaagcacggggaagggggcctttcccccacgcgtctggcgaaa

SEQ ID NO: 231463 - DNA, 663 bp, Homo Sapiens
  misc_feature (318)..(319): n is a, c, g, or t
  misc_feature (435)..(435): n is a, c, g, or t
  misc_feature (448)..(461): n is a, c, g, or t
  misc_feature (592)..(616): n is a, c, g, or t
gaagcagccttgtaactgtatttaccatgataatatattctgcacggtaagaattccttttacagacattctttatcaagaggtcggcccttctttttcaggcatgtaagccaaatgcaggcctgtgtgtagctgtgtgttttttctgtggttgccgcatttattccacctccagctggaccccccactgcaaatagagaacagcggtgggggatgggggttaaaaagtagagaacctcctttctgttaaactaatttcacgtgacagtgcatgtatttattcaataaaacctttatgttagctcaaaacacccagcnnacccctatcccattccccaccccaactcccctttctccactccatttccaacctccctaaataataaccaatctccccccattcctctctccctatccctatccaccactcctaantttttgccggggnnnnnnnnnnnnnntcaaaaacttttttcaaacctttttcttgttgccgcccgggcccccctcacggggacaggcaaccgcgggccaccccccgtttcccccaaaaaaatcctccggccacacaaataaagggcgcgtgggattnnnnnnnnnnnnnnnnnnnnnnnnngcggggccaccccggaccgttttttggaaaccaactccaggaacggg

SEQ ID NO: 231464 - DNA, 342 bp, Homo Sapiens
  misc_feature (45)..(103): n is a, c, g, or t
  misc_feature (141)..(190): n is a, c, g, or t
  misc_feature (223)..(233): n is a, c, g, or t
cggccccaaagaaagaaaaaaaggggcgccacttgttctttcacnnnnnnnnnnnnnnnnnnnnnnnnnnnnnnnnnnnnnnnnnnnnnnnnnnnnnnnnnnnggggggcaaaacccgtccttcttaaaaacaccacaccnnnnnnnnnnnnnnnnnnnnnnnnnnnnnnnnnnnnnnnnnnnnnnnnnncctcccggacgctcctataaacattaaaaattnnnnnnnnnnnatccccgcttttcctcgtagagaagaggcggggggcaataaatctccacaaaacaccctttgccccccgcaaagggggaatccccccataaaccgggggccgggtggag

SEQ ID NO: 231465 - DNA, 733 bp, Homo Sapiens
  misc_feature (273)..(557): n is a, c, g, or t
  misc_feature (562)..(562): n is a, c, g, or t
gggagggatttccaatggaagcaaagagagagagattgatactcagatatagtaatgtaaaatactctcattttactaacaaaaaattaaaactcagagcactggttgacttagcaaatgtcatccatatatgttggggaaaagtgaatacttgaactggtatgctgacaagacagtgctttccattcggattttcacatgtatgtccctgcaatataactttgcctatttttcaagatattttctagcccttcttttaagaggtaagtacannnnnnnnnnnnnnnnnnnnnnnnnnnnnnnnnnnnnnnnnnnnnnnnnnnnnnnnnnnnnnnnnnnnnnnnnnnnnnnnnnnnnnnnnnnnnnnnnnnnnnnnnnnnnnnnnnnnnnnnnnnnnnnnnnnnnnnnnnnnnnnnnnnnnnnnnnnnnnnnnnnnnnnnnnnnnnnnnnnnnnnnnnnnnnnnnnnnnnnnnnnnnnnnnnnnnnnnnnnnnnnnnnnnnnnnnnnnnnnnnnnnnnnnnnnnnnnnnnnnnnnnnnnnnnnnnnnnnnnnnnnnncgccntacctcgcacaaccccatataaaacatgtcggcccgcctcgggccctcgaaaaagctttctaaaaccattccttttggcccgcgggccccagtaaggtaagtggaacctgggcccataaccgtgtttccttaaggaaaaccctgggtcctggacaaaatggctttgacatt

SEQ ID NO: 231466 - DNA, 370 bp, Homo Sapiens
  misc_feature (155)..(237): n is a, c, g, or t
cgtttctgattaatgctaaatgtaagaatcattgtaaacattagttctatttctatcccaaactaagctatgtgaaataagagaagctactttgtttttaaatgatgttgaatatttgtcgatatttccatcattaaatttttccttagcattgnnnnnnnnnnnnnnnnnnnnnnnnnnnnnnnnnnnnnnnnnnnnnnnnnnnnnnnnnnnnnnnnnnnnnnnnnnnnnnnnnnntcttggggggcgcctcggccctcaaaaaacttttaaaacctttcgtttggcgccggggccccatagggaagggaaccgggccaaaacggtttccaaagaaaaccggggcaggaaaaggggttggattcccccc

SEQ ID NO: 231467 - DNA, 528 bp, Homo Sapiens
  misc_feature (131)..(197): n is a, c, g, or t
  misc_feature (203)..(382): n is a, c, g, or t
ggggtggctgcgcttgcgaggaccctgaggtagattgggtggtttcaacaggaacgcatccactgtctgagagtttaaacttgattttgtgaggggacgaacagcgtgacaattaaaagaagatctgggannnnnnnnnnnnnnnnnnnnnnnnnnnnnnnnnnnnnnnnnnnnnnnnnnnnnnnnnnnnnnnnnnntcatcnnnnnnnnnnnnnnnnnnnnnnnnnnnnnnnnnnnnnnnnnnnnnnnnnnnnnnnnnnnnnnnnnnnnnnnnnnnnnnnnnnnnnnnnnnnnnnnnnnnnnnnnnnnnnnnnnnnnnnnnnnnnnnnnnnnnnnnnnnnnnnnnnnnnnnnnnnnnnnnnnnnnnnnnnnnnnnnnnnnnatgcagagcaactgggaacctaattctgaccaaaaaggaggaattgtttggctaattggaagtgacagaaaccttgggagaaagcaaccgcataccaaggataattataagaagaagagaagacatggagaagaggagggagtagt

SEQ ID NO: 231468 - DNA, 589 bp, Homo Sapiens
  misc_feature (96)..(223): n is a, c, g, or t
  misc_feature (262)..(272): n is a, c, g, or t
gcagtggagcttgaaaatccctgcccggtaccccttccccacctttggggtgaacaaaaacgaaaaaccccccttcttcaaagaatacacaacccnnnnnnnnnnnnnnnnnnnnnnnnnnnnnnnnnnnnnnnnnnnnnnnnnnnnnnnnnnnnnnnnnnnnnnnnnnnnnnnnnnnnnnnnnnnnnnnnnnnnnnnnnnnnnnnnnnnnnnnnnnnnnnnncctttaaaagaaaaaccttctttttcaccaaaacacacnnnnnnnnnnngttggcgccccgcgccgcctccttcccccctattctgtaacaaaaaacaaaacgggcgcataaacaaacgctgtctcttccccatatagaagaaacacattatcccccgcttattccacaaaataccacggtcgcgggtggtgtgtttccacaccgccccccacacgtttagctaaacatccctccccccacgctcgtgcaggtggcgcgctattcaaacacaggtggcaggcactgtgatcatcctcaaaaagaccaccccccacgcttaacacgaaccggcgcaccccgcccattatcctgcgttcgcccccact

SEQ ID NO: 231469 - DNA, 381 bp, Homo Sapiens
  misc_feature (81)..(142): n is a, c, g, or t
ttacaaaaccctcttggggacgccaacccgaaaaaatctgctaaacatgaaattcggggttcgccaaaagatgggatcccnnnnnnnnnnnnnnnnnnnnnnnnnnnnnnnnnnnnnnnnnnnnnnnnnnnnnnnnnnnnnngtcaaaagggaatctataaaaaggaatctaaagaatccccagatgaatttagggcccccctattgcaaattatccccaagacatggccaaattccgctaaaaaacttttgcacacacacttgaaacacctttttcacaaaacccggaaaacggaccccaaaatacccttcatgaacggtacccccgacattttttgaaacccccctctcgaaaaaaccaatagtgcggccacatgtgac

SEQ ID NO: 231470 - DNA, 774 bp, Homo Sapiens
  misc_feature (238)..(238): n is a, c, g, or t
  misc_feature (242)..(276): n is a, c, g, or t
  misc_feature (281)..(339): n is a, c, g, or t
  misc_feature (341)..(343): n is a, c, g, or t
  misc_feature (345)..(345): n is a, c, g, or t
  misc_feature (551)..(560): n is a, c, g, or t
  misc_feature (706)..(719): n is a, c, g, or t
atgagccaccgtgcccgaccagaaagcatggtttttgaaggaccatattttattgtaaaaaaatgttttggttcagatagatgtgtgctgatgggagtaattcacatctatcagtgaccaccaccaagatatttataaaccttatcaaatacagtaggaagagcaaccagcacaattttggataaatgtatatgtttcagtgaacaaagaagatagtttaaaataaaagatgaccacngaannnnnnnnnnnnnnnnnnnnnnnnnnnnnnnnnnnaacannnnnnnnnnnnnnnnnnnnnnnnnnnnnnnnnnnnnnnnnnnnnnnnnnnnnnnnnnnannncnccccttgggtggccgcccttgggcccctcaaaaaaagcttttctaaaacactttttccttttggggcccgcggggcccccataaggggaaaaggggacactgggggccattagctgggttcccccaaagggaagaaccctgggggacatggaacaaaagggcgcttggggaatttcccccaccaccaaataaaaacaaaccccgcnnnnnnnnnnaaaaccgcaaaggggttttccgagaacaaaaactccccgatagtgggagagtttcttgggggggtccttttacgcgggggttctcttctcaacacggggggagtctcacaagggcgggacctcccaaatattacaaaatattatannnnnnnnnnnnnntgtggcgcacttttctttcgcagaaaacaaggggggggctaaattctcctctctc

SEQ ID NO: 231471 - DNA, 399 bp, Homo Sapiens
  misc_feature (208)..(208): n is a, c, g, or t
  misc_feature (294)..(347): n is a, c, g, or t
gggtactatgttaataacttgtcctatgtcaatttgtatatcatgaaacacttctcatcatattgtatgtaagtaattgcatttctgctcttccaaagctcctgcgtctgtttttaagagcatggaaaaatactgcctagaaaatgcaaaatgaaataagagagagtagttttttcacctagttttgaagggaggacgggttaccttngaaaattcccaccctttcccatttggatgggacctgggtgtagggaaaagtttaaaaagggttggttttccttaaacccaaacctnnnnnnnnnnnnnnnnnnnnnnnnnnnnnnnnnnnnnnnnnnnnnnnnnnnnnnaaattgtgtgtgtaaaaccccctggtctttttttgtgggaaaacctttttcc

SEQ ID NO: 231472 - DNA, 344 bp, Homo Sapiens
ggctaacttacggcgggcactgggaatggaaatttgttcaacctgcactgtgtttcagtggtctccaagcttttggaccacttaatatggactcttaatattaaaaaattaaaaggacgggcccaacctaaggttgacagtttttaatatgtactgggcaaaataaactctactatcttactatcaacctaatgtcaaaaaagtaatatttttaccttacaccaagagagatctataattagaataaaggacagtccttcacatcagaagaaagttggcagcattttgctaggatatatttttgaaaatctaaatgtagaaatttattaaacagtttccactta

SEQ ID NO: 231473 - DNA, 878 bp, Homo Sapiens
  misc_feature (326)..(365): n is a, c, g, or t
  misc_feature (369)..(369): n is a, c, g, or t
  misc_feature (583)..(633): n is a, c, g, or t
ggacccacgagtggcactgaggggccagaacattctgtcaatggtcctgcaagtccagctttaaatcaaggttcataggaaaagacataaatgaggaaactccaaacctcctgttagctgttatttctatttttgtagaagtaggaagtgaaaataggtatacagtggattaattaaatgcagcgaaccaatatttgtagaagggttatattttactactgtggaaaaatatttaagatagttttgccagaacagtttgtacagacgtatgcttattttaaaattttatctcttattcagtaaaaaacaacttctttgtaatcgtnnnnnnnnnnnnnnnnnnnnnnnnnnnnnnnnnnnnnnnncganagacagacaaagagagagaattctttccagtgaaactaaaaagcttttgctttttcccttggcttttatggaagaaacaataccttttacattacaactggtcaacagtaccccgcccggacctggcttttaaaaatcccaaacactgggccgaccaacccctaacataatcaaggcccctttttctgtcccccccacaagtccttatacctannnnnnnnnnnnnnnnnnnnnnnnnnnnnnnnnnnnnnnnnnnnnnnnnnnttgcaaccctatgttattactcaattgtccctgccgagcagaccctgcatcctcagccttcgtactaacaatagattgcaagtcgcacctcatcccacccattctccgtacccacatttccttatttcctcgcgacctccacgcgtgcatatcctttatcctaacacgcccgccgtctatttataccacacgcgcgcacctccaaccttgttgactcaacccccgtgtcgcctcgcgccacaccg

SEQ ID NO: 231474 - DNA, 347 bp, Homo Sapiens
  misc_feature (58)..(58): n is a, c, g, or t
  misc_feature (60)..(214): n is a, c, g, or t
  misc_feature (227)..(235): n is a, c, g, or t
taagcgtaacttccctcaaagcaacaacccccctccccaatacagctacgtttgtacntnnnnnnnnnnnnnnnnnnnnnnnnnnnnnnnnnnnnnnnnnnnnnnnnnnnnnnnnnnnnnnnnnnnnnnnnnnnnnnnnnnnnnnnnnnnnnnnnnnnnnnnnnnnnnnnnnnnnnnnnnnnnnnnnnnnnnnnnnnnnnnnnnnnnnnnnnnntttggggcccccnnnnnnnnnaaaaaatttttcaaaaccttctttggggccccggccccccaaaagaaaagaaaagggctaaatttttttcttaaaaaacccggcggaaacaaaaggggtggtgattcccccc

SEQ ID NO: 231475 - DNA, 323 bp, Homo Sapiens
  misc_feature (141)..(154): n is a, c, g, or t
ggctgaggcatgagccaccatgcgcggcccacatgcatgttttatgtatgtatacttcctgatgtaaaaatcccacctttatgggccaaagattttttttctcctgaaagcaagaaaaaatgttaaacattcccaacaatnnnnnnnnnnnnnncttgtcgggccgccctcggcccctcgaaaaagactttctaaaaacatttccgtttgggcgcgccggggccccccttaagggtaagtgaaacatggggtcctaagttggtttccctaaggaaaatacctgggccatggaaataaggggtttgggattctttcccccaaat

SEQ ID NO: 231476 - DNA, 750 bp, Homo Sapiens
  misc_feature (145)..(153): n is a, c, g, or t
  misc_feature (267)..(277): n is a, c, g, or t
  misc_feature (346)..(360): n is a, c, g, or t
  misc_feature (716)..(716): n is a, c, g, or t
tcgttgctgggcggccccgcccgctccaaaactttcaaaaaaatttgttcttggcccgcggcccacgaagacaagcgaacgggcgcttcctggtttccaaggaatatccgggctccgactgccgctggcctctcccaacaaaaannnnnnnnnggttctacaccaatcctcctgggacccttttcccagagggcccttcctcggggttattaactggaactcaacccccctgcgcgtccaagccaagcttctaatttatgattttannnnnnnnnnntctgtccattgcctcttaggaaacggctgtaaactctccttcatgtacctccccgcccgaatgggaaannnnnnnnnnnnnnnggcatgggaagtacacttggcataccccccccgccggtcctcttgcgtttcctccggcgccgcttgagagaataaaatacctttgcccttacgcgtggacataaggcagggcagaaataaaaggcgcccgtactttccacccgggcagctctgtttccttaatcaccgaacacggtggttaataaactctctccatcccaacggcgttcggtgagttgcgataagtatacacaaccctcttgtcttttcttcctaatacacaccacttttcttacgcgctgaattccacggggcctgtctctctctctctaaacaatcacaaccggcagcacgttctcgccttgcggggataaccncgctcggtgatacccccaaacgccggccgctcgg

SEQ ID NO: 231477 - DNA, 520 bp, Homo Sapiens
  misc_feature (182)..(367): n is a, c, g, or t
  misc_feature (376)..(450): n is a, c, g, or t
gggtgggggcagtgtgaggacttggggtttctgtgctgtgtgacacaaggagataagtgacaatcttgaagtcctaacttccactattctagaaagtatagtggtgatttgtgtgcaaagatttgaagttttaaaaaagtaccaagttcctgaaattcaataaaatatttttattaattttnnnnnnnnnnnnnnnnnnnnnnnnnnnnnnnnnnnnnnnnnnnnnnnnnnnnnnnnnnnnnnnnnnnnnnnnnnnnnnnnnnnnnnnnnnnnnnnnnnnnnnnnnnnnnnnnnnnnnnnnnnnnnnnnnnnnnnnnnnnnnnnnnnnnnnnnnnnnnnnnnnnnnnnnnnnnnnnnnnnnnnnnnngttttgggnnnnnnnnnnnnnnnnnnnnnnnnnnnnnnnnnnnnnnnnnnnnnnnnnnnnnnnnnnnnnnnnnnnnnnnnnnngggggtaaatctttttttctttgaaaaaacccccggaggaaaataagagggggtttttttccccccccac

SEQ ID NO: 231478 - DNA, 756 bp, Homo Sapiens
  misc_feature (507)..(517): n is a, c, g, or t
gggccacctgccagggcacctgcaaccctagcaataccatgctcgctggagaggctcagctgcctgcttttcgcctgcctgtgtctgctgctgagaagcccgtgcccccgggagggctgccgcactgccaaagagtctccctcctcctggggaaggggctgccaacgaaccagactcagtgaccacgtcatgacagaacagcacatcctggccagcacccctgggctggagtgggttaaagggacgagtctgccttcctggctgtgacacgggacccccctttctacagacctcatcactggattttgccaactaaaattcgaatttccggccaaaggaagccccctggggaagaagggaatgggggggaaggaaatcaacgggttaacaaacccgggtttggtcaatcccgggggggcaagaaaggtttttttaaatcccctctggactctactggggcgtggctgccaacgaccgggtggcgcatcccctggcgagaaaacaacnnnnnnnnnnncgtgcctgggcgcccccgggaaaagaggcttttccaggagacccgtttcgtttgagggccgggcgcgagccccccagagtgggggaagatgtgggacgcggcgccgcgtcgtcatcgctggggtgccacccggaccaaaatcccgcacgcgcacggggtacaacaagaggtgcgggcggtcgtcccgcccgcccgcggtgtgaacaagcagcccacgtggcgggcgatagcacgcagaa

SEQ ID NO: 231479 - DNA, 570 bp, Homo Sapiens
  misc_feature (227)..(420): n is a, c, g, or t
  misc_feature (424)..(437): n is a, c, g, or t
gggtggtgagggctggttaatgtagtatggtatatgcacaaaactacttttctaaaatctaaaatttcataattctgaaacaacttgccccaagggtttcagagaaaggactgtggacctctatcatctgctaagtaatttagaagatattatttgtcttaaaaaatgtgaaatgcttttatattctaatagtttttcactttgtgtattaaatggtttttaaattnnnnnnnnnnnnnnnnnnnnnnnnnnnnnnnnnnnnnnnnnnnnnnnnnnnnnnnnnnnnnnnnnnnnnnnnnnnnnnnnnnnnnnnnnnnnnnnnnnnnnnnnnnnnnnnnnnnnnnnnnnnnnnnnnnnnnnnnnnnnnnnnnnnnnnnnnnnnnnnnnnnnnnnnnnnnnnnnnnnnnnnnnnnnnnnnnnaagnnnnnnnnnnnnnnaaaaaaattttttcaacacctttttcttcgggggccgcgggccccacccagaaaaaacgacacagcatcccttctaccttcttcctctcccacaacaacccccggccaaaaaacacctccgggtcttttttct

SEQ ID NO: 231480 - DNA, 789 bp, Homo Sapiens
  misc_feature (149)..(259): n is a, c, g, or t
  misc_feature (495)..(495): n is a, c, g, or t
  misc_feature (680)..(709): n is a, c, g, or t
gggatgaacaattcgacctccttctgttgtggatgatcttttctggtctgggtaaagttgttggtgttggagcactgttcgagaaacaagaacatgaaggtcgcactgactctatgcttaaactgctgacagtttcatggaaataaatnnnnnnnnnnnnnnnnnnnnnnnnnnnnnnnnnnnnnnnnnnnnnnnnnnnnnnnnnnnnnnnnnnnnnnnnnnnnnnnnnnnnnnnnnnnnnnnnnnnnnnnnnnnnnnncgcatgagctaccatgcctggataagacaaccttccagatggtggagcctctgtcagttggagtcccagaatgcagcaatctaaagcagaagccatcactaaaaggcagcaacgtgtgacagaaacaagaaataaacattgtctgtgccacagaaatgttgtgggttttgttaccacacatctcctgcccaacagagacgtatgtggtgtagtagaaggagcataatcactgttanaagttgccagcaactggtttccccaagagttatctaaggccatcagagtggcttttcctgtgtgtgacaatggacacataattagccacacacccagatctcccaactctcaacacgtcattttagaaagcagcattcaaggtgcaattttaaagtttaaatattaaaatactaacaaactggtnnnnnnnnnnnnnnnnnnnnnnnnnnnnnnccctgtccgcccgccctcgggcccctcgaggaagctttctaagaccattccgttttggggcgcgcggggcccccaataag

SEQ ID NO: 231481 - DNA, 329 bp, Homo Sapiens
  misc_feature (220)..(220): n is a, c, g, or t
  misc_feature (225)..(225): n is a, c, g, or t
gcgtcccttgctcccgcccgtcgccccctttcttgccctttcctgttgccctcttcgccccccgccgcgtcgtccctcgtgttccgcgccctgttcccgccccttttctcccgccccctgtgttccgctctccttttcgccttccccccgcctgtagcgctgccgtccgtggttgccctggcccccgctttttgcccccgtcttccctctccgcccgtcncccgntcgtccgtctcggtcacccgctttgtatgccgcctaatcaacgcactgagcaactccatgcttaccacatgagcactatgtgcctccgcgctatcgccccaatg

SEQ ID NO: 231482 - DNA, 925 bp, Homo Sapiens
  misc_feature (86)..(95): n is a, c, g, or t
  misc_feature (142)..(202): n is a, c, g, or t
  misc_feature (308)..(308): n is a, c, g, or t
  misc_feature (374)..(383): n is a, c, g, or t
  misc_feature (849)..(849): n is a, c, g, or t
gcctccgttccccccctcttttccccgcttattcctctcttatcctcatgctcctcattcttttccttcccttatcccccccctcnnnnnnnnnncttctctctcccttttgcttcttgcctcaccctatttctcatttccnnnnnnnnnnnnnnnnnnnnnnnnnnnnnnnnnnnnnnnnnnnnnnnnnnnnnnnnnnnnnattccttgtccgcggccacctgttcttttcttagcgttacacctcatctgcgcttccttgattatatgtgttgtatttattattgtttgatctttccgttccatgnctctcatgttttgtttctcttcgctcgttgcgccgtttgttatgtgctctctgcctttctctcgcnnnnnnnnnnccgtatgctatgttttgttctgctacgctctcccgtaccgcgtccttctccccatttctgtttctccactctcctctctgtgtcactctttcttgtactccctctgtccatcctcttgttcttcctttcttgctctccttattctgtcgcttcttatatttcacctcgcctgtatagtattgtgccatgttcagcctcttatttgccacatattacacttatatgtttttttccttccatcctatattttctgtcatcccatcttttcccgtgccctgtatctgtgctctttgtgtcatactctctttgctacttttcattttttatccctatttaccaacttgtctttaccgttttttccttctctccctctgtataatgtctccatgttttatctgattcttctctcattctcgttcccccctctctttctccatacatttatcattctttatactatttttcncccctcactcgtaacctttatcctatattctctctctttatttgcgttttgcctccacacctattcttcttctttc

SEQ ID NO: 231483 - DNA, 1142 bp, Homo Sapiens
  misc_feature (111)..(173): n is a, c, g, or t
  misc_feature (795)..(795): n is a, c, g, or t
ggtgcttttgagttgacctgacttccttcttgaaatgactgttaaaactaaaataaattacattgcatttattttatattcttggttgaaataaaatttaattgactttgnnnnnnnnnnnnnnnnnnnnnnnnnnnnnnnnnnnnnnnnnnnnnnnnnnnnnnnnnnnnnnnccttgtcaagccccctagcccctcaaaaaagttccctaaaccacttcttttgccccgccggtcccacccagcgaaaacgaactgggcacttcctctgtgttcctgggccgccctctggcatagaaactagggctctgcaatcgtcgcgcccacaacaaaaccccccgggagcgaaaacccagaggtgtttcgtaacacaacattttccgagtgggaattttcctggaggggggtcttccccggagggtctttctcaagcgaggacccttctctaggaggagagcctccccaaaggcccatattttccgggcaccctaacttttgtgggccaactttcttctcggcgatcaaaccttctgtttccaaaaaccacactgttgtccagggcccattttctcttgctccccgcccgccctttgttatatagcccccaccaccgatatgaatatacgggtgacaatatctgtgtatggaaacatccacatctgttataattttccgcgccccaaacgactgcgcggtagactcttaataacccgttccgttttattaatacgacgccaccctttgtggttcggtataaacaagaccacgatcgtggccggccgcgtatatgtgggtngtttagtaacacacacctgcggtgtatgtgccgcataatacacacctctgtgccagttgctcccaaataataatcgggcgcgccccacacactatctttcgatagtcaccaccaccgaccgggcgtgcgccgacataaaaaacccctctcccccgcaccagaaaatatattgcctccctccgcaagacactatcaccgtctattttaaccactgtcgtccgacagaacgaaataacaccgcccgttcgcgcgcgggtacacatttcgtcggcgcccggagaatattctcattccctactcatatactccgcgcgcaacacattcccctccgccgcgtgaaccatata

SEQ ID NO: 231484 - DNA, 560 bp, Homo Sapiens
  misc_feature (264)..(272): n is a, c, g, or t
  misc_feature (356)..(356): n is a, c, g, or t
  misc_feature (477)..(486): n is a, c, g, or t
ggtaagaagcaacgagcaaaaaacctttctgtaggctgagacctctcggtgcacctggtgaccctgggtggaggggacttgctgtgaagtcttcctcgccctctgccctcttgctgcttctccacattgccaggaaaagctgctgacgcctgccctcctctcttgagtcgagggctgaatctttctcctctaagcagtctggtcaggaaccttggtttcttgagaggccccaagagacgcaacttctgggttcctctccctccnnnnnnnnnctgggggtgcctacaagaaggtgaccccattcttggccgggcgccggggaagtttttttgatagggagacctgtcggcccccancatgttgaagatgtatttttatgcccgggggaatgcatatctttgggggacgggcagggttccagtggggttggacccaaccctctcctttagaaaaaagcaaccaaagggttatattgcnnnnnnnnnncccccggcaaaaaggacaaaacttgtctctttttccccccccgggggcacaaatcacgggaccttctccccgca

SEQ ID NO: 231485 - DNA, 879 bp, Homo Sapiens
  misc_feature (280)..(780): n is a, c, g, or t
  misc_feature (785)..(790): n is a, c, g, or t
  misc_feature (792)..(796): n is a, c, g, or t
  misc_feature (799)..(808): n is a, c, g, or t
ggcgtgtgcaaaactgcacgtccctttcactactggggaagaacagagatcagaagcagacacgctcaaaggcaggtgctgcctccaaggccccgaaacagagagtgctactgcgaacaaatcaacctcttccactccactgctgcttttggtgccccataacgacgaccccctctcagcaggaagtagccagaaagattacgactccccatctccctgcgattctcatgataaataaatatccatgcatgataaaaatcgtgtaaattgacagtggggnnnnnnnnnnnnnnnnnnnnnnnnnnnnnnnnnnnnnnnnnnnnnnnnnnnnnnnnnnnnnnnnnnnnnnnnnnnnnnnnnnnnnnnnnnnnnnnnnnnnnnnnnnnnnnnnnnnnnnnnnnnnnnnnnnnnnnnnnnnnnnnnnnnnnnnnnnnnnnnnnnnnnnnnnnnnnnnnnnnnnnnnnnnnnnnnnnnnnnnnnnnnnnnnnnnnnnnnnnnnnnnnnnnnnnnnnnnnnnnnnnnnnnnnnnnnnnnnnnnnnnnnnnnnnnnnnnnnnnnnnnnnnnnnnnnnnnnnnnnnnnnnnnnnnnnnnnnnnnnnnnnnnnnnnnnnnnnnnnnnnnnnnnnnnnnnnnnnnnnnnnnnnnnnnnnnnnnnnnnnnnnnnnnnnnnnnnnnnnnnnnnnnnnnnnnnnnnnnnnnnnnnnnnnnnnnnnnnnnnnnnnnnnnnnnnnnnnnnnnnnnnnnnnnnnnnnnnnnnnnnnnnnnnnnnnnnnnnnnnnnaaaannnnnnannnnnaannnnnnnnnnccttgtcgggccgcctcgggccctcgaagaggctttctaaaaccattcgttttggcgcgcggggcccccga

SEQ ID NO: 231486 - DNA, 591 bp, Homo Sapiens
  misc_feature (104)..(114): n is a, c, g, or t
  misc_feature (154)..(162): n is a, c, g, or t
  misc_feature (269)..(291): n is a, c, g, or t
  misc_feature (376)..(384): n is a, c, g, or t
  misc_feature (389)..(389): n is a, c, g, or t
  misc_feature (541)..(550): n is a, c, g, or t
ccccgagaagggaaaagggaaaaaggggggcctactcccctgttccccatgaaaaaaccccgggggcccggggaacagagggggtgggggatttccccacaccnnnnnnnnnnncacccccgcggggggggaatacgggaagaagtttttcttnnnnnnnnnttccccaaagaggggggagtggcgcggggggggtaataagcgggcggaatctcattccacacaggagaaccccgcaagccggaaccctcagatattataaaatccannnnnnnnnnnnnnnnnnnnnnnttttgtcggaaagaaagggtgggggagattcttataaacactttctccgcccccgcgcgggggaacacccacaccaccacgggcnnnnnnnnnaaagnctgaaacccgcgccggcgggaaaacgaacccccggggcacatgtggtggtattatatatattctccccccggcgcaaaacacagggggaggagaaaaaactccccctctcttgtcgtccccacgcgattaaaagaaaagacggggagggagnnnnnnnnnngggggtgggggtggggagagagaagaaacattccctcctac

SEQ ID NO: 231487 - DNA, 496 bp, Homo Sapiens
  misc_feature (113)..(122): n is a, c, g, or t
  misc_feature (224)..(232): n is a, c, g, or t
  misc_feature (318)..(345): n is a, c, g, or t
aaaaaattttcaaaaccacttccttggggccggggccccccaaaggaaaaggaaaagggccaaaatggttccccaaaaaacccggggcctgacaagggcttggattccccccnnnnnnnnnncccccggggggaaccaagggttttgaaaaaatcccaagggaggtcggggggccttacgggggttatcaaagggagtccaggggggtcccaaattaaattaannnnnnnnntggcattcttgggggaatggggggaaatttcttaacccttcgggccgctggggaaccctccaaaccggcattaagaacctgaaatnnnnnnnnnnnnnnnnnnnnnnnnnnnntggggaaaaaatttcccccgagggaaaccccggggcgcaaaaaaagggcgctataaacaccctctcaaattagcccgggtaaacccccccaggggggtgaacccccaccaggaatttgtccgaaaaaacatcatagtcacgatgaggcccc

SEQ ID NO: 231488 - DNA, 927 bp, Homo Sapiens; identical to SEQ ID NO: 93778
  misc_feature (884)..(884): n is a, c, g, or t

SEQ ID NO: 231489 - DNA, 989 bp, Homo Sapiens
  misc_feature (207)..(305): n is a, c, g, or t
  misc_feature (307)..(360): n is a, c, g, or t
  misc_feature (362)..(367): n is a, c, g, or t
  misc_feature (369)..(383): n is a, c, g, or t
  misc_feature (385)..(412): n is a, c, g, or t
  misc_feature (415)..(416): n is a, c, g, or t
  misc_feature (418)..(418): n is a, c, g, or t
  misc_feature (420)..(420): n is a, c, g, or t
  misc_feature (425)..(441): n is a, c, g, or t
  misc_feature (474)..(482): n is a, c, g, or t
  misc_feature (490)..(562): n is a, c, g, or t
  misc_feature (595)..(604): n is a, c, g, or t
gggtcagtgaattcagaataagtacattcatgtataacatagggacagttctgctgctgttatttatatgcaattcttctggtaaatagcaatagaataaaacatatttcaatgtttgtgtataggttttatattattattccactaggaatggcataagaatttatagataaattcttgtaacattaaaggattaaaatgtttttnnnnnnnnnnnnnnnnnnnnnnnnnnnnnnnnnnnnnnnnnnnnnnnnnnnnnnnnnnnnnnnnnnnnnnnnnnnnnnnnnnnnnnnnnnnnnnnnnnnannnnnnnnnnnnnnnnnnnnnnnnnnnnnnnnnnnnnnnnnnnnnnnnnnnnnnannnnnntnnnnnnnnnnnnnnnannnnnnnnnnnnnnnnnnnnnnnnnnnnatnngncncgcgnnnnnnnnnnnnnnnnnaaaaattttttcacccaacactttctttttgcnnnnnnnnncccccccnnnnnnnnnnnnnnnnnnnnnnnnnnnnnnnnnnnnnnnnnnnnnnnnnnnnnnnnnnnnnnnnnnnnnnnnngaaggtctgggtttgtgttctccccccccaacnnnnnnnnnncacccccccgggggggagaaaaccgcaaagttgtgttaaataaaaaaacaccccacagcaggggcgtttctttcgggagccgtcattatattgggggggtttatctaacaaaggagaaggggtccccaccgcgggcgcgcccaaaatataaaataatatccacccccgcgcccgcgggtgggtggtattttagagaaagaggaggggggggtgattattttttaaaaatcttccctcccccgcaaggggaggaacaccccctcccaccccggggggggagatgaaacgaaaaacctccccgcgggcggtgccaaacacaccacccctgtgtgtcgagaattaaaaaatataatatctctcccccgcgaggagagagcagggggag

SEQ ID NO: 231490 - DNA, 1152 bp, Homo Sapiens
  misc_feature (678)..(678): n is a, c, g, or t
  misc_feature (1110)..(1110): n is a, c, g, or t
ggctatgggcagaagccatatcgagggatgaaaggaagtgaagtcaccgctatgttagagaaaggagagcggatggggtgccctgcagggtgtccaagagagatgtacgatctcatgaatctgtgctggacatacgatgtggaaaacaggcccggattcgcagcagtggaactgcggctgcgcaattactactatgacgtggtgaactaaccgctcccgcacctgtcggtggctgcctttgatcacaggagcaatcacaggaaaatgtatccagaggaattgattgtcagccacctccctctgccagtcgggagagccaggcttggatggaacatgcccacaacttgtcacccaaagcctgtcccaggactcaccctccacaaagcaaaggcagtcccgggagaaaagacggatggcaggatccaaggggctagctggatttgattgttttcttgcgtgcgggaatttcccacggggtcatttccagagcgggtgccgacccttccaagcttgcgctccgggcagacgcatcacaccggcggaggagtggacactcacggcccgataacaagcccaaaccaagccagtcatacagcagggaggccagaaagggaacccgcgaacgcagcatagaccaagaacttcagcacacccaccgatacatcgcaccacggcgcngctgccttgcaaccacactgacggccagggtgcacgcgctcgctcggcaggggccgccctttggggtacacgtgacagaactatatttcacgatctattctctgtacctcaccacaacaaacgacaccgagacccgcggagcaacaatatccgcggcgctaggtaaacagagatcgcacacacgctcggcgctgcgaggccgcgcgccttctcacgctcgaccaccccggcctcgcagctctgacggtacggcgaccgtgaacggtagagcagctctgaacatgcggggcataatgactctgatgcagagcccgacgccgcctccaccgaccacgcctcacgtgatcacacgagtgaacggcgtcaaaggaggagtcgcgagggcaccgtacataccgcccgcagcggatggcggcacgcgcgcatcaccanaccatcaaaccctacgcgagcacacgtcggataatcgcggtg

SEQ ID NO: 231491 - DNA, 964 bp, Homo Sapiens
  misc_feature (367)..(368): n is a, c, g, or t
  misc_feature (370)..(449): n is a, c, g, or t
  misc_feature (522)..(522): n is a, c, g, or t
  misc_feature (944)..(944): n is a, c, g, or t
ggataacagagtggactaacatctctaataatttctcttgccagtgactttaaactaaagaacttaattaaagaacattgttcccataggttaaatttttattcttatttaaacatatttttcttaacttttgtgggtacatagtgtgtgtatatatttatgccatatatggcatattttgatacaggcatatgaataggtattaatcacatcagggcaaatgaaatatccatcaactccagcatttatcatttgtattacaaaccgattctacacttttagttactttaaaatgtacaagtaaattgctattgactatagggtcattttcatgggtataataaaaattatatacaagtataaatannannnnnnnnnnnnnnnnnnnnnnnnnnnnnnnnnnnnnnnnnnnnnnnnnnnnnnnnnnnnnnnnnnnnnnnnnnnnnnnncccttgtcgggccccccctcggcccctcaaaaacttttcaaaaaccttccttttgggcgccgggggcccccanagaggaaagggaaacttgggcccatacctgtttctcctagggaaaacccggggaccagaacaaagggcctgggaatctccccccaaataaaaaaaccccccgggggggaaaccgcgagggtttctggaacaaatccccagaaggggagttccgggggggccataaacggggatttctttccaacggggagtccccaggcggagccttcaatatacaaaataacgcccccgggcgcggggccacttatttggaaaaaacgggggtgggaaaatccaattaagccattcctcggccgacgggggaagacccctcccaaaagggggggtggaggaaaccctggaaatcgccaggggaacacccttgggcgctgggaaaaatttgccggggaaacggggcaaattgcatggccctatcatgacccngtggggaatcctactggaga

SEQ ID NO: 231492 - DNA, 593 bp, Homo Sapiens
  misc_feature (129)..(129): n is a, c, g, or t
  misc_feature (131)..(381): n is a, c, g, or t
gggtacatgtctctggtttcagaattaaaagaattcagagttaccttgtgagataaatgttctttgcttcatattcacagtttcacctccatttaaatttatggggaagaataaatgtttcctgactcngnnnnnnnnnnnnnnnnnnnnnnnnnnnnnnnnnnnnnnnnnnnnnnnnnnnnnnnnnnnnnnnnnnnnnnnnnnnnnnnnnnnnnnnnnnnnnnnnnnnnnnnnnnnnnnnnnnnnnnnnnnnnnnnnnnnnnnnnnnnnnnnnnnnnnnnnnnnnnnnnnnnnnnnnnnnnnnnnnnnnnnnnnnnnnnnnnnnnnnnnnnnnnnnnnnnnnnnnnnnnnnnnnnnnnnnnnnnnnnnnnnnnnnnnnnnggccccgggggcaaccaaggggccggaacaaacccaaagggagcccggaggcccccaggggaccccccaacgggagccaagggggccccagaccaaaaaaaccccccgcccggcccaaacaccgaaaccgggggaaaaccataaaaaatctgggcaacggggaaaccaccaaaaacggcggagggacccgaaaccccggcagaaacacaccc

SEQ ID NO: 231493 - DNA, 1228 bp, Homo Sapiens
  misc_feature (721)..(721): n is a, c, g, or t
  misc_feature (748)..(748): n is a, c, g, or t
  misc_feature (788)..(788): n is a, c, g, or t
  misc_feature (822)..(822): n is a, c, g, or t
  misc_feature (986)..(986): n is a, c, g, or t
  misc_feature (1139)..(1139): n is a, c, g, or t
gggggcgtacagcggagccgatcctcctgtcttggccgtgggctttgtggcaggagaatggggaagcagtggccggacgccgaaggcctggtggcagatggcgtggagcgcacgcccgcgggcctgggcctaggagctcgtgctagcggggccggagggggatgggaaggtccaggccgtctcagccgtagagcctggctttctggtatgggtgcacaggtgggggagggagatgtctgcggctccactcacccgggcgaactgggttagtgactaccccccccgcagcaaccccgcgaagtgaggccgcggacgagcgcctgcgccagaggacaagtggcgcagggcggagcacacgagcgggtggctctcccagcaggccgggcggccggccacgcaggtcgtcgtcgctcgcgccacacatcacgcggccccgcggaccgccggcctcggagcgtggagccatagggtgctcccgcagtaccaccgggcaacgccgcccagccgcgaaggcaccccgcccgcgactcgcaggttgtcgtcacctcaagcgactccgacgccgctcgcccgctcccgtcgtgcgcgtggtcggcgcggggagggcggcctagtggtgtgacgtacgttagttccaggggaagcgcgaagcaggtcgtagcttgacgaacatacccgcagtccttctgcggcgtgcaccggcggcccgagcgctgggccncgtcctgacaagaagcccagtcgtacngagcgcgcgagggagtggtgctctggacggggcggggccncccgccctggaggggaagatcagacgacgacctnaccacaccgcactcgcgccaccgtgacccacctgctgacattagcgtagcccggcccaccctcgcgtgcacgtacgcggacgacacgcctgacgtagcgttcgtccgcgcgatccgagtcgccaccggcaatacgctgatgcaacaccgaggccctgagacgtnccgtgaagacgctcgacccgtgacctacaaggggaagggtgaagctcgccgcacatgcggtgcgttggatgacgccattctaccaatcattgtatcataatccgacgcatgcccctcatgtgagcagctttgcgccacacatgcacgacgcgncccatgccagtcgtagaccacgacgacacgggcgacgcatcgtgagggcggtgcgtcgagcccatcctgactacggcctgggcgtgaga

SEQ ID NO: 231494 - DNA, 684 bp, Homo Sapiens
  misc_feature (272)..(394): n is a, c, g, or t
  misc_feature (416)..(428): n is a, c, g, or t
  misc_feature (430)..(498): n is a, c, g, or t
  misc_feature (502)..(530): n is a, c, g, or t
  misc_feature (536)..(536): n is a, c, g, or t
  misc_feature (554)..(581): n is a, c, g, or t
ggattctagggcttatttccttgccctttgcagttttctgtgtgtgttacagtctccaccaaaatatgcccaggtatgttgtatgaataatgcaaggtaacatccagagaagcaaattgtgttcacccaactctaggagaaactgcccttttttcttttggacaagaccacactgccaacctgatttgctggatttgaacactcttaattctcccaccttcaccacagcagaaatcaaagggcagtgaatgtggggtcaagactttgtctgnnnnnnnnnnnnnnnnnnnnnnnnnnnnnnnnnnnnnnnnnnnnnnnnnnnnnnnnnnnnnnnnnnnnnnnnnnnnnnnnnnnnnnnnnnnnnnnnnnnnnnnnnnnnnnnnnnnnnnnnnnntaaattatgttttgggcattannnnnnnnnnnnnannnnnnnnnnnnnnnnnnnnnnnnnnnnnnnnnnnnnnnnnnnnnnnnnnnnnnnnnnnnnnnnnnnnncccnnnnnnnnnnnnnnnnnnnnnnnnnnnnnctgtgnccgcccctccgccccccnnnnnnnnnnnnnnnnnnnnnnnnnnnngggcgccgggccccccaaaagggaaagggaaaagtggccaaaactttggttccccaaggaaaacccggggcccaggaaaaaagggcttgggaatctccccccc

SEQ ID NO: 231495 - DNA, 431 bp, Homo Sapiens
  misc_feature (228)..(228): n is a, c, g, or t
  misc_feature (301)..(318): n is a, c, g, or t
tgagccaccgcgcccggcccttagtttgctttttaagcgaagagaatgcaggtgttgagttgcatgtgtgaaaactctgaatttactttggttgatacatcttcgctcccactcccattcagattctgtttttatatggattgtatttgttttcctctggaattaaatggcctaactttatctgggtcctaaagggaaaaccccccaccccgcccgaaacaaaaaaanaacccttggtcggggcccgcccttcgggccccttcaaaaaaactttttccaaaaaaccaattccctttttggnnnnnnnnnnnnnnnnnnagaaaggggaaaagggaaaaccagggggccctataaaccgggtttttcccccaaagggagaaaaaaccccgggggcccacggggaaaaaaagggggctttgtggaaaatctct

SEQ ID NO: 231496 - DNA, 591 bp, Homo Sapiens
  misc_feature (290)..(353): n is a, c, g, or t
  misc_feature (390)..(402): n is a, c, g, or t
cttgccagggagtcggtgatgtgtgttcctgtgaatgtcagttcttttcacagcatggttctgagaaagtgcccttaagcaagaccaaatttatggccagaaggattgctcagacccagacatctgagtggcatctaacactattctaaagattgactttgtcctcatgcaaggaattttcctttaaatactataagaacaattcaacatgcaatatattcttgctgtctttcctataaataaatttcactgggctgggacgggaaataaaagcctttttcaacacactnnnnnnnnnnnnnnnnnnnnnnnnnnnnnnnnnnnnnnnnnnnnnnnnnnnnnnnnnnnnnnnncccacacaaacacaaacgacccacccagcaatttctnnnnnnnnnnnnncaatcaaaccaccatcctctttgctgggcccccctccggccccttgaaaaaattttttttaaaaccatctctttttggggcccgggggcccccccctaggtcaaagggcaaatgcggcccaataactgttttctcaagaaaaaacaccgcgggcaaacaacaaaaggggcgttggacatctccccccac

SEQ ID NO: 231497 - DNA, 1005 bp, Homo Sapiens
  misc_feature (147)..(148): n is a, c, g, or t
  misc_feature (193)..(193): n is a, c, g, or t
  misc_feature (373)..(375): n is a, c, g, or t
  misc_feature (432)..(432): n is a, c, g, or t
  misc_feature (434)..(436): n is a, c, g, or t
  misc_feature (438)..(446): n is a, c, g, or t
  misc_feature (466)..(466): n is a, c, g, or t
  misc_feature (527)..(571): n is a, c, g, or t
  misc_feature (709)..(710): n is a, c, g, or t
  misc_feature (797)..(797): n is a, c, g, or t
  misc_feature (859)..(859): n is a, c, g, or t
  misc_feature (917)..(917): n is a, c, g, or t
  misc_feature (978)..(978): n is a, c, g, or t
ggataccacaaggcttttgtaccatggtgcccacgtgtatcaaagtcagggaatcccacttcctggaagccaagaggaagtctctcaaaactaggagggaaaggtgttttccccccaacagtctgcgctccggagacattatattanngccctatgttttttcccccaaacacgaaaatgaagtattctgtgngcttttttttcacccccccaaaaaaacgcaaaaacatccctcggtcaccgagcatgccccaccgtaatttagacaccttcgcgtggccgcgcgcgcgggcacacccccgctcaccaacatccaataccttaactatccaccaacccaccaccggcgccgctctaccccttccctcacccnnnccataacacctggcacatctacccctacccctaatcccccccttcacgcatcacggncnnncnnnnnnnnntctcttcctcccccaccccnccatacacataccaaatattcctccacatccccactctacaccacatctctctattacatnnnnnnnnnnnnnnnnnnnnnnnnnnnnnnnnnnnnnnnnnnnnnacaaccaccttatccccctacctctctgtgcacccatctcatcccaatacatgattactctctgtccctctttcaccctcacctcatgcttctagtctccccgccttaatggggctctctctgcccttcatctccgcnnctcgaacaccacctccgcacccacacccacacgctaccctcactcgcgccgcctctgatcggctaattcgccggacgttctaaattntctttgaaattctataataactgacgtattattggaatctagcccacaccacaccatcttcnctcactcgctcgcgagagcgtctgatcctcctctctactgtatcgcgtacccggaccngcctctctattcacgtgtttgcgctattgccccgacctctatagtgcacttctctcacaancgctagcaatgccgcctcaccaccccg

SEQ ID NO: 231498 - DNA, 618 bp, Homo Sapiens; identical to SEQ ID NO: 32835

SEQ ID NO: 231499 - DNA, 910 bp, Homo Sapiens
  misc_feature (182)..(302): n is a, c, g, or t
  misc_feature (358)..(369): n is a, c, g, or t
  misc_feature (445)..(445): n is a, c, g, or t
  misc_feature (599)..(607): n is a, c, g, or t
  misc_feature (671)..(671): n is a, c, g, or t
gggctcagtttctcagtcacattagtcattcaagtgttcagacagccacatgaggggacagtgcagctacaggatatgccatcatggcagaaagttctattggttggacagtgttggtctatactgactcttatttctcagggagatcacagcaacctaaataaaccagataccttttctcnnnnnnnnnnnnnnnnnnnnnnnnnnnnnnnnnnnnnnnnnnnnnnnnnnnnnnnnnnnnnnnnnnnnnnnnnnnnnnnnnnnnnnnnnnnnnnnnnnnnnnnnnnnnnnnnnnnnnnnnncgcaccacaaaaacacttaagaacttcatctagagccgtgtcttctccccaataannnnnnnnnnnnccacaaaaagacatttactgaaacctcgcccacagagacctcggaaacgaatctcgcccataatacccacaggggncccaaacaaccttatatttacacattaccccgcccaaccgggggcatgaaagtccccgcgagctggttcgcctctacctttacagcactcccccccacaaaatggagaacactcacgcacctcgcggcgcgagtgaagaacccgaatacgcctnnnnnnnnntgtattaattaatcagggcctccctcccccccactatcccaaacactaacccccccgcggagangaggggggggagcactaaaaaaacatccttatagaattccgccccaacgctcacaaacaccagtatcccggtagtacaaacagacttcacactcgccgcaaaggggatcaacaccacaaacccccacaccccatcaggcgcaccaccctttatgacgaaacaagggggcgcagcgagatgtcttctcatcccacacccgcgccggcttatatattgcccgcaaatagctcctgcgggca

SEQ ID NO: 231500 - DNA, 1010 bp, Homo Sapiens
  misc_feature (724)..(724): n is a, c, g, or t
ggggaaatggagcccgctgcagggacaggaaccacagtgactcacagttggaccccgaggggaagtgccatctgcaaatcctctaaatggctctggtccccgggtgagctcatctgcactgccgctgacactcagaaccaggactggcttctttctcccagggaacgggcttttcactctaaattatggctatggcagaaaccaacattcgagccgcagcacctctcccctacccgccatacacacacacaccgccacacgatggcatggacctgggtgagaacagcgtgcccgtcctgcgagccgtcacaaattttcccccttttaaaaaacgcgccttcctccataatgactctccccacagcaagcctccttggacgctatcatggcaagcggaaatgagaccgttcctcttaaacccgaacgtatgtggaattcccccccaaaggccagtacaccctgccaacactccattgagtttaaacccttggggctcccggggtactctgggtccacggaaggcctcctcacctttgggtccccctcttccctggggctccatttgggtcctggggcaggccggaaccaaccgtcccgggacctttgcgggcagggaaaaggggggcccattgtctgcccccacgggaacttctggggggggccatcctcttcctagacgataaaacgcgcccgaaccgctgcgggggcgaaacacacccaaatnggtcgcaaaccgccaccccccattcaccctccctcaccctggcgccctttgtttccctaccgttcactaatccggtaccagaaataccacaccgccaaggcctctgtgccccagtccctgcccatccggtaaaatcccgccacaaaagcgccgcttcttttgcaacacccgcttttcgctttacgcggaatacgcacgcgcgcttcctcatatgtaccagggatccaaatcgcacactaatgtaccgactacatcacatctcgctgcgcgcccccacactggtaaa

SEQ ID NO: 231501 - DNA, 168 bp, Homo Sapiens
cttgttcggcgcgcctcgacccctcaaagaagtttatctaaaccattctctttgtggcgccccggcgccccgaaaggtaagagggcaacatgggcctatagcttggtctccttagggaaaactctgtgggccttgaacataggggcctttggattcccccaaccatat

SEQ ID NO: 231502 - DNA, 1042 bp, Homo Sapiens
  misc_feature (924)..(924): n is a, c, g, or t
  misc_feature (1008)..(1008): n is a, c, g, or t
gggagtcctaatgagatgaaccaggtacctcagttggaaatgcagaaatcacctgccttctgcattggtctcactaggagctgcagaccacaactgttcctaattggccatcttgccccctctcaaattttactgattttatgaagccaaatttattaattttttttactttgcatctggattttaagtcattgcgaaaaaatttttttcccacaccgcaaattatgtaagaatttattcatgctttcttctagtacttacatgggtacaatttttacccttaagtcttcactcatttgagactttaataaaaatatcagcttaccctgtacatcagcttattgattgcctccaataatgttggtattcaaaaattaccctacccaaatgaccactggccatggtccccccgtcccccacttgctctaatgagatataaacatccttggtcgggccgccctctggcccctaaagaaagttttcctaacccctttcgttttgggagtggtagggccccgggttaggtaaaattgccacctcggctccttcaaccctcctctcccctaacgaaaacaccttggaccactggacccaaatgccctttgagattctcctcacccgaataaccaaacaaccgcgcccgtgggcgggtgtaacaccgcgaagccgttctgtgggacaccgaaattcgcctaaattggcaccgccccctcgcaagcgcttcctctcgatcgcggctatcattttcatcctacaacggggagcctcccgatgcgcgaaggtcacctcctagtctccgcaaattacggcgcgcccgccccaccctgtgggacacttctacctcggacatagtacttcgtcatgcgtattattgtcactatcacaacacactgttcctccgcgcgctatcatgtgcggtacctngcgcctacatgcacacacacgcgagcttacgtgtcgagcgtccagattctgagtattatacacgctcggcacctctgacatctnctactcacctccctgtgactttcgcgccgctcct

SEQ ID NO: 231503 - DNA, 977 bp, Homo Sapiens
  misc_feature (609)..(665): n is a, c, g, or t
  misc_feature (906)..(906): n is a, c, g, or t
ggggatggttttaaacacctttgtgaaattgtctttttgccagaagttaaaggctgtctccaagtccctgaactcagcagaaatagaccatgtgaaaactccatgcttggttagcatctccaactccctatgtaaatcaacaacctgcataataaataaaaggcaatcatgttaaaaacccaaaaccactcctatcgcttccgttttgcctttctataatcacgtaaccacctctaacaaacctacccaccctttcacccctcttttccactcccgccatgccctgttccactcgtccgtttgtcccccctccccacctttccccttctctctccacccccatgaaaacccttccgacccccgattcttcctgtcggcacctgtatctcacaccccttacaagtaaccacgtctcccacagtttttgcgtccttcccacccatcccctgttcaccttcatcctcgcccctctgatccgtgattcgctgccacccgtccacccccctgggcgcatcccgctcgccttccttttcccctcacctcccttacatagctatgtcccctttacccgatttttccatctatctttcatttctccctcctctcttnnnnnnnnnnnnnnnnnnnnnnnnnnnnnnnnnnnnnnnnnnnnnnnnnnnnnnnnnattctttccgttctgcgcgccccatccccctctttgtgagccatcttcctcccattcttgtcccgcgccacccctccccgctctctactcctcgcttcactgccatccgccattcgcctcacttaatgcttgccctctcccacacatcggaccggcactcgtcacaacctcatgtgcaccccttctctaccctcccccacccctccgccgctttttatacatgtagtgagccctggcatgngaccgctttatggcgtgcgatactctcagagcgacactcgttcgtgattgccgacgtcacttacgctaccg

SEQ ID NO: 231504 - DNA, 885 bp, Homo Sapiens
gattgtgcaaagtttttgctagttttatcttctgactttgggactagtttttgctgcagagttgtgttgctttgtgattttcctctgggatagtgtactgtacacaaccagatgtgttccacactccgtgactccgcagtttgtcctggagtgacatacacatccaccatggaaagggaagcatctctgcctgtggattctcaagtacttggaagcacctctcctgaggaacctacaggattctaaggtttcctaggtcactgaacaactaatcttggtcccctgaatatttctaggtttgtaagcgcagcagctttatttcctctagaactcatcctgtttcaagggaggtacctaagaagatatagagtgtttctagggtaagggacctgcacgtgtacgcatagatgaaatacctgccctgtcacatgcgcacccaggccatggactgtcgcgccgtatccctgttgcctttcctgccccctcacccttatcaaggcgagggtcgcctcccctccacattgtctggtttcctggtgcggctttaccatgtcgcagaaagaagcctcctccggctttaccgcttactaagagccctagctttccccccttttccccagctttccacttccctacatcccgtttttcctgcccgggccttttttccttcctccccttaccaatcttttcctcacgtacctttccccttttgcttcgcgccccgctacccgcttccccggtttatgctgtaaccttgggccccccaatccccgctcttttcctaccgccaatacctttgcccaatgtgtacgcgtatggatattctccatatcctcaccccctgaagatcgagagatcatgttacccgcggccactattatcgtg

SEQ ID NO: 231505 - DNA, 523 bp, Homo Sapiens
  misc_feature (122)..(179): n is a, c, g, or t
  misc_feature (354)..(354): n is a, c, g, or t
  misc_feature (377)..(449): n is a, c, g, or t
tcttacccccaccttcccgacatacgggcaccaacctacccaacctaatttccttcaaaatgccttccccccttaaccatggtgcgaccagcttgtcaccctccttgaaaatgccttaacannnnnnnnnnnnnnnnnnnnnnnnnnnnnnnnnnnnnnnnnnnnnnnnnnnnnnnnnntcttcctttctcaatgcccctcccaaagaaacaatccccgggccccggagctacctccgttgcgccttctatggcccgggcgaatctgccctttatccccctcttacccaccctccctcttcgataggccccccccagcgcgtggcccttacaacctcccccggaaaccaccctngggtaccgtctcgcaaaccgcgnnnnnnnnnnnnnnnnnnnnnnnnnnnnnnnnnnnnnnnnnnnnnnnnnnnnnnnnnnnnnnnnnnnnnnnnngttcgtaacgcctatcccctcacgttctcataccctcattcccccaacatctgtctcgcccgcgccatcttttt

SEQ ID NO: 231506 - DNA, 637 bp, Homo Sapiens
  misc_feature (60)..(145): n is a, c, g, or t
  misc_feature (242)..(251): n is a, c, g, or t
  misc_feature (316)..(325): n is a, c, g, or t
  misc_feature (415)..(471): n is a, c, g, or t
  misc_feature (555)..(563): n is a, c, g, or t
  misc_feature (566)..(579): n is a, c, g, or t
gggtaggtagtggggacaaaattgatgatccattaagtaaacaataaaagtgtccattgnnnnnnnnnnnnnnnnnnnnnnnnnnnnnnnnnnnnnnnnnnnnnnnnnnnnnnnnnnnnnnnnnnnnnnnnnnnnnnnnnnnnnnccttgtggggccgcctcggccctctcaaaaagctttttagaacattttctttgggggcccgggccccccttaggggaaagggaaacgggggcaatannnnnnnnnnccaggggaaaaccccgggcacagaaaaatatttgttttagaaattccttccccagagaaaaacannnnnnnnnnggggaaaacacaaagaggtttgttgaaaacaaatttcctttttggggaaaaaaccagggggggcctttaaagggggaatcttgttttcannnnnnnnnnnnnnnnnnnnnnnnnnnnnnnnnnnnnnnnnnnnnnnnnnnnnnnnntttcctttgtaacactttctttcaaaaagggaccggctgtgggaaatctttctctttttgggggttttttctccccccacaaannnnnnnnnaannnnnnnnnnnnnnaacaacgagggtattttttatttaaaaaaacccggacaaactccccccgcgaggggtg

SEQ ID NO: 231507 - DNA, 473 bp, Homo Sapiens
  misc_feature (143)..(143): n is a, c, g, or t
  misc_feature (145)..(146): n is a, c, g, or t
  misc_feature (159)..(160): n is a, c, g, or t
  misc_feature (170)..(172): n is a, c, g, or t
  misc_feature (226)..(226): n is a, c, g, or t
  misc_feature (237)..(237): n is a, c, g, or t
  misc_feature (240)..(240): n is a, c, g, or t
  misc_feature (252)..(252): n is a, c, g, or t
  misc_feature (369)..(416): n is a, c, g, or t
gggcagccatttgggagtagggggtaggtggggaagatgtactccgtatcaaataataatgatgttgaaataatgatagtaggtatgtattatggattggagaagcacttattacactatctaacctaatatgtagaacaatntnncttgagaaagttnngtatcctgtnnncgttattttctgaatgtgaagctcagagaagtgacacagagtaaatggctgatnctctatattgnagnatattttgtccnttccctcttcccctgaaggaacaaaagcacggaatcctttaggcctcttttggataattttatttcttgaaaaccccaaaggggcctttggcctttggaacccctgggaagggaaannnnnnnnnnnnnnnnnnnnnnnnnnnnnnnnnnnnnnnnnnnnnnnnttccccaaattccccaagaggggttttctggaaaaccccccccttaaaaatttttgg

SEQ ID NO: 231508 - DNA, 1125 bp, Homo Sapiens
  misc_feature (95)..(96): n is a, c, g, or t
  misc_feature (104)..(104): n is a, c, g, or t
  misc_feature (934)..(934): n is a, c, g, or t
  misc_feature (1025)..(1025): n is a, c, g, or t
  misc_feature (1068)..(1068): n is a, c, g, or t
  misc_feature (1077)..(1077): n is a, c, g, or t
  misc_feature (1087)..(1087): n is a, c, g, or t
  misc_feature (1108)..(1108): n is a, c, g, or t
gggcgctcactaaggctcggtcctctccacgtggtcctgacctgtcctctgtgagcaagagaaacaggactgggtttgggggtgtcctgtctcannggacacangacaccccggttttcaccactacacacgaaaaaataccacatctatcataccctatatctcatgccgcgccacctcccgactccctgaagctatcctaaaccagatccctctcgggcccggccacagcgatgcaaatcgaaatactggccccctcattatttcccgcaccgcgtcaccgcgccacataatgacacccccttgacatccgcccgcagaacatggcgcaccccacccccgctaagaaaccacgcagtcgtaagatatcagaatgaggagcttcgctgaaggcgtctgtccccaggcccgacaactactggagaacagcgacagcgctgcatcagtgtacggtcaacatcgatgctctacctccaagactcgctgctcgcacctactgctctggtaatgacccgcacagctccgccgcccgaaaaaacaatgcgccccaggacagcacacaaacataccacacacacgagccggatagcacctagcggaagaaccaccaagccgaacgcctggtaatatatctagcggccgcacgtgctggcgtaacatcgccggcggccatgaatccccacggatggatcaacaacgtcatgccagccgtactcactaattatgctggaacagccaccgccgcgtcgctctgaacagcagcaccgggctatgctacagcattgtgcaccacccgacgcgcgcggtgacgcgaaacattgacgacgaccgatttccgcagcgccgcacagcgactacaactggcggtgcactgatgtcacaccctgctcagctgcacgcgatctcacgccgatcacgatcaccgcgcgtcganctattgaccgtcatgagtacataagacacgcggtctcgtcacctagcatgtgtgaactagacgcggacgacgatagctctccatgccgtcngtacatgtgatcgtaatacctgccacgtgcagcagcacgtgangctatgagngactgttcgntgacgtaccaactgccatctnagcgacatgatgaacgt

SEQ ID NO: 231509 - DNA, 501 bp, Homo Sapiens
  misc_feature (163)..(203): n is a, c, g, or t
  misc_feature (249)..(383): n is a, c, g, or t
  misc_feature (393)..(406): n is a, c, g, or t
gggaaggagctgggccttgctgactttcctatctggcctcttccctatctcctgtggggccaagagcttaggacagtgtctcagaaaagcctctaagtagggggtttttcccatgggattgtggtagtctgatttttcatatctattcaaatgttaagaaatnnnnnnnnnnnnnnnnnnnnnnnnnnnnnnnnnnnnnnnnnataatagataatttcaaacctatataaataaatccttatgtatttnnnnnnnnnnnnnnnnnnnnnnnnnnnnnnnnnnnnnnnnnnnnnnnnnnnnnnnnnnnnnnnnnnnnnnnnnnnnnnnnnnnnnnnnnnnnnnnnnnnnnnnnnnnnnnnnnnnnnnnnnnnnnnnnnnnnnnntttggtgcgnnnnnnnnnnnnnnaaaaaaatttttaaaacccttctttggggcgcgggcccccaaagggaagaaaaagggggccaattgtttcccgaaagaaccccgggcacaaaaaa

SEQ ID NO: 231510 - DNA, 900 bp, Homo Sapiens
  misc_feature (736)..(736): n is a, c, g, or t
ggggaggtttttagctgttaagcaaataaattatgtcattattgaaaaagacttaagggatgattagacttggcaatctgtaagcaggagtataaatgttttaaattgcattgtccctatgtaactatcttaatggctatatatatgtattttataaagccatttatgtatacacatgtaacttggaatttccttcctccctacacattttctacacttacatcaccttattggataaaaacaaagccacgcgccttttttgcttgaaaatccaaaatatcaaaaaccaaggttacccaaatgaaaccaagtcaaaagaaacacatccctggcccaattccaaacccaagtggtttcacagcctaacaaactctaactttctccaacactttaataccagtttgggtttcccttcttcatcgactacccctaccaactatggcactgccctattacgaagcacccctccacaccaacaaacctacatgcacacactcagtcagaaatatctaactcctgtatacacaccctgtttcccatatatgtgccgcctcatacaatgttcgactctcatattacccatttgaaacgcatcatacaacccaaacgttcacgacaaaaatcactaattacgtacttatctattccatccacgacgcaaaccccatattcactcctcctccacaataaacacatcatcttacgacaacttgagtacgccgcgcgacgccatcangtcaaacccaatatacacgctcacgcatcaatcgtacagcacacttacgatcgaatcccacaaacgacatcaatatcatcatactgacatacttcaccctcactcattactctacgtaacatactccaacccagtctacccatacccacactcctcctaccgct

SEQ ID NO: 231511 - DNA, 305 bp, Homo Sapiens
  misc_feature (155)..(155): n is a, c, g, or t
  misc_feature (162)..(162): n is a, c, g, or t
  misc_feature (166)..(167): n is a, c, g, or t
  misc_feature (210)..(219): n is a, c, g, or t
gggacttccggtcgcgccagccgcccgttgccagttctgcgcgtgtcctgcatctccagtatggaatgtatgtttggccctgtgctgtggtcctggcccagtacctttggtttcacagaagatctctgccaggcaaggccatcttagagattggnaaaggcncctnngggtgaagtgaacctttccaggaatttttggggtggcccaaannnnnnnnnnccaaaaataaaataattgggccaaaaaaagtttaaaaacggggcctcccctgggcttgggaaaatcttttccgcaaaacctgcccc

SEQ ID NO: 231512 - DNA, 684 bp, Homo Sapiens
  misc_feature (203)..(537): n is a, c, g, or t
gggcttgaccatgtgacttgcttcagcctgtggcgtgtgagtcacagtcacatgttccattgagaaatgggagctttaaagaccatgctacggttctgccacctttgtcgtttgccatgacacgagcttatcctaagggagagctgcttctttagcctgaaacagagttgaaactgatctgcaatgaacctgtcacatgagannnnnnnnnnnnnnnnnnnnnnnnnnnnnnnnnnnnnnnnnnnnnnnnnnnnnnnnnnnnnnnnnnnnnnnnnnnnnnnnnnnnnnnnnnnnnnnnnnnnnnnnnnnnnnnnnnnnnnnnnnnnnnnnnnnnnnnnnnnnnnnnnnnnnnnnnnnnnnnnnnnnnnnnnnnnnnnnnnnnnnnnnnnnnnnnnnnnnnnnnnnnnnnnnnnnnnnnnnnnnnnnnnnnnnnnnnnnnnnnnnnnnnnnnnnnnnnnnnnnnnnnnnnnnnnnnnnnnnnnnnnnnnnnnnnnnnnnnnnnnnnnnnnnnnnnnnnnnnnnnnnnnnnnnnnnnnnccttgtcgggcggcctccggcccctccaaaaaactttctagaaacatttcttttggggggcccgggggccccccgataagggtaaaggggaaaacttggggccccaaagaactggtttttccccaaagagaaaaaaacccggggccc

SEQ ID NO: 231513 - DNA, 925 bp, Homo Sapiens
  misc_feature (82)..(214): n is a, c, g, or t
  misc_feature (218)..(476): n is a, c, g, or t
  misc_feature (711)..(727): n is a, c, g, or t
ggggaggtgtgtgtatgtttggggaacctttgaatttggaagtaccaagcctaggtgacacagcaagactctgtaaaaaatnnnnnnnnnnnnnnnnnnnnnnnnnnnnnnnnnnnnnnnnnnnnnnnnnnnnnnnnnnnnnnnnnnnnnnnnnnnnnnnnnnnnnnnnnnnnnnnnnnnnnnnnnnnnnnnnnnnnnnnnnnnnnnnnnnnnncagnnnnnnnnnnnnnnnnnnnnnnnnnnnnnnnnnnnnnnnnnnnnnnnnnnnnnnnnnnnnnnnnnnnnnnnnnnnnnnnnnnnnnnnnnnnnnnnnnnnnnnnnnnnnnnnnnnnnnnnnnnnnnnnnnnnnnnnnnnnnnnnnnnnnnnnnnnnnnnnnnnnnnnnnnnnnnnnnnnnnnnnnnnnnnnnnnnnnnnnnnnnnnnnnnnnnnnnnnnnnnnnnnnnnnnnnnnnnnnnnnnnnnnnnnnnnnnnnnnngggacgaagtaagactcttttcttcaaaaaccaccaccaaccaaacaaaccaaaaattgtttcctttaaggggggagaaaaccaaatttttatccaaaataaaaatggtaaaaagccccctctccctcctctgagactcaacggaaccaaaccgatataaccctttgttcggggccggccctccgggcgcccttcaaaaaaaccttttctcaagaaaccattttccattttgggnnnnnnnnnnnnnnnnntgtacggttacatggaaacagtgggccctaaaccgtgttttcccctaagaaaaatccctgggctccatgaactaaacgggctctgggaatctcccacccaatttaaaaaagaccccccgggcggcaaaccatgtctttctcttaacacactcccccaagggtggattccgaagggctctaatattgacataactaaaa

SEQ ID NO: 231514 - DNA, 969 bp, Homo Sapiens
  misc_feature (48)..(277): n is a, c, g, or t
agtcgacggtaccggacatatgcccgggaattcggccattacggccgnnnnnnnnnnnnnnnnnnnnnnnnnnnnnnnnnnnnnnnnnnnnnnnnnnnnnnnnnnnnnnnnnnnnnnnnnnnnnnnnnnnnnnnnnnnnnnnnnnnnnnnnnnnnnnnnnnnnnnnnnnnnnnnnnnnnnnnnnnnnnnnnnnnnnnnnnnnnnnnnnnnnnnnnnnnnnnnnnnnnnnnnnnnnnnnnnnnnnnnnnnnnnnnnnnnnnnnnnnnnnnnnnnnnnngcagaatcaatatgtgcacagttctctttatcaggcaaaaacacgtttattgagacatgaaatgagaatcaggctgaaggaatcatgcagctgaaagatgattatattcatagaaatgaagagatgaaatattcaaagaagatggctactttattgtgagacttaccactttaacctcatatgttaacagcacctaccaaaaaatgatatgagatagagctaaaatactgaaattgcaaatggacaaaataaatcgtgaaaatttgtttattatttcttcaataaatatttctaggtgctttgtgattctttcatttagtcattaaagccattgctttactatatttgcgttgccactttaaaaacaagttacttgacattggttttgacagatttccctaaattcctatggaattaattgattattttccaaaatggttgaataaactttgtaaccccctctaagggagattttaattccttccttttaaatccccaaatgaacttttaaacttaccgtggctgtttaaatgcccttggtaaagggaccttcttgaaaattggcataaaacaaattccttggaaaaaggggaacaactgtgagaaatattcccttgggttcccttttttcccccaaagggccccacaagaaatggccttttaaaaacacctaaatcccccgggtgggccac

SEQ ID NO: 231515 - DNA, 973 bp, Homo Sapiens
  misc_feature (50)..(219): n is a, c, g, or t
  misc_feature (238)..(321): n is a, c, g, or t
agtcgacggtaccggacatatgcccgggaattcggccattacggccgggnnnnnnnnnnnnnnnnnnnnnnnnnnnnnnnnnnnnnnnnnnnnnnnnnnnnnnnnnnnnnnnnnnnnnnnnnnnnnnnnnnnnnnnnnnnnnnnnnnnnnnnnnnnnnnnnnnnnnnnnnnnnnnnnnnnnnnnnnnnnnnnnnnnnnnnnnnnnnnnnnnnnnnnnnngagacagggtcttcggcannnnnnnnnnnnnnnnnnnnnnnnnnnnnnnnnnnnnnnnnnnnnnnnnnnnnnnnnnnnnnnnnnnnnnnnnnnnnnnnnnnngtagaggggtttataggcacgagaccctgcacccaacctagagttgccttttttaagcaaagcagtttctagttaatgtagcatcttggactttggggcgtcattcttaagcttgttgtgcccggtaaccatggtcctcttgctctgattaacccttccttcaatgggcttcttcacccagacaccaaggtatgagatggccctgccaagtgtcggcctctcctgttaacaaaaacattctaaagccattgttcttgcttcatggacaagaggcagccggaagagagtgccagggtgcccctggtctgagctggcatccccatgtcttctgtgtccgagggcggcatggtttctcgtgcagtgctcagacacagcctgcccctaatcctaccagctcaaagcagcacctgctctcccttggcagctaatggccatgaacacccccagaagaaacagcttccggggaaccaacccgaaattctggttttggccaacatgcccctctgcccgggtggccccggttaattgaggggacaccccgggggagactggtttaactgggcgctgtggaaaataaagggggaaaagccttgccacaccctcccgggccggcggggggaccctctcaaaagcccccacaaactttggaaaa

SEQ ID NO: 231516 - DNA, 966 bp, Homo Sapiens
  misc_feature (50)..(134): n is a, c, g, or t
  misc_feature (136)..(157): n is a, c, g, or t
  misc_feature (224)..(319): n is a, c, g, or t
  misc_feature (487)..(617): n is a, c, g, or t
agtcgacggtaccggacatatgcccgggaattcggccattacggccgggnnnnnnnnnnnnnnnnnnnnnnnnnnnnnnnnnnnnnnnnnnnnnnnnnnnnnnnnnnnnnnnnnnnnnnnnnnnnnnnnnnnnngnnnnnnnnnnnnnnnnnnnnnntatatttgacaatacccagtaccaatttattgtttgttgttgacattaacattttctttaagagtannnnnnnnnnnnnnnnnnnnnnnnnnnnnnnnnnnnnnnnnnnnnnnnnnnnnnnnnnnnnnnnnnnnnnnnnnnnnnnnnnnnnnnnnnnnnnnnaaccttaggcctgtttcctgacatatactaaatgccccatgtgctaactgaggatgatcattgtaggaaaatttcatagactatgagggaaagccatgcctaaaataatctccagcttattaagaagtgcattcctttttgtttctttgttttatcttagattgagtnnnnnnnnnnnnnnnnnnnnnnnnnnnnnnnnnnnnnnnnnnnnnnnnnnnnnnnnnnnnnnnnnnnnnnnnnnnnnnnnnnnnnnnnnnnnnnnnnnnnnnnnnnnnnnnnnnnnnnnnnnnnnnnnnnnccagcttaattttttggggtttttaagtagaaggccggggttttcaccatgtttggggcaagaatggttctccaaactcctggaccctcaaggggatccaaccccgccttcaaacttccccaaaaggcctggggattggcgggcgttgagcttaatcggggccccggccaaatttttgggaatttttaagcaaaaaatggggggtttcacccatatttgggtcacggcttgggtctttggaacccccggaacctcagggggatttaaacccggccctctggccctccccaaagggggctggggatattccaaaaggggagacccagcggccaccccagccccgtgccca

SEQ ID NO: 231517 - DNA, 1005 bp, Homo Sapiens
  misc_feature (171)..(171): n is a, c, g, or t
  misc_feature (178)..(178): n is a, c, g, or t
  misc_feature (185)..(185): n is a, c, g, or t
  misc_feature (187)..(187): n is a, c, g, or t
  misc_feature (218)..(218): n is a, c, g, or t
  misc_feature (240)..(240): n is a, c, g, or t
  misc_feature (242)..(249): n is a, c, g, or t
  misc_feature (251)..(258): n is a, c, g, or t
  misc_feature (260)..(263): n is a, c, g, or t
  misc_feature (265)..(267): n is a, c, g, or t
  misc_feature (269)..(273): n is a, c, g, or t
  misc_feature (279)..(290): n is a, c, g, or t
  misc_feature (294)..(494): n is a, c, g, or t
  misc_feature (498)..(502): n is a, c, g, or t
  misc_feature (504)..(505): n is a, c, g, or t
  misc_feature (512)..(531): n is a, c, g, or t
  misc_feature (541)..(541): n is a, c, g, or t
  misc_feature (543)..(546): n is a, c, g, or t
  misc_feature (569)..(582): n is a, c, g, or t
  misc_feature (589)..(597): n is a, c, g, or t
  misc_feature (601)..(601): n is a, c, g, or t
  misc_feature (608)..(609): n is a, c, g, or t
  misc_feature (619)..(626): n is a, c, g, or t
  misc_feature (630)..(630): n is a, c, g, or t
  misc_feature (649)..(649): n is a, c, g, or t
  misc_feature (691)..(691): n is a, c, g, or t
  misc_feature (693)..(694): n is a, c, g, or t
  misc_feature (700)..(700): n is a, c, g, or t
  misc_feature (737)..(737): n is a, c, g, or t
  misc_feature (759)..(768): n is a, c, g, or t
  misc_feature (776)..(776): n is a, c, g, or t
  misc_feature (782)..(782): n is a, c, g, or t
  misc_feature (799)..(799): n is a, c, g, or t
  misc_feature (801)..(801): n is a, c, g, or t
  misc_feature (808)..(809): n is a, c, g, or t
  misc_feature (829)..(829): n is a, c, g, or t
  misc_feature (842)..(843): n is a, c, g, or t
  misc_feature (845)..(845): n is a, c, g, or t
  misc_feature (865)..(914): n is a, c, g, or t
gggagctctgacgtacctcactaaatatcaaactaaatgagccaaatttacatagttcaagatggcgtatgatcctccacaagactcacaacttaatagcctaaattttaaaaaggaataattaaggttggaagatttcaagcctataatatcttttaaaatatcaactcnaagggcnccagggncnaaccattttggggctttcaacacccctggcnaaatccagcactttgggagccnannnnnnnnannnnnnnngnnnngnnntnnnnnaccccnnnnnnnnnnnnaaannnnnnnnnnnnnnnnnnnnnnnnnnnnnnnnnnnnnnnnnnnnnnnnnnnnnnnnnnnnnnnnnnnnnnnnnnnnnnnnnnnnnnnnnnnnnnnnnnnnnnnnnnnnnnnnnnnnnnnnnnnnnnnnnnnnnnnnnnnnnnnnnnnnnnnnnnnnnnnnnnnnnnnnnnnnnnnnnnnnnnnnnnnnnnnnnnnnnnnnncccnnnnncnnccccccnnnnnnnnnnnnnnnnnnnnagggagagangnnnnacggcgaggaaggaaaggagaannnnnnnnnnnnnnaagtgannnnnnnnnaggncgcgggnntttccccccnnnnnnnntccntaggagagggagaacggancacgggatttatttcccccccgccgccgcgggggggaggagncnncgccgntggggttgccgcaggagccccgaggagccgcctctcncccccgcaggtgtatacccgtnnnnnnnnnncccctttncgtctntgcgcgtttgccgcccncnctacgcnnagaagaaagaagggggaggntaccgcccgcccnntntgattcggcaccagaggggnnnnnnnnnnnnnnnnnnnnnnnnnnnnnnnnnnnnnnnnnnnnnnnnnntcatgtcctcccccccttgacatttaagtggcgcgccgtcagtcatttagttatgccgcaccccgccgcacccgcgtctctcacagcctag

SEQ ID NO: 231518 - DNA, 676 bp, Homo Sapiens
  misc_feature (349)..(412): n is a, c, g, or t
  misc_feature (478)..(538): n is a, c, g, or t
  misc_feature (583)..(615): n is a, c, g, or t
gaaaagacagaattcacattgggatccagtttctttaatatctcatgcacttaaacagaaatttgcatttcaagaagatgattcttttgagaaagagaatagatcttgggaatcttccccattttctagtccagaaacttcaaggtttggacatcacatttcacagtcagaatgacagcgaaacttaaagaaagaaatgggtcaacacaaaaagctggttggacccaggtatcagcaaccacaagcccttctaaaactccaggggatttaaacttcaacttaaggggtgaagctttttaaactttcccaaaaactttcctcccgggaagggataaaattaattccttannnnnnnnnnnnnnnnnnnnnnnnnnnnnnnnnnnnnnnnnnnnnnnnnnnnnnnnnnnnnnnnagaaccctttctttggacccccttttttggcctaaaacttttggcttattggaaaaaatttggaannnnnnnnnnnnnnnnnnnnnnnnnnnnnnnnnnnnnnnnnnnnnnnnnnnnnnnnnnnnnaaaaaaccccgggggccccttccgggggaaccctttgggacgccnnnnnnnnnnnnnnnnnnnnnnnnnnnnnnnnnggggggcccccaaacaaacgacacctaccctacaaaatgccacaaagcagtgatatataaa

SEQ ID NO: 231519 - DNA, 942 bp, Homo Sapiens
  misc_feature (44)..(52): n is a, c, g, or t
  misc_feature (73)..(212): n is a, c, g, or t
  misc_feature (290)..(300): n is a, c, g, or t
  misc_feature (471)..(480): n is a, c, g, or t
ggtgtgtacaatgtacacactggtacttagagtttctgtttgannnnnnnnnaataaactactctttgatttnnnnnnnnnnnnnnnnnnnnnnnnnnnnnnnnnnnnnnnnnnnnnnnnnnnnnnnnnnnnnnnnnnnnnnnnnnnnnnnnnnnnnnnnnnnnnnnnnnnnnnnnnnnnnnnnnnnnnnnnnnnnnnnnnnnnnnnnnnnncccaaaaaggaaagggaacggggccaggcgttgaaccaaaggaaaatccgggccttggcaagggctggaattccaacnnnnnnnnnnngcccgcgggcacccgaaggttacgaacaaatccaaagggcggttctaaggccattaccggaaaagaacaaccgggaagcccaacccacctcaaaataaaaattaagccccgcccgggccatttatgccattactggttgaaatccataaggaattttgcccaacatgaaannnnnnnnnnaccgcccctcgttaaacctgaattcgttaattgcaattaagccacattttcccccccctgggtaataaaaattccccccctgggggaaaacacgaaaactaaaaaaaccggcaccaaatttggcccgccgtttaattttaaaaaatgcgaacaaccccccccaaaagaaaggggtttgaaaaataaaacccatatttctaaattaaacccttttagggcaaaggggggcaagggcctccccccttgtgggccgcgcacaatccttaccaaatattttttgtttaatccaacttgcccgggaaaaaacctatccggggttctcctccccctcccacccgcgaaggaaaaaactggttaaaaaaattggcttttgtgggagaacacgcgtcgtatcacccaggggtgaaaacacatctatcctccccaacctccacaacgtctccccctcttttatttatgtag

SEQ ID NO: 231520 - DNA, 1020 bp, Homo Sapiens
  misc_feature (165)..(165): n is a, c, g, or t
  misc_feature (169)..(169): n is a, c, g, or t
  misc_feature (179)..(179): n is a, c, g, or t
  misc_feature (186)..(186): n is a, c, g, or t
  misc_feature (218)..(305): n is a, c, g, or t
  misc_feature (341)..(353): n is a, c, g, or t
  misc_feature (391)..(391): n is a, c, g, or t
  misc_feature (394)..(414): n is a, c, g, or t
  misc_feature (429)..(429): n is a, c, g, or t
  misc_feature (447)..(447): n is a, c, g, or t
  misc_feature (451)..(488): n is a, c, g, or t
  misc_feature (496)..(496): n is a, c, g, or t
  misc_feature (503)..(503): n is a, c, g, or t
  misc_feature (507)..(507): n is a, c, g, or t
  misc_feature (544)..(544): n is a, c, g, or t
  misc_feature (563)..(563): n is a, c, g, or t
  misc_feature (575)..(577): n is a, c, g, or t
  misc_feature (580)..(580): n is a, c, g, or t
  misc_feature (582)..(582): n is a, c, g, or t
  misc_feature (594)..(594): n is a, c, g, or t
  misc_feature (603)..(603): n is a, c, g, or t
  misc_feature (610)..(700): n is a, c, g, or t
  misc_feature (704)..(704): n is a, c, g, or t
  misc_feature (799)..(800): n is a, c, g, or t
  misc_feature (820)..(820): n is a, c, g, or t
  misc_feature (822)..(824): n is a, c, g, or t
  misc_feature (866)..(866): n is a, c, g, or t
  misc_feature (869)..(870): n is a, c, g, or t
  misc_feature (872)..(872): n is a, c, g, or t
  misc_feature (874)..(874): n is a, c, g, or t
  misc_feature (884)..(884): n is a, c, g, or t
  misc_feature (890)..(890): n is a, c, g, or t
  misc_feature (905)..(905): n is a, c, g, or t
  misc_feature (925)..(925): n is a, c, g, or t
  misc_feature (931)..(931): n is a, c, g, or t
  misc_feature (985)..(985): n is a, c, g, or t
  misc_feature (987)..(988): n is a, c, g, or t
ggcggtataattcaccaatagcctacttgcaggagatatggaaggcagaagtgaagaaagcattagtcaggttttatagccaccatatgtggagacagatggatgcataggagcttcagggacacctgcttccaccacattgtcctgatcctttgctctgccaanttgnaggagtattncttaganaccaccactaactggcttgacctgcccattannnnnnnnnnnnnnnnnnnnnnnnnnnnnnnnnnnnnnnnnnnnnnnnnnnnnnnnnnnnnnnnnnnnnnnnnnnnnnnnnnnnnnnnagaaaagggggggttttgtgtggttcttttttgtgnnnnnnnnnnnnnaaatttttgtttggtggggaggggcacacccccccggncgnnnnnnnnnnnnnnnnnnnnnccacatcttcttttntgggtgtctttctcgcanccannnnnnnnnnnnnnnnnnnnnnnnnnnnnnnnnnnnnncttccgcngccccanatgntgtcgtgtgttctttccgccgttcccaccgccgtttntggtcccctcccccccggntgggcggccccnnntgncngtcctcttcccncctctctcngcggcgnnnnnnnnnnnnnnnnnnnnnnnnnnnnnnnnnnnnnnnnnnnnnnnnnnnnnnnnnnnnnnnnnnnnnnnnnnnnnnnnnnnnnnnnnnnagtntgcttttcttacctcccccctcccttttcgtgcgccccgccccacgccccgtcccggccgcccttttgttgtccccacccatctccgctcgcacnnacatcccgcgcgtctccctncnnnctccttttctggttctcctcctctcctcctctcccccccctngcnncnanccgccccctngtgtanatcgccccctgctantcctccacccgccgcgcccntcgctnccgtccgccccctaatcattgttgtttgttttttgccccccgcccgtccgcccncnnttcactcacgtccgctttgccctcctccgcat

SEQ ID NO: 231521 - DNA, 1049 bp, Homo Sapiens
  misc_feature (44)..(52): n is a, c, g, or t
  misc_feature (75)..(189): n is a, c, g, or t
  misc_feature (215)..(232): n is a, c, g, or t
  misc_feature (292)..(346): n is a, c, g, or t
  misc_feature (953)..(953): n is a, c, g, or t
  misc_feature (959)..(959): n is a, c, g, or t
ggtgtgtacaatgtacacactggtacttagagtttctgtttgannnnnnnnnaataaactactctttgatttacnnnnnnnnnnnnnnnnnnnnnnnnnnnnnnnnnnnnnnnnnnnnnnnnnnnnnnnnnnnnnnnnnnnnnnnnnnnnnnnnnnnnnnnnnnnnnnnnnnnnnnnnnnnnnnnnnnncccttgccgctgcgaccacccccccnnnnnnnnnnnnnnnnnnttactgtttggccccgccgctaccttttagcatacaaaacaatgaaacatacccgtatcnnnnnnnnnnnnnnnnnnnnnnnnnnnnnnnnnnnnnnnnnnnnnnnnnnnnnnntgccacgatgaaacaacaatccttcccgaagcaacaaaaaaaggatcacccccgcggctccttttatgttaatataaaaaagcctgccgccccatccagaccatacattatacaaatatacaccacccctacctacccccctctcccacataaaccgccgtacacctcccatttctcaccttctcacctccctcctgcccaaacctacataaaacaattcttattttaccgacactaaaaactcgccgcaagagacaaacgcccccccaattggccgccttgtggacaaaaaaacataatctcgcccgcagcggtacaacacacgggtggtggataataaacctttccacatcagacgccgattccccttttataaaacacacccttgtggagggagaaacatcccctcccatcttccctcttatttctcgcacaccacaaacacacctttttcccccctaccaatataacctctctacacaaaacgacataaccaccacccctttttcttcttctccccaccaaatcaaccctcaattattccgcgctccgaaaaatatacgagcgcatagttcaataactacttcagctaaacacacacagtccntattanacagtgaattttctctgtccatacacaccacatctaatcaataataaaaaagacgactactcaaccgaccttgagtctcatccatcgata

SEQ ID NO: 231522 - DNA, 807 bp, Homo Sapiens
  misc_feature (119)..(238): n is a, c, g, or t
  misc_feature (247)..(531): n is a, c, g, or t
  misc_feature (533)..(538): n is a, c, g, or t
  misc_feature (540)..(540): n is a, c, g, or t
ggggcggcttgacacagggttggtacgtagcgtctgtcctgggcgttggtccaccgggattgcgtttatctggcgaccccatggagttcacaggctcggaaaaaccaatctaacgttgnnnnnnnnnnnnnnnnnnnnnnnnnnnnnnnnnnnnnnnnnnnnnnnnnnnnnnnnnnnnnnnnnnnnnnnnnnnnnnnnnnnnnnnnnnnnnnnnnnnnnnnnnnnnnnnnnnnnnnnngactgatgnnnnnnnnnnnnnnnnnnnnnnnnnnnnnnnnnnnnnnnnnnnnnnnnnnnnnnnnnnnnnnnnnnnnnnnnnnnnnnnnnnnnnnnnnnnnnnnnnnnnnnnnnnnnnnnnnnnnnnnnnnnnnnnnnnnnnnnnnnnnnnnnnnnnnnnnnnnnnnnnnnnnnnnnnnnnnnnnnnnnnnnnnnnnnnnnnnnnnnnnnnnnnnnnnnnnnnnnnnnnnnnnnnnnnnnnnnnnnnnnnnnnnnnnnnnnnnnnnnnnnnnnnnnnnnnnnnnnnnnnnnnnncnnnnnncnacccacacccacaacgaataactaaggccctcttagataaacagcagttactacactcccagcaatgttttagggactttacagatattaattcctttaatctcctttacagtcctatgagaaaagcactattattttcctttttacaaagaaaataagcactgataaattaaataattggcctaaagtcttacagctaccttaaaaacaaagcttggatcttcaccccaaagcaggtttggtctcttttacacacctatactggcc

SEQ ID NO: 231523 - DNA, 552 bp, Homo Sapiens
  misc_feature (213)..(221): n is a, c, g, or t
  misc_feature (329)..(329): n is a, c, g, or t
  misc_feature (372)..(372): n is a, c, g, or t
tggagttctgagagctaggaaactgggaggttgagccaggagcaggggaacttgggctttgaggcgagacctaattcttagggtgctctatgaggacatgggtggtgggcaaagtgacagccgcctgagcccctctgcctggtcccctttgccccccggatgaatacgacgacattgtggttcacagcagccgcagccgaacccggctgcctnnnnnnnnnagcctcaaaaccctcttcctgacgacccccgcccccgggtgaatttgtttcccttggtaaatatactttcccggtttaataaacaaaaacccctagtttctggacccncacacaaagcaccattttattataataattaacattgttgtgnccggcccccgggcccttgaaaaaacttttcttaaaccatttccgttttggggcccggggcccccgcaggggtaaggcgaacagttggcgccacaacttggtttcctaaagagaaattccttgcgtcattgaactaagggccctgggtatttccccccaaatataaaaattctcccggggg

SEQ ID NO: 231524 - DNA, 483 bp, Homo Sapiens
  misc_feature (299)..(299): n is a, c, g, or t
attttttaaaaagtagaagcttgagggtaagatgaaatctggctttgtcattagagtctcagcagagcaagaaaagcatagatgtggggtgtgagaacgctggagcctgtctcctcttcgcaggcctctggcctgccccagcctcccgctaccttgcccaaaccccatctgaatgatttgtggacaagcaaaaaagttcccaccgcattttctccttgacttttactaaaagttaaataaaccgtgccacttcgcccccggcccttcgtttatttaccacccccccacatttacatatnttaaaatggccggccccgcctctggcccctcgaaaaaagcttttccaaaaatatctctgtttgtggcgcgccggggttcccctcacggataagggaaaaatggggcctatagtttggttttcccaaaggaaaatccctgggacaatgaacataagggcttgggaatctccccactacaaaaaaa

SEQ ID NO: 231525 - DNA, 300 bp, Homo Sapiens
  misc_feature (70)..(126): n is a, c, g, or t
ggagacagaattctgctctgttgcccagactggagtacagtgatatgatcgtagctcatagtaacctggnnnnnnnnnnnnnnnnnnnnnnnnnnnnnnnnnnnnnnnnnnnnnnnnnnnnnnnnngtgcgtgccaccatgccaggccgatttttgtattttttgtagagacaggggtctcagtagattgccccagcctggtcctcaaaactcctggggttcaaagcaatccctccccgcccttggcaaaataccgaagttttggtttaaaagggaaaattaggaccctaccgggggtcc

SEQ ID NO: 231526 - DNA, 708 bp, Homo Sapiens
  misc_feature (241)..(244): n is a, c, g, or t
  misc_feature (517)..(525): n is a, c, g, or t
gggttgcacagccaaataggtaatttgggagtcttcagcatgctgcccacctggaaaggggaaggggaatgcagataaatatatagattttgccacattgtgacacatgccgatacatgatcgcgaccaaaaagcagctctgaggtttcttgttgcacttgtcgcgtgcagggcactgtacatagagcaagatttgaaatcaaggcttcgtcatgaataaatttgcatttatgaatgaccnnnnccaaccccaccaacaaaataaaaccctggtcggccgccccgccccccaaaaactttccaaaaccttccttttgccccccgggcccataagtaaagggacctgggcctaagttgtttctaagaaaatccgggccagaccaagggttggaattccccccattaaaaaccccccgtgcggaacccaagcgtttggaacaattccaaagggagttcgaaggccttaatgggaatttccccccgggaatcccagccaaactccaatatccaatttcgnnnnnnnnntggcccattcattggaaagaccgggtggaaaattccttaacccatttcggccccaacttgggaaagccttccccaaagcgggatggattgaaacctggaattcgccacgggggcattccagacactttggccccccttgggggaaataattatttgcccccctggcggaaaaaagggggcgcc

SEQ ID NO: 231527 - DNA, 795 bp, Homo Sapiens
  misc_feature (280)..(334): n is a, c, g, or t
  misc_feature (336)..(598): n is a, c, g, or t
  misc_feature (680)..(689): n is a, c, g, or t
gggactgagaatcattctagggtttgattgagcccctgtcctgtgccactaaaggaactcgaacttttcatcacttagagatttcagaggggaatggaaaaacagttctaatcaataagcaagcaattcaagaaaaatagaattaatcaggcaatggctgcaacatgtcctatctttaatctattttcttattaagcttggacattgacaatagaaccagaagcttgtagctggatcaaaatattctccataggcctggagtttcatgagggtctattcnnnnnnnnnnnnnnnnnnnnnnnnnnnnnnnnnnnnnnnnnnnnnnnnnnnnnnngnnnnnnnnnnnnnnnnnnnnnnnnnnnnnnnnnnnnnnnnnnnnnnnnnnnnnnnnnnnnnnnnnnnnnnnnnnnnnnnnnnnnnnnnnnnnnnnnnnnnnnnnnnnnnnnnnnnnnnnnnnnnnnnnnnnnnnnnnnnnnnnnnnnnnnnnnnnnnnnnnnnnnnnnnnnnnnnnnnnnnnnnnnnnnnnnnnnnnnnnnnnnnnnnnnnnnnnnnnnnnnnnnnnnnnnnnnnnnnnnnnnnnnnnnnnnnnnnnnnnnnntgagccacggcgcccagcctcatgaaggcctatttctttacttcaccatggtctgatgggtgctacatgtttggccatgaannnnnnnnnnccattatcaggggtcttgggccgggtccttgccccaccatgaaaaggcccacaaggttttcttatgaagttaaagaaaaaaagccgaaatggggaaacctaacatt

SEQ ID NO: 231528 - DNA, 633 bp, Homo Sapiens
  misc_feature (616)..(616): n is a, c, g, or t
cactgcagctatcttaccttctcttgatgcgcgctgttaagtcctttgaaaatcgaggagtagacctaaggcaaatacgctccacagtcctagacctgcaaggaaacccctggttaccaggcgcatgcccccagagcaatggtggccttcctacggggctagaccttgttaactgccaccgcccacacccatctgaaccatcctacaactccggaacattacaggacacattgccccctacccctcagggtgatagcacaactccctagcaaatcacaggaaagagtcgggcaacacggttatgttggtacacgagtatacaacgtgaccgagcaacaacactgtagcgcacaagagtccctgtcaatcaatcccccgcggtaactgtcgagagaagacacctagccgagctcgcacacgatgcggagtgcagataatagacaataatctcccgtcgaacccacctctcacacccacccgacgcgacgcaatattgaatcgtgaccgccgaaaaaccacagactaagcctacatgatctacagcaacgacaacgaggacgacgtcttcgcccctctaccatgggactcgcacagaccgctgacgaggctcttgagncataaagcacagtcgtc

SEQ ID NO: 231529 - DNA, 802 bp, Homo Sapiens
  misc_feature (109)..(396): n is a, c, g, or t
  misc_feature (581)..(615): n is a, c, g, or t
gggaaagtcgtgtgtgctccaccccaccccagccacccatacccagcctctacccacaccctgctctcctcagtcatcctttgttaagggttaaaaccagggcacctgnnnnnnnnnnnnnnnnnnnnnnnnnnnnnnnnnnnnnnnnnnnnnnnnnnnnnnnnnnnnnnnnnnnnnnnnnnnnnnnnnnnnnnnnnnnnnnnnnnnnnnnnnnnnnnnnnnnnnnnnnnnnnnnnnnnnnnnnnnnnnnnnnnnnnnnnnnnnnnnnnnnnnnnnnnnnnnnnnnnnnnnnnnnnnnnnnnnnnnnnnnnnnnnnnnnnnnnnnnnnnnnnnnnnnnnnnnnnnnnnnnnnnnnnnnnnnnnnnnnnnnnnnnnnnnnnnnnnnnnnnnnnnnnnggagaaaatataaaaaaccaggggcacctgggccgggcgccagtgcttcaccccctggtaatgccaaccacttttggggagggccaagggtggggcagaaccataaggtccaagaagattcgaagacccatccctggaaccaaacatggggggaaacccccattctcctactaaaaagcgccatnnnnnnnnnnnnnnnnnnnnnnnnnnnnnnnnnnnttgggggggcccgccttcgggcccctcggaaaaaaacttttccaaaaaccattatctttttggggcgcggcgggcccccccagaaaggcacaaggggaaaattgggcgaaataaatcgtggttctccaaagggaaaaatccctggaccatgagacaaagcgggctttggaaattctcccccccaaat

SEQ ID NO: 231530 - DNA, 580 bp, Homo Sapiens
  misc_feature (88)..(377): n is a, c, g, or t
gggtgtaaaaattgataaaaaatagaaaatgtaaataaacgaaacatcttaggagaaattgaaaaaataggacaagaacttatttttnnnnnnnnnnnnnnnnnnnnnnnnnnnnnnnnnnnnnnnnnnnnnnnnnnnnnnnnnnnnnnnnnnnnnnnnnnnnnnnnnnnnnnnnnnnnnnnnnnnnnnnnnnnnnnnnnnnnnnnnnnnnnnnnnnnnnnnnnnnnnnnnnnnnnnnnnnnnnnnnnnnnnnnnnnnnnnnnnnnnnnnnnnnnnnnnnnnnnnnnnnnnnnnnnnnnnnnnnnnnnnnnnnnnnnnnnnnnnnnnnnnnnnnnnnnnnnnnnnnnnnnnnnnnnnnnnnnnnnnnnnnnnnnnnnccacaacgaatccacaactaaaataatataaaaaccaaaccttgtccggccggcctccggccttccaaaacccttttctagaaccattccgtttgggtgccgcgaggcccaacaagggctacacggagacatgggccataaactggtttcccaaagagaaccctggaccagcgacctagaggccttgggatcctacaccaaat

SEQ ID NO: 231531 - DNA, 165 bp, Homo Sapiens
gaattatcccaatggggaattatttaaaaaatccaaaaactaacatggttagcgagggctggcataaaaaaagcaaataacttataactaatggaaaattaattcccgccctttgggggaaaagcactgccagccgaattctccctaggacttaaaaagccctat

SEQ ID NO: 231532 - DNA, 895 bp, Homo Sapiens
  misc_feature (274)..(323): n is a, c, g, or t
  misc_feature (335)..(376): n is a, c, g, or t
  misc_feature (662)..(662): n is a, c, g, or t
gggaaccacgtggaggaaaagcacgcgagtttggagcgggtggagcaggaacagaggtggactggaatgtcacacgacggggcagctggaagggcaccactgagttcagtacttcaaaattgccgtgctctacctctccccagtgcacaaaaacactctccacaccaagctgctgctgctgggggatggagggatggcgtcagcgattcaagactgtttttcctacctgttcagcacttctttcagcgatatgaagttaaatccagagtcacannnnnnnnnnnnnnnnnnnnnnnnnnnnnnnnnnnnnnnnnnnnnnnnnngatgttcaagcnnnnnnnnnnnnnnnnnnnnnnnnnnnnnnnnnnnnnnnnnnagactctcctagagaggtggcaagaaaatctcttagcagatctagggctccatttgaccagctcatcatgcttgatggaaaaggatcacctctttctcagtagcgtcagccaaagttccaggggctgaatctcatggaaaacaatctgggaatatgagccctatccccagaacccaatctctgtgggccaggggggatgcaactattcctgaactagccagatcccccaatttccaggtaagaacagccttatggccaacccacgtttggaagaacccccagaggnaagaactcgaaatcccttatggagaaatacaggttttcctttcaacctggcctggttcctttatgggcttcccatctcctggcacttccttttggaacaaatccaaacaaatcctcccacacctttttggggcacaacttccccaaaaacccctcttaaaagaaacaccttaatcccccccaaaaacttcccctctcaaagaaaaaagcgccggaatttttggaagggggttt

SEQ ID NO: 231533 - DNA, 323 bp, Homo Sapiens
  misc_feature (54)..(274): n is a, c, g, or t
tatttaaggacataacacgaaaattataaaaaagaaggcccaagacgaaggccnnnnnnnnnnnnnnnnnnnnnnnnnnnnnnnnnnnnnnnnnnnnnnnnnnnnnnnnnnnnnnnnnnnnnnnnnnnnnnnnnnnnnnnnnnnnnnnnnnnnnnnnnnnnnnnnnnnnnnnnnnnnnnnnnnnnnnnnnnnnnnnnnnnnnnnnnnnnnnnnnnnnnnnnnnnnnnnnnnnnnnnnnnnnnnnnnnnnnnnnnnnnnnnnnnnnnnnnnnnnngggcgccacaaataaaaaccctggcgccctaaaattggcaccgaacata

SEQ ID NO: 231534 - DNA, 963 bp, Homo Sapiens
  misc_feature (308)..(503): n is a, c, g, or t
  misc_feature (693)..(693): n is a, c, g, or t
gggagaagcgtcaattcctgggagtagttcgttggttttctttcccctcatccttttgcctgctcccggcgaggggtggctttgatttcggcgatgagctcccagaaaggcaacgtggctcgttccagacctcagaagcaccagaatacgtttagcttcaaaaatgacaagttcgataaaagtgtgcagaccaagaaaattaatgcaaaacttcatgatggagtatgtcagcgctgtaaagaagttcttgagtggcgtgtaaaatacagcaaatacaaaccattatcaaaacctaaaaagtgatggannnnnnnnnnnnnnnnnnnnnnnnnnnnnnnnnnnnnnnnnnnnnnnnnnnnnnnnnnnnnnnnnnnnnnnnnnnnnnnnnnnnnnnnnnnnnnnnnnnnnnnnnnnnnnnnnnnnnnnnnnnnnnnnnnnnnnnnnnnnnnnnnnnnnnnnnnnnnnnnnnnnnnnnnnnnnnnnnnnnnnnnnnnnnnnnnnnngaacctccctgagcctggtgatctggcctggcctcaaccctccggaaagtggctgggaaattagcaaggtggtggaaccccatccattgccttggagcctaaattttggtataattttttcgaattgacctcccatgaatggcttggacctggaagcaatccgtgttgccgttttcctgttttccggttntattgtattgcccttggactagttttggaggaaaggagaactctgtggcctcctcaatgaacccccagggttggaggaggtgtccataaggcgccgccccctttttccaacctcccagagggaaaacccctgctgggcccatcccctaggggtttgcagaggaggaaattttctccccgggcgcctccaaagacctgactcccgaaagctgacctgcgggccgtattatattgaggggggaaaatactcccaccgtaccccacgtgcccc

SEQ ID NO: 231535 - DNA, 420 bp, Homo Sapiens
  misc_feature (57)..(288): n is a, c, g, or t
  misc_feature (297)..(311): n is a, c, g, or t
  misc_feature (350)..(359): n is a, c, g, or t
ggggttgacaacggctggagcaaattaaataaataaaatagctctgtctttcaatgnnnnnnnnnnnnnnnnnnnnnnnnnnnnnnnnnnnnnnnnnnnnnnnnnnnnnnnnnnnnnnnnnnnnnnnnnnnnnnnnnnnnnnnnnnnnnnnnnnnnnnnnnnnnnnnnnnnnnnnnnnnnnnnnnnnnnnnnnnnnnnnnnnnnnnnnnnnnnnnnnnnnnnnnnnnnnnnnnnnnnnnnnnnnnnnnnnnnnnnnnnnnnnnnnnnnnnnnnnnnnnnnnnnnnnnnccggggggnnnnnnnnnnnnnnnaaaaaatttttaaaaactttttgggggggcggggccccnnnnnnnnnngggaaggggaatattttttttccaaaaaaacccggcccaaaaagagggttggggttccccc

SEQ ID NO: 231536 - DNA, 756 bp, Homo Sapiens
  misc_feature (49)..(347): n is a, c, g, or t
  misc_feature (358)..(358): n is a, c, g, or t
  misc_feature (656)..(656): n is a, c, g, or t
  misc_feature (714)..(714): n is a, c, g, or t
gcgatgtatccatatggtggcaaacatgccacaattcggatgaatctcnnnnnnnnnnnnnnnnnnnnnnnnnnnnnnnnnnnnnnnnnnnnnnnnnnnnnnnnnnnnnnnnnnnnnnnnnnnnnnnnnnnnnnnnnnnnnnnnnnnnnnnnnnnnnnnnnnnnnnnnnnnnnnnnnnnnnnnnnnnnnnnnnnnnnnnnnnnnnnnnnnnnnnnnnnnnnnnnnnnnnnnnnnnnnnnnnnnnnnnnnnnnnnnnnnnnnnnnnnnnnnnnnnnnnnnnnnnnnnnnnnnnnnnnnnnnnnnnnnnnnnnnnnnnnnnnnnnnnnnnnnnnnnnnnnnnnnnnnnnttagagcttanaaaattcatccctcttgcccatcagtagatcaggatatgaaggataccattgaacataaatattttgtatccatgatgaatacaaagtatattctcctgggaaaccaatagaacattcatataaatgattcctatgaaggtaaaaaactacaaaattcaaagatcatacagatcatgtgctctgtataatgtaataataggaaacaaaagcctgtcccactggaaattttttaaatgatcttcctaataactcatttaaaggagaaaatcaaaataattgccaattattttagaatantaaaaacttctcttaagctgaggaaattctaccaagaagggggtaaaaggaaattggnatagaatttgattcactttcccgggaaggaaaaaaaccaaat

SEQ ID NO: 231537 - DNA, 671 bp, Homo Sapiens
  misc_feature (207)..(207): n is a, c, g, or t
  misc_feature (242)..(312): n is a, c, g, or t
  misc_feature (617)..(626): n is a, c, g, or t
ggtggagttgtagacctggtgtggggagtatggggatcaacctcagaagcctccagagagagattggtggactctaggagtgtcgatctcagactgaccatcgctggggccacatccaagcagcagccctttgtccagagccatttcctccactggcctcagtttctgtagggcccagatggtgctgaagtcagatgccaagggganagtgactttacccacgagagagatttttaaatatnnnnnnnnnnnnnnnnnnnnnnnnnnnnnnnnnnnnnnnnnnnnnnnnnnnnnnnnnnnnnnnnnnnnnnntacgggtgaagagagatatatgaaactgggcatcatcttgcctatcctcctttcaagaggttatccaaaatacttgcaaagggggccttttttccaaagggggaaaagacaacccgagcccctgattattaggggttcccctgggctgaaacctttttgatggggcaacccaattgggcccccctccgggaagggtttaaccctaaaacctggccgggggaaacccccgatttttgaaagaaaaaagggggggccaacccccccaaattgggttaaaatccccctccccctgaaaaaactttgcnnnnnnnnnnaaaaaaaggggggacagggcggggctttttcaggggctataaaaa

SEQ ID NO: 231538 - DNA, 913 bp, Homo Sapiens
  misc_feature (229)..(287): n is a, c, g, or t
  misc_feature (368)..(440): n is a, c, g, or t
  misc_feature (627)..(635): n is a, c, g, or t
  misc_feature (671)..(679): n is a, c, g, or t
  misc_feature (705)..(759): n is a, c, g, or t
  misc_feature (880)..(880): n is a, c, g, or t
gggatttttatttcattaatgtttgtttatttctaataaattttaataagcgagtaatttaactaggtcgccagaagaccattatttttgtttgtctatttttgttgtcgtcactccctctctcgtcatctgtctgccagtctgttcacagatcaccttgtagtcccttgtggtttttactccatccagtgcttaaagctgatctaaggacttcgatggttccagcctnnnnnnnnnnnnnnnnnnnnnnnnnnnnnnnnnnnnnnnnnnnnnnnnnnnnnnnnnnncaaacaaaatccataaccccatccattacccctccccccatcacctaccccctcttcatatttcctctctcctttttatannnnnnnnnnnnnnnnnnnnnnnnnnnnnnnnnnnnnnnnnnnnnnnnnnnnnnnnnnnnnnnnnnnnnnnnntgcgggcgcttctattccttaacagccccctttcccttttcctgcctcgtccccgttccaccaacaatacttccttatttacctcctccttgggcgggcagccaccccacacagataggaaatacctggattcccccctgtcttccccccacacaatacattttccctttctacctgaacactttgnnnnnnnnnccaacaaacaacaccgttccggcgtgcgggccgccnnnnnnnnncttccccccaacctctgcggaaatcnnnnnnnnnnnnnnnnnnnnnnnnnnnnnnnnnnnnnnnnnnnnnnnnnnnnnnngccgtacacctttcaattcaatttccccctccgggccgtcctcccttcttggacgagtgggggtattttacatcacatatcacctaatccccgcgtacctcgcccaatactaccacccatnatgcctccggcagcacttccccacaccccccct

SEQ ID NO: 231539 - DNA, 838 bp, Homo Sapiens
  misc_feature (102)..(115): n is a, c, g, or t
  misc_feature (673)..(708): n is a, c, g, or t
gggccagcacagcagctgccttcgggccagtcggaagttaagggaaggaaaggcaaggcaagttacaagataaaagaagtcaacggaagcctcaaatactcnnnnnnnnnnnnnnaagaaaagaacaaaaaggggggggttaagttttctttttcatttttatacgtctggacttaacttccaggatagctgcaagacccttttgttcctttgccatgagcaggttttaggccgctctgttgggaccatggtgttaccttcgcgattacactggatcagaaacaggccatggagggacaggatccgggaggcgccagctcaaccgtccatgaaagacctcctcctccttttcacctccctctaacatatatggattattttctccaccctccctctaacatattttttaacggagtcaaagaggattcctatgaattttcccccctgggtttaaaaattatgaaccccaattccaagggagaccggcttaccccagtaaatggcccggggaaaacctggttcttaaaaccccccggttttcccccaaggcttggaccaaaaaatggttgggttgggctcttttcccctttcacccctcccccattccctgtgcagaaaaaaggggttttggttatatttttgggggcgcccttttccacaaaaacttgaggtnnnnnnnnnnnnnnnnnnnnnnnnnnnnnnnnnnnncccccgggaaaaaaccccccacacacaaatattggggccgcgggggcttttcttatatcccaaaagaaaaacaaatttgtggttcttttttaaaccccaaatggcttcttatccaaaaactttttgcccc

SEQ ID NO: 231540 - DNA, 599 bp, Homo Sapiens
  misc_feature (123)..(123): n is a, c, g, or t
  misc_feature (134)..(134): n is a, c, g, or t
  misc_feature (160)..(160): n is a, c, g, or t
  misc_feature (171)..(171): n is a, c, g, or t
  misc_feature (192)..(192): n is a, c, g, or t
  misc_feature (221)..(221): n is a, c, g, or t
  misc_feature (382)..(391): n is a, c, g, or t
  misc_feature (407)..(452): n is a, c, g, or t
  misc_feature (490)..(547): n is a, c, g, or t
ggggggagtcaactctgcttcttctgacctccaaactttccattagaagggcagtgatctcagcgatttaccagcatgggcagctgggcctgtgatttagataaatgctgttaaggaactgangttatactcangcagccgcgccctcagaagacgtgcngtctgggaggntccaagccttcctatactcgntgatctgggacacataacccacttcccantggaatcatccccaactgttaccctaagactttccctgggcaaccaaaagctggtcttgcccctggaaatgcccaaaaggaaaacggattggaaaaagtcctggtttcccgggaaaaacccccctcagggaagggagggggaatttggggaaaaaatgggnnnnnnnnnnttatacctttctccannnnnnnnnnnnnnnnnnnnnnnnnnnnnnnnnnnnnnnnnnnnnncccttggggaaactcccccgcggggggagttattttcnnnnnnnnnnnnnnnnnnnnnnnnnnnnnnnnnnnnnnnnnnnnnnnnnnnnnnnnnntttgtagggggggcggccttttcttccccaagagggggggcgggcggttcca

SEQ ID NO: 231541 - DNA, 1011 bp, Homo Sapiens
  misc_feature (845)..(847): n is a, c, g, or t
  misc_feature (961)..(961): n is a, c, g, or t
ggggcctccgaccctggatagtcgccgtcaggcactgaggaggccgagagatgaggccggagcccaccaagttctgggaagttctttctgacacaagtaagataacatctctgccatgcccacaggtgctgagaacaagagaaatcacagtgaaggaaggaggcggagtttccaagatttgggtgccatcatttctggagacatccttgaccggagataacagtcgtcgcccagatatccccttcactatctcccgcgtatacccgcaaaaaaagcgtctcacgttcccaatcgcagtactctatccacgcctattacttccacctaggcctcaatattcagtttaccgcgccctatgatgccgcttcgtcatattcccacacctccccgccccagcaagttaatccgtattcaccccacccaccctcattaacccccctgacccccttccaccccggcctcctccaaatacgttatcacctgtcttcccatatccttacacatccgttcgcatctctctacctatccgtatccgcacgaagatatagccttttaatacaccccagaccctacctacactccacgttgagttcacgcctctgcacattaccctaactcatgatactctattgcacggtctgtgatcccctccagtctctcaatcacattacgccgtcatatgttacactatcaccttttacctttgacctcgtatactacttgtgcctcccccgtaatatttcaccagttgtacgcaccgcgtcgcccgcaaccttgatatacacttcctgtccgcatccacgcaacgtaatactattccctcgctcagtggtttcgctgcctcnnncttatcttttgactgtactactgcgcactcgcgctgaaggaatcaaccctatacctgacgccgttatgttaccgccgcctcgacttccatattatctcaaacgtttcaccacanaccagctaatactagcgatttgctccgaacacgctagcctttctagctat

SEQ ID NO: 231542 - DNA, 359 bp, Homo Sapiens
  misc_feature (287)..(287): n is a, c, g, or t
ggggaacgcgaacgcggaaccgaagcaacggacagcccgaccaacacaccagcaggaccaccgacacaaatcagtgaaacggcgaccgaagcgcgccaagggaacagcgcgagtctgtagaatgggtgcgctgctaatcgcgctggcgcgcgttcccactatacgcctacggctgcccgacgttaccgccgctgctggggccgcacaaagacggcccacgatcctacgacggctctccccttgtcgcgcggcgtacatcgttactacgcaaatacgccacgcgcgtnaccccatggcatgaatgcgatagataagacgtgattaggagaggaataataatgagtctgaggccagccgag

SEQ ID NO: 231543 - DNA, 806 bp, Homo Sapiens
  misc_feature (52)..(62): n is a, c, g, or t
  misc_feature (137)..(147): n is a, c, g, or t
  misc_feature (186)..(240): n is a, c, g, or t
ctttctcacccacaaacctaagactactagtaaattccctcaaagccacaannnnnnnnnnnaatcggactgccaaattctccggcttgccccgggatattatcgaaaattatttgcatgattaatgataataaaannnnnnnnnnnggcaaaaataacccctacccacccccagcctccaacttnnnnnnnnnnnnnnnnnnnnnnnnnnnnnnnnnnnnnnnnnnnnnnnnnnnnnnnaaaatgataccccgccttccactatccacccttccctatccctacattacacccacccatctatacatatacactgtcgaacaggaccctcgcaccccattccacaaaccaacacagccactaattcacccacaccagatgtcataccactttccggtccataatacctacacgcccaaccccatcacctgccgactgctgccatccacccaacaactacagactacaccgcgtactccccctaccctacacccattttagtgatccaatcccactattacaacgcccaccaaaaatgctcccacaagaccctcgtcccttcgctcgtaagttggtttacatccaactccacgtctactgatcctttgactccctatagtctatatctatcctgacattgcctttctttatctcacaataccctacgtcctccgcctcgagatatttcgtcataccatatccagaccgcgctatcgacactttcatagactttgcataaactccatctcaccttatgtgagatgttgcccctattctttaggaatggcctgttgaacttttcatag

SEQ ID NO: 231544 - DNA, 333 bp, Homo Sapiens
  misc_feature (148)..(148): n is a, c, g, or t
  misc_feature (166)..(167): n is a, c, g, or t
ggggtcatatgtccagatcatgcaggaccctgaagataacagaaagggctcttcattctgttattttcagtaagatggaagagaatttgggggttaaagctgacacattgaatttgtgaacagagaaggggaggaggagataggtggnagaaaactggcttcttanngaagtgattacagcccaacagagggggactttgaaaggaggacattcccttggggaaccccattatttttcctttttttggcccaccccaatgggaaacttttccccaaaaatctccaaaaagtgggaaggtccccccaaaatccctgtgggccggaaaatttctc

SEQ ID NO: 231545 - DNA, 444 bp, Homo Sapiens
  misc_feature (87)..(220): n is a, c, g, or t
  misc_feature (236)..(236): n is a, c, g, or t
  misc_feature (246)..(246): n is a, c, g, or t
  misc_feature (253)..(253): n is a, c, g, or t
  misc_feature (256)..(281): n is a, c, g, or t
gggctcacatggtctttcttcagtgtgtgtgcatggagaaagagatccctctccctctcttccctttcttataaagccaccatcctnnnnnnnnnnnnnnnnnnnnnnnnnnnnnnnnnnnnnnnnnnnnnnnnnnnnnnnnnnnnnnnnnnnnnnnnnnnnnnnnnnnnnnnnnnnnnnnnnnnnnnnnnnnnnnnnnnnnnnnnnnnnnnnnnnnnnngccaccatcctatctngattagaatnctcaaanaannnnnnnnnnnnnnnnnnnnnnnnnnaccagtgtccgggccggccccttcgggccccccttcgaaaaaaagcctttttcctaaaaccctttccttttgggccgcccgggggcccccgaaaggggaaaggggaaaaagtgggccaataagctgtggtttccccaaggaagaaaaccccgggggcccaggg

SEQ ID NO: 231546 - DNA, 821 bp, Homo Sapiens
  misc_feature (45)..(94): n is a, c, g, or t
  misc_feature (404)..(412): n is a, c, g, or t
  misc_feature (423)..(500): n is a, c, g, or t
acagatggggtctcactatattgcccaggctgatcccaaattggnnnnnnnnnnnnnnnnnnnnnnnnnnnnnnnnnnnnnnnnnnnnnnnnnnatgagccactgcccctggctagggactttccttatttaagggtgacgcaaagaaaaacctaaccaagactattcaggatctccaggcttatggactgggggaataagaccttgcttttctgacccaagaaactcttgtgttcaatgatataaataaaggctgcggtgaccccccttctctcgcttgtatattttcttgtttctatccgatcccttcttaatatttttgtgtacgcaagttgtttggctctgttcttgcatttactcttcttttgtccagttctgtattctaatttagtagtattcatatnnnnnnnnnatgccccttcnnnnnnnnnnnnnnnnnnnnnnnnnnnnnnnnnnnnnnnnnnnnnnnnnnnnnnnnnnnnnnnnnnnnnnnnnnnnnnggttttgcgccttctgtgcgtctccatactggctcatgtatattttatctttatgttttttcttcctctcttgtctttcctatgtcttactattctttgtctttcttttcccttttttctctcgtaatagttacatgctccttctctcttctttatcgattatgtcgtgtttactttcatctccgttgctatattgtttctttcttctttgtccactttgcgtcttctttattcctcactacatgccgtccgtttcttcctcttatcatatttttctttctttgactgttctatcgctgtactctacctcttccctctcct

SEQ ID NO: 231547 - DNA, 1143 bp, Homo Sapiens
  misc_feature (905)..(917): n is a, c, g, or t
  misc_feature (919)..(919): n is a, c, g, or t
  misc_feature (921)..(921): n is a, c, g, or t
  misc_feature (926)..(926): n is a, c, g, or t
  misc_feature (929)..(929): n is a, c, g, or t
  misc_feature (993)..(993): n is a, c, g, or t
ggatgtgtaaaaatgtgatgctcagataagtacatttatatcagttcagtgttaaaatgcagtctcttgagttaaagtcatctttattttaaatgcagtgataaatgtcaactcttcggagaaactaggagaacaacaacagaaagctgtgtttgtcttttttctctcagatatatatcccgtatgagacttcaggtccccatgatttcacctcctaacctcatatgacaacatatcaacatcactttctctcggagttctaatatacactcatcccgtcctatttgtttccatccatacctccatcacacatattattggattcctccccatcaaaacccaaattttcatgcacctcatttcgcgtcagccatcccacattctaatccacaaaccaatcatccctgaccctttctttaccacacttttctgacaactacctcttcaagtctaacacccaacctactaccacccctctccaccttctaccttaccaatctttccccgttccatacatcaccacaacatctttccctgctccttttcccttaccttcttttccgtgaccgctctcgaactatgttttattccatcctctgcaccacaaatccgaagttcctcttccgttgttatatcaagacacaccactccgttactcatctgcttaccccactgtcactatcatttatatttatcctatcttgtataaatcgactacgtttccctattaccacgttacttcgcccactcttttactgcacctcccctctacacgtcatatatataaagagattacctatctaatttactcaatatacaatgtcactatacaccactccactgatcttcttacactgtcgttatgtctccaatcactttagtttcgtatatcatcttgatatttnnnnnnnnnnnnntntnctacnatncactaccctacacacttcttctatcttatactcactcaactacatactcactattgttattcancaatttccacactctattctttaaatattatgcacgacccaacacaacttaacatactagactctaggcctactacccccattcgtatcatacatcacatgctcttacgcatctcactctaattccccttttacgcactcctagtgttac

SEQ ID NO: 231548 - DNA, 195 bp, Homo Sapiens
  misc_feature (117)..(125): n is a, c, g, or t
atggacccaccgtggtcaaccgcaaaattctttatgaatttttaacccttggaaaatggttaatggacggaaaccctaagcccggccccccaaaaactgggcccaaaaatttgcacnnnnnnnnncatttaacgggccggggaaaattaaaccccccggggttttttggttaaaaaccacggggtattccccctt

SEQ ID NO: 231549 - DNA, 727 bp, Homo Sapiens
  misc_feature (260)..(283): n is a, c, g, or t
ggggtaggaagcaattgttctcaaacttcactagccccgtcggcgcggacgcttgtcgagaatgcagattcctgggtactgccagatacgaattgagcataccacaaaaaagttctcattttgtgtcctcccatcccattctcctcactaaccaaaggctaggaattatctgtgaatgtaggaccactggatttgcagtcttcatctgacactgtggagagtttctaggaatgaaacagatatatggccttgggtccccnnnnnnnnnnnnnnnnnnnnnnnnaatagagacgagcatctcactatgttgccctagggtagtctttgaactcctgggcctcaagcaatcccccacccgacttccgccctctcgaaagtgatggggattacaggccgttaaacccaccacggcctgggccagaaaggtggcttttaacacccaaaatcctggaaaaattgggttcaaaaagagaaaacatttgaaggcattgaaacaaccattcttggtgcgaagttcatttttaccttaatttgcccccctccaccttcctaaaattcttaccctttcctggtacctcccttcctttccccctggaaaatttattggggggcttaagtttgtcccttccaaacctggttttcctccagaacctttcctttttttaaagccttggccctttccgtgggttccaagtttccctgggccaaattagggggggtccacctt

SEQ ID NO: 231550 - DNA, 568 bp, Homo Sapiens
  misc_feature (87)..(118): n is a, c, g, or t
gaaataagtgaataaaggctagataggcccacagagtgggggagggacaccccagggctgtgtcccatctggcctgggattcatagnnnnnnnnnnnnnnnnnnnnnnnnnnnnnnnncgccatgcatggtcactccccctttcaataaaaaccccatagttccccttccccgactgcccttgataagtgaaagcaggaaaggaaggtcttagaaaagctcctggaagaaacggaggcggagcgggattataccctggaattcccagcaattttttgggaaagcccgaagcggggcaaaattccctcgcgggtcgggaagttccaaaaacagcccgggttccaaggtggtggaaaaaccccattctcctactgacggagaggccgaaccgaattgcggaacattattcgaggctacgctgtccaactcaccaaaaaggttcgccttgaactctgccgtaggcgcatgggccccctggccaactaccacaggcttgtcttcctgcgaagccctgctaggccatggggaaacataagcgttctaacccccacaacaaacgcttgaacaga

SEQ ID NO: 231551 - DNA, 825 bp, Homo Sapiens
  misc_feature (91)..(180): n is a, c, g, or t
  misc_feature (195)..(256): n is a, c, g, or t
gggggggtgtcccaggccagagcagcctcttcctctcctggtcccagaaaaacccttgcagtaaatggtggcctctgggtggttacttctnnnnnnnnnnnnnnnnnnnnnnnnnnnnnnnnnnnnnnnnnnnnnnnnnnnnnnnnnnnnnnnnnnnnnnnnnnnnnnnnnnnnnnnnnncttgtccgcccgccnnnnnnnnnnnnnnnnnnnnnnnnnnnnnnnnnnnnnnnnnnnnnnnnnnnnnnnnnnnnnncttggtcattacttgtttcccaagaaacccggtcatagattacagtttggttttccagtattaaaaaacgccggccgggcatccgaatttctctcaacattccccaaaggaaagtcttcacggcactcttttggcatctatctcaaggaaccctcaggggagtctctttattagtttttccccgccgcccttgcccactgatccccagaagcggttgtaatccccctaataccttcccggcccgccagggaaacccgttacaaaaaggggaattaattaacaccggaaaccgcccaccgactttacaaacccctttggagcaccctggggtaataaaaaattttggccccaagggggaaaatcgcgggcgccgaaaagaaactttttctcccatatttggcgcccactctcaacatttaaaaaacgcggcccgaaacctccaccctgggggtacttttccggcacccctcaaaaactttttacctctcggattaaaacctcttttaagggagaattaagggctcagaatttttcccaaccttaatacccgcccccaaaatccttttttg

SEQ ID NO: 231552 - DNA, 499 bp, Homo Sapiens
  misc_feature (160)..(211): n is a, c, g, or t
  misc_feature (225)..(265): n is a, c, g, or t
gggcaggatattcagttaaaagttaaagcagtgcatactaatgctattgtggttgtaggatttttaagaatagcattagtatttatgttgaagagtagcttttaattctttggccttctgatctcttcagctttgtttggagacagtctctttctgccannnnnnnnnnnnnnnnnnnnnnnnnnnnnnnnnnnnnnnnnnnnnnnnnnnnaggggttcaaaccnnnnnnnnnnnnnnnnnnnnnnnnnnnnnnnnnnnnnnnnncgtctggcaacacgcccaagctaatttttgaatttttaagaaaagaaggtttccccccagttttggccaacctgggcctcgcaactcctgggacctcaggtggattcccccctccctgggcctttccaagggggccgaaaaattacgggcggtaagccccaccaaaacccggggcccaggtttttccctttcttagggttttcaccttcccctggggaaccccttttggggggg

SEQ ID NO: 231553 - DNA, 807 bp, Homo Sapiens
  misc_feature (48)..(128): n is a, c, g, or t
  misc_feature (130)..(202): n is a, c, g, or t
  misc_feature (216)..(375): n is a, c, g, or t
  misc_feature (462)..(557): n is a, c, g, or t
ggtatgacagattatgtttcaactctgtagatgtttaacgtcatagannnnnnnnnnnnnnnnnnnnnnnnnnnnnnnnnnnnnnnnnnnnnnnnnnnnnnnnnnnnnnnnnnnnnnnnnnnnnnnnngnnnnnnnnnnnnnnnnnnnnnnnnnnnnnnnnnnnnnnnnnnnnnnnnnnnnnnnnnnnnnnnnnnnnnnnnntgggttcacgccgnnnnnnnnnnnnnnnnnnnnnnnnnnnnnnnnnnnnnnnnnnnnnnnnnnnnnnnnnnnnnnnnnnnnnnnnnnnnnnnnnnnnnnnnnnnnnnnnnnnnnnnnnnnnnnnnnnnnnnnnnnnnnnnnnnnnnnnnnnnnnnnnnnnnnnnnnnnnnnnncagcgtgagccaccgcacccggcctgaaaatattttctaaaaagataaaaaatatacctaacgatgaaaaataatacaaatttaaannnnnnnnnnnnnnnnnnnnnnnnnnnnnnnnnnnnnnnnnnnnnnnnnnnnnnnnnnnnnnnnnnnnnnnnnnnnnnnnnnnnnnnnnnnnnnnngatggggcttagggttatatgcccaactcctgttgccatttttatttccccggaaactttgacccattcttgacgaaaattcggtaaaccgggaagggctccgccccccgttaaacccctctatttcccctcctactttcccccaaaccccgtataccctctcccacgcaaatgggaggccaacatcccctctgcaatttctgccaagaacttgcgtccccacctccactcccacttttttcccccctcg

SEQ ID NO: 231554 - DNA, 441 bp, Homo Sapiens
  misc_feature (66)..(162): n is a, c, g, or t
gggagacaaagcagcgcccgtctgcttcgggcctctggaatttagcgctcgcccagctagccgcannnnnnnnnnnnnnnnnnnnnnnnnnnnnnnnnnnnnnnnnnnnnnnnnnnnnnnnnnnnnnnnnnnnnnnnnnnnnnnnnnnnnnnnnnnnnnnnntgacccactgcgcctggcccactttgaagtcctaaagaaatttaggttattattctatgcatggtttggagggattttaaggtctttaattagccaggctttcctggtttttccggggaaagggaaaaaaggtttaaaaaacccctttcttggggaaaaagtcctccctttagaaaggccaggccccccttttttccgggaaaaacttttggcccctggggggttaacccaaggatatggggccctgggggttttttccccaaaaaaacctttttgggg

SEQ ID NO: 231555 - DNA, 942 bp, Homo Sapiens
  misc_feature (244)..(297): n is a, c, g, or t
  misc_feature (550)..(558): n is a, c, g, or t
cactgcggtctcccaaagtgctggaattacaggcgtgagccactgtgcctggccaacacaaattgttcttattcctgctctgtgcaaaatgccatacccactcttgatgacgatttgggccccactttctccctttgcccctggactaatggtcccctcttcttgccccaacctcttctctctcccccttcctacttcactctaccacccacccccgcatccccgacgcttactcctctctatnnnnnnnnnnnnnnnnnnnnnnnnnnnnnnnnnnnnnnnnnnnnnnnnnnnnnnttatacccggtctcccaaccacacacaatcactaccttccccacccttttgccacttctcccttgtatcattccccccgtgggagaacaaaatccgcccccattcttctcatccttttttactatccctctagtccaccctcccccttccttcttctcactccgctcttccccgctcttcttcttttcaccccctgtccccccttgtgtttcgttctgtgccttcctccaccccctacttttcttattctctnnnnnnnnngtaccgccaacgtccgcctcattgctttccaccctcatctttctcacccccttaactcttcgccccccacggcggccaatatccgtgttacgccacacaatcacgacggcctgtccgatcatctcaccgcccacgaccccgttgttgcttgtgcatcattcccctccgattgttccctatcaatcgcttctcgcgcatacctccccctcccacccgccctatatcaccccactattagcctgccccactccgcgccccgctatcttacacctccccgccaatgtcccccgccgcaccgtattgcctatctacctattacgcggatcttacaacacccggctctattcctctcgctcctccctgtgttaactctcttatgtttcc

SEQ ID NO: 231556 - DNA, 751 bp, Homo Sapiens
  misc_feature (63)..(184): n is a, c, g, or t
  misc_feature (197)..(210): n is a, c, g, or t
  misc_feature (341)..(351): n is a, c, g, or t
ggtatcggttgctttttatttataaaggatgcaaaaataaaattagatttttggcagtccttnnnnnnnnnnnnnnnnnnnnnnnnnnnnnnnnnnnnnnnnnnnnnnnnnnnnnnnnnnnnnnnnnnnnnnnnnnnnnnnnnnnnnnnnnnnnnnnnnnnnnnnnnnnnnnnnnnnnnnnnnnttattttggtcgnnnnnnnnnnnnnntcaaaaaattttctaaaaccttctttgtttggggccggggccccacaagagaaaaggagaaatggcccatgtcgttgttcccaaagaaaaacccggggaaaaatacaataggcgttggatttctcaccccnnnnnnnnnnnccgccgcgggcggaaaaccagaaagcgtttttcaacaacaaatcccaaaaatgggaggttccccggggggcccttttcccggctggaactttatccacaaggggagggctcccccaagggagagccccttaaaatactaaaaaattaatagcgccgccgcccccgcctgtggcacacactataaagtggagagaaaaaagtggtgggtttataatcttttcataaaaacgataatatctttgcgcgcagaagtgtggaaaaaaccactcccaaaaaacatggcggtgttgagaatataaccccgcgataaatcacccccgcagcgggcgcatacacaacccccacttcgttggcgccctcgttgggaatataaaaaatatatttctccccaccgcggggg

SEQ ID NO: 231557 - DNA, 491 bp, Homo Sapiens
  misc_feature (282)..(291): n is a, c, g, or t
  misc_feature (323)..(331): n is a, c, g, or t
cgcacctggcctcacccctctttttataaagagaacacacctatcctcttaggaacccccaatgtggcctcgtttaaccttaattaccttcttaaaggccctatctccaattgctttagtcacactggggggtagggtttcaacatattattattacgggggaaagagttgcgtccatttcctaccctttctaaaagttcccaaccttactaaaggttctttaggagagcgttttccccccttccctgagccccccttggttgccccattgcgttttgctgnnnnnnnnnngaacgtttcatgtcatttaacttttccaccgnnnnnnnnngtttaaaattttccatgggttctcttgccacctttggttaaaaacggcatgtcttttatattttgcccccttttcggactttattggggaagccccttactccttaatttcccctttttatttaaattggttggaaaatttcccttatgccctcctatcc

SEQ ID NO: 231558 - DNA, 144 bp, Homo Sapiens
  misc_feature (74)..(75): n is a, c, g, or t
tgtcggcccgcctcggcccctcgagaaagctttcctagaaccatttcgttttgggcggcggcggggcccccccnntttagggggaaaaggggaaaatgggggccaaaaaacggttttcccccaaagaagaaaccccggggggcc

SEQ ID NO: 231559 - DNA, 878 bp, Homo Sapiens
  misc_feature (140)..(200): n is a, c, g, or t
gggtcctgagtaaatgtgttctgtataaacaaatgcagctggaatcgctcaagaatcttatttttctaaatccaacagcccatatttgatgagtattttgggtttgttgtaaaccaatgaacatttgctagttgtatcannnnnnnnnnnnnnnnnnnnnnnnnnnnnnnnnnnnnnnnnnnnnnnnnnnnnnnnnnnnntatgtcaggcttgctggccccccgagacgctttaaaaactttttaaactattcgttgggcccgctaggccaattaaaaaagggaaacaggggtttcctagggctctccagacatccagtactggtagaattgctcgcattcaaaccagccaaaaaggcccggaggcaaccgaaccgttttcaaatgagacatatggggtctttgagggaatttactggatctatcaccaaggagaccctcgcgagcatttatactcaacttccgtgcccactcctgccaagtcatggtgagaaattgttgtaatctatttagccattctggcaagacatggaaaaccgtgcatgaatgaccctgaaaacgccctgactcgctcagggaccattgagcaccctgtgcgaaaattgattttgccacatggtgcaccatggggggacaaacgggggttgaacaatatttggccaaatttggcccaccataaaatgtgcgaaactgcgcccaaattcattcggtgtgaataggcctgaaacacgaaaccccattatcacccttttaacgcctattacggcccaaatttgtccaccgattttcacgcccaaaccctccgccaattattggggagaataaagctgtccgaaacctgcccggaaagccattcgggtccaattaccccccaaaacc

SEQ ID NO: 231560 - DNA, 569 bp, Homo Sapiens
  misc_feature (103)..(473): n is a, c, g, or t
ggacttatccagtgaaacaatttgataaggtttcaaggagtatctgatgggttaggaagtcacgaaatgaggagttcttgccacatttgcagagtccctcctnnnnnnnnnnnnnnnnnnnnnnnnnnnnnnnnnnnnnnnnnnnnnnnnnnnnnnnnnnnnnnnnnnnnnnnnnnnnnnnnnnnnnnnnnnnnnnnnnnnnnnnnnnnnnnnnnnnnnnnnnnnnnnnnnnnnnnnnnnnnnnnnnnnnnnnnnnnnnnnnnnnnnnnnnnnnnnnnnnnnnnnnnnnnnnnnnnnnnnnnnnnnnnnnnnnnnnnnnnnnnnnnnnnnnnnnnnnnnnnnnnnnnnnnnnnnnnnnnnnnnnnnnnnnnnnnnnnnnnnnnnnnnnnnnnnnnnnnnnnnnnnnnnnnnnnnnnnnnnnnnnnnnnnnnnnnnnnnnnnnnnnnnnnnnnnnnnnnnnnnnnnnnnnnnnnctcctcaaatgttttgaagattgttgcaccttggaactaccagtgtgcacacaatctggctcaatgtatatattggcccagcaaggcaaagaactg

SEQ ID NO: 231561 - DNA, 302 bp, Homo Sapiens
  misc_feature (107)..(107): n is a, c, g, or t
  misc_feature (143)..(153): n is a, c, g, or t
cagcaaggcgggtcttgctgtgtttccccaacttgactggtcttgaatttccggggctcaagagatctcccaccttcagccttccacatgtggttggttttacaggnggtggagccgcccacccccccggcctatttcaaaannnnnnnnnnncttagaaaaccggggtctttttttgccccacggttgggactttgcagtgattacaaatctttagcttgaactggaacccctcccaattttcccaggggttagaggtggtctctttttcaccctttctagcttttccaagttgagctggg

SEQ ID NO: 231562 - DNA, 251 bp, Homo Sapiens
  misc_feature (54)..(195): n is a, c, g, or t
ggtaatacaccagtcttgtaaaccagagatgaaaacctttttccaaggacaccnnnnnnnnnnnnnnnnnnnnnnnnnnnnnnnnnnnnnnnnnnnnnnnnnnnnnnnnnnnnnnnnnnnnnnnnnnnnnnnnnnnnnnnnnnnnnnnnnnnnnnnnnnnnnnnnnnnnnnnnnnnnnnnnnnnnnnnnnnnnnncgggccaaaaatgggtccaagaagaaaccgggaacaaaaatggcggggatttcccc

SEQ ID NO: 231563 - DNA, 785 bp, Homo Sapiens
  misc_feature (348)..(631): n is a, c, g, or t
  misc_feature (647)..(647): n is a, c, g, or t
  misc_feature (660)..(660): n is a, c, g, or t
  misc_feature (678)..(680): n is a, c, g, or t
ggtaactaaatttttttctgatcttatatttagtgaaaaaataagtttctaagttttattggtactgttctctttcaaacacatacctacatattagatttagttactttgggaatattgggctatttgtactatctttacttagggtgttttggaaaataaatattttgtgggttattagaattctgcttaaaacacctgtgaagtttgaagcttttgctgaatttattgattttttttcccattgaatacgttctataaaaatcagagttccttagcttagttcttgattataacaagcgttagtaaatttgaaaaaagaatccttcaggatgctaattataattnnnnnnnnnnnnnnnnnnnnnnnnnnnnnnnnnnnnnnnnnnnnnnnnnnnnnnnnnnnnnnnnnnnnnnnnnnnnnnnnnnnnnnnnnnnnnnnnnnnnnnnnnnnnnnnnnnnnnnnnnnnnnnnnnnnnnnnnnnnnnnnnnnnnnnnnnnnnnnnnnnnnnnnnnnnnnnnnnnnnnnnnnnnnnnnnnnnnnnnnnnnnnnnnnnnnnnnnnnnnnnnnnnnnnnnnnnnnnnnnnnnnnnnnnnnnnnnnnnnnnnnnnnnnnnnnnnnnnnnnnnnnccctctatctccaaanaccgtatcactcnaaaaggcacccaaacccnnncaacttaacaacaacttcttaaccttcccttgtccggcccgccccggccccttgagaaaacttttagaaccctttcgtttgggcgcggcgggccccagaaaggga

SEQ ID NO: 231564 - DNA, 927 bp, Homo Sapiens
  misc_feature (45)..(92): n is a, c, g, or t
  misc_feature (201)..(238): n is a, c, g, or t
  misc_feature (328)..(391): n is a, c, g, or t
  misc_feature (518)..(608): n is a, c, g, or t
  misc_feature (621)..(675): n is a, c, g, or t
ggggcttgctttctcggcgtcatggcggctgccgggggcagatannnnnnnnnnnnnnnnnnnnnnnnnnnnnnnnnnnnnnnnnnnnnnnnacgactggttacttatagctcttgctgccctcgcccttggtgcttcaataatgaattgttagctccactccgcaggggatcgcgcgctggcgctgcggaccggagcttnnnnnnnnnnnnnnnnnnnnnnnnnnnnnnnnnnnnnngcacgccctcctgctcaccgcccagacccccgagtcctaggacccggccggcggcaaccccgggactggtcccgcccatcacgctcgcgnnnnnnnnnnnnnnnnnnnnnnnnnnnnnnnnnnnnnnnnnnnnnnnnnnnnnnnnnnnnnnnntccttcccgcaactcttcctccgttgctcgccccctacctcgtcatcctacggcccccaccatacttttcccacccccacccctttcccgccttctcacccccttcgccgccactcccccgccttgnnnnnnnnnnnnnnnnnnnnnnnnnnnnnnnnnnnnnnnnnnnnnnnnnnnnnnnnnnnnnnnnnnnnnnnnnnnnnnnnnnnnnnnnnnntatcaccaccttnnnnnnnnnnnnnnnnnnnnnnnnnnnnnnnnnnnnnnnnnnnnnnnnnnnnnnntttcccacacccgacgtcgtgccgcgctttcccgcgcccctacctcaccccgttgcgttccccccaacacgaattgcccttcacactcgcgaccccgttggcgccaatagcgcacgccgtgacagacgatacgattatactccccatggccgctcctcacgttcaccctacccaccgccgcccttttcgcggccccttaacctccgccgctccctccaccgacttacgacttccaccgtctccgctctgccc

SEQ ID NO: 231565 - DNA, 202 bp, Homo Sapiens
  misc_feature (145)..(145): n is a, c, g, or t
taaggtccatgggccactggtttggggggcctgcccgcctggccctgattcccctacaaacttttctggaatcctggccgaaaaccctttacctcctgaaaaaaatatgggctccagtaaattcgaatggagaaagtccccctanaaaacttaccaacaccctggcccgcctgggcatttgggtcaaaccaaaaaaaggggg

SEQ ID NO: 231566 - DNA, 805 bp, Homo Sapiens
  misc_feature (309)..(349): n is a, c, g, or t
  misc_feature (360)..(428): n is a, c, g, or t
  misc_feature (495)..(603): n is a, c, g, or t
  misc_feature (765)..(765): n is a, c, g, or t
ggggagcccggcagagacagggcactggtttccctctaccagagttcctgacccagccgagaacaaaccgcgaagcaagttcagcccaacaacgatggtgaaaagggtcctcctgctcacagtgtgaataacaggatatcctcagaccatctcaaaaaggaggaaaagatgactatgatggctcaccagtacccctcttggatcttcattaatgagaagacattcataaccagtttttcacctgctgaagtctgtttcaaatattcttggttcctgctcttaaacatggcaacacacacagtggaatgnnnnnnnnnnnnnnnnnnnnnnnnnnnnnnnnnnnnnnnnngagacagagtnnnnnnnnnnnnnnnnnnnnnnnnnnnnnnnnnnnnnnnnnnnnnnnnnnnnnnnnnnnnnnnnnnnnnacgccattcttctgcctagactcacgagtagctgggactacaggcgccggccaccacacctggctannnnnnnnnnnnnnnnnnnnnnnnnnnnnnnnnnnnnnnnnnnnnnnnnnnnnnnnnnnnnnnnnnnnnnnnnnnnnnnnnnnnnnnnnnnnnnnnnnnnnnnnnnnnnaaatgttgttcttaatggttgttgtcactaagcagctcagtggggtgctttaattgggacccatgaacattttttcagcaaggtctccccaaaaaggccgaagctaattcccaaacttcagggaagcggccagcccaggggggattaaaaacatggcccttngtgggccaaacccccccggttttggaagggggggattttc

SEQ ID NO: 231567 - DNA, 322 bp, Homo Sapiens
  misc_feature (76)..(90): n is a, c, g, or t
gggaaatacttgtgccctacaattctcctcttgctaactgaagaatggggcttgactctagggatagcttgtttcnnnnnnnnnnnnnnngaataatagtacaagccctcccatccccgccccgcagctttccatgtcgggcccgccctcgggcccctcgaagaaaacttttcctaaacccatttcgttttgggcgccgcggggcccccagtaaggcaaacttgaaacccttgggcccaacagcctggtttttcccctaaggaaagactcgctggggcccaatgaacctaggggggccttggaaaatttctcccccccattt

SEQ ID NO: 231568 - DNA, 894 bp, Homo Sapiens
ggggggagaatctttcggtctccgcgagaggtgcttcattccacgaaaaaagtataattcaagctcagatttgtgttgaaaccagcctcaagtttcacctatcctcactgatccgtggacttctgtatgatcagggtgctgtcctgagagcgctgcgggataaaggaggagcgtcctgcttcccggctgccctgttgctgtcggagtcacaggatggcggctgtcgtcctgcccccaactgccgctctgtcttccctgttcccagcctctcagcgagaaggacacacacagggcggagagctggttaatgagctcctgaaaagctggctaaagggcttggtgacctttgaggatgtggcccgtggagttcacccaggcaagagtggggcttggtcggcaccccgccccaaacgcacccggtaccggggaacgaggacggctggcaaaaactgacaaagaacacttagccctccacctggcgggcaacccaaaatttcgcatcaacaccaaaaaggccgtactccataccgcacggctgggggaccccagggacgtgttctatactacggccttcaacactatacaaacagccagcgagaaaattggcgcctgaggagaagacaaatggagccaaagagagttcgaataataaatcaccatataattagaagagttttagagatcggtctaataaatcccttataaaaacactcttatttccttcaaaacagcgctctatttcgcaaaaatcggggaaggaagcgcggggggcatgctccttgtgagcgccaccgccaaaaaaggtctcatggggcttcaggcctggcccaacaaatctctgcctcgacggaacgcgtggtggtttatatggggaacatactttctgatgtggac

SEQ ID NO: 231569 - DNA, 831 bp, Homo Sapiens
  misc_feature (183)..(208): n is a, c, g, or t
  misc_feature (212)..(475): n is a, c, g, or t
  misc_feature (711)..(755): n is a, c, g, or t
ggactttttgaataagcaaatattgcttccttgcttggaatcatcagagtttaaagtagcttcgtggatggaccatgatcctaagatgagttttaattttgtgtttacagtcatctcttgtacaacgtggagaagaaaagatatacttactactttgcttcaggtacacataagaaaacctcnnnnnnnnnnnnnnnnnnnnnnnnnnacannnnnnnnnnnnnnnnnnnnnnnnnnnnnnnnnnnnnnnnnnnnnnnnnnnnnnnnnnnnnnnnnnnnnnnnnnnnnnnnnnnnnnnnnnnnnnnnnnnnnnnnnnnnnnnnnnnnnnnnnnnnnnnnnnnnnnnnnnnnnnnnnnnnnnnnnnnnnnnnnnnnnnnnnnnnnnnnnnnnnnnnnnnnnnnnnnnnnnnnnnnnnnnnnnnnnnnnnnnnnnnnnnnnnnnnnnnnnnnnnnnnnnnnnnnnnnnnnnnnnnnnttgaggcactgcacctgggcctgaccatttctttaaaaaggttaggtttagtgccaagttaaaactacatgattcttacccactgaattagtttctaaacctaactacacgcatacgccggacttgcttgaagcacctttgctccttatgggaacccttttatcccattgcccctttttatttttccccgccctccacattgcccccgttccccctctttctcccgtacctttttnnnnnnnnnnnnnnnnnnnnnnnnnnnnnnnnnnnnnnnnnnnnntcttaccatctggccccaaaccccgacaacgccccactctcgttttcccctcatcaggggccctcctatcgccgcc

SEQ ID NO: 231570 - DNA, 761 bp, Homo Sapiens; identical to SEQ ID NO: 32882

SEQ ID NO: 231571 - DNA, 830 bp, Homo Sapiens
  misc_feature (149)..(740): n is a, c, g, or t
gggagacctgcagagtgaagaaagctggtaatagatgtctgacaaactaaagaaagacttgtgttactgtctgcacactggaaattcttcctggttgtgagacaagacctcagacttatctgagctaaggggaagaaagactgcaacannnnnnnnnnnnnnnnnnnnnnnnnnnnnnnnnnnnnnnnnnnnnnnnnnnnnnnnnnnnnnnnnnnnnnnnnnnnnnnnnnnnnnnnnnnnnnnnnnnnnnnnnnnnnnnnnnnnnnnnnnnnnnnnnnnnnnnnnnnnnnnnnnnnnnnnnnnnnnnnnnnnnnnnnnnnnnnnnnnnnnnnnnnnnnnnnnnnnnnnnnnnnnnnnnnnnnnnnnnnnnnnnnnnnnnnnnnnnnnnnnnnnnnnnnnnnnnnnnnnnnnnnnnnnnnnnnnnnnnnnnnnnnnnnnnnnnnnnnnnnnnnnnnnnnnnnnnnnnnnnnnnnnnnnnnnnnnnnnnnnnnnnnnnnnnnnnnnnnnnnnnnnnnnnnnnnnnnnnnnnnnnnnnnnnnnnnnnnnnnnnnnnnnnnnnnnnnnnnnnnnnnnnnnnnnnnnnnnnnnnnnnnnnnnnnnnnnnnnnnnnnnnnnnnnnnnnnnnnnnnnnnnnnnnnnnnnnnnnnnnnnnnnnnnnnnnnnnnnnnnnnnnnnnnnnnnnnnnnnnnnnnnnnnnnnnnnnnnnnnnnnnnnnnnnnnnnnnnnnnnnnnnnnnnnnngaccttgtccctttttctccacatggaacacttttgggattaatgggacctttgcaagcttaatgggcctgaaaattcatttctaacaat

SEQ ID NO: 231572 - DNA, 1147 bp, Homo Sapiens
  misc_feature (593)..(593): n is a, c, g, or t
gggtgtctagtgtcttctattgagagtactactattaattaagcttatttccaatgtgcctttttaatgcttgaagttttatctacatacacaggtaacagaggacagtagtctgtaaacatataaatcggtcataactatcgtggtctttatttctgtgaggatctagggaaatttcatgtcacttccctccttcactgcatcacaatcctattccctttttcttttcttggatttgtgccacccgcctgacactacctccagaccctcttactcacatgctaagcctacctctgtcactcctcgccacccaataatttctcgttccctcgtgtcccgcccaccacgacggtgacatatattatgtttcctcgcttttctacccccctccttttttctcccccacctagttctaccattattctcaccttctgaatcccacctcccccccctaatttactccttcccatcacctcatttttcaagtcccacccacgcattcgaaaccccaactttccctctttttccagccccattacttaccacccgctactcatctgtgctcttctgtttgtcgtcatcctccgccggcnccccatgagtattagacctcacctcgcccatatattcctcgctgtgctcactcattcacgcggctatatgctcctgtcccacatgatttcaccttgtatcggcatagatgcctccgcacgcgcttccagacgccgcctagttgctcactttttagttagccacactctgtggatgccttaccgccccgcctctattctaacgccgcacgatctcggcgattgcctctacacaaccttacttcttaacgcgtcgcactctattatccatccgcactcgcgtaatttattttcgccggcgcgcatcgcagccgcatatatctttctttattgcccgcccctctccattcgccctattctcgcaccgctctttcccgcgcaccccatttcgcacctctatttcttcatttttccaccctctcgcccttatttttcttcccatttgttccagtctccccccccacccttctccttctatgtcgacacgccggttaccccgacccctctctcactcgtgtttgttcgctatattccaattcgtacttctgtctcgcccc

SEQ ID NO: 231573 - DNA, 1161 bp, Homo Sapiens
  misc_feature (529)..(538): n is a, c, g, or t
ggggttgtaagcagagcgctgagcctcgcagctcgcattcggagggaagctgacatccacaccaagtcgagacttccagggatgtggccggggagcagtcacatgctgtagctttcatgagcacaggcatcagtcaggcagatgtttgtcgactggaatggcgccaaatcttaaaggcagaccacgcaaaaagaaaccatgcccacaaagaagagattcattcagtggtgttaaggattccaacaagaattccgatggcaaagccgttgccaaggtgaaatgtgaggccaggtcagccttgaccaagccgaagaataaccctcaccatcctcccatacaaaacaccaataaagcccttgtctggccgcctccggccctccacaagcttttctaccaccattgcccttttggcgccgcggggcccacctaacgtcaagtgcaatcttcggtccataagcctgttttccctagggagaattctctgcgtccatgaacccaacggcctttgggattctctcccacccaattnnnnnnnnnncgccccctggggggcgctaaccccgaatgccgcctttccctctaaaccaacaatctcttacacaatgggggaatctcctctctgggacggcgccgcctatctttacccttggggggtactctctcttatttttcacccaacatgggcacagctgcccgctcgagctcgtgaacacgcctctcccttaatcttcttcccaaatcttttttttaccggcacccgcgcggcgctcctcgtgtggtcacaactcttctattttcctgccccgcgcacaaccttggtctcgcgtaaacatctccacacttttaaaacaccattttattcttgtgcgcccccaaccgttgtaggaaaatcgccccacttcgctcaaaataactcgtctcctgtgtattgcacccctcttggcgaaagtatgccaccgcgggcgcggtccacccgattataacacgtctgcgcgccgcccgcgtgctgggtataaataagtcacgtccgctgctcccgtgtgtggccccacctataccgcgtcggttccaacacctcgttgcttcgtccgacttggccgtcccctcatcttaagttactccgatgcccgcgccgcacatcccgctcacgctgtacccggt

SEQ ID NO: 231574 - DNA, 985 bp, Homo Sapiens
  misc_feature (452)..(507): n is a, c, g, or t
  misc_feature (755)..(794): n is a, c, g, or t
ggcaaggaatcctgagtctgggcaatgaaaccaaagccaggagttgacgcatcctgcagttgggccagctgtcgcatctcagcggggcgcacatgttatccacaagcaatggacctttggggaagggggagtttttagtttgttttacaaatttttcctgcaaaagtggaatcactgtattttcattttaatttatatttgaaattttatttagttcttgagtagatctgcttcttcatcttgacatgtaatgaatggtcagctgtacgtaatgcatttatatgctacatttgttatgcctatcgatgtgtaccgcctgccaaaatcgaccccacccgtcccacatggcccaacgggaatatgctgactaatcctaacacctacctcactcccccgtgggcaagagaaccgcaagccccttccagcgtcgactgcgtcgcccaacgtctttnnnnnnnnnnnnnnnnnnnnnnnnnnnnnnnnnnnnnnnnnnnnnnnnnnnnnnnnttttcaccttctcctcgccccgcccagcggccacacgcttcggtgcgcccacgcaataacgcggacggcgggcgtcacatagaaggccgtcaaacaccatccacacctctccccaccctcttatcccgccccacacccctctagccccttgattcaatccggcgccctgcgaaacacgatactacgctcatgcgccccccctcgcctctccttcacccacaccctacccacccactactgatcgaccnnnnnnnnnnnnnnnnnnnnnnnnnnnnnnnnnnnnnnnntgtatgaaagtgcgcccccgtcgcgcacttgattgccactccggcgcccctctagtccccacatgacttatttcgcgctctcccttacacgccttctccccactacttcaacaacaaccccccatctctctcacatacccgctcccgctccattacttatcagatctcgcgccaccacagttgccccccca

SEQ ID NO: 231575 - DNA, 314 bp, Homo Sapiens
cagtctaccttctgtctggttcccgcttctcgaccaaccgcatcctgactttttcccccaggctcgaaacgctacagcccctcactttctgttcactggccccctgcggcctcctgcaattcgaagcggaattttcccggcctccgcctttcgcaccacccccggcattggccggtatggccccctccctcccccggtttaacccttccgctattcgtttaagcccccaacccgggtcattcccccacctttagcacttgcgtctttcgcccccaaaactccctgtcagccacccacgcctgattcctccccct

SEQ ID NO: 231576 - DNA, 450 bp, Homo Sapiens; identical to SEQ ID NO: 32888

SEQ ID NO: 231577 - DNA, 727 bp, Homo Sapiens
ggggtcgtcggccgagacattgcgcacggtcaggcggcgctcggtgccctcctcctcgatgccgtacttggcgctcgcccacaaccgcgtctcctccttgaaccacgcggcctcagtggacggctggggcacctcacataggaacgtggccgactccttctcccgcacctccagatcttgcagccgctttttgaagggaaccgcgggctctgccaggagagaagactggaggaaagacggttttcattcccttctgaatgttaggagggaaggcattttccatccttgaccagcttgtagatgacacacattcagcaaacgcacatcccagcagcaccgagagaacacacagctgggttgcttaaaaatacactacttcaaagtaaactttctctagaagcatatcagaagcaaagtaaaatccttttggagcaagtaactctgaatgctaccccactattttgaacacatacatggggaaagctgggttcctgggaccccccccattataccaaaaaatcctggggccattcctcccaaattctttaaaggatcaacccccttgagggaaaaccccaatactgcttaggggatcaaaggcccgggccccccttccaccttattccccaccaacaccgggttttcgccaacactttccacctggagaagaaacaaacctggcctgggggtgatccccatttttcacgccataattggggcatttcac

SEQ ID NO: 231578 - DNA, 111 bp, Homo Sapiens
aatttgcccttggtctcaaaatggaaacttttaaaactggtggaaccttttggaaattaaatgggctgaaaatggaagtttaggaacctttttgggggggaattggctttt

SEQ ID NO: 231579 - DNA, 911 bp, Homo Sapiens
  misc_feature (500)..(521): n is a, c, g, or t
agagcataatggcagcgtctgaggttgctggtgttgtggccaatgcccccagtcctccggaatcttctagtttatgtgcttccaaatcagacgaaggtctcccagatggtctaagcaccaaagactctgcacagaagcagaagaactcgcctctgttgagtgtaagtagccaaacaataaccaaggagaataacagaaatgtccatttggagcactcagagcagaatccctggttcatcagcaggtgacacctcagcagcgcaccaggtggttttaggagaaaacttgatagcccacagcccttttgtttttctggcagtggggtctcactcttgatttgaaaggatgtggcccagcacagcagggagaggaggggggacaccaagcccttccgggagaagccctccattcccagccactccggtcctccttaaggggcaggggtggcccttacctaaagccagctttgcccttcccgtgaaatttgcgctcttgaaagnnnnnnnnnnnnnnnnnnnnnncccttcccatttcctaaaaagggaaagggttaaaccatggggacacacccagccctttgggaatttcccccgaacctggataaatggtccctccccagccaaaatgggggggttttgaaatggagataccccagaaggggaattcaccgtattgattcgatcccgagaaataacattctcttcccctgcgaagcgttttctcccccgaaccacttcgattggataacgagagtgggactttttcagagaccacgcgttgaatttcatcggtgcgtcaccgccctacatgtccagaaatattttgcatgaagtaatccttgcccgcagcatactactgcccgcgcctcgtcacccaccccaaggtaaagtaagcagtgacacgaagacaga

SEQ ID NO: 231580 - DNA, 815 bp, Homo Sapiens
  misc_feature (226)..(238): n is a, c, g, or t
  misc_feature (250)..(514): n is a, c, g, or t
  misc_feature (577)..(577): n is a, c, g, or t
gggcacctggcccagggaaaggccttttcaagcagaggacatttgagttaagacaatgaatgccagctatgggaatccctggagggtggagccttccacacagaggggggccagtaaatgcagaggccctggtaggatgggcttgtccttttgaagaatgtcaaggatgaagcagaagggaggggaaccatctggcggggccttgaaaatggccttttagaattcnnnnnnnnnnnnngttgaagcggannnnnnnnnnnnnnnnnnnnnnnnnnnnnnnnnnnnnnnnnnnnnnnnnnnnnnnnnnnnnnnnnnnnnnnnnnnnnnnnnnnnnnnnnnnnnnnnnnnnnnnnnnnnnnnnnnnnnnnnnnnnnnnnnnnnnnnnnnnnnnnnnnnnnnnnnnnnnnnnnnnnnnnnnnnnnnnnnnnnnnnnnnnnnnnnnnnnnnnnnnnnnnnnnnnnnnnnnnnnnnnnnnnnnnnnnnnnnnnnnnnnnnnnnnnnnnnnnnnnnnnnnaccatgcccggctcagacttttaaaattgggatttattctgagtcccatggggaacttctgangtgtcttccctgtctccatactatcaccctagtctgaagacatcatttgtccggttgctttggaacccagtggagcctcccctggtcctttttggcccggtgggattcctctgggcccaggaatggatttaccctaattaagccccgggaagggaaaaaatacaaaccgacaccccttggggggattatttggggccttaggggtggtggggtgcgcaatcccaataggccccctaaa

SEQ ID NO: 231581 - DNA, 1106 bp, Homo Sapiens
  misc_feature (356)..(414): n is a, c, g, or t
  misc_feature (650)..(650): n is a, c, g, or t
  misc_feature (652)..(652): n is a, c, g, or t
  misc_feature (654)..(656): n is a, c, g, or t
  misc_feature (667)..(667): n is a, c, g, or t
  misc_feature (671)..(671): n is a, c, g, or t
  misc_feature (789)..(789): n is a, c, g, or t
  misc_feature (801)..(801): n is a, c, g, or t
ggggacactggcagcagttgccaggttttagctgccaccgcttcagtatgagatatagctgtcccatcttcccccattcagggtaggagatatagtgacccagacttcatgcaaatggaaaaaaagttttaactgaaatatttatttagatttcagggtctagatggatgggaaagtagaaaaacatatgcaaatctcagtgttctcactatgaccactctgagcatagatttggctttgcttccttctgcccccactcgaatccacgttgagaccatgcgccccccccaaccgtcgcaaacacaaccctttccgcgaatccaaactaatcttccatcgcagcccctatccgattnnnnnnnnnnnnnnnnnnnnnnnnnnnnnnnnnnnnnnnnnnnnnnnnnnnnnnnnnnnaatttggcctcgcccaacccgtcattcgcaaaaatgcgaaagattgtccttcccttcccgccgtcccactcacaccaccgtaaaacatgtgacgcaaactgcgtcgtcggctatttccatccgacacttcgcgcatggtagtaaataaataccagccgcccacacagcgcgaccccgagtacctacagcaagcacaccacatctcccgctcaagacagagaatcccttccttttcncncnnngaccacaccancganatcaaagcaatcagaagacataagctaagaaatgatgcaatgtcgcacagatccacacccatagtataagcgtcagcgagaaaccatcgatcagtagcacagctcagatcacatggcncgcctcgccacnaaccagatgatgagcccgccgccccctatcctcccaccaccctacgctttgcccgacgcgtagccgccgcccaccaaggcgtacacggcaacctaacaccacaccgcgcacgaagcaagagggcaacacaccggtatgaccaagagcagcggagatttaaataagagggcaacaaaagcgccgcaccattcgtgcctccgcccacaggccgaccgatatgaacaccacgcacggatatagcgcgcctaccactcccacaagcccctcaacactccgagtacggcacaaacgaaacaacaaacaac

SEQ ID NO: 231582 - DNA, 604 bp, Homo Sapiens
  misc_feature (305)..(485): n is a, c, g, or t
gggaggaagagaaaaggggaaggagcgtctaggtgaaatgagctgtgtagtcctttagagcctctggacagaaggtctgatgaatacatgtaaagcttattgagcctcagaactctaactacagggtttcaatagcacagaaactctgagaagaaaaagaatgtcaaagttcctccctaaggagactgattagatgcaagtgtgtccggaattggtgggttcttggtctgacttcaagaatgaagccgcggaccctcgcggtgctgctgttttactaagaggtatatgaataatggaaatgcctnnnnnnnnnnnnnnnnnnnnnnnnnnnnnnnnnnnnnnnnnnnnnnnnnnnnnnnnnnnnnnnnnnnnnnnnnnnnnnnnnnnnnnnnnnnnnnnnnnnnnnnnnnnnnnnnnnnnnnnnnnnnnnnnnnnnnnnnnnnnnnnnnnnnnnnnnnnnnnnnnnnnnnnnnnnnnnnnnnnnnatccccttgaaaccccagaaggccggaagttttaaggttgaaccccaaaaaatcatggcccttttgcccctggaaacccctgggagccaccaagaaaggggaaaaggccctgggtcctt

SEQ ID NO: 231583 - DNA, 287 bp, Homo Sapiens
ttacattttacaagtttatggccagcccacctgtaataacattctctgatattcctttacttaagatgtccctattgagatcatttttttaatttatgtgggaccgattctctagattattattaaaatggaaccatttcagttttggtttgttttttgaaccctgtccttgtacccgggttggccctaaaataataaaaagttatccttttgggggaaacctttaaaaccccaaaatttgaaaaacagggttccagggggatataaaaaattttgccccaaacctt

SEQ ID NO: 231584 - DNA, 989 bp, Homo Sapiens
gggagaaggaagaagcctcaaaccacccatttcctgctttttagagatagagtctagtggaaccatggctctaactgggtcaagtcctcctagctctgaagctaaggctgcagagctgtcctttggactgtatttcttcatgctttccagagttagagccttgatcacggaacatcattgtgtgcagaagaatactgtacctagtactaagttcttttcatctttgatttttctttagcttcatcagtccttccttcctaatctctaatcccctgaagcctaacacagttcctaatgtgttttgccttaacctcttttctcttcccacattggtacttctggatggggctctctttacttactgcttaggcacatagtcaccttctctggactccctgcttccatgctttctccttccgcccattcccccaactccttgtgatcttccaaaaattagctctggattagcctttccactttccgggaggaagcccccaaaccagccctccctctgcctcggggcacttttgggcctggtgggcccatggtgaatcccacaaaatttaacctcttcccctaattggggaaattttaccttaacttcccggttttggggctaaccgactgggtaatttgggggaaccctcccctggggcccccaaaagcttatcgccaaaaaagaatggcggaaccctctctttgggaattccctccccaagaaagccaccactacttaaaaagggggtctcccgtgaaccattgcctttttacacaccctccttttttgaaaaggggccttaattgtggcccccccctgtggtggaaaaaatcaccttcacacttaaattccggattgcgcccccccctttttccccggggaggccagttttgggacgtgaaaaatgcgagaattttcccttttcctccccctttgggaaaacctcttttaaaaggggttgataccctctaaggcgccaccctccctaatc

SEQ ID NO: 231585 - DNA, 1137 bp, Homo Sapiens
  misc_feature (300)..(301): n is a, c, g, or t
  misc_feature (303)..(304): n is a, c, g, or t
  misc_feature (539)..(553): n is a, c, g, or t
  misc_feature (742)..(742): n is a, c, g, or t
  misc_feature (766)..(766): n is a, c, g, or t
  misc_feature (1105)..(1105): n is a, c, g, or t
  misc_feature (1109)..(1109): n is a, c, g, or t
ggcattttaagtgcttcacatttgtatgtgtgtagactgtaactttttttcagttcatatgcagaacgtatttagccattacccacgtgacaccaccgaatatattactgatttagaagcaaagatttcagtagaattttagtcctgaacgctacggggaaaatgcattttcttcagaattatccattacgtgcatttaaactctgccagaaaaaaataactattttgttttaatctactttttgtatttagtagttatttgtataaattaaataaactgttttcaagtcaaaaaaacannanncagcgaagccaacgacgctacccacacccacagactattctactatgtgttgctataataccaaatcaaacgccagccgcgcccccctcccgtgaaagagaggcgtgttgctacacccaccccacaggagaaagctgtccctatatccccgcctttacacactttcttctgaacggggccccctctgggcgcgccgcgcgaagatagctgttcacaccacacacctcgtggagtnnnnnnnnnnnnnnntccgccccccaccgcccaatggaggagaaaaacggggcttaattatatatttgtttccataaataacgaggagaaacattcaatgtgttaacacaataatcaccaatacacccggggagagaatactccccccccgaccacgacagctttagaatcatgcaccctggtctcccgtggcgggtctgtggngcaaacgcgagacggggtttggcnttgtcctcctcaacaacaccttcccataatcaatgcctcccccatgaccgcactccaccgacgagcgcctctctcctcggcaggaggtagatctcttcaaccaaactatgaagagccgcccactccacatacgaaaataatccacaagcagcacgaatgcaaggcacaccaacaaaccccggccgcgccccgcctccctcccagcattcctcctccgcacagacccaacaattacggatgtgtgaccacacgaaagatgtcacatatataagaatcactggggctccccccagcaaaaattatcctctcctaccatcggccgccagttcttgtgcacanagantttgtacttggtaaacaaacaaaacaca

SEQ ID NO: 231586 - DNA, 856 bp, Homo Sapiens
  misc_feature (167)..(193): n is a, c, g, or t
  misc_feature (212)..(455): n is a, c, g, or t
  misc_feature (499)..(518): n is a, c, g, or t
  misc_feature (762)..(762): n is a, c, g, or t
gatgaacaggaagcaaatgcctcaacatttcatagaaggaggactccattggataaaggccttattaatacggggatctgtgagtcttctggcaaacagtgtttgcctctggttcagctcatacaacagcttcttaggtaaatcatattagctgtattgtattgtgnnnnnnnnnnnnnnnnnnnnnnnnnnngagacagagtttcgctctnnnnnnnnnnnnnnnnnnnnnnnnnnnnnnnnnnnnnnnnnnnnnnnnnnnnnnnnnnnnnnnnnnnnnnnnnnnnnnnnnnnnnnnnnnnnnnnnnnnnnnnnnnnnnnnnnnnnnnnnnnnnnnnnnnnnnnnnnnnnnnnnnnnnnnnnnnnnnnnnnnnnnnnnnnnnnnnnnnnnnnnnnnnnnnnnnnnnnnnnnnnnnnnnnnnnnnnnnnnnnnnnnnnnnnnnnnnnnnnnnnnnattagccaccacgcctggcctatttatttacttattaatggtgnnnnnnnnnnnnnnnnnnnngaaatggagtcttgctctatcccccaggctgggatgcagtgtccccaactttggctcactgcaacccccggcctcctggggtcaaagctattctccctgccccaaccctcccaaagaaacctgggaccaacagggggccccgcaaaccacacccccggcctggaattttttggaattttttacaaagaaaaccgggggctcttaaccacaatctgcgccaccgcctgtgaccctcaaaaacacnccggaacgcccacggtggcaaacccacgctgcgccgtttgggcccgtccccccacaagcgcgctcggggggaactcccccggagtgctctagcc

SEQ ID NO: 231587 - DNA, 1533 bp, Homo Sapiens
  misc_feature (50)..(430): n is a, c, g, or t
  misc_feature (850)..(850): n is a, c, g, or t
  misc_feature (867)..(867): n is a, c, g, or t
  misc_feature (869)..(869): n is a, c, g, or t
  misc_feature (912)..(912): n is a, c, g, or t
  misc_feature (958)..(958): n is a, c, g, or t
  misc_feature (1140)..(1140): n is a, c, g, or t
  misc_feature (1151)..(1151): n is a, c, g, or t
  misc_feature (1167)..(1167): n is a, c, g, or t
  misc_feature (1191)..(1191): n is a, c, g, or t
  misc_feature (1207)..(1207): n is a, c, g, or t
  misc_feature (1308)..(1310): n is a, c, g, or t
  misc_feature (1346)..(1346): n is a, c, g, or t
  misc_feature (1369)..(1369): n is a, c, g, or t
agtcgacggtaccggacatatgcccgggaattcggccattacggccgggnnnnnnnnnnnnnnnnnnnnnnnnnnnnnnnnnnnnnnnnnnnnnnnnnnnnnnnnnnnnnnnnnnnnnnnnnnnnnnnnnnnnnnnnnnnnnnnnnnnnnnnnnnnnnnnnnnnnnnnnnnnnnnnnnnnnnnnnnnnnnnnnnnnnnnnnnnnnnnnnnnnnnnnnnnnnnnnnnnnnnnnnnnnnnnnnnnnnnnnnnnnnnnnnnnnnnnnnnnnnnnnnnnnnnnnnnnnnnnnnnnnnnnnnnnnnnnnnnnnnnnnnnnnnnnnnnnnnnnnnnnnnnnnnnnnnnnnnnnnnnnnnnnnnnnnnnnnnnnnnnnnnnnnnnnnnnnnnnnnnnnnnnnnnnnnnnnnnnnnnnnnnnnnnnnnnnnnnnnnnnaatgcacccaagcactttgctaaggcaaaacatgccgtgaccctttgctctaatcccccaataaacccccctaatattccacctcaaaaaacgccgaaacacttgtaaggtgcccagccgcccatccaccaccaccctggacacccccgccaccgaaaaccgaacgcccactcacattaacaccacaacccaaaaaacaaaccgccacgcagaccacacaatatctcactcagcgacaaacaaaatagtatcgcgcctttctttattatgttctgtgtagcttgtactattatacgagcataatagtcgcgcacatctcgacgtgagcacgcatcgacgcagccgccctccatgtacccagacacctgacactttaagtccccacagcaccggcctcacccttctgttcccagcgttccncccctcccggccggggncncgccgcagaggaaagccaaagagacccgccctgagcgttacanacccacaccatacaattcccctctgtgtttatatcccgacttacanttcttccgtttataccccctgcccactacgtaagaggtgtacccctccgcccaaacaccgtctatctcgagaattcatggcaaatccatctttctttttccccaggtcctgggtgtacggacgcgaaagtgttaaagcgggtggggccgggccctcccggccaccaaccccccagggccagncccccttcctnccaatttagggtggantaattggatgcgggtggctcactngcgtgtttgccccccncactacaattagaaccccccccttcgcccggtacaaatcttaatccggcgccccgcagtgggggagaccgccggacttagaatcacccccccacccctttnnnatttttatcctaccccacaactacctttcaactcgnccggcagtggcccacacagccgnaaccggccgctacagtgccctgcgccccgaataaccagacaaacacggctggctacgctatggcaaaaatacataataaaccaacccttatctcaatcataattaaccccaccccccgtgttttctctagtgaaagaacgcacgcacttaaaaaacatatgtaa

SEQ ID NO: 231588 - DNA, 1912 bp, Homo Sapiens
  misc_feature (58)..(109): n is a, c, g, or t
  misc_feature (113)..(148): n is a, c, g, or t
  misc_feature (197)..(423): n is a, c, g, or t
  misc_feature (1094)..(1104): n is a, c, g, or t
  misc_feature (1122)..(1122): n is a, c, g, or t
  misc_feature (1336)..(1376): n is a, c, g, or t
  misc_feature (1456)..(1456): n is a, c, g, or t
  misc_feature (1467)..(1467): n is a, c, g, or t
  misc_feature (1506)..(1568): n is a, c, g, or t
  misc_feature (1768)..(1768): n is a, c, g, or t
  misc_feature (1817)..(1817): n is a, c, g, or t
tctcctcccctcctttccctccccacctcgcccacctctaccccctctacggcgctannnnnnnnnnnnnnnnnnnnnnnnnnnnnnnnnnnnnnnnnnnnnnnnnnnnccgnnnnnnnnnnnnnnnnnnnnnnnnnnnnnnnnnnnnagtcgacggtaccggacatatgcccgggaattcggccattacggccggnnnnnnnnnnnnnnnnnnnnnnnnnnnnnnnnnnnnnnnnnnnnnnnnnnnnnnnnnnnnnnnnnnnnnnnnnnnnnnnnnnnnnnnnnnnnnnnnnnnnnnnnnnnnnnnnnnnnnnnnnnnnnnnnnnnnnnnnnnnnnnnnnnnnnnnnnnnnnnnnnnnnnnnnnnnnnnnnnnnnnnnnnnnnnnnnnnnnnnnnnnnnnnnnnnnnnnnnnnnnnnnnnnncagtgaaaaaagtcaacttcctccctgcaaatagtaagaggctagttccaccaaacacctgtgacttcaatggtcacccgtatcctacagacctgctatatggttcctgagcgcaaccacaatggacacgcagccagtgcatcaaagaagggcctgggggctcccgtgaccacgtctctgtactcctcgacctggcagcatcccgcacttccaaagctgggatgctccttgtcgggacacctgggactctcggaaacagggcccatcttctcgaacatacttctgccttccccgtccaccaatccccattcctggtggaaccctttcccccccaccctgcctacaacccccgaacaagcgtttgctgtcacaccttccccgcgacggaagccctattataattatcctgctctccacacgtttctttctcttggtcgcaccagcccccctccggcccggctgaccccgaaccacatccagccagcctttgttgcctttttctgcggcactatcgcgacccttctgggggaaatacgcgcctatgcgtagcgcagaagcgcagatgggcatcaccacatgcgtctcgggcaacacccccgcggtcccacacgattttgttttccccccgggcgagcctagtaaaccattccggcagaaacccccagccgcannnnnnnnnnntgcaaacaaaggtggtgnccaccggtcctcctcagccccactttattatattgttattccaccccggtctttcctcttttccgccccctccaaccactccacttttatgccccctaatacccgccgagcaaccacaattggcgggggggcccggataccgccaattttatacccactcccctcccacaaatacgaggggtgggggtaaaataaaaccgccgccgggccagcnnnnnnnnnnnnnnnnnnnnnnnnnnnnnnnnnnnnnnnnntcgtagccgccattcaaagtggggcggtggtaaccacgcccccccttagggcgccaacgaagttgccgccaatggcggcntgggtgaactntttaatgtggcccgcgcgcggtcttttgggcgggtaaannnnnnnnnnnnnnnnnnnnnnnnnnnnnnnnnnnnnnnnnnnnnnnnnnnnnnnnnnnnnnngccttaaatgtcttcccacaccttatgctacccaccatcgccttttccgccccgtgttgaaacaaagacaccccgccgcccgataccaccaccccgccgtatccccgtagtataccagcgacaacacccccttttatcccggacgtgccccaccctggtacagcgggtttttctctttagtgcgaaacccccactcatcnttccccgctgttgcacctacccacactttccccgccgcctgtgggatanaataaccctgcaccgacgtccttttctttatcccacggccacccacgggcacacctccaaggaaggaccgcctgtccccacccggggggggttcg

SEQ ID NO: 231589 - DNA, 475 bp, Homo Sapiens
  misc_feature (79)..(94): n is a, c, g, or t
  misc_feature (218)..(226): n is a, c, g, or t
  misc_feature (363)..(363): n is a, c, g, or t
  misc_feature (410)..(418): n is a, c, g, or t
gggggagccaccctgcccgggcgagggtagcactttcattaccaaagaacccgcgcctctcgtgggcctttgagggatnnnnnnnnnnnnnnnnttgtattttattacgtgctcttccggggatggggaattcgttgagtttgcttttaaagccaagtttctttccctggggggggttttgaggaaaaactgagggtccctaatctgtgggcaacaannnnnnnnnggcggtaaggcttaaaagaaagcaacccctcctctcatttggtgcggaaacagtcacgaaggaaccattgggcctaaaagttcctgtgtaccccaaaaacgccccccgaaaaacctgggggaatgaattttcgcggnaaacttttaatttctttttgctttgggcgttttggggaaaacaaaannnnnnnnncccccccctccacaggcaattccctccaaaggttccccctcccttgggggtgtggga

SEQ ID NO: 231590 - DNA, 659 bp, Homo Sapiens
  misc_feature (120)..(254): n is a, c, g, or t
  misc_feature (345)..(354): n is a, c, g, or t
  misc_feature (517)..(527): n is a, c, g, or t
gggaattcacaagttttattgttttatagctgtcattttcattgatgtatatttcattgttgggttatacaacatattgttaaggaatacatacatatataataaattatacattttttnnnnnnnnnnnnnnnnnnnnnnnnnnnnnnnnnnnnnnnnnnnnnnnnnnnnnnnnnnnnnnnnnnnnnnnnnnnnnnnnnnnnnnnnnnnnnnnnnnnnnnnnnnnnnnnnnnnnnnnnnnnnnnnnnnnnnnntgattttggcggaggcccccgaaagccggggcacgccgactgattggtttcccaaaaaaatctgggcccgggcggcgcctgggtttccccnnnnnnnnnngccccggggcaaaagaaattgctggaacaaaccccggggggtcttcccgaggtctatatggatttacgcccgggactgccactcaactaaaaactgaatgagcccccgaccttatcttgctgacatgaagggtgtaacttctgaaagtttttaccgaaatggnnnnnnnnnnnaacagcttggcgaatcgggaatcctattggcccttggccctgggggccctgaaaaaatcttttgtcctgggcgaaaatcgggcccaaaaaaatgaccctcacccgccccttgtttaaaaaaagcgggggaaa

SEQ ID NO: 231591 - DNA, 917 bp, Homo Sapiens
  misc_feature (119)..(436): n is a, c, g, or t
  misc_feature (572)..(580): n is a, c, g, or t
  misc_feature (600)..(600): n is a, c, g, or t
  misc_feature (632)..(632): n is a, c, g, or t
  misc_feature (712)..(712): n is a, c, g, or t
  misc_feature (743)..(743): n is a, c, g, or t
  misc_feature (778)..(778): n is a, c, g, or t
  misc_feature (791)..(791): n is a, c, g, or t
ggagcctgcacagtgtgtgaaagtgtcattgtcttttatgaatcctagctgatgcagaacgcttaaattaatttagatttgaagatataacaaaataatacacttttaaaaagtgacannnnnnnnnnnnnnnnnnnnnnnnnnnnnnnnnnnnnnnnnnnnnnnnnnnnnnnnnnnnnnnnnnnnnnnnnnnnnnnnnnnnnnnnnnnnnnnnnnnnnnnnnnnnnnnnnnnnnnnnnnnnnnnnnnnnnnnnnnnnnnnnnnnnnnnnnnnnnnnnnnnnnnnnnnnnnnnnnnnnnnnnnnnnnnnnnnnnnnnnnnnnnnnnnnnnnnnnnnnnnnnnnnnnnnnnnnnnnnnnnnnnnnnnnnnnnnnnnnnnnnnnnnnnnnnnnnnnnnnnnnnnnnnnnnnnnnnnnnnnnnnnnnnnnnnnnnnnnnggtttcccccaatccccattatagagtatttgaaaaagtacaaaggaagaaaagaatcaccatctctcactccaaagacaccctgtgtttgaacattttggcctattccattattttctatggaaactgatttacnnnnnnnnnaatgcatacttttgatgatngtggagataatagagtctatctggctcttatntagcattacaaaataacttttatatggtattaagaagtccctatttcatggctacattatactccattctatgaatatangcttacagtgtgtactaccttttacttttgntgcagctaatttctaatatttttgctaattataantcaatccctttgntttaagggtccatttccttagattctccggatttaggttaaagaaattttgaaagagtttaagggcttattgcgaaaagctttttaggaatagggagtcccctcttttgcttaagaaaaattttta

SEQ ID NO: 231592 - DNA, 924 bp, Homo Sapiens
  misc_feature (468)..(488): n is a, c, g, or t
  misc_feature (490)..(726): n is a, c, g, or t
  misc_feature (760)..(760): n is a, c, g, or t
  misc_feature (841)..(849): n is a, c, g, or t
ggagcccagcgcaggcctcaactcctcccaggaggccgcttcagcgccaccatccaagcccaccgttctcaaccaacccctccctggagagaagaatcccaaagtacccaaaggcaagtggaacagctctaatggggttgaagaaaaggagacttgggtggaagaggatgaactgtttcaagttcaggcagcaccagatgaagacagtacaaccaatataacaaaaaagcagaagtggactgtagaagaaagcgagtgggtcaaggctggagtgcagaaatatggggaaggaaactgggctgccatttctaaaaattacccatttgttaaccgaacagctgtgatgattaaggatcgctggcggaccatgaaaagacttggcatgaactgaaacaggctttcatttccacagaattcacaggagcatggttcctaataatagcccctgatagtctgctctttccttcnnnnnnnnnnnnnnnnnnnnngnnnnnnnnnnnnnnnnnnnnnnnnnnnnnnnnnnnnnnnnnnnnnnnnnnnnnnnnnnnnnnnnnnnnnnnnnnnnnnnnnnnnnnnnnnnnnnnnnnnnnnnnnnnnnnnnnnnnnnnnnnnnnnnnnnnnnnnnnnnnnnnnnnnnnnnnnnnnnnnnnnnnnnnnnnnnnnnnnnnnnnnnnnnnnnnnnnnnnnnnnnnnnnnnnnnnnnnnnnnnnnnnnnnnnnnnnnnnncctcccaaagggctgggaataacaggcatgaagncaccgcgccctgggaattggctgtttccttccacaaacctgggctgggaatggaaaattttggggcaacctccttcgaacnnnnnnnnnaggccccattttcccctttcctccccgtgtgggagatcctggggagctataaaaagcgagagcccaagctccccc

SEQ ID NO: 231593 - DNA, 682 bp, Homo Sapiens
  misc_feature (104)..(248): n is a, c, g, or t
  misc_feature (263)..(271): n is a, c, g, or t
  misc_feature (315)..(324): n is a, c, g, or t
  misc_feature (501)..(511): n is a, c, g, or t
  misc_feature (577)..(629): n is a, c, g, or t
ggggtgctgtgtgtggtaagagacttgttcctagtggatcaatgaaccatctcttctgggcagttttgttgaaaataaaggtttctctttgatttcaagaatgnnnnnnnnnnnnnnnnnnnnnnnnnnnnnnnnnnnnnnnnnnnnnnnnnnnnnnnnnnnnnnnnnnnnnnnnnnnnnnnnnnnnnnnnnnnnnnnnnnnnnnnnnnnnnnnnnnnnnnnnnnnnnnnnnnnnnnnnnnnnnnnnntcccggtgccggcgnnnnnnnnntttaaaaatttttcaaacccttttttttggcctggggcccccgnnnnnnnnnncaacggggcaaagccctttcttaaaaaaacttcggcaagaaaatcgcggaggctttctcccgaataaaaaccccgctgcgcaacaatgtttttatcaaattaatcccgcggcctggcggggtttccccgggggctcttaatatgggggttcatagccccccacctattaaattcttnnnnnnnnnnntggtacaataccgcaaaaatagagtgaaaatcctccaaaacctctcgccccacaaatgacaacctnnnnnnnnnnnnnnnnnnnnnnnnnnnnnnnnnnnnnnnnnnnnnnnnnnnnntggccgccttttaccattaaacaactccccccccggggaaagcagggggggcg

SEQ ID NO: 231594 - DNA, 130 bp, Homo Sapiens
cctttgtcggccgcttcggcccctcaaaaaagctttcaaaaaccattcgtttggggggcgggggcccccaaaagggaaaggggaactggggccaataactggttttcccaaagaaaaacccgggggcaag

SEQ ID NO: 231595 - DNA, 101 bp, Homo Sapiens
aacctggccctctcaaaaaagattctctaaccccccttcgtttggggtcggggggcccccggaccgggaaaggcccctggtggccactccctcgttctccc

SEQ ID NO: 231596 - DNA, 812 bp, Homo Sapiens; identical to SEQ ID NO: 32902

SEQ ID NO: 231597 - DNA, 920 bp, Homo Sapiens
ggggcagcgggctgaggcaccttcgggcaacacccaatactcggggctccgctcggcttcttcgcgccgagatgcctaagaaggctggtgcgacgaccaagggtaaaagccagagcaaggaaccagagagaccacttcctcccttaggtcctgtggcagttgatcctaaaggatgcgtcaccatagccatccatgcaaaacctggctccaaacaaaatgctgtaacagatttgacagcagaggctgtaaatgtagctattgcagcacctccatcagagggagaggctaatgctgagctctgtcggtatctttccaaggtcctagaactcaggaagagtgatgtggtttttggataagggtggtaaatctcgtgaaaaggtggtgaagctttttggcttctacaactccagaaaaaatcttggaaaaaaacaccgcacacaaaaaggaaacgcgtggccggccgcctcggccactggagaagctttttaaaaccattccgttggcagcgcggccccccctaggaaatggaaccatggcccaaaacggttttcccaaggagaatccaggtagctggaataatggcttgggatttcttccccatacacacacagcctggaggataacacgagatgttcttgcttactcacccccatttgccgctcactcatctcctcaccctcgcacccctccttaacgcacgacccacgcgccacgataccagccaatcatattcgcctactgaggataaagtgcaacccactgtgcgcctacagtcgcgccgcccccgcggttaatcattccgacaggccgaccaactatgaacacaatctatacgcgctcagctaagcaatctagagtatacacccaacacgcaagagagatcacaccgcgcctgctgtgtgtcggaggacatgacaccg

SEQ ID NO: 231598 - DNA, 928 bp, Homo Sapiens
  misc_feature (277)..(295): n is a, c, g, or t
  misc_feature (637)..(645): n is a, c, g, or t
  misc_feature (695)..(706): n is a, c, g, or t
  misc_feature (852)..(852): n is a, c, g, or t
  misc_feature (902)..(902): n is a, c, g, or t
ggacaaaaaaaagaggcgcaagcagcagtaccagcagagacagtcggtcatttttcacaagcgcgcacccgagcaggccttgtagaatgaggttgtatcaatagcagtgacaaaacgcacacatcaacccacagaccttaggaggaggaaggcgagggcggggtgacttctggtgatgataaaaatggttttatcacccagatgtgaaagaagctgcctgtttactgatccattgaataaacccattttaatagaaaaagtcaataccaattcagcnnnnnnnnnnnnnnnnnnncatactacttgaatataaagaaatttattctgaaatagactttacgtgttttttttcttacagaggaagaaaaatattgcttgacggcaaattatataccccaaagtggatttgcccggggtccctttaatttcccctttagcttttggaatctcaaaaggaagcttagcttgaaccccggtttcccccatttctttcccaaaaggaatccccaaaagggggggaaatcccaaaacccccaaggtgggaaaaccctggcagggcttttacgaaaatcttgggggggtccccaaaaaatttatttttcccttaacggtttggcaaaaaaactctggaaacccnnnnnnnnnggcccccccaaaaaagaaagctttcccccgggccccttttttcccttttnnnnnnnnnnnnttgtttttcaaaaacctttccatatttttgtgggggggcaactttggaaactctctctcggagaattcccttgtgggaaaaaagaaacacattggtggttttgtgtgtgggacaagctgttctaaaggaattttcttgctgcttcnccgcaattattaaacaaaactcatctcttcttgtgggtgccccccgctcntagtaacaacagaggagaacggccgc

SEQ ID NO: 231599 - DNA, 578 bp, Homo Sapiens
  misc_feature (502)..(510): n is a, c, g, or t
ggcaccccagcctggaagctgcctccctccgcctatgcctgcaggataagaagcccgaggaggcggagcatggaactcgacagttaaaacatttaagagagaaaacctagtgtcttgctggcctgaaatcgagtacgcagcccggggtgatcagggtctcccggcccggatgtgtgagacttgcttcccctgggcagtaggcgatacgatgctttaggaggaagtgtctctccctcctaagcccccgagggggagaacttcccaagaccgaaaacccccgggcttccctggcacagaaacttttcccttttatccagcttaaagcagaaatccttttctgggcctttaacctgggcccccttccctctaaattgccaggggcaaaaaagggccgaaccgaaaaaagcccctttggctggaaacccccaaaaagttttgggttccgggcccccacaaccaaaattgggctaaaaaaatttgaaatggggctggaaaaaccccnnnnnnnnnccatttaaggggccctttccccggggggtttttccccattttaaaaatgggggggcaaccccacgccc

SEQ ID NO: 231600 - DNA, 520 bp, Homo Sapiens
  misc_feature (153)..(298): n is a, c, g, or t
  misc_feature (395)..(399): n is a, c, g, or t
  misc_feature (401)..(433): n is a, c, g, or t
atttcctgtctcagaaagtctggctgttaaagaatgttgtctttcaagatcgttatttctaccacgactttaaaggctgtgttttggaactcaaaggcaaaaattctaatatctgtgctccttgaacaacctcttctcctagagggctgtgcnnnnnnnnnnnnnnnnnnnnnnnnnnnnnnnnnnnnnnnnnnnnnnnnnnnnnnnnnnnnnnnnnnnnnnnnnnnnnnnnnnnnnnnnnnnnnnnnnnnnnnnnnnnnnnnnnnnnnnnnnnnnnnnnnnnnnnnnnnnnnnnnnncctgaggatggtgaaggtacctgactgtgtgaggtggtaggagaatgagagaaacctcagtcagtgtctcaaaataaaatcctgctacaaacattgnnnnngnnnnnnnnnnnnnnnnnnnnnnnnnnnnnnnnnggacgcaccacgagcgcaaagaacgaacgcgggaaaataaaaacaaaacacggagacaaagaccggaaggaagaagacccccccagc

SEQ ID NO: 231601 - DNA, 833 bp, Homo Sapiens
  misc_feature (304)..(304): n is a, c, g, or t
  misc_feature (456)..(456): n is a, c, g, or t
  misc_feature (489)..(489): n is a, c, g, or t
  misc_feature (723)..(731): n is a, c, g, or t
ggggggagaaccgtgggcgctgaggcgctgtaggtggctccctcccaccccaacgatttcagagagaaacaagtcggaatctgagaagtgaggctccagataaactgtaaactgctggaagggggcgatggctgtggccctgggttgtgcaatccaggcatccttgaatcaaggctctgtgtttcaagaatatgatactgactgtgaagttttccgtcagcgcttcaggcagttccagtacagagaagcagctgggcctcatgaagcatttaacaaactctgggagctttgctgtcaatggctngaagccaaaagatgcgcttctaaaggaacaaatccttggagcctgctaagtggttgggaagcaaatttcctaaaactattccttggcccccacaggaagaattaggaagaacccttgggggttggaagggggaaaccaaacttggccccccnggaaggaaaatttaggaaggaaaaagggaaagntttgggtggggtccccaaccttgggaatttaagggaaaaggaaacctttttacccccgggaaagggaagaaaaccctttttggggaggaaaattaacccccaagaaaaagccccaagcccaagaaaacccatttttttgcccttgggccttggaaaaaataacccagggtcccacacctttaacccttaaagtcccccttgggttaacccaagggctttcccctttgggaaagnnnnnnnnnttgggaaaaataatagtgggggccccccattttatcccaaaaattttgtggaaaaaaatccctcggccctgtggtttggaaaaaatggggccattgggaaaa

SEQ ID NO: 231602 - DNA, 539 bp, Homo Sapiens
  misc_feature (270)..(425): n is a, c, g, or t
  misc_feature (439)..(474): n is a, c, g, or t
gggaatacaccatctttttctctggataattatttcttacatcatgcttgattcctacattttgttgggtctcaacattggctcacgaatgctgttaatatttattctgtattgataaaaagtctgtcttgccactacaagtaaatcccccatttaatattttcttctttagcatagcactgtcattttttgtgaaaatggttatgtttatttattacaatactgagtcatatataaattttcaataaaagcagaaactttcttaccttnnnnnnnnnnnnnnnnnnnnnnnnnnnnnnnnnnnnnnnnnnnnnnnnnnnnnnnnnnnnnnnnnnnnnnnnnnnnnnnnnnnnnnnnnnnnnnnnnnnnnnnnnnnnnnnnnnnnnnnnnnnnnnnnnnnnnnnnnnnnnnnnnnnnnnnnnnnnccccctgtgggggnnnnnnnnnnnnnnnnnnnnnnnnnnnnnnnnnnnncttcttttgggggggcggggcccgcccagaagaaaagaggaaacgggggaacaatgctttgcccc

SEQ ID NO: 231603 - DNA, 220 bp, Homo Sapiens
gggtgagccactgcacctggctggggttggagaatttctgtgagattcagggaaagccaattggatgccgaaacccatgacccggccaaccctaggggaacccccctcaggtgaaaatccttggaaaagggtaaaaaagggtcttaacgggaaaaccttggggggggattcccccaaaagggggtgtttctcaaaaaaagagtccaaaatcttcggggtt

SEQ ID NO: 231604 - DNA, 442 bp, Homo Sapiens
  misc_feature (47)..(101): n is a, c, g, or t
ggggtttttgaacagagtagaactggttcatttttagtcaaatgcannnnnnnnnnnnnnnnnnnnnnnnnnnnnnnnnnnnnnnnnnnnnnnnnnnnnnntttaaagtttccttaggcacactagctgtgtgattaataaataaaacatttctgtcatgtaaaagttcccgttgggcaaagctggtctaaagcaaagtccctgaagggtctcaccaaatcatttggttttaccgcccatttgtttataaaatgcccaatgccgggccttgggttatgggaaccgaaattaataattttggggccaaaaaaagtttttgcccctgaaaccccaaaaaattttacctacccggcccctttttaggggaaaaattttgttttccctgtttccaaaggggaaaggggcctcccgcccaaaggttttctccgggttggggccccta

SEQ ID NO: 231605 - DNA, 1014 bp, Homo Sapiens
  misc_feature (426)..(434): n is a, c, g, or t
  misc_feature (983)..(983): n is a, c, g, or t
gggaggaggacttaagagaaagtaatccacccaaaaatgaagagcagaaagaaactgtagacaatgttcagcgttgtcagttccttgatgacagaattctacagtgtataaagcagtatgctgacaagattaaatccggcatacagaatacagccatgcttctcaaagaattgctttcttggaaagttttgagcacaaaagactatacaaccatgtttttctaccacaaattttctaagtgcatatgtgcactattttattcggtcactttatatccgacgaataactgaggtagcacgcagatatctctcgggttggcacaaaggacacccaatgatttgtctacatacgctacaccagatacttattgggagatctaatcgaccgtgtctccccccgtctttccacacccgccgtatagaattnnnnnnnnnaactgagaccaactcaatgatctggcgttgcatcaccgcaaccgctcgtcttgatccctagtaccccaatacatgaaaatacaatgcgttgtaccccgcgctgactcactcatgtaacatgtctcagatcctcataacactattggctgtcgtgagctatgacgatacactagtttatctaacttaatatccacgataaatgggtcaacattacccatattcacgcctttgtgatatgccgtaggctttgattaacccgacacacgacacgctacactagagggtttgtaccttgataccatcgtccgaagcgacacctcaacacatatgctggggccagatagccgtttcatcagactatttatgtcacacaactacacataatccgcacatgggtacgatgtaatctgaggcgaataaccgccatacacgaggctttattgaaagtgacgactatacaccacaccttcgctctcaaccatatctatctgagaatgtgtatcctatcagttgatctcctcaacacatcacgacctacgagaaatagtntactttatagtctcgctgtcatcacatcacg

SEQ ID NO: 231606 - DNA, 581 bp, Homo Sapiens
  misc_feature (129)..(204): n is a, c, g, or t
  misc_feature (212)..(225): n is a, c, g, or t
  misc_feature (336)..(345): n is a, c, g, or t
  misc_feature (512)..(520): n is a, c, g, or t
gggtaccacgtatctcagttaggtccagtgtgttaaatgcatcctttaaagattctatgtgcttactgatgtttgtttatttttcagtggctgagacacagatattaaagtttcccacaatgatcatcnnnnnnnnnnnnnnnnnnnnnnnnnnnnnnnnnnnnnnnnnnnnnnnnnnnnnnnnnnnnnnnnnnnnnnnnnnnntgttgggnnnnnnnnnnnnnnaaaaaattttttaaacatttctttgggggcgggggccccaaaggaaaggaaaagggggctaactggtttccaagaaaacccggggaagaaaaagggtggggatcccccccnnnnnnnnnncccggggggaaaccaagggttttaaaaaaaccccagggggttttggggggcttattggggtttataacagggggcccaggggaatccaatttaaattaagccccccccggggcctccttggggaaagggggggaatttcttttaagaattttgccgggctggggaannnnnnnnnaaaccggctgtggtggaacccttaatttcccacgcggggttataacccccttggccgccct

SEQ ID NO: 231607 - DNA, 1077 bp, Homo Sapiens
  misc_feature (230)..(278): n is a, c, g, or t
  misc_feature (370)..(408): n is a, c, g, or t
  misc_feature (424)..(478): n is a, c, g, or t
  misc_feature (745)..(745): n is a, c, g, or t
  misc_feature (866)..(866): n is a, c, g, or t
  misc_feature (958)..(958): n is a, c, g, or t
  misc_feature (964)..(964): n is a, c, g, or t
  misc_feature (1001)..(1001): n is a, c, g, or t
  misc_feature (1021)..(1021): n is a, c, g, or t
ggggttgtgactgtactatttctagtatagcgaactacatactgaatatccaagttctcagcacctacttttgtcaaaccttaacattttgccacttcgagatcacattgccattcctcccctccagaggtaacaattatccacaatttgatgtttagcattcctgtgttgccgcactttccacgcgcataccctataccctctacctctttagcatcgtttcacatatnnnnnnnnnnnnnnnnnnnnnnnnnnnnnnnnnnnnnnnnnnnnnnnnntattgacttaactcacctcctcccgaatgcctcccgcaccacggacaatattccgcccctcccgctaacccacttaccacaccatactccgnnnnnnnnnnnnnnnnnnnnnnnnnnnnnnnnnnnnnnngtactactgtcgccgnnnnnnnnnnnnnnnnnnnnnnnnnnnnnnnnnnnnnnnnnnnnnnnnnnnnnnntatattcttttaaacacaccccacccgatccaaaatgcaccacccccgccccacaaccatatatgaatcaaattatttccactcgcccaaccctcgtttcagcgaccccccacgacgtcctcctatatccgtccgcccctcatatatattacatatacccttatatactcccggccccctcccgccgccattattcttcatttcttattttctcgcgcccccctttctccccctttatattaccacccactcccaacttagtacccnccacccgcgcctaattaccctccctaccctttactcacctcctatcaatgccattcaccaaacgctcctcgctccctacctatgtaatataaccatagtctcctgtggccggccgccgctngttctatcctcagcaaacccactccgtacgcgtggtcccgcgtcctacacccatcttatacaccactacatcttcgcttcgcacctcacaanacaggntctcctcacagtcttgtgagcgatcacaccgcactantattactgcgcgctctcctnttatctccatcatatttcccgcttcatttttctcgccgcgcatccgctatatatcc

SEQ ID NO: 231608 - DNA, 823 bp, Homo Sapiens
  misc_feature (48)..(68): n is a, c, g, or t
  misc_feature (83)..(330): n is a, c, g, or t
  misc_feature (456)..(466): n is a, c, g, or t
  misc_feature (489)..(628): n is a, c, g, or t
gggacaaactactatgtatgataaaacaccttcagagtcatgccttgnnnnnnnnnnnnnnnnnnnnngagacagaggtctcnnnnnnnnnnnnnnnnnnnnnnnnnnnnnnnnnnnnnnnnnnnnnnnnnnnnnnnnnnnnnnnnnnnnnnnnnnnnnnnnnnnnnnnnnnnnnnnnnnnnnnnnnnnnnnnnnnnnnnnnnnnnnnnnnnnnnnnnnnnnnnnnnnnnnnnnnnnnnnnnnnnnnnnnnnnnnnnnnnnnnnnnnnnnnnnnnnnnnnnnnnnnnnnnnnnnnnnnnnnnnnnnnnnnnnnnnnnnnnnnnnnnnnnnatgagccaccccgcccagctgagtcatgccttattttcgtagtataccaagaaatgttctatggaagtttacgttttaacacctcttttatacttggtaaaattgcctgtgtttcgctttattccnnnnnnnnnnngagacggactcttgtactgtcannnnnnnnnnnnnnnnnnnnnnnnnnnnnnnnnnnnnnnnnnnnnnnnnnnnnnnnnnnnnnnnnnnnnnnnnnnnnnnnnnnnnnnnnnnnnnnnnnnnnnnnnnnnnnnnnnnnnnnnnnnnnnnnnnnnnnnnnnnntagtagagacagggccttcgccatgttgaccagggctggtctcaactcctctgggaaatcgcctgtcttgggccttccgggtggctggggattacagggcgtgagcccactggaaccctgggcctggtcggggcctttatttttttcccccttaactggaagtaaaagccgcctttggggtccaaacacaccaca

SEQ ID NO: 231609 - DNA, 838 bp, Homo Sapiens
  misc_feature (397)..(659): n is a, c, g, or t
gggaaaaccgggaagcggatcgcgtggagtgaaagtcaccgcagcggagatggacaaaccatgtgggtgccctccaggtgtgtgcgaccatgaaatgggagactagcaggacccacgttggccaaccgtggacctggtccctccagtaggagtcgtgagccagctgaatttgaatgcaaagatggagcaagggccgactggagtcacactgacatccacccccataacatggggacagatcaagaaaacaaagcaggaagctgagaaaatgctggagcatccatgtgcttggccatgttagcagtagtgtcctgtgaggattgatttccaaaaactcctgttacatgaggaagacaccaagaagagcaaagaaaaggagccagggtggctcttcctnnnnnnnnnnnnnnnnnnnnnnnnnnnnnnnnnnnnnnnnnnnnnnnnnnnnnnnnnnnnnnnnnnnnnnnnnnnnnnnnnnnnnnnnnnnnnnnnnnnnnnnnnnnnnnnnnnnnnnnnnnnnnnnnnnnnnnnnnnnnnnnnnnnnnnnnnnnnnnnnnnnnnnnnnnnnnnnnnnnnnnnnnnnnnnnnnnnnnnnnnnnnnnnnnnnnnnnnnnnnnnnnnnnnnnnnnnnnnnnnnnnnnnnnnnnnnnnnnnnnnnnccaagaaagaaaccaaccaaaattttcataacctgcaaagactactttctccactagaactctttggttatttatgtcagaaattatttctggaaatgttgcctttttccattaccatataaggtaccgggggctttttttggggcttttttcctgcctaaaaaattggacaaaaaaag

SEQ ID NO: 231610 - DNA, 959 bp, Homo Sapiens
  misc_feature (474)..(545): n is a, c, g, or t
  misc_feature (577)..(657): n is a, c, g, or t
gggaggtgttaaacatgagtaaagcaaaggtaggcaaagcacattttatgttttgatatctttgttttatttaatcttatttattcacttgtgaaatatcatagtttgaatcattagtattaatcagtaagagtctatattgtagttagaatatcagaatactgaagtgaaatttctagaattttactaaacagtttgcacatgtttgatgtcctttaaaatttatggatgagttgaaatttaatcaggagctgattctgtgtctccattacattaaaagatgataatggttatacttagtgaccctgattcatttcacttaccaccaggtaattaatcttttagggaaagagaggagtggctatgtatagaaaggagaaaaggaagaagattgacggaaatgcttgcccccatccttaaacaaaaaccccccttttttgggggccctcctccagggttaattgggggaggggnnnnnnnnnnnnnnnnnnnnnnnnnnnnnnnnnnnnnnnnnnnnnnnnnnnnnnnnnnnnnnnnnnnnnnnnccgggccggaaccccctaccatccccgaaccnnnnnnnnnnnnnnnnnnnnnnnnnnnnnnnnnnnnnnnnnnnnnnnnnnnnnnnnnnnnnnnnnnnnnnnnnnnnnnnnnaatcaatcgcgcgaactccccgttgacaacaacataccgccttatgaccacaccactttcactccatgcgacacacactcccccaacccaaataactccaaatacacttcccccctctaccaccacacctccaagaacacttcctcactacataaccgcacaccctcatcaccgacccccccaatacacctccccacagccgctcataacacatccctgggatgagaacaacacccccataagacacacgctccaataccccataccgctcccccaccgcaaactcaccatactatcccccc

SEQ ID NO: 231611 - DNA, 436 bp, Homo Sapiens
  misc_feature (66)..(98): n is a, c, g, or t
  misc_feature (290)..(351): n is a, c, g, or t
gggggcttggcgcggcggccaaactggtgggacagtgtctccaggtagtgaggcccaacctctttnnnnnnnnnnnnnnnnnnnnnnnnnnnnnnnnntgcaaacgtgagtagagaatgaaatacacagtttaaatgcccctcactatctttgggttactaatatactaagcctttctggactaagtaaaagatgcaggttccttgcggcctagggatagaacccccaaaatggccgcctttcataatctcccaaccaaggctgtaacctctggaaggaattcctagggnnnnnnnnnnnnnnnnnnnnnnnnnnnnnnnnnnnnnnnnnnnnnnnnnnnnnnnnnnnnnncaaccaccccttttggggaaagggttttctccccggaaaaatacgaacccccccttttttttatccggcccgaaaaaccccgtgg

SEQ ID NO: 231612 - DNA, 987 bp, Homo Sapiens
  misc_feature (396)..(480): n is a, c, g, or t
  misc_feature (518)..(666): n is a, c, g, or t
gggagacctttgttctctgaccacttgataatgtcaggacgcggcaaaggaggtaagggcctggggaaagggggtgccaagcgccaccgcaaggtgctgcgcgacaacatccagggtatcaccaagccagccattcggcgccttgctcgccgcggcggcgtgaaccgcatttctggcctcatctatgaggagacccgcgcgagtgttgaacgtgttcctgcgagaacgtgatcccgggacgccgtgacctacacggagcacgtcaagccgcaagacggtcaccgccctggacatggtctactccctctagcgctatggccgcaccctctatggattccgcggctaaatggccttttcgaagcccattcattctttatcaaccgtcccttttacggnnnnnnnnnnnnnnnnnnnnnnnnnnnnnnnnnnnnnnnnnnnnnnnnnnnnnnnnnnnnnnnnnnnnnnnnnnnnnnnnnnnnnccatgcgcccatacacagtcccttccataaaacctcannnnnnnnnnnnnnnnnnnnnnnnnnnnnnnnnnnnnnnnnnnnnnnnnnnnnnnnnnnnnnnnnnnnnnnnnnnnnnnnnnnnnnnnnnnnnnnnnnnnnnnnnnnnnnnnnnnnnnnnnnnnnnnnnnnnnnnnnnnnnnnnnnnnnaaatatatccgcgcccctattttttcccgcccccactttccgtagagccgtctccacctacccgttaatccctcgctttcgtcccctcgcccttcacaacacttttccgcctttccctcccgcccttattaccgtcccccattccacaattatgcgcacaccgttgcattccgttgcccggactttccccttcgcgacgttacattatctctcaatgccaagtaacctatacacaagattttccccgccaaccccccgctcgtcttgtcccgccctcacctctttccacgcccctctttgtttatcctctcgacccgttta

SEQ ID NO: 231613 - DNA, 789 bp, Homo Sapiens
  misc_feature (230)..(269): n is a, c, g, or t
  misc_feature (271)..(277): n is a, c, g, or t
  misc_feature (281)..(306): n is a, c, g, or t
  misc_feature (666)..(675): n is a, c, g, or t
gggggagagctactatgggtgatattttccttgtttaggagctgtgagttaaaattgtatcctttctggtttatctaaggaaagtcaaatcttgacagaaaacatttttccttggaaggtcaactctcagacatctattttggtttccctcagtcctcataacttccttcttgctgaacatattttattctcttttcagagaaggaaaataaaaaggattctaaaagttnnnnnnnnnnnnnnnnnnnnnnnnnnnnnnnnnnnnnnnncnnnnnnncccnnnnnnnnnnnnnnnnnnnnnnnnnnaaaaaatgtgtcggccgcctccggccctcaaaaaacctttctaaacctttcctttgggccccgcgggccccattaaggaagggggaacgtggcccatacttggttccctaggaaaaccccggcccatgaactaggtgctggaaattccccccaaataaaaaaacccccggaggggaaaccggagccgttccgaaacaattcccaatggggagtttcctgagggcattaaaggggactcttttcaccagggagcccaagggaaaccttcctttttccaatttaccgccccgcccttgcaatttatttggaaaaaagggggtggaaatttctttaagccatttttggcagaaatggggaaannnnnnnnnnaaacgggccttggatgaaccccctgaatccgcccagggggcttttcggccacctttgtggccccttggcggattaaaaatttttggccccatggggggaaaaaacggggggcgc

SEQ ID NO: 231614 - DNA, 375 bp, Homo Sapiens
  misc_feature (254)..(263): n is a, c, g, or t
caaagaagagaaaacaaacattgtaaactttaaataaaaacgttctgcgccgtctataaggacacagtattgttccgaataatgtagtagcagagcaacccaacaaactaaaaaataaggaactctactttacgcgagaaaaaggggaatctgaaacaggaataaaaaaccacaatcaaaaaaacacagagcccgtaaggcaggaataatagaaaaccccggtgctaggtgacggaaacttcatgcaatatatnnnnnnnnnnctccttggggaatggtgaaaccaaaaaaaggcacaccaagcctccatacaataatgatggggagaagaaaaaaatttttacataactacgcatccagggacccaagtattat

SEQ ID NO: 231615 - DNA, 553 bp, Homo Sapiens
  misc_feature (62)..(356): n is a, c, g, or t
ggtataaatttgtgtctgtaacctgaatagtttgaaaacttctttaaaaatctcttgtattnnnnnnnnnnnnnnnnnnnnnnnnnnnnnnnnnnnnnnnnnnnnnnnnnnnnnnnnnnnnnnnnnnnnnnnnnnnnnnnnnnnnnnnnnnnnnnnnnnnnnnnnnnnnnnnnnnnnnnnnnnnnnnnnnnnnnnnnnnnnnnnnnnnnnnnnnnnnnnnnnnnnnnnnnnnnnnnnnnnnnnnnnnnnnnnnnnnnnnnnnnnnnnnnnnnnnnnnnnnnnnnnnnnnnnnnnnnnnnnnnnnnnnnnnnnnnnnnnnnnnnnnnnnnnnnnnnnnnnnnnnnnnnnnnnnnnnntactcttgtatctcaatatttttaaaccgcaggcctaaataaaactaattttgctcaagttttctcaacctagggaaaaagaactatggttccatattcaaaataaatattatagacccttttcctaagtaagattttgcaggtttactgattgggaaatttgatcattaaattatgtgaaatctgcccgggcacac

SEQ ID NO: 231616 - DNA, 843 bp, Homo Sapiens
  misc_feature (149)..(216): n is a, c, g, or t
  misc_feature (220)..(221): n is a, c, g, or t
  misc_feature (225)..(309): n is a, c, g, or t
  misc_feature (334)..(334): n is a, c, g, or t
ggtattgaaaatttaaggttcagtataatatcaattttgaatttttaatggtgtttatggaattttagatagcagcgagtccttcgtttgatcaataaacagtgttacagataacttcaagtttataaaaatacagtgaaatttctacnnnnnnnnnnnnnnnnnnnnnnnnnnnnnnnnnnnnnnnnnnnnnnnnnnnnnnnnnnnnnnnnnnnngaannaagnnnnnnnnnnnnnnnnnnnnnnnnnnnnnnnnnnnnnnnnnnnnnnnnnnnnnnnnnnnnnnnnnnnnnnnnnnnnnnnnnnnnncggtgaagagagcaggggcaagagntggaagggtggatcttggtgactttccgtgacccacaagcggccctgctctggaatttttcttttctgcgcccgccgccctcacctcttttctctccgttctccgcggacacgccggctagctaacatatacccataagaaaagaaagcgctcgtttactacgtgccggcgcgcccgcgtcacccccctctccggcgctcctcccaacaccctcccgtcccatcgtgtctccaacatcaatacctcggctcaagacgactaaactacacgatgcgcagatctaccccttctcctccgaggtgataggtgtgagcaaaatcccttcgcatcatccccttctcctcgcgtgctccggcaaaatagcgttactaccacctcccgaggggcgcccgtctctgccccccacgaggccatatcgactaccctacccgtgacaagacctacaacacgcgggttgtgcgtgcacactacctacccggtagaaacgacctttatattaattcaaccac

SEQ ID NO: 231617 - DNA, 1004 bp, Homo Sapiens
  misc_feature (523)..(532): n is a, c, g, or t
ggggtgaaggaaagaggtttaattgactcacagttcctcaggctgtttgggaggcatggctgggaggcatcaggaaacttccaatcatggcggaagatgaaggagaaacatgcatgtcttcacatggcggagcaggagagaacgcaaagggggaagtgctttgaaacaaccagatctcatgagaagtcactcactatcatgagaacagagaacagcaagggggaaatccatccccatgactccatcaccttccaccaggaccctcccctaagattgggaattacacttcaacatgatatttgggcaggaatacagagcccaactgcggcatcacaacactccgcccccatgaaccgccgcctcggagccactcccccaaccgctcccgccccggacatagactaccacaaccaccaccccccttcccacctgttcgcccccgacgtgtcgcccgggacccgctacggccagatatatatataacagtaatgtctggtggcggcacgggcgagagaatagccgnnnnnnnnnngcgcctgcgcggcggacggcggccgctcgccgcccccacgtcctatacaataatatcaccccttccgtatgcgacgcgaagatagcttacgttcatgcgagtcattctctatactgtgccccgccacatggtggttcgccgcccacgcccattttatattatttaagatcatcacccgcgagcacgaagatggaggcacttccctccgccctgctggcagaagtgtctgccgcaccgccagttgccggcgggttcattcccacccagcccactttgatgccccacccctatcttccaatcctcagtcacctacggggtgagccgcgcctgcaccacgcggctcactccatcacagctgatgagacataaacttagagctcccgacttgctgtcgccccatctagatgtctgcagtgtacgagccagacagagcagcccctccctcgacaccaactgaagcgcacaatgcgag

SEQ ID NO: 231618 - DNA, 985 bp, Homo Sapiens
  misc_feature (453)..(461): n is a, c, g, or t
  misc_feature (631)..(639): n is a, c, g, or t
gggcagttgaacatcctcagatgactttcggcaggctccacagaatcatcccgaagatcatgcccaagaagccagcagaggacgaaaatgattcgaagggagtgtcagaagcatctggcccacaaaacgatgggaaacaactgcaccccccaggaaaagcaaatatttctgagaagactaataagagatctggacccaaaagggggaaacatgcctggacccacagactgcgtgagagaaagcagctggtgatttatgaagagatcagtgaccctgaggaagatgacgagtaactctcctgggggatacgacacatggcccttgatgagaagccgaacgtggtgacccttcccgaacatggccatggctgcggccccccctcctcatcccgcggcatacgtaaggggaaagcaaagtgtctcacccaccggcggtaaactctgaagttgccannnnnnnnnctaatggcggcccgacaacgcccccattgttccaccgcgtttcccaattggtaatttttacccttacccgccggggggcccattctcatgcccaaagcaatatctcacacccgctttaattacaccttggcccgcgcttcaattccaaccgtaaacccggccaccttgcnnnnnnnnngtccggcctttttgccgccaaccttcattttgcccaccctttcttctatttttaaaacccaccattggacattgggcctcccggcgtatttcccccttctccacttacaaaacacgacccaacttatttcgtcccatgtcttcctcccccgaataataggtgtacaccacacacgacgggggcgacctcttatggaacgggggattaaccatttccaaaaaatattttctccacccgtcggctatctcccccatattaaccatcacatccgcccccgagtcgagaccccttctcgatataccgcggcaatacacccccactaagatcccctctcaatccgttcccc

SEQ ID NO: 231619 - DNA, 1076 bp, Homo Sapiens
  misc_feature (548)..(595): n is a, c, g, or t
  misc_feature (774)..(807): n is a, c, g, or t
  misc_feature (897)..(953): n is a, c, g, or t
  misc_feature (974)..(974): n is a, c, g, or t
gggagaccagaggatggctgacacgaaggggcacccgagacagcgcctgggctttttcccgcccgcggttccaccgctctgaaaccgatttctaacacagagagacatagtcttgctctgttacccatgctggagcacggtggcgagatcacgactcactacaactttgaattcctggattcaagcaatccccccatctcagcctcctgagtagctaaggactaccggcggtaaccagcgtgagctcgcccgccagaataatatgacacaccccatgcgactcggttaaccggaacgcgccctagatgactgggctttcctgctgcacgcccgcaccgcagaagggacccccgacgaccccgccctcacatagtagacctagcccgaacttaccaacgagaggcggaaaccccatgccagcttttgccggccttcgttcgcctacccactccttgcccctttcgcccccgcccgcgcaatggcaagccatgttactaatcaacccccgtcggtcgtttttctcttcttccgcccccggcttatctaannnnnnnnnnnnnnnnnnnnnnnnnnnnnnnnnnnnnnnnnnnnnnnnttggaacgatatggcaatgaggagggacccgtcacttttccggccgccgccccccctcttaaccgccgcttaacggcccttttacctccacatttcctcccccctccgcgccgagaagtcttaccccccgccagatcccccccgacgcggcattttatctcttctttctctcccacctnnnnnnnnnnnnnnnnnnnnnnnnnnnnnnnnnntttattcctattcttcccccacctatattacacccccccgccctttccccattataaccccatattagcaccccactgtctctcttaccnnnnnnnnnnnnnnnnnnnnnnnnnnnnnnnnnnnnnnnnnnnnnnnnnnnnnnnnngtatatctgctccctccgccnctgtgaccgccgcccgcgcccctatattcacccgcccacacaactatactgtcgcttcctactcctctgttcttcgtgctgggcgtcacttatatctctccc

SEQ ID NO: 231620 - DNA, 1027 bp, Homo Sapiens
  misc_feature (211)..(271): n is a, c, g, or t
  misc_feature (313)..(331): n is a, c, g, or t
  misc_feature (342)..(357): n is a, c, g, or t
  misc_feature (494)..(530): n is a, c, g, or t
gggaattatcttccgtaggatttttttgtgtattcacaaggtgatatttgtattgtaaaacaataatggtgaaggaaataaaaaggcttttaaaattttgtttgttttaaatctttgtaaagttattattccagagagtatactggtatcttacagcttacctagatcataaattaatcaaaatgcactttttaataaaaactgatacttnnnnnnnnnnnnnnnnnnnnnnnnnnnnnnnnnnnnnnnnnnnnnnnnnnnnnnnnnnnnncacacctaacacacataaaaccacacaatccttccaattttnnnnnnnnnnnnnnnnnnnccttgtggggnnnnnnnnnnnnnnnnaaaaaattttcctaaaaccttccttttggggggcggggcgccccacagtgtattggaaccttgggctcaatactggtttcccaaagaaaaaaccctgggcacataaaccaaggggttggggatattttaacaaattnnnnnnnnnnnnnnnnnnnnnnnnnnnnnnnnnnnnntaaacacattttcccaaatggggagttcttgcggaggccattcaccgggggtctctccacacacaagggcgcggcccccccagtggggactcctctatacttcccaaattatagccccccccgccgtcgtgcccccctctttttttaaaacatcgtgttctattacacccccctattaagactttttcttccgcccgcaattgggcgcatatccctctcacacaaaacgcggggatttgtataacaaccctcgaaacctcctccccaatggtgcaacatcacacacacctttctggctcgctcctgttgcgcaaaatataactattttctcccacccccgtgggaacgacacaaccgcgggggcggcacacaaaaaatattttgctcccccatcacttctgccgccccaccgctacttataatcacacaaaaaaccgggcgcggaataaacctaccccctccgcgtggcacatctggttggtttctaatacaacaaa

SEQ ID NO: 231621 - DNA, 971 bp, Homo Sapiens; identical to SEQ ID NO: 5365
  misc_feature (752)..(760): n is a, c, g, or t

SEQ ID NO: 231622 - DNA, 878 bp, Homo Sapiens
  misc_feature (210)..(423): n is a, c, g, or t
  misc_feature (455)..(469): n is a, c, g, or t
  misc_feature (512)..(541): n is a, c, g, or t
  misc_feature (545)..(717): n is a, c, g, or t
  misc_feature (734)..(795): n is a, c, g, or t
gggatggagcgcgcgggcgctactagccgcgggggccaagctcctggcttcttactgcggcttcatactgagggccgagccgaggcggcgcgggtgcaggagcaggacttacggcagtgggggctgacagggattcacctacgctcttaccagctgggaggggaagttaaaaaactggggcttcgcccccgcccgggggcgcaaccattnnnnnnnnnnnnnnnnnnnnnnnnnnnnnnnnnnnnnnnnnnnnnnnnnnnnnnnnnnnnnnnnnnnnnnnnnnnnnnnnnnnnnnnnnnnnnnnnnnnnnnnnnnnnnnnnnnnnnnnnnnnnnnnnnnnnnnnnnnnnnnnnnnnnnnnnnnnnnnnnnnnnnnnnnnnnnnnnnnnnnnnnnnnnnnnnnnnnnnnnnnnnnnnnnnnnnntgagttatttcccgccccgcgcccgttccttnnnnnnnnnnnnnnngttatggtccccccaccctcccgctcccttttccacgtttttnnnnnnnnnnnnnnnnnnnnnnnnnnnnnntcannnnnnnnnnnnnnnnnnnnnnnnnnnnnnnnnnnnnnnnnnnnnnnnnnnnnnnnnnnnnnnnnnnnnnnnnnnnnnnnnnnnnnnnnnnnnnnnnnnnnnnnnnnnnnnnnnnnnnnnnnnnnnnnnnnnnnnnnnnnnnnnnnnnnnnnnnnnnnnnnnnnnnnnnnnnnttcctttgttacttctnnnnnnnnnnnnnnnnnnnnnnnnnnnnnnnnnnnnnnnnnnnnnnnnnnnnnnnnnnnnnnatgtgggcgtcccgcccagtatttatgccccccgcggctctttcccgcccctgtatatatttttcttttcccacccttttact

SEQ ID NO: 231623 - DNA, 1127 bp, Homo Sapiens
  misc_feature (956)..(964): n is a, c, g, or t
gcctctgacctgcatgcagcattacgaggaagtccagacatcggcttcggatctgctggattcccaggacagcacagggaaaccaaaatgtcatcagagtcgggagctgcccacaatccctcccgagagcgcagtggataccatgctcacggcgagaagtgtggacggggaccaggggctggggatggaagggccctatgaagtgctcaaggacagctcctcccaaaaaaacatggcggaggactgcctgcatgaaactgtgaaagagatcaaggaggtggctgcagctgcacccctggagaaccgcctcagtggcaaggcaaaatctacttctgcctcgaaagagctcccagggccccaacactgaacgcaaagctgaagctcgcttgaccatgccctcggtggcacacaacataaaaaaatgttcgccaaaagcgtcaaatggagaccacttatccctttggaaaattccttgctgcatcccaggaaagaaggaaggcccccttaccaaccttgtccccccgcgtttaacccctttcttgggaaccaagacatggtaaaaatccccttcaagggaacacaccgggaatgcggcgcggccaataatggcccgccaaaacccacacattttgtccctaccaccaacccaccggaacctctaggttggtgtaaaacccctaccgcgccgacataacgtaaatctcacacccccctccccttttggcttccgcctcacccacagttttcccccgccgcgccacccatatataatacctccccggattttgttttcggcgggcgaacaggaaaatgcagaatcctctccccgccccttacatgggagccctccatttttccgcgacaaaattaaaaaaccgccctgcgggtaacgccccccagacgcatcatataataattcaggcgggcgcacgcttccgaactacctcccagggggnnnnnnnnngaaatgacacccaacacctctacccaccccctccccactatttcatatggtgggtactaaacacaccacgaaaaggggccccttccccgcggactcggcgataggaaaagagggaaatccaaccaccgtcgccacacttcgtgttctcacacctcctccctcg

SEQ ID NO: 231624 - DNA, 1035 bp, Homo Sapiens
  misc_feature (256)..(265): n is a, c, g, or t
  misc_feature (303)..(315): n is a, c, g, or t
  misc_feature (414)..(414): n is a, c, g, or t
  misc_feature (438)..(438): n is a, c, g, or t
  misc_feature (611)..(611): n is a, c, g, or t
  misc_feature (643)..(643): n is a, c, g, or t
  misc_feature (684)..(684): n is a, c, g, or t
  misc_feature (891)..(891): n is a, c, g, or t
tcccccttaacccgataccacaccactcacaaattacctgtcggatcgcctccggacctcaaagaccgctttcctagaccactcccttctggccgcgatggataccatgaacgttaaccgaaatatgggtccgtacgcttgtttccctaccgagtattcctggcgccctagacccaggggccccggggaactcctccaccaaaactacaaaccacccgctctcgtggcggcccaatcctctaggcgctctccccgnnnnnnnnnntccccgagaatagcgccgcgccctccttttatgtgttnnnnnnnnnnnnngtccattcttatttcccgcccccgcgcgcagcccgccccaagtgtcgagaacagcgtctctagataataatattaaaagaaattgaaccagcgcaaacntactggaaccccccggccgcgccncacacacgttaaacatacgtcgacaaataaatttactactatttggacgcctgctatcaataccttctccacactctctcccccacgatatgttgtcgcttatgggctccgcgatacaaatttggcacgcgaagtcacccctctgtttattatatactacatttactgtggantaaccggccacacacgccccacccccaccttnttatatctccgcggccccccgcgctcccagatatttttaancgactcataacgtctccgcccgtccatgttcactcccacgccggcgcccccccaaaataccacacatttttttgatacccccatatgatgtattctatcacaacatcgcgcgctgattctccacccgcctcgacctattgtgtgtttttttctccctctctcgcgccgctatctgtttcctctctcacgccccgccccgtatatgantgtttgagattacgagattcataaccaaaatcggcgcacgccccgctatatatatcgccccaccgcgctactagttgtctctcggcggtcgtcggtagctctcagtgtattcgggcgcggccccgcgcgttattatatctcctc

SEQ ID NO: 231625 - DNA, 1247 bp, Homo Sapiens
  misc_feature (360)..(380): n is a, c, g, or t
  misc_feature (410)..(431): n is a, c, g, or t
  misc_feature (549)..(549): n is a, c, g, or t
  misc_feature (600)..(600): n is a, c, g, or t
  misc_feature (656)..(656): n is a, c, g, or t
  misc_feature (678)..(678): n is a, c, g, or t
  misc_feature (690)..(690): n is a, c, g, or t
  misc_feature (756)..(756): n is a, c, g, or t
  misc_feature (767)..(767): n is a, c, g, or t
ctctagaacatttcaagtcttttcctttttttctgttcctagctatggggttttagagaagtgggaacaggaaggcctttgtctttttcttctagtttactacattttccttccgtacctcttcagctgtgtggaaacgggcatcccaaggacataggatcatatattgcgtacggagggaggaggatccctggaacttttctcaaaggcacctgcacccttataagtgggactgaccgccataaccacagtgatctcttcgcttccaccctgcccccccgtgcctctacctccgacagcctaccccgtttttccccaataccacggcttttactaatctgctctctcccgcaaccacgnnnnnnnnnnnnnnnnnnnnntcttccgtttgccccactgccaatgttctnnnnnnnnnnnnnnnnnnnnnntttatcttcccgcccgcccatcacgtgccgcttaccccctcctctcgcgcgcctttacatttgcccacccgcctaccccctcctctttttatctgtctcttctcataacctctccccnttcctccacctttttgtacgccctttatcccctgcccacctcctccttatnttctccgcccacacccccgcgcgccgcggctatattattcacgcagcgccgcgctngttattactcactccgcaccgnggtatgtattanacaccttctatactactcttcacgcccccatcttattttttcccccacgccccccactctcttttntatttatcttntataactcgcccacattacggcgtccgctgctcttattattgtatatcttttaccgccgccgcgcgcccgtcacagatattttgctcgacgatagtacttttgcccgccacgttatcctctcccccctgctcctcccgcgcctttcttgctgccctctcctccaccccactttattttcacttgtgtgttattaccactactcatactcaacagactgcatcccctctcgctcatctttatagcgcggcagcctatatttatatgtagcacgacattttcctcacccacaatttgtgcggtcggtggcgcccatgtatagataaatcaccgcccccgcgcctcactttctccccaacccctttttatatatttttgtctcttggcccgcccgctttgttattccacgccgccccactccaccgccctgtctttctcttgccctgccgcgctcgctttttttctatgtttctcttctctgt

SEQ ID NO: 231626 - DNA, 575 bp, Homo Sapiens
  misc_feature (479)..(479): n is a, c, g, or t
atgggcgcctgcccattaactggccctacccattatggcaccaagaaatgaatatatgccccccctcttctaaccaccctcccccacaaattttaacttccacccacggcccatttaaacagcatttttcggaaatgggttaaaagaacttttcctaaacccctcccccaacacaaaatttctcttataaatagcaataaaacccctttcctcgcacacacccccctcatttttgtcttggggaacattcccaacaccctctgcggagaagaaaataaaattttacaaccggcaccgccacacatttctcccccccacaccccctattttgtgcgcatcctccccctctcatattacaccctctcccacaaacacgcgtggatcacacctattaatctccatactcccacattatacacccctccctgtctttccttttcctcccgcacatattttttcctcgcgccccaatggtgggngttgcaaaataacctatctccacacctgtggatcaccaccccaactttgccctatactcctggcaccccatgcaaaacgtgtcgcttatacacccc

SEQ ID NO: 231627 - DNA, 679 bp, Homo Sapiens
  misc_feature (76)..(317): n is a, c, g, or t
ggctccactttctaaaggaattatagtcttgtggctaacccaaaccggagtggctgggaggggggaaaaggggggnnnnnnnnnnnnnnnnnnnnnnnnnnnnnnnnnnnnnnnnnnnnnnnnnnnnnnnnnnnnnnnnnnnnnnnnnnnnnnnnnnnnnnnnnnnnnnnnnnnnnnnnnnnnnnnnnnnnnnnnnnnnnnnnnnnnnnnnnnnnnnnnnnnnnnnnnnnnnnnnnnnnnnnnnnnnnnnnnnnnnnnnnnnnnnnnnnnnnnnnnnnnnnnnnnnnnnnnnnnnnnnnnnnnnnnnnnnnnnnnnnctgagttctccccgagaaaaaaagccccgggggaccccgggggtttccaaaaaattccaaagaattccgaggggctttttgggtctaatacaagaagagtccaagggagctcaatagaaatttaaacccagttgggcgccgccgcggaatatggggaaatccttgtaggcttccgccccctgggagacccccacgaaaggcctttaaataccccgagagtgcagcggggattccccccccggttgcgcctggggaaaaatttgtgccccaggaggaaaccggggggggaaaagaagtgccccaaataagggcgccccttttggggcccaaaggagaaaaaactcccccggggaattgggcgg

SEQ ID NO: 231628 - DNA, 450 bp, Homo Sapiens
  misc_feature (67)..(115): n is a, c, g, or t
  misc_feature (134)..(142): n is a, c, g, or t
  misc_feature (345)..(354): n is a, c, g, or t
cttgctcccccccaggccctcaaaaaactttacaaaaccttctttggggggcggggccccaacaagnnnnnnnnnnnnnnnnnnnnnnnnnnnnnnnnnnnnnnnnnnnnnnnnnccccttcgatcttaccccnnnnnnnnnccccgggggtcacccacacgttttaaaacaaccttaaacgcaatccggcaagcaaaatcacggagggtacaaaaaaaggaatacccacggccagccaaaacatataaaattacacccaccctcccctcaccgactaaaccccgcacaaaatatggcccccacgctattaacacaactacccctcaccccaaaaaccaaaaaannnnnnnnnnacaaaaaaccggggcgacgccacacaaatatttagaaagccgctcccccgtaccgcaataaaacaacaactatggtaaatacacaccggcgggacc

SEQ ID NO: 231629 - DNA, 352 bp, Homo Sapiens
  misc_feature (53)..(204): n is a, c, g, or t
  misc_feature (230)..(244): n is a, c, g, or t
taagcgtaacttccctcaaaaaaactagcaccccctctaccccctctagagcnnnnnnnnnnnnnnnnnnnnnnnnnnnnnnnnnnnnnnnnnnnnnnnnnnnnnnnnnnnnnnnnnnnnnnnnnnnnnnnnnnnnnnnnnnnnnnnnnnnnnnnnnnnnnnnnnnnnnnnnnnnnnnnnnnnnnnnnnnnnnnnnnnnnnnnntaaacagaacaaaaacccctgggggnnnnnnnnnnnnnnnaaaaaattttccaacccccttttgggcccgggcgcccccaaaagggggaacaaaggggaaacttttttccaaaaaaaccccgtttccaaaaaaagggatgggcccccc

SEQ ID NO: 231630 - DNA, 783 bp, Homo Sapiens
  misc_feature (91)..(146): n is a, c, g, or t
  misc_feature (219)..(303): n is a, c, g, or t
  misc_feature (449)..(657): n is a, c, g, or t
gggaaccgccgcggacgtcagcgagacagatccggctggcagggcggcccgtggaccgcgaaagcgaaaccatggaatctgactctgtcannnnnnnnnnnnnnnnnnnnnnnnnnnnnnnnnnnnnnnnnnnnnnnnnnnnnnnnttcaacagattctactacctcagcatatagagtagctgggagtagaggtgtgtgacaccacacctggttaatnnnnnnnnnnnnnnnnnnnnnnnnnnnnnnnnnnnnnnnnnnnnnnnnnnnnnnnnnnnnnnnnnnnnnnnnnnnnnnnnnnnnnctagcaaactgctgagatgagaggagtggcccactgcacccagcctactggtttatttttaaaaatagcaatttgggtcgggcgcagtgtgtctcgcctttctatatcaaccaacattctttctcgagtctgatgacctgcgatcnnnnnnnnnnnnnnnnnnnnnnnnnnnnnnnnnnnnnnnnnnnnnnnnnnnnnnnnnnnnnnnnnnnnnnnnnnnnnnnnnnnnnnnnnnnnnnnnnnnnnnnnnnnnnnnnnnnnnnnnnnnnnnnnnnnnnnnnnnnnnnnnnnnnnnnnnnnnnnnnnnnnnnnnnnnnnnnnnnnnnnnnnnnnnnnnnnnnnnnnnnnnnnnnncgggtccccaatactgcgcccatggccctgtcccatcgaaacaggactcacttctccaacacaacttaataaataccgcttacgccaatcgaaaaacgcttcccaaacacacaactttctacggct

SEQ ID NO: 231631 - DNA, 741 bp, Homo Sapiens
  misc_feature (244)..(613): n is a, c, g, or t
  misc_feature (669)..(678): n is a, c, g, or t
gggaccttggggtttcagaacccatggtctgtctcatggctctccagagagtctgtgaactcctggaaggcagagcctgtgtccttgcagtttttgtttccctagcatcaagacttgaacacagtggatattaataaatatttctaaaactgaaccacaggagtgaatatggctcggcagaaaaccaacatcccattatcctactcttttcatatgatgattaatacttttaggtttactttannnnnnnnnnnnnnnnnnnnnnnnnnnnnnnnnnnnnnnnnnnnnnnnnnnnnnnnnnnnnnnnnnnnnnnnnnnnnnnnnnnnnnnnnnnnnnnnnnnnnnnnnnnnnnnnnnnnnnnnnnnnnnnnnnnnnnnnnnnnnnnnnnnnnnnnnnnnnnnnnnnnnnnnnnnnnnnnnnnnnnnnnnnnnnnnnnnnnnnnnnnnnnnnnnnnnnnnnnnnnnnnnnnnnnnnnnnnnnnnnnnnnnnnnnnnnnnnnnnnnnnnnnnnnnnnnnnnnnnnnnnnnnnnnnnnnnnnnnnnnnnnnnnnnnnnnnnnnnnnnnnnnnnnnnnnnnnnnnnnnnnnnnnnnnnnnnnnnnnnnnnnnnnnnnaaactaaaattccttggcaccccagcaggcccaaggttgcacttgaacttgaaatnnnnnnnnnntacaccttcgccgcggggcccagtaaaacaataactcctgcctaacccaatccagcccctgta

SEQ ID NO: 231632 - DNA, 835 bp, Homo Sapiens
  misc_feature (370)..(373): n is a, c, g, or t
  misc_feature (425)..(457): n is a, c, g, or t
  misc_feature (506)..(625): n is a, c, g, or t
cttggcccatgattaatggaatgtatgtaactagttagggttcctttcttagatctagaggaagtacagccacccactgacatctgaatttatatacctgttgagttttgagtgcacccaaacactcgataaaccaggtgaagaaatttagcttccatgttctacttcagctaaaacagctacatacaacctagtacacttgaagtcagacagacatttcagttgcttacctccagtactgagccttgctttgggaaactaaaagatttagaccaagtcactgccagtttttgcctttgttgcattttgtacagtttttatatttttgatatcttgtaaataaagacaaccagcttttccaggttccttnnnncaacaaacacaacaatacacatccaaataaccatatcacacccatataccannnnnnnnnnnnnnnnnnnnnnnnnnnnnnnnnacctatactgcatccacctccttcccccaattcaaacctccgttaccgnnnnnnnnnnnnnnnnnnnnnnnnnnnnnnnnnnnnnnnnnnnnnnnnnnnnnnnnnnnnnnnnnnnnnnnnnnnnnnnnnnnnnnnnnnnnnnnnnnnnnnnnnnnnnnnnnnnnnnnngcctcatacccacgcccacttgcgatacccacttccatacgctacaccccctccccgcagccaaaaacctgcctccccacatgaaaatatctaaggacacagcccacggcatatgtccgtaaacccagacaccctactctcccaccagttaacctaccccgccctatacttcatgatccaccatcacagcacccccgacctatgctctca

SEQ ID NO: 231633 - DNA, 881 bp, Homo Sapiens
ggggctcagctggggataccgcgagcacaacggtcctattcactggaaggaatttttccctattgctgatggtgatcagcaatctccaattgagattaaaaccaaagaagtgaaatatgactcttccctccgaccacttagtatcaagtatgacccaagctcagctaaaatcatcagcaacagcggccattccttcaatgttgactttgatgacacagagaacaaatcagttctgcgaggtggtcctctcactggaagctcaaggttacggcaggatcaccttcactgagggcccgctgatgaccacggctccgagtccatagtatatggagtgagctatgctgcacagctccatggggttcactggaatccagacaaataccccccctctgttggaggcagctcatgaaccgaatggactggttagcttgggaatgtcattacccgatggaggaaccgtaattcgcagctgcggggagaattacctgacaccttgggattcccaattcaaggaacagggcgcaacatacctcggattccgccaatttgtgaccctatgggcgccaggtttccccccaccctggggcatgctgggacatgaccctggggatccccataacgggccccaacatcactcttggaaagaggaccccggatattattcttacacgaggcgcagaaaaccccgcgctgaagaaagccgtggccgcaccttgtgatatccgccccgaaccactgaccacgagggacgtccacccaagactcttttctggaggattggacccgcggtgccgggcgactgacgttcaagataggggcatgaaactcgagaggccccgccttccgcctctgaaacgacgggaccccgatggctgctgccc

SEQ ID NO: 231634 - DNA, 480 bp, Homo Sapiens; identical to SEQ ID NO: 96159
  misc_feature (238)..(380): n is a, c, g, or t
  misc_feature (382)..(385): n is a, c, g, or t
  misc_feature (395)..(408): n is a, c, g, or t

SEQ ID NO: 231635 - DNA, 958 bp, Homo Sapiens
  misc_feature (150)..(213): n is a, c, g, or t
  misc_feature (215)..(217): n is a, c, g, or t
  misc_feature (219)..(229): n is a, c, g, or t
  misc_feature (231)..(231): n is a, c, g, or t
  misc_feature (234)..(234): n is a, c, g, or t
  misc_feature (236)..(236): n is a, c, g, or t
  misc_feature (240)..(314): n is a, c, g, or t
  misc_feature (321)..(321): n is a, c, g, or t
  misc_feature (323)..(323): n is a, c, g, or t
  misc_feature (325)..(326): n is a, c, g, or t
  misc_feature (330)..(824): n is a, c, g, or t
  misc_feature (826)..(826): n is a, c, g, or t
  misc_feature (828)..(828): n is a, c, g, or t
  misc_feature (846)..(846): n is a, c, g, or t
  misc_feature (853)..(854): n is a, c, g, or t
  misc_feature (867)..(867): n is a, c, g, or t
  misc_feature (882)..(883): n is a, c, g, or t
  misc_feature (908)..(908): n is a, c, g, or t
  misc_feature (915)..(916): n is a, c, g, or t
  misc_feature (936)..(936): n is a, c, g, or t
  misc_feature (943)..(943): n is a, c, g, or t
ggggctgaaggcgagcgacagcttcatccccaggacatccaggcccggggctgagtgctggggagttggccatccagcctggggagaaatgtttgaatgttccagctgccccatgctgacagcagcccccatctctggtttcagaagggnnnnnnnnnnnnnnnnnnnnnnnnnnnnnnnnnnnnnnnnnnnnnnnnnnnnnnnnnnnnnnnntnnntnnnnnnnnnnntnttntntttnnnnnnnnnnnnnnnnnnnnnnnnnnnnnnnnnnnnnnnnnnnnnnnnnnnnnnnnnnnnnnnnnnnnnnnnnnnttgtttntntnnttgnnnnnnnnnnnnnnnnnnnnnnnnnnnnnnnnnnnnnnnnnnnnnnnnnnnnnnnnnnnnnnnnnnnnnnnnnnnnnnnnnnnnnnnnnnnnnnnnnnnnnnnnnnnnnnnnnnnnnnnnnnnnnnnnnnnnnnnnnnnnnnnnnnnnnnnnnnnnnnnnnnnnnnnnnnnnnnnnnnnnnnnnnnnnnnnnnnnnnnnnnnnnnnnnnnnnnnnnnnnnnnnnnnnnnnnnnnnnnnnnnnnnnnnnnnnnnnnnnnnnnnnnnnnnnnnnnnnnnnnnnnnnnnnnnnnnnnnnnnnnnnnnnnnnnnnnnnnnnnnnnnnnnnnnnnnnnnnnnnnnnnnnnnnnnnnnnnnnnnnnnnnnnnnnnnnnnnnnnnnnnnnnnnnnnnnnnnnnnnnnnnnnnnnnnnnnnnnnnnnnnnnnnnnnnnnnnnnnnnnnnnnnnnnnnnnnnnnnnnnnnnnnnnnnnnnnnnnnnnnnnnnnnnnnnnnnnnngngngggtttttgtgttgtgtntttggtnnggttttgtcgttngtggtgggtgggggnntgtttggtgttgtgggtggggttgnggccggnnggttgtttttcgggggtgtnggggggngtgttttttgtttgt

SEQ ID NO: 231636 - DNA, 827 bp, Homo Sapiens
  misc_feature (132)..(280): n is a, c, g, or t
  misc_feature (336)..(511): n is a, c, g, or t
  misc_feature (608)..(618): n is a, c, g, or t
gggccggagatgggtctcactctgtcacccagactggagtgcagtgagtggtgcgatcatagcttactgcggcctgaaactcctgggctcaagtgatcttctcgcctcagcctcctgagtagctggagctannnnnnnnnnnnnnnnnnnnnnnnnnnnnnnnnnnnnnnnnnnnnnnnnnnnnnnnnnnnnnnnnnnnnnnnnnnnnnnnnnnnnnnnnnnnnnnnnnnnnnnnnnnnnnnnnnnnnnnnnnnnnnnnnnnnnnnnnnnnnnnnnnnnnttgtgacattccccctgcccccgacagtgagtctcatgatctccccacccagcacnnnnnnnnnnnnnnnnnnnnnnnnnnnnnnnnnnnnnnnnnnnnnnnnnnnnnnnnnnnnnnnnnnnnnnnnnnnnnnnnnnnnnnnnnnnnnnnnnnnnnnnnnnnnnnnnnnnnnnnnnnnnnnnnnnnnnnnnnnnnnnnnnnnnnnnnnnnnnnnnnnnnnnnnnnnnnnnnccccccccgatcttaacctcccctccgcctcgtatcgcgcctggttcccgctatatacggcccgatttacgcatccttactccatcaccgaaagaannnnnnnnnnnaatcgctattcgccgttgttcctacatatctattgttcgggccccttctgggcccctccgaaaaagtatttccgaaaacaaatctatttttgggcgccgcgcgccccccatcaggggtacgggagaaccgggctcacataacttggttttccaaagaagagaaccctggcttccgaaacctaagggtttgtgggtcctcctcccaccat

SEQ ID NO: 231637 - DNA, 842 bp, Homo Sapiens
  misc_feature (166)..(176): n is a, c, g, or t
  misc_feature (292)..(321): n is a, c, g, or t
gggttccccaaacctggtcacacagcatcctgcaccttagcgtcccatgtaagggactctgcaagcttgttgttcagcaccgcagtgttacctcttggcaagctgtgaacctgtcgcctcatcaggagcattcgagggtgcttggaagcatgaactctgggggtgnnnnnnnnnnnggttattttaattatgtgatgatgctgttaagcttacagatatgcagttgattttttaaaaagcttaactaggaatctttctgaatacttgtcctattttgaaactacctgtctgnnnnnnnnnnnnnnnnnnnnnnnnnnnnnnaatgtcagaggaatctatccatgtgaatcgaaaggcacaggaatctaggaactctgaggaatttattgtgaaggattttgttagggggttgacagagaaagcaaagtgtaagtttggaagaaggcatgtgcggtggtggcgagcgctgccggctatggaaggggacttggcttttcagttaggggtaatggagaaagggggagttgcttgtaaaacgagttaaaaccattcagggtggaaggggttaaaccccttttacgaatcccttggttatcccggggggtaaaaatatgggaacaagagcccaaagccaggaactaaacccaaaagggaggaacccatgaacctctgcagattggccaaatctaaaaaattaggcaggggaaaacctaactgaacttgggcaaaaggtggagcccctcccccaactgggaatccgaccacctttaatccctgccccttttggaatggaaaacacccctattcggggtaaactgtctctaaaaaagacccaggaaaac

SEQ ID NO: 231638 - DNA, 590 bp, Homo Sapiens
  misc_feature (252)..(253): n is a, c, g, or t
  misc_feature (297)..(297): n is a, c, g, or t
  misc_feature (320)..(320): n is a, c, g, or t
  misc_feature (380)..(380): n is a, c, g, or t
  misc_feature (478)..(478): n is a, c, g, or t
  misc_feature (548)..(548): n is a, c, g, or t
  misc_feature (568)..(568): n is a, c, g, or t
tcactcaaaccgtctgttgggtaacatgaaaagactgtattcctctaaaaggctgggattgatacacgtgatttcacctggaagaggtggaagaaccaagggaattgctcatgaatatgggaatggaaatagcaaatttatccttgaaggggtgatgttacaaatgggactgcttctgaatatgtgaatgacaccaaaacaattagccgatgaatgggtgaaggggtatatgcctgaaatccagcccctccnnccaccagccgcaaaacccgccccagacggaacacgacccccggnggcacacaccgcaccaaaacggngaagcgaaacccagcaaaacgggggaaacacgagaagggagcgggacgaccggcacaacncccggccgccgcccgggaacggacgggagggggccgggggcgcgcaacggagaaacggcgggaggggggacggaaccgacccgaggccaccgcccgancggcggggggacacaaccgaacaaacaggggggagagggaaaccaaacaaaacaaagagaagacggtggnacgccgcacgaccgcgcganacggcaggaccggcgcacataa

SEQ ID NO: 231639 - DNA, 806 bp, Homo Sapiens
  misc_feature (116)..(136): n is a, c, g, or t
  misc_feature (281)..(281): n is a, c, g, or t
  misc_feature (307)..(323): n is a, c, g, or t
  misc_feature (345)..(391): n is a, c, g, or t
  misc_feature (462)..(477): n is a, c, g, or t
  misc_feature (492)..(608): n is a, c, g, or t
  misc_feature (639)..(698): n is a, c, g, or t
  misc_feature (708)..(708): n is a, c, g, or t
ggggctagtacaacttgatttcatcatgttcatttgatacacaagtgaactggaaagtcacttcccatagaagcaaaagtacttattttctaccctagctgggtgcatgtgtgtgnnnnnnnnnnnnnnnnnnnnnccccacgcccctttgccggttcctcgactcatacatccctcgtgctttcccatctccagtctgtattactgtaggttctcttcaaataattaattgagcagacaagtttgttttattttggagcctttttggctctggcttttanacattgtcctggttggctcatttaannnnnnnnnnnnnnnnngacaccgagtcactcttgtcannnnnnnnnnnnnnnnnnnnnnnnnnnnnnnnnnnnnnnnnnnnnnncctccgcggtcatgccattcccctgcttcagccccctgactagccgccgataccggcccccctccctatgnnnnnnnnnnnnnnnngcttttcctccaagnnnnnnnnnnnnnnnnnnnnnnnnnnnnnnnnnnnnnnnnnnnnnnnnnnnnnnnnnnnnnnnnnnnnnnnnnnnnnnnnnnnnnnnnnnnnnnnnnnnnnnnnnnnnnnnnnnnnntccgcccctcctgcgtccttatctacctttnnnnnnnnnnnnnnnnnnnnnnnnnnnnnnnnnnnnnnnnnnnnnnnnnnnnnnnnnnnngcctccgcgnggcccgcacgcccgatccgcggctccccctccgttttacggttttctcccgccgcccccgcgccgtccttcgcccgtgttgtcatcttgccggcgcgg

SEQ ID NO: 231640 - DNA, 859 bp, Homo Sapiens
  misc_feature (87)..(226): n is a, c, g, or t
  misc_feature (373)..(381): n is a, c, g, or t
  misc_feature (687)..(687): n is a, c, g, or t
ggactgtgaatagtgtctcctgagttatcttccagtttataaactaccccaccatctgtgattataataaatttattattcctgtgnnnnnnnnnnnnnnnnnnnnnnnnnnnnnnnnnnnnnnnnnnnnnnnnnnnnnnnnnnnnnnnnnnnnnnnnnnnnnnnnnnnnnnnnnnnnnnnnnnnnnnnnnnnnnnnnnnnnnnnnnnnnnnnnnnnnnnnnnnnngccagtgacgagggggccggggccccaacaataaaaaaacacacaccggaaaccgtggccgtacggaacgaatccaaatgaaagatgtggggtcgttacctggcccaaccaacggggggtcccattccgaggggcgtttttgaaatnnnnnnnnnggcacctgtccactcagccgcagcaactgtttttctacaatactaaaagcaatgccggggggactaggcgaatctccccccccacacacggaagagaaaagaaccccggaagaggtgctggggcgggaattggggaaaaccctttgcccacccccgggggtgggaacaatcccttgacccactggtgtgcaaacccttagcccccgcaacgggcgcacgcccgcccattctgtgaaccatttttttcaccctcgcgccaacctaatggggggaccccccacccaacaagggcccatgggcctcggncacataccagtacgccctctttatcgcgcgggagacactcctcaccccaaaaagttgggccccgcaccctccacccttaaatcggccggcccgaatacaacgcccaatatggcggtgttctcgccaaacctcgtttttgtacagagcaaacgcgggcgacacccctcttccc

SEQ ID NO: 231641 - DNA, 1033 bp, Homo Sapiens
  misc_feature (347)..(371): n is a, c, g, or t
  misc_feature (423)..(520): n is a, c, g, or t
  misc_feature (666)..(666): n is a, c, g, or t
  misc_feature (900)..(900): n is a, c, g, or t
  misc_feature (917)..(917): n is a, c, g, or t
  misc_feature (927)..(927): n is a, c, g, or t
  misc_feature (958)..(958): n is a, c, g, or t
ggtctctgtgtcagtaaaaagcgtgttttgttttttaaaaatcattcatgtgttctctggagtagcacctataacttccttcaagaactttttctttgcattcacaacttgagtagctgatgcaagaagcttagctttggcctgtcttagcttccaacatgctttcttcactaagctcgatgatttctaccttttgatttgaagtgacaggtgtgcacacttcttttcagttgaacacatgccggccactgcagagtgaagtggcctaatttcattgtcgcatctcgcggaatgccacctacaaccacacaacccgatcccttctacatgctttattttatcgcagnnnnnnnnnnnnnnnnnnnnnnnnntttgacccacgcggctccccttacgccaccgtctacccgctattctgtccgnnnnnnnnnnnnnnnnnnnnnnnnnnnnnnnnnnnnnnnnnnnnnnnnnnnnnnnnnnnnnnnnnnnnnnnnnnnnnnnnnnnnnnnnnnnnnnnnnngccgcattgacccgcacaccgcgctctccgccctctcgaagcctatccctctcctacgacctccccgctatccctctctttgtctgtcctctattctggtgcgtactccccatcgagagacgcgccccacgccgccccgcgggtgnctctgactgcacacccacaccctaacaccgttgtgcctgcccacgcccaccctcatttcggtcccattttactataccccgctcgccgccgccgcgtcccgactagctcgtacgcctctacgctcttattttcgcaaccgggccacgcactcaacacccgtatctcgttcgttcttcgctctcctccccacatctcttccgcccaccattactacccaccgacccacaccccancccaccacatcactccnttaccccccnctacgccacctccacgcctcgttcttctttntccctcccccaacaggccgtatacaaccagcctgacttccgcgtcttctcctctcctcaacctcctcccctcccc

SEQ ID NO: 231642 - DNA, 649 bp, Homo Sapiens
  misc_feature (82)..(248): n is a, c, g, or t
  misc_feature (257)..(271): n is a, c, g, or t
  misc_feature (296)..(305): n is a, c, g, or t
  misc_feature (315)..(480): n is a, c, g, or t
  misc_feature (491)..(500): n is a, c, g, or t
  misc_feature (545)..(607): n is a, c, g, or t
gggaagagttcctagtctattgtgttcaaacagagtcaacaaaagtttttaattttttattacagaagggtgaagttcaatnnnnnnnnnnnnnnnnnnnnnnnnnnnnnnnnnnnnnnnnnnnnnnnnnnnnnnnnnnnnnnnnnnnnnnnnnnnnnnnnnnnnnnnnnnnnnnnnnnnnnnnnnnnnnnnnnnnnnnnnnnnnnnnnnnnnnnnnnnnnnnnnnnnnnnnnnnnnnnnnnnnnnnntttttggcnnnnnnnnnnnnnnnaaaaaattttttaaaactttttttnnnnnnnnnncccccaaagnnnnnnnnnnnnnnnnnnnnnnnnnnnnnnnnnnnnnnnnnnnnnnnnnnnnnnnnnnnnnnnnnnnnnnnnnnnnnnnnnnnnnnnnnnnnnnnnnnnnnnnnnnnnnnnnnnnnnnnnnnnnnnnnnnnnnnnnnnnnnnnnnnnnnnnnnnnnnnnnnnnnnnttttaaatttnnnnnnnnnngcgccctttttgggaaaggggggaaaatttaaaaaaatttctgcnnnnnnnnnnnnnnnnnnnnnnnnnnnnnnnnnnnnnnnnnnnnnnnnnnnnnnnnnnnnnnncgccgtggaaaaaaatttttcccccgggggaaaaacgggggg

SEQ ID NO: 231643 - DNA, 629 bp, Homo Sapiens
  misc_feature (262)..(262): n is a, c, g, or t
  misc_feature (350)..(400): n is a, c, g, or t
  misc_feature (416)..(516): n is a, c, g, or t
acttcagtgtttagaaagttattaccaatacttttaaacaacactccaagaaaatttgctatatttctttctcatcactacagagagagtagatttccccatagagagcacagcctccattagtaaggttggtgactattggtaagaggtggacttcattgacaccaagtgggaggtagggaaagcccagaaatggcaggatgatatggtggttctgtcgttgggaaaggtattgggtcttgctggttgtcttcatactgtntaacccacaccacgctttttcctattacctgcatatgccttgactttccatgcctgatcttctaccatgcccccgacctgcccctaannnnnnnnnnnnnnnnnnnnnnnnnnnnnnnnnnnnnnnnnnnnnnnnnnnccacaaccgtcgctgnnnnnnnnnnnnnnnnnnnnnnnnnnnnnnnnnnnnnnnnnnnnnnnnnnnnnnnnnnnnnnnnnnnnnnnnnnnnnnnnnnnnnnnnnnnnnnnnnnnnntcccttttttctttcgcccgcgccctgtcgctccccttcgtcgctccgctttctccgtacccgcccgcaccgccgtacacctcgctctgcccccgctctccctgcctttccaa

SEQ ID NO: 231644 - DNA, 773 bp, Homo Sapiens
  misc_feature (344)..(593): n is a, c, g, or t
ggggggggacatctgatgtgatgcactgtgttcactgccagtgtggtagaaggacggagatttctgctagtcgcgaatggtgtccttataccccacctccacgaagcaggcggctcactagccaggcaatgtggccagtgctttgcttctcacttggaaggcaagccatttcaggatgtgagccatgtggtgtgcctctgtttttgtgcctgttatggtggaattttcccctttgtcatacataaaggatttgaggactccaaacaataagctataagaataactagggttggaggaggacggaatatccctagcaaacacacagaaagtaagtaagaaaaagnnnnnnnnnnnnnnnnnnnnnnnnnnnnnnnnnnnnnnnnnnnnnnnnnnnnnnnnnnnnnnnnnnnnnnnnnnnnnnnnnnnnnnnnnnnnnnnnnnnnnnnnnnnnnnnnnnnnnnnnnnnnnnnnnnnnnnnnnnnnnnnnnnnnnnnnnnnnnnnnnnnnnnnnnnnnnnnnnnnnnnnnnnnnnnnnnnnnnnnnnnnnnnnnnnnnnnnnnnnnnnnnnnnnnnnnnnnnnnnnnnnnnnnnnngcccagttgccggtggcttacgccctgttaattcccagcacttttgggaaggcccgaaggtggggtggaattcacaaagggtccaggaagtatccaaagaaccccttccctggggctctaaaccaccagaggggaaaaaccccccgggtatatccctaccctttaaaaaatttaccccag

SEQ ID NO: 231645 - DNA, 556 bp, Homo Sapiens
  misc_feature (45)..(61): n is a, c, g, or t
  misc_feature (65)..(124): n is a, c, g, or t
  misc_feature (187)..(274): n is a, c, g, or t
  misc_feature (307)..(427): n is a, c, g, or t
ggtatctctccctccccctctatctttacccttgtctgtttctgnnnnnnnnnnnnnnnnngtcnnnnnnnnnnnnnnnnnnnnnnnnnnnnnnnnnnnnnnnnnnnnnnnnnnnnnnnnnnnncttccctttagatctctaaccttctatccccctcccttttttttgagacagggtttctgtgannnnnnnnnnnnnnnnnnnnnnnnnnnnnnnnnnnnnnnnnnnnnnnnnnnnnnnnnnnnnnnnnnnnnnnnnnnnnnnnnnnnnnnnagtagccaggaccagaggcgtgcaccaccacannnnnnnnnnnnnnnnnnnnnnnnnnnnnnnnnnnnnnnnnnnnnnnnnnnnnnnnnnnnnnnnnnnnnnnnnnnnnnnnnnnnnnnnnnnnnnnnnnnnnnnnnnnnnnnnnnnnnnnnnatgagccaccacgtccaacctattccttgatctctaactctcgatctctatatctgactttctctatgaccccctgtgcctcagtttccctaaacctccatcctctcatccctctaaccctgtgccccc

SEQ ID NO: 231646 - DNA, 882 bp, Homo Sapiens
  misc_feature (457)..(542): n is a, c, g, or t
  misc_feature (720)..(720): n is a, c, g, or t
ccatttacttgttcaatatgtgtctacagcagctgtttgaagtaaaagttttcaaggaaaaacaccattcttggtttataaatcaatcagttcaatcaggaggtcttctccattttgccacacctgtggatcctctatttctgcttctccactacctcataaaggctgataaggaggggaagtttcactcccttgatcaagttgtggcggacaacgtgtctccatactgcatcttgctgttcaacctttctggacttgagaaggcccttctgtgtgcgcctcaccgagctctctactcccccacactctctaattcacaccccattagtaccactattcgagaagctttcacccacgcccccaaaattctttcacttatcttgtctctcctgaaaatcttcctcccctcgccctgttcccctccaccgcgacttgcgccctcctttcttctctattnnnnnnnnnnnnnnnnnnnnnnnnnnnnnnnnnnnnnnnnnnnnnnnnnnnnnnnnnnnnnnnnnnnnnnnnnnnnnnnnnnnnnnacaaaacctcgacgcatctctctctcaccctttatatctccctatcttgtccccacccattgcacacttccatgctttcatacccccaccgatttcacgccgcaaccgccaccacccctatcacccacgcctctctgtcgtaccagatactcccacttcactccccccagtcaccatntcgcttctaactgacgcttcatccactacagctaaccaccgttaccccctgcaccttaaccttctcaccctaccacgcttactcgtctctccgcgtactatactgtaaccctgtaatacgtacatcagccccttaacactcgaaatcgccacgtttctgttg

SEQ ID NO: 231647 - DNA, 695 bp, Homo Sapiens
  misc_feature (49)..(220): n is a, c, g, or t
  misc_feature (326)..(338): n is a, c, g, or t
  misc_feature (529)..(568): n is a, c, g, or t
cctttctaagagggcttgagggagagagtttgtcccttttacccttctnnnnnnnnnnnnnnnnnnnnnnnnnnnnnnnnnnnnnnnnnnnnnnnnnnnnnnnnnnnnnnnnnnnnnnnnnnnnnnnnnnnnnnnnnnnnnnnnnnnnnnnnnnnnnnnnnnnnnnnnnnnnnnnnnnnnnnnnnnnnnnnnnnnnnnnnnnnnnnnnnnnnnnnnnnnnatgtgttgataggtttagggtcatgttttactttttcagccacgttacattttagaagcgtctaaagccaaaactcttgccaaagttaaattcacacacggacgtnnnnnnnnnnnnnaccttcgtcccccctgcgccccacctttattacctcggcggccccccgccttctctctcggactccgggtgcgctagccccactgagccaacgtccggatcgcgcccccctctcttaacccagcggcacggggcctccgcccactgcctgggactccccctgccggtcacctgaaccggcgccatttccannnnnnnnnnnnnnnnnnnnnnnnnnnnnnnnnnnnnnnnttacacatccctctacagttgttctgccctggccccatccgcacacccactgcccatgtacccccgcgtccgagcccgcagtaggtgtagcctcatctaccatccaccccggtcgccttactctttg

SEQ ID NO: 231648 - DNA, 895 bp, Homo Sapiens
  misc_feature (519)..(527): n is a, c, g, or t
gggttctgcccttgtttgtggagttacagcctcaaggttgtagcatgtgtgctggcaatcagggccgcagtgtgttctgcgcctgcccagagctgactcctgatttaaccgctggcgtaaccgcgggttgcacgcatgcgtgctgaaaagcctttcaccctcacgtggtttcttttttaaccagtcatcaagcgaggctcgcgcgcaggccccgcgttggaaaatggcggggaagctgaaacctctgaatgtggaggcgccagaagctgctgaggaggctgaaggtatcgagggcaagtgcgctgcactcctttctctccacaccaggcacaaaggaggcgaggttcgcgccctcttcataacgacccaatgatatcctaccattcctcacccccactgtacacccccttgcttcgtccctacacgcgcgcccccagcaaaccaccctcaaccgacgcttccacgctcgcaaaccccccctgatttatatccctttgtacgccactgcactctatttgnnnnnnnnngcctgctcaccaacttatctgtccggtcaccctcatccatctaagttgtccctcaacagttagcgccctgtggcgcaccccccccatcagtagatgttctcacataacccccacctcgacaaccgatccacctaccacgcgatgcctcagacaccattgggcggctcgtgaggaatggcctaaacctccgtactgggcggcgccctagtaacgatttcgctgacgtcgcaccgttggacaagagtcactgtgcatgcgtaacattggacagtctgcgaactccttccgtgcaatcacgactacgcaggattccatggcgcgcccggtcgcagtctaggtctaatcccacgatcaccgtcagtgtactc

SEQ ID NO: 231649 - DNA, 957 bp, Homo Sapiens
  misc_feature (89)..(166): n is a, c, g, or t
  misc_feature (177)..(185): n is a, c, g, or t
  misc_feature (196)..(211): n is a, c, g, or t
  misc_feature (330)..(350): n is a, c, g, or t
  misc_feature (663)..(671): n is a, c, g, or t
  misc_feature (768)..(776): n is a, c, g, or t
ggtgtttagttttgtatgtgataaacagaattgatgtaagtttttgtggacttgaatttctccttccttgagatcaattaaacagcagnnnnnnnnnnnnnnnnnnnnnnnnnnnnnnnnnnnnnnnnnnnnnnnnnnnnnnnnnnnnnnnnnnnnnnnnnnnnnncacaaccaacnnnnnnnnntccttgccggnnnnnnnnnnnnnnnnagaaaaccttccaaaactttttgtttgtggccccggcgccccatataggacacggaaattggcccttatattggctttcccaagaaacacctggccaaaggacaaagggcctggatttnnnnnnnnnnnnnnnnnnnnngcggggcccacccagagcgttctctaaacaaatctccaaaggggattcctggagggcctcttcgggggatttatccaccgggggccccaggccgagccccataactaaaattttaccccccgcccctgtccccctcctttcgagaatgacctgggggaaatttcaattaacacatttctctgccgccatttgggaaacccctcccccccaaaccgcgggtttggtagagaacacctttaacattccgtccccgcgggggaatttccatacccccttgtgtgcgccccctttggggcataattcaatttttttnnnnnnnnngggggccacaaaacgtggggggcgccacaagaaaaagtcggctccccattttggggcccccgcttttaaaaatccaaaactccggggcgaaaacctnnnnnnnnnggggatttgggcctgaaaccacaacaaacacctttatttcctccaataacccccttttttcgccgaaatataggggcccacgtttttctccccggatacacacgccccatttttcgtgggaatatattattgggagacaaaaattcggcgcaaaaaccctttgcgggccctcctcccccaa

SEQ ID NO: 231650 - DNA, 731 bp, Homo Sapiens
  misc_feature (99)..(108): n is a, c, g, or t
  misc_feature (140)..(215): n is a, c, g, or t
  misc_feature (314)..(345): n is a, c, g, or t
  misc_feature (595)..(651): n is a, c, g, or t
cacaccgccccgcgccgcggagtggggcggtggcgccggactctattctccgtcgacgtcccgacaccctctggacgcccctttttcacctctataatnnnnnnnnnnggcccgcgttacgcgcagccgcgccccggcgnnnnnnnnnnnnnnnnnnnnnnnnnnnnnnnnnnnnnnnnnnnnnnnnnnnnnnnnnnnnnnnnnnnnnnnnnnnntcctccgttcgcccgccgcctcccccgcgtccgtttcaccccacccctaccccccgcctcagtgtatgaacgcccggctagcgtccgtcggagggcctnnnnnnnnnnnnnnnnnnnnnnnnnnnnnnnntatataccccctccacccttatgttcgtggcggcgccgtcgtaatcgacacgcgccgcccgcaccgccgcgcccctatccctcggccgacacgccattgtggctttgcattcccccgcgcgcccctatgctctcgccgtcgcggttccccgcgttgggtcgcgcccatcccgcctggcggtgtctattccgccgcgttccccgcgccgccgctcccgcgctatgcccttatcccctcggctctcactctnnnnnnnnnnnnnnnnnnnnnnnnnnnnnnnnnnnnnnnnnnnnnnnnnnnnnnnnnttttgctctccccccgccgcgccggcgtttatcccccggccatagagaccgagagtgacggctccgcatcccccgccgcc

SEQ ID NO: 231651 - DNA, 758 bp, Homo Sapiens
  misc_feature (177)..(197): n is a, c, g, or t
  misc_feature (234)..(243): n is a, c, g, or t
  misc_feature (307)..(307): n is a, c, g, or t
  misc_feature (460)..(460): n is a, c, g, or t
  misc_feature (673)..(703): n is a, c, g, or t
atgccctccccaccgttgttaacccccgcaaccaacccccccctcaaacacaccaccatttggtaatacaggttcccatcccaaggccggttcgccgcctttaccacccagtttacccgacgcacgcgctcactctgccccccgtctttccggggaattttactagtacgttgatgnnnnnnnnnnnnnnnnnnnnntccttgggcccgaggcctccacctttccgcccgactnnnnnnnnnngccctcgtttcgccagctgtcgtttacgctctcactgtcaacacaccctcccgcgtcgtcatcncactccgcgtaaccacgctgtacatacaagccgcgccggaaccgacgcgtgtcgccccgccttcctcaatatgatcgcctcacccgccacattcgcgagaatgtctccgccgcgacggagtgtgacacaaataattatcaccgtcacttcgcnctcgcactcgcacctaatcttaccgatctctctcaggaccgtgagtcagcacagcactatccgcatcgtcttcgaactcttgtcccactaccccgcaactcttcacaatttcaattccgcatatgctcgcccgcgccgcgcgcgccctcaccttgatccgcccgcacgacgtgagtcgcttcttctacatatacaccgcctacatcccatcgnnnnnnnnnnnnnnnnnnnnnnnnnnnnnnntcttgttctcctctcccgccccacgaacccgcacatatcaccattaccgctcccc

SEQ ID NO: 231652 - DNA, 675 bp, Homo Sapiens
  misc_feature (54)..(386): n is a, c, g, or t
  misc_feature (455)..(464): n is a, c, g, or t
  misc_feature (508)..(508): n is a, c, g, or t
gggggtgcccgtttcctgtgtttcgaattataccaattcaaaacagaactattnnnnnnnnnnnnnnnnnnnnnnnnnnnnnnnnnnnnnnnnnnnnnnnnnnnnnnnnnnnnnnnnnnnnnnnnnnnnnnnnnnnnnnnnnnnnnnnnnnnnnnnnnnnnnnnnnnnnnnnnnnnnnnnnnnnnnnnnnnnnnnnnnnnnnnnnnnnnnnnnnnnnnnnnnnnnnnnnnnnnnnnnnnnnnnnnnnnnnnnnnnnnnnnnnnnnnnnnnnnnnnnnnnnnnnnnnnnnnnnnnnnnnnnnnnnnnnnnnnnnnnnnnnnnnnnnnnnnnnnnnnnnnnnnnnnnnnnnnnnnnnnnnnnnnnnnnnnnnnnnnnnnnnnnnnnnntacccatcctccctccttttcttttctttaccccccaattcatacattatataacccgcctaacaccgnnnnnnnnnngtactacttatcggggtcacatcccaacaatcccagataaagcnaagccggtgcggggccccctttgctcctccaaaaaactcctccaaaaccccttttttgtgggcgccgggggcctcccactagcgaaagagaccacttgccttataatttgttttttccagagaaacccccggccattaacacaaagcggtttgggatttcctacaac

SEQ ID NO: 231653 - DNA, 884 bp, Homo Sapiens
  misc_feature (225)..(286): n is a, c, g, or t
  misc_feature (321)..(405): n is a, c, g, or t
  misc_feature (486)..(498): n is a, c, g, or t
  misc_feature (563)..(572): n is a, c, g, or t
ggtttgcataattctgtgcaggaaatacatatttatagtaattttgatggcaactactaagatttcctacgctgtccttaaagcttagcataatgtatattttaagtgaaatatttgagaaggttaaagaatcattacatactttgtcatcctatacttttgcatatataaataggtctgagctgcctcttcaataaagaagctaatgtgtaacatttcgcccannnnnnnnnnnnnnnnnnnnnnnnnnnnnnnnnnnnnnnnnnnnnnnnnnnnnnnnnnnnnnttccctcaccaccctcccgtcggacaccctccccnnnnnnnnnnnnnnnnnnnnnnnnnnnnnnnnnnnnnnnnnnnnnnnnnnnnnnnnnnnnnnnnnnnnnnnnnnnnnnnnnnnnntcttccaaaagattttcctcacaaccctcttggtgtgccggcgggggcgcccccattgaccgcatagaaccccttgtcccnnnnnnnnnnnnnccccccgcagcggatctgcgccgccccgcaaccaaggcggttgcccggacttttcccaccaaatnnnnnnnnnnccgccctcggcgtacccacgccacgccgtccttttatccgccgactctcccctaacggcgggttctttctcgcccccccgatattcgtcccgtgggcgccgctttcatcgcaacggagggcgcccccccgtccgcggatacgcctcgcaccgccgataaaagccctcgcctgcgacgcttccttctgcccgctttcctactattcgagcagttgtggtgccgtgccctaccccttccccttctacagccttttttccgcttcgccgagtagtccgcgaggccctcccccccctattcacgcctttatttcgc

SEQ ID NO: 231654 - DNA, 1187 bp, Homo Sapiens
  misc_feature (49)..(204): n is a, c, g, or t
  misc_feature (410)..(418): n is a, c, g, or t
  misc_feature (484)..(576): n is a, c, g, or t
  misc_feature (750)..(750): n is a, c, g, or t
  misc_feature (869)..(869): n is a, c, g, or t
  misc_feature (1015)..(1015): n is a, c, g, or t
  misc_feature (1139)..(1139): n is a, c, g, or t
gggggcactgggacctggatttgtttttctaaataaagttggaaaagcnnnnnnnnnnnnnnnnnnnnnnnnnnnnnnnnnnnnnnnnnnnnnnnnnnnnnnnnnnnnnnnnnnnnnnnnnnnnnnnnnnnnnnnnnnnnnnnnnnnnnnnnnnnnnnnnnnnnnnnnnnnnnnnnnnnnnnnnnnnnnnnnnnnnnnnnnnnnccaccgacactcctattccccacacaacaccctacaacaccaaaaccccccgcccacactccatgccgaccaaaaaaaaccccacaaaccccacctcccctccgcgcaccggagtcctccttaactcacccaaaaaaaatgtatctacatcctcgacccccaaagccctctcttaacccccgcactaaaacgacggccagtacaannnnnnnnnaaaaaacccctcatttagcgcagaaataggctcccccactcgacacaatcatagaaaaagacccgnnnnnnnnnnnnnnnnnnnnnnnnnnnnnnnnnnnnnnnnnnnnnnnnnnnnnnnnnnnnnnnnnnnnnnnnnnnnnnnnnnnnnnnnnnnnnccgccctaacatcggcctatactctttgcagaacccgccactgtagggatcgccacacacggtttagaagcccccgcccccggctaacaataaacaattcaaacatacacgcaccgcctaccgcttaaccgacccgccggcaattcacccccatcaaaacccttttactccaangaagcggcgtggtacaacgaagagaccgacgcccaacaataacgagccaggtaagacaatcgccgaggtcgcgaaacccgcagagcgcgagaataaaatgcccccgccccccgagtatnacctctaccacccaattacccgccacgactacatcgcacgccctaccagcccatataccgagccatatccgcccgtatataccgccaccctccctgcatagtctgtttatctgctatatcacccactatccatacaactcacacanatgcacccccccggacctcaacaccacttatgtaaccctcaccccccctcgttattctcacccactctatttgatcctaccacgcgccccacacccacacaatataaacacgcccgccgaaganaatataattgtgatattttcctgctgttcgaactcccatctccccgcc

SEQ ID NO: 231655 - DNA, 1079 bp, Homo Sapiens
  misc_feature (167)..(219): n is a, c, g, or t
  misc_feature (277)..(304): n is a, c, g, or t
  misc_feature (923)..(923): n is a, c, g, or t
taagtatgagtttttaagttagcccactttgttaatgactatgagtactaatagcttaagataaagaagtttctaggtaatcttgtttgaaggatgatgtaaaaatataaatttaaactgtgagtgacaaaataaacttccttaatatttgcctaccatattttttnnnnnnnnnnnnnnnnnnnnnnnnnnnnnnnnnnnnnnnnnnnnnnnnnnnnnggagacccgcccctttccttttccccggaaatcccctaacacccccgcgtctgtcttnnnnnnnnnnnnnnnnnnnnnnnnnnnnttcttatacccctctttccccgaaaagttgcgccccgcgctcgcggacccggctagacccgtcgcctgtccccacctccgctcccccccggcgtttggctccgcccctcgtgcacatgcgcacgttctccctaaacgcggcgacctggccgccgctgccgcctttcccccggcctaccttcgcgcgcgcgattcgcgttgccgtgaacgcgcgccgcccgccccctcgtatccctccccgcctcccccgttcggaccctcgttgccgcccggagttcacgcaccgctattacgattccccggcggccagtatcccccacgcccgcacggcgcccttttgctcctccacattacactcccccgtctcgtatctcgcgcccatgcgcggtctccccgcctcgccgcggtgacgctcgctgccggtatgcccccctttccctactccccgtgcccctcgtcctattcctcctctcaccgccgtgcgcgccctgtaccaagcccgtgctccgccactagaagcgcttggttcgcgcctcactcccgctgctatttttcccccaccgcgtccgcccgcgtccctccctcgttcgtacgcgccgcgtgtcgtctccatcccgganagtgcgcacccccgcgccacgtgcgtcctccgcgcccgccacgatactctttactctccgcgtcatgtatatgttgtttataccctgcgcccatccaatatcgttgtcccgctcgcgccgctatatttcgtccctcgccagggtggccagagcgag

SEQ ID NO: 231656 - DNA, 1010 bp, Homo Sapiens
  misc_feature (422)..(449): n is a, c, g, or t
  misc_feature (542)..(551): n is a, c, g, or t
  misc_feature (698)..(698): n is a, c, g, or t
ggcaacctgccagactaggctatcggtgctgcttctgcccactttcaggagaaccctgctctgcaccccagaaaacctctttgttttaaaagggaggtgggggtagaagtaaaaggatgatcatggcagggagctgaggggttaatatatatacatacatacagcagtatatatatttttgtaaataaacaggaactgattttctgcctccatcccacccatgagggctgcaggcactacgaccaaacatttccccgtcattccctaaaacatcgctcggccgccctccggcccttcaaagaagcttttccaaaacacctccctttgcccgcgcgggccccaggagggtcaagggacaccgggcccatacccttgtttcccgaaggaaaaacccggggccatgacatacgggcttgcggatnnnnnnnnnnnnnnnnnnnnnnnnnnnngggggcaaacgcccccgcggtttttgagaaaaaatcccccaaaggggcgccccccgcgggggcttttttaccccggaccctccttttaccccnnnnnnnnnntcccaagcgggagaggctctcctccgcatttcttgtaaggtttcgcgcggccccccttctgccccctgtgttccctcccctctatttttcgcgcacacaatgcgggggtccgcataacgcttttacctctcacgcccttttctcccncgcccgacaacactgggcggacaaccaatcctcctctacaaccaatgccgtctgtttcggtgcaccaacccccccgttttatatgttgcgacaagcgggcgattcgcctgcgcttgcccccccgcccgttcgaccctctccctcctctgcttaaaacgtaaagaatgactccctccccccacacctgcgcgccgccacccatcgccgtgcagcccgcccaaaacactaaaacccccttctcgttgtccgttttgcgcggcgcatcacttgcctcgcgccctgccccgttttacgcccccgcggggcgggcga

SEQ ID NO: 231657 - DNA, 1069 bp, Homo Sapiens
  misc_feature (50)..(189): n is a, c, g, or t
  misc_feature (203)..(216): n is a, c, g, or t
  misc_feature (265)..(273): n is a, c, g, or t
  misc_feature (333)..(348): n is a, c, g, or t
  misc_feature (701)..(701): n is a, c, g, or t
  misc_feature (704)..(704): n is a, c, g, or t
ggggtcgcgccgtcgggcccgggggaggggataataaatatttctaaccnnnnnnnnnnnnnnnnnnnnnnnnnnnnnnnnnnnnnnnnnnnnnnnnnnnnnnnnnnnnnnnnnnnnnnnnnnnnnnnnnnnnnnnnnnnnnnnnnnnnnnnnnnnnnnnnnnnnnnnnnnnnnnnnnnnnnnnnnnnncccttgcctttggnnnnnnnnnnnnnngaaaaagttaaaaattttattaattctggggcgggggccccgggggccnnnnnnnnngggaacaggggcgtgttcccgggcacaacggcgctcccggaccgagctccgggtttcccnnnnnnnnnnnnnnnncacggcgcgggccgaaaccccggacttatacacaagcgcccaaccggggggccctcgacggttttccgtgacccccgcgacccgagtgccccccccggaattctttaattttaggtcccccgccgcgtccccccttattcccatagtcccgcgaggaggaggttgccaacaccacatatttccccccccttgttgggcaaaacccttgtaccaccgcactcgcaggtgtgcgggggaacgcgggccggaatgccgcgcagaggcgtccgaccatacgggacaactctttggcgtccccgcgcgtgtggggcggtcggggtgtgttctattcccccgcacgcgggggcgcccancanccatgggggcgcgccgccccgcaacccccagtccccgcgaactacatttttgccctcactattatgttgcgcccacatctttctataaaacccgcggggagagaagtgtctggacacacacactactcgcgccccgccgggcgctggcgcccgcttagcacacaaccagtacgcgcgtgtgtccgtcccgacgtcccgcccgcggcccgttacattatggcgccaatacgcccgcccccctgcccctttttattgcgcgcccataacagtccgcgggcgtgtatttttcgcgttttttcgcgacgcgccgccataattgtctccccgcaccgaagtttctcccccgcgctcccatcacccaagag

SEQ ID NO: 231658 - DNA, 1126 bp, Homo Sapiens
  misc_feature (453)..(560): n is a, c, g, or t
ggtctctccctcctcccgccccgccaggcctggcggcccccgcccccctcgctggccattttgggggagtgagggggcgtggttgtttcttgtggttgtgtgtgtttgttgttcgggttttaaaaaagggaaactgagactgcaggtgggggaggtggtgggttttggggggatgtcccctaatccaagagtgccccctcacttgcgaacgactctcctctattgcctgcctctgctgagaattaacttgttctgtgtattatcaccaccaccccctatcccgtcaaaaccatgaacccccgacgtccccctaagataatactttcaccaacaccttcatattgctcacttgccccccttttatctcctatccataatgccccctcatctgccttacttatgcctggtcctgcctccctgtcctcaccccttttgcattttttctttcttccnnnnnnnnnnnnnnnnnnnnnnnnnnnnnnnnnnnnnnnnnnnnnnnnnnnnnnnnnnnnnnnnnnnnnnnnnnnnnnnnnnnnnnnnnnnnnnnnnnnnnnnnnnnnaccgcctttcactccgcactcacatattttaccccgcccacccgtccgactgctcactactattcttccacccgcccctcgccatccgtacaccaccccccgcccctatgtatctccgcccctgtttctcgcgtatatagagtcaaccgacgacgttgtgcaccaacgcgccccgacggctcagtatgctacgcgcgccagagtgcaattcgctacatcggcaacctcctaatgccactttattttttccccgccccgccccctgcgtgctactgcgccctcaattcgccccgcgtttattcgtcgtcctttcccgtcgtctaacctactcgtttaccgcccgttaacccgcgcccccgccccgtctcctcctattaccgcacttccgcctatatccgtcatacgtctcatgaattctcccccgcgtcatgaccatcacctggttcccttcgtccgtcctgtttttctcacgcccctatttcttctccccgctctccacccccccgcttaatacaccgcgcctacatatcgccttaatattttcgtctctcttcttcgcctcgccc

SEQ ID NO: 231659 - DNA, 1126 bp, Homo Sapiens
  misc_feature (49)..(175): n is a, c, g, or t
  misc_feature (522)..(538): n is a, c, g, or t
  misc_feature (920)..(920): n is a, c, g, or t
gttactgaagcatgtgtgtaaaaacatttaaaatattatcatttatgannnnnnnnnnnnnnnnnnnnnnnnnnnnnnnnnnnnnnnnnnnnnnnnnnnnnnnnnnnnnnnnnnnnnnnnnnnnnnnnnnnnnnnnnnnnnnnnnnnnnnnnnnnnnnnnnnnnnnnnnnnnnnncggacaaaagataaaatacaccaaaatacgccttgtcccgccgctctcgcgcccctctacaagctttcgctaaaccactctcgtttggccgccgcgggccctcagtagcccacagtgacacatggctcataccttgtttcgcctaggcagcattctgcgtctatgacctacccgcctccggattcctcatccatatcaaaaaaacgccccgcccgggtaaacccgccgcggcctctagaacaaaatctcaaaatcgggagtcccctcgaaggcccattcaccggggaatcctaatcaaagaagggaagttcccaaagcgcagccttcgcaatactttaaaattttannnnnnnnnnnnnnnnngggcacaacctcaatcagtaaaccgaacatgggtttggtaaacctcaagttataaagcacatttcccgggccacgaaatactggcgcaaaggccactttctcgtaacacacccgggccccactgaatacgcaaaccaccgtgtaaacatccgccgccgccccctgttttaattccgcccacctctctctttgtgtctgacccacccgcgcgtgatatataaacaccagtctctggcgcccaggcggcggcggcacacaacaggctgcgcgcgcggcaccaacagaaagcacctggctcccctatatattctgcggcccccccacgcgcctatctaaataatacaaaatagaacagtgcggtgtgcaacatagctctccctcncacacggcggtagatattcggtctctcgtaccacccgcgccaagactaatctctagctttctctctcgcaacatcacacacacgccctgatacaccccgtggaacacagcaccgcgcccatagtggtgtttctgccacccgcccgcacacccccgtattcctcacaactcgtatgttcgccacatctcaacatcttcgtcgcttca

SEQ ID NO: 231660 - DNA, 703 bp, Homo Sapiens
  misc_feature (60)..(70): n is a, c, g, or t
  misc_feature (73)..(81): n is a, c, g, or t
gctggcccccccacgccgcccacaagaaaatttttaaaaaacatttttttggggcggcgnnnnnnnnnnnggnnnnnnnnnctgggacaaaattttttgtgcggggggggccccccggcaaaagaaagagaggccgggggatctcccccgtgaaaacaaaagggcgcgggcgggaaacgagggggggttggggaactctcccccaaaaggaaaaccgcgggcggggctagacgggggttttttttaaaggaacaacctcagagggtggcgtcggatgatcaatttatggggcgccctcccgaccgcgagtctgcccagaagggcggttaggaacatattttaaaccgcccgccgcggcgcagcgggggagtgacgatgacagagcggcggatagatcatcaaccgagccacgcgcggcggcaggggggccacacacccgagagcgagggcgggggaaaaaagaaaattgggcggccccgcggggcagcaacacgcggcgggcgaatagaaaatggtgcgcagaaatatagaagctgccggacccttggacacacaaagagaggagggagaaaataaacaatcgccaccgcggttgtggggcgaccgacacagaaaaaaagagttcgggtggggaggaaaaccccctcctccggggcggagtggcgtcgcgggagaaatatgaacactgtggtttactcgctac

SEQ ID NO: 231661 - DNA, 700 bp, Homo Sapiens
  misc_feature (112)..(120): n is a, c, g, or t
  misc_feature (126)..(126): n is a, c, g, or t
  misc_feature (485)..(493): n is a, c, g, or t
aagaagtttttaaaacaatcttttggggccccggcccccgaagttaacagcacagggttgtaggggcgtcccgaaaaacccgggaggaacaccggggttggtttcccccccnnnnnnnnngccccnggaggaagggagggtcctccaaaaaaccaacacgagggctagggcgggcaaatagtgtgggttatccacccagggatctccccgggggcctctaatttaatttgaccccccgcccggaggcaccttgtggacgagtgtatttgaaatccctacttacgccctcgcgccacagggggaccctcacacgcacgcccgggggggaccacagaaaggggggaggcaggccacacccccgggccccgcgtgaagggaaaacatctgggccccaggggaaagcaccgcgggcccgctaatagaagtttcctaaatttctgcgcgcgctcatgaaaacaaacgcgcgggggcgttatcccccgccnnnnnnnnntgttgtattggccaacaaaacagtggtttactccctccacacccgtctttgaagagaagaaaagggtatgcatattttgcggcgcgaacaacccacccgaagatagacggaacaaacgtgagtggaaataactggcgccagcaagcagattgggggtgtgtatctctgctccgcagaaagggcacgagttcgtatactcgttctgtt

SEQ ID NO: 231662 - DNA, 498 bp, Homo Sapiens
  misc_feature (73)..(376): n is a, c, g, or t
ggtgagaatgtctctattttactttcattcctaaaggatgttttgctggatatagaaaattagttattttcannnnnnnnnnnnnnnnnnnnnnnnnnnnnnnnnnnnnnnnnnnnnnnnnnnnnnnnnnnnnnnnnnnnnnnnnnnnnnnnnnnnnnnnnnnnnnnnnnnnnnnnnnnnnnnnnnnnnnnnnnnnnnnnnnnnnnnnnnnnnnnnnnnnnnnnnnnnnnnnnnnnnnnnnnnnnnnnnnnnnnnnnnnnnnnnnnnnnnnnnnnnnnnnnnnnnnnnnnnnnnnnnnnnnnnnnnnnnnnnnnnnnnnnnnnnnnnnnnnnnnnnnnnnnnnnnnnnnnnnnnnnnnnnnnnnnnnnnnnnnnnnttattttctttcagtgcttgaaaatgttgttcacttccttttcgcctccatggtgtctgatgaaaaatctgcagtcagttgaatcattgttcatctatataaacagtgcctatttctctggt

SEQ ID NO: 231663 - DNA, 308 bp, Homo Sapiens
cattcccggccctgattgagggccgtacctaccatccctgttcgcccgccctcggaccctcgaaaaagttttctaaccatttggtttgggggcccggccccagttaggtaaaccgaacgggggtcatagcttgttcccttagggaaaccccgggcattgaacaatgggtttggaattcccccccaatataaaacggccccggggggggaacccaatgggttctgaaacaaatcccgaaaggggatttcctgcagagccttatagggggatcctttcccaccgggagttcccaatggcgagctctcact

SEQ ID NO: 231664 - DNA, 1044 bp, Homo Sapiens
  misc_feature (999)..(999): n is a, c, g, or t
ggaacacaaggagcatccatatggccaaataaatacactgaattttagaaaaacatattactttgaattcaaattgtcgtgaaaaccagaacagtgtttgtccatgttgcatgtaatgaaaataaatccctgctctgagaaaaacccatcgtgaaaaaacgcgtccgtaacacgacccatacctaagcaaagagcgttgatgagccgccgtcgcccctcccgagagccttgctagatacaggcactcgtagccgcaccgcaccggaaggcgggaggagcggggcgccaagccccggtctcgccgagcgcgcgcgctcgcggctaccccccggcctcacggcccgccgtagaccaaggcacccgttagatgaagggcaccgccaaacgagacagcgcgggcaccgcgtgcgcgcagagatcacggcgtcggcgaggcggttggggccatacccgacaggccgcagcaggcgacgcagtgctaggcagagggacagaacctccgcgcagcccaccagagcgtgaaggaaaacatgcgcgcgctgcgccccgcaagcgcggcccgaccagccaggacgcacgagcaagaacgcccagccgacgtacacacccgcccgcaccgaggcgtacgccacgccaagcacggcgtggacgaagctcacaccggcgctgtaaaacgacgctccgagaggaccgggaacacgcaggtaggggcgcgcgctcaagactcgtgcaggcagtaggcagcgacagcacgcgagtacgacgacggtggagacgaagctgctgactagacggcaacaaccgcgcagcgacacgcgcacgaacggcatagaggcacgccctgcagactcagtagcgcaatgagggtgaggacagcagcagtcgatacgcgtgtagtccatgctcgacgacgcgcatcagcggtgcgcagacggcagcgccacgaggagtgattctccagtgtttcgcatacggcggctaccagacacgggcaccganactgagaacattcgtgtacgcagcgcatcagcgtggtcgtctcga

SEQ ID NO: 231665 - DNA, 186 bp, Homo Sapiens
  misc_feature (64)..(73): n is a, c, g, or t
  misc_feature (80)..(137): n is a, c, g, or t
ggaatttctaaggccataacggaaccaataaaaagaagcccaagcaacctcaaaataaaataannnnnnnnnntgccacnnnnnnnnnnnnnnnnnnnnnnnnnnnnnnnnnnnnnnnnnnnnnnnnnnnnnnnnnncggaataataaacctaaatccccaggggaataaaaaccttgccccctgg

SEQ ID NO: 231666 - DNA, 1007 bp, Homo Sapiens
  misc_feature (527)..(535): n is a, c, g, or t
  misc_feature (932)..(932): n is a, c, g, or t
ggcgagcccgccgggagtgccgtccccgcgcagagccgcccatgcgtggactgccacgccttcgagttcatgcagcgcgccctgcaggacctgcggaagacagcctgcagcctggacgcgcggacggagaccctactgctgcaggcagagcgccgtgccctgtgtgcctgctggccagcggggcactgaggaccacgctgctccgtgtgaataaatgcccagtggcctaaaataattacaaaaatgaacacaccaccccttgatgagcctagaacccacagaaaacaaaaataaatgaaataacttcacactctacaactgtaaccccactcactcgccctggtaaaattttatttttgggggccccttgggccctctcaaaaaagtttttcgaacacttttcctttggggccccggggccccatacggaagacgggaacggggctcataggtgtgttccccaaggaaaaccgcgggtcataaaatagggggtcgggagctctgcccccaaaacaaaaaacacgccnnnnnnnnnaaccgccggatggcttctttagaaacaatactcccagaggggaagctccgggggcgggcctttcccgggggactcatatacacgcgcgggaggcccgataggtgacctctctccactattaatatacttggcgaccccggcctctcgcggcaatatatatttgccacaaaaacagtggcttgaaacactccctcgtaaaggatgttttctgcgcccacacattgtggaaaaaccctcttctacagatacaccgggtgtgtgagagaacattttggtgataacctccgagtggcgcgattatttcagcccccccttgttgcaccgcccgtgtggggatataaatatattttggccccgccgggggtgcacaaaaggggggggcgcgtgccgaagaaanaagtggtccgcacataataatggggcggcatcctcttttataaaaacacaacaaacggtgggagtggaatactct

SEQ ID NO: 231667 - DNA, 751 bp, Homo Sapiens
  misc_feature (159)..(169): n is a, c, g, or t
  misc_feature (438)..(446): n is a, c, g, or t
cccgccacggcgcggggacgccctcccaacaaaaaaaattttggcacccgcccccctggggggggcggccccccgggaggaaaatttgtaacctgaaaaacacttcgtttccacaaaaaaaggtgggggtccaacaaccaaagaaaaaccccccccacnnnnnnnnnnncggcggcggcggaaaacaccgaccgtgagttttccaatcccccgtctgttgtgggcggtgtgacgccgccttcggcggggctcattacgaaaagagagattaaaaggggagccgcgtcgcccatacacaaaaaactcccgcgccccagcgggcggttaaccataatcgcaccccacggcggcgtgatcgcctccaggagacaacctccccccacccggagggggagttcgaccctatcccgggaggcgtggctggggggtagatcatannnnnnnnnggggcgagtgttacaacaataaatacatgcccgccgctcggagaagaaaaatacacccagccggcagagaaaaacacaagccgcggctaaataacaccccttattataactacataggccgccgcgggaaagataacaaaccaggggtgtggacgcgcaccacccacacaacagaaaatagctcctcatcaaataaaacacacaccccttttcgatacaaacaaccccctcctttgtatgaaagaaggcagcacgtcgtctctctctatcccgacgggaacgactactgcgttatagacaagata

SEQ ID NO: 231668 - DNA, 133 bp, Homo Sapiens
ctgtgtcgggcgcctcggccctcaaaaaaattttaaaaacctttgggggggcccgggcccccaaaaggtttttaaacctgtcctttgggggccccgcccaaaacgggaacgaaactggggcttggtttctccc

SEQ ID NO: 231669 - DNA, 773 bp, Homo Sapiens
  misc_feature (473)..(473): n is a, c, g, or t
  misc_feature (508)..(508): n is a, c, g, or t
  misc_feature (656)..(668): n is a, c, g, or t
catgttcggccgccctcggcccctcgaaaaagcttttctaaaccattccttttggcgcggcgggccccagtaaggttaagtggaacaatgggtcattagcttggttccccaaaagaaatcccttgggccttggaactaggggccttgggaattcctcacacaaataaaaataaccgcccggggcgggcaaaacccaaagcgggtttctggaaacaaaatccccagaatggcgaaggttcttgaaggggtccatttacctggtgacccctacccaacccagggaaggtccccataggcggagggtctcccgaatttttccgaaaatttaacccggccccccggcccctctttggccccaacttatcaattggggacagaagacaactcgtggttggataaagttttcccattttataagggacaatttctcgtcggccctcgcgaacaatgtggggagaaatgccacacattcnaccacaaataccggtgggcagattggatgttgganaacacctcttggaaataattctcgcgccccgcgcgcgggaccatatcaacaacaacaaccatctttggtggcagcgcccgctgttgaggcggcgagattagaaataattttgcggggccgcccgtgggtgtgtgggatataaaacgcnnnnnnnnnnnnncgaaaaagataaaaactctctcggtccccccacgatatgtttgggggcgcgcccccgccgtgatattaaacaaaaaccacacaaaaaacactcgtgtgggggtgg

SEQ ID NO: 231670 - DNA, 167 bp, Homo Sapiens
gcatgtcgagccgccttcggcacctcaaagaagtctttctagcacccattccgttgtggcgccgcggggccccagtaggttaaggtgaaccatgggccagtagctggctttccctaaagagaaatccctggctcaatggaactaggggctgtggaatttcctccccc

SEQ ID NO: 231671 - DNA, 1226 bp, Homo Sapiens
  misc_feature (333)..(342): n is a, c, g, or t
  misc_feature (500)..(534): n is a, c, g, or t
  misc_feature (682)..(682): n is a, c, g, or t
  misc_feature (753)..(753): n is a, c, g, or t
  misc_feature (770)..(770): n is a, c, g, or t
  misc_feature (837)..(837): n is a, c, g, or t
  misc_feature (859)..(859): n is a, c, g, or t
  misc_feature (1037)..(1037): n is a, c, g, or t
  misc_feature (1066)..(1066): n is a, c, g, or t
  misc_feature (1075)..(1114): n is a, c, g, or t
  misc_feature (1136)..(1136): n is a, c, g, or t
  misc_feature (1147)..(1147): n is a, c, g, or t
  misc_feature (1159)..(1159): n is a, c, g, or t
  misc_feature (1171)..(1171): n is a, c, g, or t
  misc_feature (1180)..(1180): n is a, c, g, or t
ggagccgggggttttctctaaatctgactaaaggcccaaagtgggcccatctgagtcaggtttgttgagaacaagccctctcaagtgggtggtggcttttcagtggccctgatttctgttccacacgtgttcactggagccaggtgacttcctccttgcgtgagtgagggcacaggaatctcaaaattaaacctgacttcattgcacaaaaacccaaaacggacagacgcccaccacccacccccagtcgcacaccaaatcggccccccgccacaagacaacaagggcgcactcccccaaacccacagcgcaaccccaccatctcgccggcgnnnnnnnnnnaccctccaaaaattttatataaccccctcctttggggcgcgcggccggcccagctggcgcaaccccccggcgtccgtacaacactgttttccccagggggaacctccgggtaaacaccgcctcagtggttttggaaatccttgcgctgagctgaaaannnnnnnnnnnnnnnnnnnnnnnnnnnnnnnnnnngtctctcaaaaacaaacactcccgatgggtggggtattttttccacagcgccccctccctcacgcgcggaaatatttaaaacaaaagacgaggaagacgttggtcgcaaggcaggaggagccccctcgcacacctggttaggacaganccaaaaaagggcgcaacccccgcgtagcgcctactctatactatcttcgttttttattactacgagcgcanacaaaaggtgggggggngtgggcgacacacctctctgttgtgtttgtgctcggccccacactctgtcccccgcccaggcgcggntgcaggtgggaccgagaggcgnggagctatggcacgccaaatgggtggtgcgggttcaggtcaactaacataaaccccctcgccccaacaactctgagccccgcgcgcgctcggccgctcaccgagcagccagcactcccccctcctctccttcgtcacctctccctctgtcaccaacacatcctacctgtcctgtgtgngccgcgcgctcgccagggccgtggcggangacaaaacnnnnnnnnnnnnnnnnnnnnnnnnnnnnnnnnnnnnnnnntttagccgatgatacgtaatangaaatacacanacggccgcctcntatgattcgccntgggtatgnggggccggcgggggggcccgacacctctcgccaacgcacgtgcggg

SEQ ID NO: 231672 - DNA, 1041 bp, Homo Sapiens
  misc_feature (293)..(406): n is a, c, g, or t
  misc_feature (596)..(605): n is a, c, g, or t
  misc_feature (809)..(823): n is a, c, g, or t
  misc_feature (859)..(859): n is a, c, g, or t
  misc_feature (867)..(876): n is a, c, g, or t
  misc_feature (897)..(897): n is a, c, g, or t
ggtgggcaatgccctcgccaacagcgtctgggagggggccttgggtggctactccaagccagggcctgatgcctgcagagaggagaaggaacgctggatacgggccaagtatgaacagaagctcttcctggccccactgccaagctcagatgtgccactggggcagcagctgctccgggccgtggtggaagatgacctgcggctgttggtgatgctcctggcacatggctccaaagaggaggtgaatgagacctatggggacgggggcaggcggctgatgttttataaattgnnnnnnnnnnnnnnnnnnnnnnnnnnnnnnnnnnnnnnnnnnnnnnnnnnnnnnnnnnnnnnnnnnnnnnnnnnnnnnnnnnnnnnnnnnnnnnnnnnnnnnnnnnnnnnnnnngtggtgggcccgccttcgggccctgcaaaaaagcctttctaaaaccttttcgttttgggcgccgcggggccccagtaagggaaagggggaaacatgggggccatataccctggtttcccctaagggagaaaccccctgggggccattgaaacaaaagggcgcctttgggaatcctcccccacccaaattnnnnnnnnnncggccccccgcgggtgggaaaacacccgcagaggggggttcttttgcaacccaaaaattctccccaaaagggggggaggttcccgtgggagggggtccattctcacgcggggggaaactctcttcttccccacccggggggaggtgtcccacataggggcgggagccctttccgagattatctctccaaatatttttcacgcgnnnnnnnnnnnnnnntctgtggccaccatcttttatattgtgggagaagangagacacnnnnnnnnnnaaccaatttcctcctttttanagagacgaatttttctctcgcgcccggaaaatatgtggggaaaaggcccccctctcccccacaaaacacgtggccttctgttgtacttaaaaaaccgtccgtggaaattctccccccccgcgtgcgtggggcttttttccctat

SEQ ID NO: 231673 - DNA, 1111 bp, Homo Sapiens
  misc_feature (291)..(300): n is a, c, g, or t
  misc_feature (353)..(415): n is a, c, g, or t
  misc_feature (470)..(499): n is a, c, g, or t
  misc_feature (623)..(672): n is a, c, g, or t
  misc_feature (674)..(674): n is a, c, g, or t
  misc_feature (768)..(768): n is a, c, g, or t
  misc_feature (825)..(825): n is a, c, g, or t
  misc_feature (858)..(858): n is a, c, g, or t
  misc_feature (882)..(882): n is a, c, g, or t
  misc_feature (1021)..(1021): n is a, c, g, or t
  misc_feature (1062)..(1062): n is a, c, g, or t
ggggggcaaaagtagaaacctaaaaaatcctgggaaaaggagccttttctgaggaaacttcagcagatgaaatatttaagacttgaactgggatctctagggggaacgttggaacatctattgattgatgtgtcaaagtccggaatttcactgtaattagtgaacgattataacttgtaactttgtctgttatgtaagaaattacattttggtctcttagatccaagagttcttgtctgttacgatttgtaactgcttgttaaaattaaacatttacatatttcattctcnnnnnnnnnnggggaaccacaaactcaccaaacaacccacacccatacacattgaccaaaccnnnnnnnnnnnnnnnnnnnnnnnnnnnnnnnnnnnnnnnnnnnnnnnnnnnnnnnnnnnnnnntataaactaacaaaacgcgccccaacaaatataatccttatttaaccacacctgnnnnnnnnnnnnnnnnnnnnnnnnnnnnnnggagcaggtgaagaggcaaataacaaggcattttctcctacaccacacacgcccaccgggtgcggcgacaggaacggaaggagggagatcactgatatatttcggttaggtcactctcataggnnnnnnnnnnnnnnnnnnnnnnnnnnnnnnnnnnnnnnnnnnnnnnnnnncncctcgataaaacaactctcttctttccctccccacaatattctgtttcccctcccctctccccacatacgcactaatatatatctcaccccccntgcgcgcggtcctagcacaaccaccgggagcccgaccccgggtgccggggagacacnactccctccacatattgcacagcgccccgagcntcgcgcgcctccgccgacgacccnatatctaacgccacccccgtccctcactacctcttcccaatattcttcacacctcgcccgtttacatcccacgtgatccagaatggtgcgtcctggcgaagagcgactatcaccggtcatacagggcgcatcacaaatnctgcccacccaaggtatagtggagagaggtccgcccgtttntatccacgcgccgccccccggcacgagcacaccacgcccaatcaccgtg

SEQ ID NO: 231674 - DNA, 824 bp, Homo Sapiens
  misc_feature (131)..(181): n is a, c, g, or t
  misc_feature (291)..(386): n is a, c, g, or t
  misc_feature (483)..(598): n is a, c, g, or t
  misc_feature (681)..(731): n is a, c, g, or t
aaaaaaaaccccctcgtcccctttttccactccccgggccacggggtccttcccctcaccctcggcggtctttcttcccccccagtaatcatttcaatcctttgataccaataacctcttggcgggcgctnnnnnnnnnnnnnnnnnnnnnnnnnnnnnnnnnnnnnnnnnnnnnnnnnnncagcgggactccctcctgtcccctcgcgtttccttcccagcggctctttcgggtcccgggctgttgccgttcctctctctccggatctactatcactgccccctccaccnnnnnnnnnnnnnnnnnnnnnnnnnnnnnnnnnnnnnnnnnnnnnnnnnnnnnnnnnnnnnnnnnnnnnnnnnnnnnnnnnnnnnnnnnnnnnnnncgggatcgcccctcgcgtccttcgtatcgctccaccgctcccccttcgtcgcccccactcccttgtttaccccggctttccccacgttttcccttannnnnnnnnnnnnnnnnnnnnnnnnnnnnnnnnnnnnnnnnnnnnnnnnnnnnnnnnnnnnnnnnnnnnnnnnnnnnnnnnnnnnnnnnnnnnnnnnnnnnnnnnnnnnnnnnnnnaacaacccttgccgcttactcttctccattcacactatagattcgcccctttggcgtgctgcccacctgggggacctagacannnnnnnnnnnnnnnnnnnnnnnnnnnnnnnnnnnnnnnnnnnnnnnnnnngcttggtccatatgaccctgcacccgcgcggttgcccttggtcctcttattcccccaatccaaccatgcgccactgttccgcaccggtctgcg

SEQ ID NO: 231675 - DNA, 343 bp, Homo Sapiens
ggccctgggggaaacaacaagctggaaaaaaaccaagtaggaattaaagatgcgccccgccctgaaaacaagggaagacggggggaacttaataaaaatctcccccccactggaaccccttcaaaaaaggggggataaacttgaacccccggcgaacaaaaaacagtgcgcccacgcggtaaaaatttccccacacgcaaaggggggaaaaacaaagtcccctaggtagaaagcctttcaccccgggggggcggcaaccccccaaaatattcgggtggggaccacccgcactactccacaaaaaagggcgttacacgccaacaaaggagacggggtcgcaaac

SEQ ID NO: 231676 - DNA, 1042 bp, Homo Sapiens
  misc_feature (332)..(364): n is a, c, g, or t
  misc_feature (526)..(534): n is a, c, g, or t
  misc_feature (931)..(931): n is a, c, g, or t
ggggtgaactgaagtccagtcccaccaggacccagacgcctccctgggtggacagcaatagaaaagggggcagacgcccaggaagtgaccttctcctggatgagctctcctggcccgtctgtccagcctggactcccgagcccacgaggctgttgaggcccctgcagccgggcccagctcttctgtccttggccaccagagactgcagcccacaacccttggaggggttgggccggaaggtggaagagcctgccaaggacctcatttagtttgtgtattaaaaccaaaaagcttttgtctttaagaaataaaaccatttttttaagccccannnnnnnnnnnnnnnnnnnnnnnnnnnnnnnnntgtcgggccgcctccggcccttcgaaaaaatctttctaaacccattccgttttggccgcggcggggccccaactaggataaactgaaaccttgtgaacattagcttggtgttccataggggagaatcccggggcccatggacctaagggcctttgccaattnnnnnnnnnacaaaataaaaaaaggccccgggcggggttaaacccgaaacccgttttcttgcgaaccccaaactcccaaagtaattgggtaggtttttctcgcaggggcccctctctaacgggggggaaatccataatcccaaacgcagtgataggtccgcccggggcggagcggccactcccgtcatatgtccgaagttgttcaccgctcccccccgacccccaaggcgccaacttgtgatatggatacagtgacaccgtcggtttgtctatatctttgcacttctaccgcgccgtttctcccgtggcccgaggaaggtgggttgaaagtccccattaccagatacgaagggtggacaattggatggggaggagcccgggagaactgcgcccccaggaggggcgnatttttagcaaaccacgcttctggcgcgcggcctggttgggggctatataacgtatttcgtcggcgccccacgggcgctaggaacaagaggcgtggctccacaaattaaat

SEQ ID NO: 231677 - DNA, 116 bp, Homo Sapiens
gggcaattattgaaaaaagggggaaaattattaaaaatttcgcccaaagggaaacccccccaaacgggttgaaaaaaccaaaaccccagggggatacaaaccttggcccccggggg

SEQ ID NO: 231678 - DNA, 644 bp, Homo Sapiens
  misc_feature (75)..(236): n is a, c, g, or t
  misc_feature (243)..(257): n is a, c, g, or t
  misc_feature (281)..(291): n is a, c, g, or t
  misc_feature (328)..(486): n is a, c, g, or t
ggcatttttatgatgccaaaagctgccactgtgtggtattcgaggattattgcaacaaagccagtagttaaaccnnnnnnnnnnnnnnnnnnnnnnnnnnnnnnnnnnnnnnnnnnnnnnnnnnnnnnnnnnnnnnnnnnnnnnnnnnnnnnnnnnnnnnnnnnnnnnnnnnnnnnnnnnnnnnnnnnnnnnnnnnnnnnnnnnnnnnnnnnnnnnnnnnnnnnnnnnnnnnnnnnttggggnnnnnnnnnnnnnnnaaaaaattttttaaaacttttttnnnnnnnnnnncccccaaagggaagggaaagggggcaattttttttcnnnnnnnnnnnnnnnnnnnnnnnnnnnnnnnnnnnnnnnnnnnnnnnnnnnnnnnnnnnnnnnnnnnnnnnnnnnnnnnnnnnnnnnnnnnnnnnnnnnnnnnnnnnnnnnnnnnnnnnnnnnnnnnnnnnnnnnnnnnnnnnnnnnnnnnnnnnnnnnggcgcccttggggaaaagggggggaattttaaaaaccttgcccgccggggggacccccccaaaagggggtgtgtaacactctattctcccggggggaaaaacaccccgtgggggcctggtgggataaatattctcccccggggggaaaaccggggggg

SEQ ID NO: 231679 - DNA, 1181 bp, Homo Sapiens
  misc_feature (298)..(314): n is a, c, g, or t
  misc_feature (670)..(679): n is a, c, g, or t
  misc_feature (745)..(753): n is a, c, g, or t
  misc_feature (808)..(808): n is a, c, g, or t
  misc_feature (931)..(931): n is a, c, g, or t
  misc_feature (981)..(981): n is a, c, g, or t
gggaatcggcgacggagcactgcacctgcctccagccgccggctgtgcagtcctgggtcctcctttctgagggcccgtgtaaatatgtacatttctcaggctaggccagcaggggctgcccgagtctgtttttcatgcgatgacacttgtacaattaattatcttttcaaaggtacttggataataatgaaataaaactgtttttgaacctgacacaagaaaccgaaacaagccaagaacaaacccccaagggctcctccccacccccgacgttgctcggcggcgcaaaacgcgcgcnnnnnnnnnnnnnnnnnccttgccggcggcccccggggccccccaaaagaattttgcaaaaccgttgctgtgggcggcccaccggcccccgaaaaggagagcgggaaatgggggcgtaaagcgggttttcccgccgggagaaaccccgcacgcctctgggctgaagggcggctggaacttttcccccccaaaacaaaaaagagacgccccccggggcggggccaaaccccgcgggggggtggtctcgggacgcacatcgcccgcaaaaaaccaacacttccccttggcaccacacacaaactcaccccgcggcgcgcctccgtaagtgcgcagacagtggggggtggttactcaaacagaggcccgccggggnnnnnnnnnnaccaagaggcgcaccccttaaaatatttttttctctactccaacccggccgatggggcgccccccnnnnnnnnntcgagtgaaggggcgtgcgtcagcgctatcgcggggcaactggaaaaatgtcttntccggggttctctttgtacaaaaaaatgtcgcttcggctgcacgtgcgcggaccagaaccgctgtagttctaacgtaacccgcgaactccagccattttttatactaaataaatacgcgcccntttcttccttaagaagcacaaacgccgggtgggcgcctataagcgagggngggtggtgcccgccgcgcgggggtaatgatgccgtgacgacggggaggacgcgggggggtgtgtcctctaacaaacaccccttcttggtggttgaaactccccccgactgttaagcgctcgtaccaaaataaacaactttattgtcgcccgcccctatggtgtgggcgggggaacacagacagtagggggggaccagcac

SEQ ID NO: 231680 - DNA, 1040 bp, Homo Sapiens
  misc_feature (416)..(436): n is a, c, g, or t
  misc_feature (988)..(988): n is a, c, g, or t
  misc_feature (1022)..(1022): n is a, c, g, or t
gggcacagacggccgaagccctgcagcccacgctacagccggagatgcagctcgagcacggggccatccagattcagtgagcggtgcccatggcaccaggagcccctcgccggctccgcctacggcccggcccccacgcgccctgctctcacggcctcggcacaggcagcggctgcacgtgttctgctgaagtgcgtctgaaggccgctgcctccgcggggaacagcatcctatcaactgaaagagcagccgccgccgcccccagccggagacccctttcgtttgagtcctgctgttggtgtcggagcacgaggggaggcacggcgcggagagcgtcgcatatgcgcgggaaatcaagaactatgatattttcctggttaaacagctttttttaatttgctatggtgttcataacnnnnnnnnnnnnnnnnnnnnngacacaccctaccacaagaacacaatcttggtcgggccggcctcgggccccctcgaagaaattttttctaatcacccctctccccttccggggccccccgggggaaccccaagctgggggtaacccgcgaaacaccccgcgggcccccaccactaccgcgttcctcccctccaggggaaaaccaccccggggagggaaaaataggggggccttaaactgggggtctcgtgcgggatattttcccttcccccccaacattcatataaaaccagagtcgctccccggagaggatggggtcgacaaacccccaatggtcgcgctttcccgtcgcaacatctacaagttccccccctaactgtccagagcctaccctgttggaggggcgcccccgactcgaaccgggcgggagcacccaatctcccagcggagtgggcatttaccaccacaaataaccaaagacctcttgaatgatattaataagctctcacagcgactccccaggcccacagggccccaacttcctaatacacacacgtttgacgcgagtagaantatataccacctaaaaaaataatttatatgttcncatgaacctttagggaac

SEQ ID NO: 231681 - DNA, 1117 bp, Homo Sapiens
  misc_feature (241)..(311): n is a, c, g, or t
  misc_feature (367)..(401): n is a, c, g, or t
  misc_feature (409)..(423): n is a, c, g, or t
  misc_feature (476)..(484): n is a, c, g, or t
  misc_feature (556)..(564): n is a, c, g, or t
  misc_feature (682)..(682): n is a, c, g, or t
  misc_feature (771)..(771): n is a, c, g, or t
  misc_feature (921)..(921): n is a, c, g, or t
  misc_feature (954)..(954): n is a, c, g, or t
  misc_feature (1030)..(1039): n is a, c, g, or t
ggtaaaatttatcatttaaaccatttttaagtgtacaattcggtggtataaagtacatttacattattgtgtaactatcacctctatccatctccctaactttttcatcatcctaaacaagctctgcccattaaacaatatcacctcatgcccatagcccttggtaaccattgttctactttttgactctatgaatttgtgtactccaggtacctcgtataaatggaattatgtaatattnnnnnnnnnnnnnnnnnnnnnnnnnnnnnnnnnnnnnnnnnnnnnnnnnnnnnnnnnnnnnnnnnnnnnnnccatgagaaataaaacaaagaaacaaacccccaaaaccacccccacacacgccatnnnnnnnnnnnnnnnnnnnnnnnnnnnnnnnnnnntttggggnnnnnnnnnnnnnnntccccaaaaggactttttttaaaacaattttcttttggggggcggcgggcggnnnnnnnnnaagcaaagggggagaaaaggggggcaaaaatgacgctgttccacacaaggaaaaacacccgggggggccatnnnnnnnnngaagggtggggtgggggtctcctctcctccccgcacttaataataaaaccacccccgcgccggcgcggcggctcaaacccaccccgcgagggagggcgtgtgtggctagagacaaacnagcaacctccccacaagcgaggggtgggtcctcctcgctcgcgagagggcgcctccttctatcggtcgcggggaggcactctataacanacaagagaaggaggatgagcacgccccccgaggggggggctgtcgtgctcttgattatttatagagatacatttttgtgccgccgcgcccgcacgcctcactagtgtacgattcctatatactttgtttggggaagatagaaggcggctngcgggactacacacatccacaatatatatatanagtgtaccacttcttgtgtggtccgcagagagctggtagggggggagagaactgctttgtcttcatagtgaaagannnnnnnnnntgggtgtgtgatagaacaactccggactttatcatctcttcccacgcgccggcggcgcggttatatacactatacttc

SEQ ID NO: 231682 - DNA, 813 bp, Homo Sapiens
  misc_feature (139)..(147): n is a, c, g, or t
  misc_feature (197)..(218): n is a, c, g, or t
  misc_feature (461)..(509): n is a, c, g, or t
caacaaaacaaaggatgaggcctcacaccttgtaaattccaagcacttttgggccggaatcacctcgcgggtcagggaatcttgagaaccccgcccctggtgccaccattgggcaaaaaacccccctttctcctacccnnnnnnnnngcaccaccagaaaaatatacaaacatagaatactctcatggtcccgggannnnnnnnnnnnnnnnnnnnnnacaagaaaaagatcttttttcctataagaacccccatttctcctgttttgtggcgctgcccggccgggtcgccctccccacgaacttagaggtgttaaaacggagggaacaacaccgcgcgcgggtcacacaatatagagcgtgtggcgatatcttccgcctctagagggggagaagagaattacccccggggggcactcacacggggtcacataaaagcgcggcggtgtgggggggacatannnnnnnnnnnnnnnnnnnnnnnnnnnnnnnnnnnnnnnnnnnnnnnnnggctggcgtgggcaacaaaatccgggagaaacgggattttctgcgagcagaacccagattctcccccccgcaaatggggggaaccattcccttgcaaggggcgaccctcttttaacacgggggggaatcccctattacacaacaccggagggaggcaccctaaaaggccggagcgctctcccgatataatttacaaaattattaacctctcccccccgccaatctgtgtacctaatttatattttggagtcagggaagcgaggggttgggcaagtttcgtctattaaacgccaactactcgccg

SEQ ID NO: 231683 - DNA, 432 bp, Homo Sapiens
  misc_feature (61)..(72): n is a, c, g, or t
  misc_feature (334)..(345): n is a, c, g, or t
ccagttttcaatcttcattcactacccatccgcagcctgcaaaagatgttgaagagattgnnnnnnnnnnnngactcaaggttttagaaaaagctattgctgaactgagtcactgagtcattgcctccaacctcatcctaaggggtacatgcccctcacctcacactaataaaacgaattttactgggaacagattaccaagaaatcctggcaatgacaagtgtttggattcccaccaataaaaaagcgcgggggtaaacgagcggtttgaaaaaatccaaaccgtgttgggccgccctgggccctaaaaaatttttttaaacactttcgtgtnnnnnnnnnnnncccccgagggaaaagggaacaggggcccaataacgggttccccaaagaaaaaacctgggggcaaagcacaaaggggggttggaaatt

SEQ ID NO: 231684 - DNA, 770 bp, Homo Sapiens
  misc_feature (195)..(294): n is a, c, g, or t
  misc_feature (314)..(326): n is a, c, g, or t
  misc_feature (567)..(579): n is a, c, g, or t
  misc_feature (698)..(709): n is a, c, g, or t
gggacatatagagttgtaccttatatagaatatagttgtatcttgaagtcaacatattaaattattctcaaaattatgtatttgcagattgtacttgtaagtttcaaagaaaaattaccatcttttcatattgacctggaaactaaataggatgtgattcagctacattaatttcttaatacaatctaggaaagnnnnnnnnnnnnnnnnnnnnnnnnnnnnnnnnnnnnnnnnnnnnnnnnnnnnnnnnnnnnnnnnnnnnnnnnnnnnnnnnnnnnnnnnnnnnnnnnnnnntaacactatccttggtgggnnnnnnnnnnnnnttaaaaacttttcaataacccttttttggggcccgggcccccccaggaaagggaacctgccccaacttgtttcctaagaaaaccggggccagccctagggcttgggttttccccccaaaaaaaccccgccggggggaacccccggtggttttaaaaaaaccccaaaagggccccttcgggggccctttcgggggtattttcccctcggggatccaatagcgccccccaattatcaaatttnnnnnnnnnnnnnttgccattctctcccccaaaagggggcccaatttccttacacccctcccccccgaaattttggaacccccttcccacaacccgggtggtcccaaccctgactttccgctggggggcctnnnnnnnnnnnntgggcgcctctttcgggaaaaaattttctcctccgcccgggggggaaaatatgggggccgc

SEQ ID NO: 231685 - DNA, 1311 bp, Homo Sapiens
  misc_feature (55)..(73): n is a, c, g, or t
  misc_feature (323)..(392): n is a, c, g, or t
  misc_feature (735)..(743): n is a, c, g, or t
  misc_feature (745)..(745): n is a, c, g, or t
  misc_feature (887)..(887): n is a, c, g, or t
  misc_feature (949)..(958): n is a, c, g, or t
  misc_feature (1100)..(1100): n is a, c, g, or t
gggactcccctacctggcgcccagccccaaccagctggccgctcctgcccatgcnnnnnnnnnnnnnnnnnnnaacttttataattggagcccctggtgaggttacgcgtgccatgagaaccccctctacaccaccattctggtgcctccctgttggccaaactccggagtcactgactggcttgactttcataccgcgaatatgcatcctggtctgtactgaccctggaataaacacatctctctttttttatccaccaacgtgccgtagcccctaaaaaaacatctatctcctatccgcctctctcccccctactactccnnnnnnnnnnnnnnnnnnnnnnnnnnnnnnnnnnnnnnnnnnnnnnnnnnnnnnnnnnnnnnnnnnnnnngaataataattcctatcccaacaacactacccctcccggggccccgcctccacaatttgttgtacccctcacccccccgtggccccttaatgttgtttttacccccataagatgataccccactatgttgcccttttagataacccaccccgtctctttgttatctcccctcccgccgtaacgaattataaattaaactcccccgcccacgtgcggcgggtttattattctactctgtcacggcttctcaatgtgattatccacccagccttttcttcatcctcacacccgtgattttgtccccccctttccacttgagagagaaattttaatgttccctttnnnnnnnnnanacccgccggggagtgcttcgtccccacttcctccctccaccccccctttctccggggaccaccatctctttccccctatcacccccctatacccacaaaacaccccacccaataagataaatcttcttcccgcctgcagctnaacgttttttccttgggccccttccactgagagcccccccactcctttacgaaaatatactnnnnnnnnnntgccgtaacgtgcgcagccaccttatctcggcgggtgcggtttgtgcgggtttgtaaaaacgcgatgtccccccccacatgatcatattttttctataatcttcttaccatttccacacttttccccggtaaaaccatattnatacccccatctccccaacccctcgtttcttcacctcgctagacatttctttttcctccccccgccgggataaaacactacaccccatagtgtgcttcacctctttcccaccccacccagcacacaccagcttctttcccgtttatctccggcgccccacccaccactacatgtttttcccctccccgcacgcaccccccacctgtccttt

SEQ ID NO: 231686 - DNA, 960 bp, Homo Sapiens
  misc_feature (578)..(588): n is a, c, g, or t
  misc_feature (651)..(683): n is a, c, g, or t
  misc_feature (799)..(807): n is a, c, g, or t
ggggagtggtatcaacgcacagtgcccattacggccgggattcatttcagtattcctcagactgtaagttgcctattgaactgattgtaatgtctactgattccttcattaattaatgagtcaaataaaatctttgcatgtgataatttcaaaaaaaccatgaacaaaaaccgcaaatctaaaaccccccgccaaccataataaaaccccatttatcacccaaaaacgtaaaaaaccctatcctgtgcgggccgcccgggcccctaaaactttttttaaccttttccctgggccgcgggcccccccgggaaccggacctggccctaattttttccccaagaaacccggccatggacttggcctggcatttccaccaaaaacaaccctccgggggccaaaggtgttttcctcccaaataccgtgagtgggtgttcccggagttcaattaggggacccatcccacgggggggcccctcgggggccgctccaattttcccatatttccctcccgcaccccgcggaaatttttatcccaacctatgtggttttttaaccccccactcgcgcgcattttttgnnnnnnnnnnnacccgcggtaactccccctctatcgcggccgggtgaacattgatgggaacatcccgagaccannnnnnnnnnnnnnnnnnnnnnnnnnnnnnnnntttggttccctcaccctgcgccgtatatataattttcttctgctccactgtggggccacccacgccgctgtggcccgccaaaaacacaccttggcccccttatatttgcgcgccgnnnnnnnnnacatcccttatagttggcgcgcgaaatctctaccaccccctggcctttggcccctattacttccaacacaaaatattgtgcttcttcacccattcgcacctctcacccggtattactggtgcgacacccctacactactctttgaccacacca

SEQ ID NO: 231687 - DNA, 1232 bp, Homo Sapiens
  misc_feature (207)..(230): n is a, c, g, or t
  misc_feature (257)..(286): n is a, c, g, or t
  misc_feature (337)..(368): n is a, c, g, or t
  misc_feature (405)..(444): n is a, c, g, or t
  misc_feature (556)..(599): n is a, c, g, or t
  misc_feature (690)..(690): n is a, c, g, or t
  misc_feature (778)..(786): n is a, c, g, or t
ggaccagagacattatttataattcagccatttaagatatacctgtactcaaaaagtcctgtatatttttaacacgttttatttttcaggtgaacaacaatacatcctaagaactctgcctacaaacaaaacaaaaaacaccccccctctcctcacgattaccatattccccgcgaacctctaaaaaagaaatacactctcctactnnnnnnnnnnnnnnnnnnnnnnnngccttttcataccccgctctgtttctnnnnnnnnnnnnnnnnnnnnnnnnnnnnnntctttctcattacgcccgcgcttttaattccctagtttcccataccctttnnnnnnnnnnnnnnnnnnnnnnnnnnnnnnnnttacctaagaccaactcgcgcgaccgccttcagactnnnnnnnnnnnnnnnnnnnnnnnnnnnnnnnnnnnnnnnngactccatttaaagcctccctaataaacccaacaaaaaacccagcgaatgcccgtccctccccagatcccccatatacgcccccttcgacaccccctcccgtataatttatnnnnnnnnnnnnnnnnnnnnnnnnnnnnnnnnnnnnnnnnnnnncttgccatctacctctcgccttttgattcacgccatcttgccgcattaataattcccaattttcgcagcggctctttactattgtccaccnccataattccgctcgactactcttgatgtatggcccgcgcgcgctccgcgccctaaaagcgaacagtcaccgcgccaatacataatgnnnnnnnnnttctgcttatcgccattaattcccccgtaccggtcgcgccctttcatcgacctattatatttgattataggccccccggcccactaaagttatgtggtattattcccccatattctaccctcgtccccctcaaccttaccccttatgccaatgcctctatttacaggcggtcacccaactattcacctctgcctcttgggtcaccccctgcacttttgtccacttctcacgacgaattccccgcacaccccgcacattctgcgccgccgcacacctctgctttccttacccacggaatgtccgccctcacgagacaaccactaagaccagtcgacataagagacacgccagtgtcccccccaccaaccccgcgacttgcgcgtttgtacacacccggtaaatgtttgttcttgtacatgcacgcgcgtcctcttttgcgcccgata

SEQ ID NO: 231688 - DNA, 366 bp, Homo Sapiens
  misc_feature (120)..(120): n is a, c, g, or t
  misc_feature (133)..(134): n is a, c, g, or t
  misc_feature (171)..(198): n is a, c, g, or t
ggtagcccagagtgggatctgaaagcaaagtggaacctaaaaaatgtgaactgtcaaagaactctgatatcgaacagtcttcagatagcaaagtcaaaaatctcctttgcttcctttccnacggaagaatttnncaatcactacacatttaaaacaccagaaaaggcaaannnnnnnnnnnnnnnnnnnnnnnnnnnnccttgttgggcggcctcggccccctcaaaaaacttttctaaaccatttcgttttggggcgcggcgggccccagtaagggaaaaggggaacatgggggccaaaaagctggttttccccaaaaggaaaaatcccggggggcccaggaaaacaaaaagggtttggggaatt

SEQ ID NO: 231689 - DNA, 813 bp, Homo Sapiens
  misc_feature (192)..(203): n is a, c, g, or t
  misc_feature (216)..(304): n is a, c, g, or t
  misc_feature (321)..(330): n is a, c, g, or t
  misc_feature (342)..(342): n is a, c, g, or t
  misc_feature (348)..(411): n is a, c, g, or t
  misc_feature (480)..(480): n is a, c, g, or t
  misc_feature (632)..(654): n is a, c, g, or t
  misc_feature (753)..(770): n is a, c, g, or t
tcaccccacaactatctctaacctacatctcctcgccgtgccccctttgcccctcccgaaatcttcccccaaccatttccctttggccgccccgcccccaatctaggcgaggccgacccgtggcccccttacccctgttttccttagccacacccccccggggccctagcccttatcggcccgggtgttttnnnnnnnnnnnnaacaaaaaaatannnnnnnnnnnnnnnnnnnnnnnnnnnnnnnnnnnnnnnnnnnnnnnnnnnnnnnnnnnnnnnnnnnnnnnnnnnnnnnnnnnnnnnnngccggtcttcccacctnnnnnnnnnngcataattatcnccatgnnnnnnnnnnnnnnnnnnnnnnnnnnnnnnnnnnnnnnnnnnnnnnnnnnnnnnnnnnnnnnnnaatatatatccattcaaatccccctcttctccctctagagccacgcccgatggtatttctcccccattntgccgccccccacaccacttgccttagtgattagatgaaaaactcgcggctcctctctcaatattaacccccctgccacccccaatacaccccctctatccgagcgatgcatatacgggcgtccccccaggcgtatttctcccctttcacgnnnnnnnnnnnnnnnnnnnnnnntttctttggcatacacacttcacacccccccatattcccagtcaaaaggtgcacaaaaacgccccccttggtcctttggccaccacctccattcacagnnnnnnnnnnnnnnnnnngcattaaacccgccggccgataatccccccacctagtacaatg

SEQ ID NO: 231690 - DNA, 830 bp, Homo Sapiens
  misc_feature (528)..(538): n is a, c, g, or t
  misc_feature (666)..(676): n is a, c, g, or t
gggctttcgccctgggtaggggagatgggggctaatctctctctatgcaatcaggctctaaaattggctgcttcccggaacagaaacggcaggagttggcatcagaatgcagcaacttgattcctggctacttaccagttccgcgacctgagggtccagcacatggtatgtgcaccgacatgttgtttgaatgaatgaatattttcccacctgggtctgctgcctccttcatgttttaccacctggtgtcacttcacattctgaaactatctgtggctcatctacttacggaggacactgatgtggaccttgcataacatcagccccagcctgatacggtggcgcacaatgatgagagacacgactttgagggtttcttccccagtgctcaagtcactaccaaataaataaattaaccaatacaataccttccctcaacccatatttccccaatcccttgacccgccggaccgacctctgcccctcaaaaaaccctcctcaaacacatttccttccggccgcgtgcgnnnnnnnnnnnggtacactgaaaaatggcacgccaccttggatcccccaaggacaacccctggctcccgaccttaattgccttggatatttttcaaacccctaaaaaaacccccccgggggctcaaaactataatcctnnnnnnnnnnnaaccctataattcgctacttatcttaaacccccactcccctggcccatttcttcctcccacgggagtccctattattcctctctcccaaaaccacatcatcgtattccccccacccaacgttgggttttctactcacaccaccccacttgtttt

SEQ ID NO: 231691 - DNA, 453 bp, Homo Sapiens
  misc_feature (50)..(222): n is a, c, g, or t
  misc_feature (232)..(263): n is a, c, g, or t
  misc_feature (285)..(404): n is a, c, g, or t
ggcccaacttacacttaggagatttcaacttaacttgaccgctctgaccnnnnnnnnnnnnnnnnnnnnnnnnnnnnnnnnnnnnnnnnnnnnnnnnnnnnnnnnnnnnnnnnnnnnnnnnnnnnnnnnnnnnnnnnnnnnnnnnnnnnnnnnnnnnnnnnnnnnnnnnnnnnnnnnnnnnnnnnnnnnnnnnnnnnnnnnnnnnnnnnnnnnnnnnnnnnnccttgggggnnnnnnnnnnnnnnnnnnnnnnnnnnnnnnnnttttttgggggggcgggccccnnnnnnnnnnnnnnnnnnnnnnnnnnnnnnnnnnnnnnnnnnnnnnnnnnnnnnnnnnnnnnnnnnnnnnnnnnnnnnnnnnnnnnnnnnnnnnnnnnnnnnnnnnnnnnnnnnnnnnnngagttcgggggtttttatgggtttaaaaaaggggggccccggggagacc

SEQ ID NO: 231692 - DNA, 1153 bp, Homo Sapiens
  misc_feature (49)..(223): n is a, c, g, or t
  misc_feature (443)..(443): n is a, c, g, or t
  misc_feature (572)..(593): n is a, c, g, or t
  misc_feature (756)..(756): n is a, c, g, or t
  misc_feature (1073)..(1081): n is a, c, g, or t
ggtctctctgtctctgtgttttgctgtcctcagccccatctctgctccnnnnnnnnnnnnnnnnnnnnnnnnnnnnnnnnnnnnnnnnnnnnnnnnnnnnnnnnnnnnnnnnnnnnnnnnnnnnnnnnnnnnnnnnnnnnnnnnnnnnnnnnnnnnnnnnnnnnnnnnnnnnnnnnnnnnnnnnnnnnnnnnnnnnnnnnnnnnnnnnnnnnnnnnnnnnnnnctctgactacgcaaagatacataacacacaaaacttgtccggcccgccctcggcccctccgagaaagtttctcaagaacctattccgtttggcgcggccggccccccagaaggggtaagtgaaccattgtccataacctgtttccctaggaaaaacccctggggcattgaacatagggctttgggatttctcccccaaataaaaaaaccgccccgggggngccaaaccggagcggtttttgaaacaaaatccccaaattggagtcttctgggggccctttatcttgggacttttattcaaaccggggaattcccaaagccgagagctccaaaatattaaagattaacgnnnnnnnnnnnnnnnnnnnnnntctctattccccaaaaaaaacgtgttttgacaaatttccctttaaaagccatttttttggccgccaaaaatgtgggaaatccctctctccaccccacacctggggtctgtggatatggaccaccctctgaatattctcgcccaaagcgggggcaatattacgnagccacacccttttggttcgcgcccttgtggcgggataatataataatttttcgccccacactgtgggcgggaaaaacaccgcgcggggcgccacaaaacaacacatagtgtctcacaatataatttggcgccctcccggttttttaacaatcaccacaaatacgtttgtgtgtggaaaaactctctccccccacgtcgtggatatttgtgtactgtggatagcacctccacacaagcaccttttattcttctctccacaaatacaaaccaccctctcatataaggggggagaaatatatggcgccccccgcagggnnnnnnnnnctcccccccgggtgaaaaccaatcgctccactcatcgtctgttttggagaaaaaataatatgagtgtggacg

SEQ ID NO: 231693 - DNA, 645 bp, Homo Sapiens; identical to SEQ ID NO: 33069

SEQ ID NO: 231694 - DNA, 795 bp, Homo Sapiens
  misc_feature (221)..(284): n is a, c, g, or t
  misc_feature (369)..(369): n is a, c, g, or t
  misc_feature (546)..(546): n is a, c, g, or t
  misc_feature (626)..(626): n is a, c, g, or t
  misc_feature (640)..(641): n is a, c, g, or t
  misc_feature (763)..(763): n is a, c, g, or t
ccgcggccggaccgccactccccccgcggctgccgctacggccccgcggacctgcacgaccgctcgtgctctccctgcacgagcgccgccgcccggcctgatccccaccccatatttccgatgcacccacaccgcgattagcggccgcccgtcccgttagattcacccgttgcggcgccccgagctcagccggcgcatcacgcacttacgggccgctgccnnnnnnnnnnnnnnnnnnnnnnnnnnnnnnnnnnnnnnnnnnnnnnnnnnnnnnnnnnnnnnnntcgggagctatacacacggcgcgcgcgccgccggtgggcgtatctactgggcgcgcggctctctcaggcgcggacaaagaggcgntcctctaagctggactaatgcccgcgcatccggtccgtgctggagccccactcccactcggcgccccgatgaccgacccgccttcctaatcgcatcgtcggcagccgggctctatagacagcgttacgcagacggactgcacgtttctacatctcctagtcccggcgacactccccnttgcacaactcacatccccctcgctcgcgtcctcgccggctagatgcgctagtcctccgcgtcgtctgcgcctagagganacgcgcctctccgnnctgtatacgcctctcgaccagtcgtattactcgcacgccgagtcacatcgtcttctctcagtcacctctcgtctttgtgtctatccctctcgcacgcctgcatattatatcatccgcgtctngcgcgttgcgcgtcggaccctcagacggcacc

SEQ ID NO: 231695 - DNA, 651 bp, Homo Sapiens
  misc_feature (110)..(110): n is a, c, g, or t
  misc_feature (113)..(115): n is a, c, g, or t
  misc_feature (117)..(118): n is a, c, g, or t
  misc_feature (120)..(120): n is a, c, g, or t
  misc_feature (123)..(124): n is a, c, g, or t
  misc_feature (126)..(127): n is a, c, g, or t
  misc_feature (132)..(159): n is a, c, g, or t
  misc_feature (173)..(176): n is a, c, g, or t
  misc_feature (178)..(178): n is a, c, g, or t
  misc_feature (190)..(216): n is a, c, g, or t
  misc_feature (343)..(362): n is a, c, g, or t
gggagcccacaggtaagggtgtgaagcatagacattgccctggagattcagagcactttgtacatgtattgagaaattacattataaaaaaatacaattctttgctttcntgnnncnncnttnnannccccnnnnnnnnnnnnnnnnnnnnnnnnnnnnttccctcgttttgnnnngnggccgcacgagnnnnnnnnnnnnnnnnnnnnnnnnnnncttgcgggccgccccgcccccgaaaaattttttaaaacctttctttggccgcggggccccgtggggaagggaaccggggctaatactttttcccaagaaaacccggccctgaaaaggggttggattnnnnnnnnnnnnnnnnnnnnggggggaaaacgaggggtttcgaaaaacccaaaaggggtttctgggggtctttgggggttcttcccacgggggtcccaagggaggcccccgttacaaatttaaccccccgcccctggctcttttttgggagagagggggggaaatccccttaaacgctttttccccccggaatgggggagcccccttccaaaaaggggggtgggattaaaacccggaaatccccccgggggggaatttaaacaccccttgggcccccccttgggggatataaaattttcttccccccct

SEQ ID NO: 231696 - DNA, 603 bp, Homo Sapiens
  misc_feature (168)..(192): n is a, c, g, or t
  misc_feature (338)..(350): n is a, c, g, or t
ttagaataaaataaaaatgtcgggccgccttcggccctccaaaaagctttcctaaaccattccgttttggggccgcgggccccagtagggaaagtggaaacttgggccataagctgattccctaaggaaaatccctgggtccatgaacttagcgctttggaatttctnnnnnnnnnnnnnnnnnnnnnnnnngggcggcaaaccccgaagacggtttctggaaacaaaaatcccaaaaagtgggactttcctcgaaaggcccttttaacctgggaatcctaatccaaacgagggaacttcccaagccgaaagcctcccatttttccaaatattaaggnnnnnnnnnnnnnttggcccaatttacatcccccaagaaaacctgggtgggtaaatatctccctttaaaagcccatttcccgggcccgaaaccattggggataagtcactattaccaaaaaatcggagcacctgtgaagatacaaccctgtggaaattccggccccaaggcggggccatattaagatctaactctgtttggatcccgcccctccggcagcttattataaaattactttttggcacccctagtgcgcgcagacaaaa

SEQ ID NO: 231697 - DNA, 337 bp, Homo Sapiens
  misc_feature (109)..(198): n is a, c, g, or t
  misc_feature (210)..(224): n is a, c, g, or t
ggggattacagacgtgagccaccacgaccggcttaggaaatttttttaaaatgttgaaataaatatacatttaagagaaataaaaaagcaataactcgcaaataccatnnnnnnnnnnnnnnnnnnnnnnnnnnnnnnnnnnnnnnnnnnnnnnnnnnnnnnnnnnnnnnnnnnnnnnnnnnnnnnnnnnnnnnnnnntttcctgggcgnnnnnnnnnnnnnnnaaaaaaacttttcaaaacatttgtttggggggcgcggccccagaaggaaagggaactgggccatacctgttcccaagaagacccgggcctaaacaagggtttgattccccacc

SEQ ID NO: 231698 - DNA, 771 bp, Homo Sapiens
gggggatgtgagcctggttcagaagattgagctggcggctcgccgaaggagaagtcttccaggactagcatcctcggtgaaagagcctttgccccaagcaacctgattttgacaaatctgattaaaatgtgatgctagaacagggatctttcccagtatcttgagtgggtgaccacacttgtcagtgggaggctctgggctgccctgtcggctccttgagggcgggatgaactgctttgtgacttggaaaggtacgctgctggccacccttggacaagaagctgctgagcatgggtttctgtaggttttagccaggacgcgggggggctgttgactttgcatcctggcatgattttctagcagaaaatgatgtttttatggcgccgcgacgacgacgcgcaagatggcggatgttttgggcccgcctgggggccgtcggaaagttttctgaaccctttccgtttgccgcgcggggcgcccctgcggcgagggccggcttggccctcaccatgcatgcttaacgaataccgccggagccttgcgctcggtggttcgcggtcgcccacgcgaacccggctcggtcgcgggccagatccgcgcgcacggctcgcagaaagtgacgcgcggtggcacgtagaggggggccgcccaccgtgtgtttgaatcaataaagggggccctagcgggggtggctcccgcgagcccaggctgagagccgcgaggaccgtggcccgatggttcagggcgacagcggggcggtcgccgtactgt

SEQ ID NO: 231699 - DNA, 444 bp, Homo Sapiens
  misc_feature (209)..(305): n is a, c, g, or t
ggtgtggacctcatgctggtgatggctcccctgggtggcctgccagcacagccagtgccatcagggagctgaaggggctgtcccccacctaactccagctcccccttcacgttgtcaccaaggccctgtgccgcccgcctcgcccccctgctctgtggattcctttgggaagggctccctgggcaggacaataaagagttttgactccnnnnnnnnnnnnnnnnnnnnnnnnnnnnnnnnnnnnnnnnnnnnnnnnnnnnnnnnnnnnnnnnnnnnnnnnnnnnnnnnnnnnnnnnnnnnnnnnntttgtcggccccctcgcccctcgaaaaacctttcaaaacctttcgttgggcgcccggccccattaggaaaggaaaattgggccatacctgttcccaaggaaaacccgtggccagaaaatagggttgggaatcccccccc

SEQ ID NO: 231700 - DNA, 527 bp, Homo Sapiens
  misc_feature (196)..(196): n is a, c, g, or t
  misc_feature (198)..(334): n is a, c, g, or t
  misc_feature (349)..(390): n is a, c, g, or t
  misc_feature (436)..(437): n is a, c, g, or t
  misc_feature (464)..(487): n is a, c, g, or t
ggaagttagcagattaatttcaaacttaggattcagccttccactcctgccccgcctcaccccacatgctccctgtttctcatgctttctctaacttcctcaccccttaaccaaaaaggtgtgttttcttttgtgcatatagccattcttaaatatcagtgatgtaaacctcactttattaaaaaattatccagcngnnnnnnnnnnnnnnnnnnnnnnnnnnnnnnnnnnnnnnnnnnnnnnnnnnnnnnnnnnnnnnnnnnnnnnnnnnnnnnnnnnnnnnnnnnnnnnnnnnnnnnnnnnnnnnnnnnnnnnnnnnnnnnnnnnnnnnnnntatgcaattgtgtgnnnnnnnnnnnnnnnnnnnnnnnnnnnnnnnnnnnnnnnnnncattttccgtgggggggcggcggggcccccccatgagggggagganncaaagcgggggcgcagaaccgcggctnnnnnnnnnnnnnnnnnnnnnnnntagaaataaaaaacagcgtgggtaattttcctacccccag

SEQ ID NO: 231701 - DNA, 935 bp, Homo Sapiens
  misc_feature (599)..(607): n is a, c, g, or t
  misc_feature (743)..(743): n is a, c, g, or t
ccatggtcggccgccctccggccctcgaagaagcctttctagaaccattcggtttggcgccgcggggcccaagtaaggtaaagtggaaacatgagccaatatgcttgtctctcctagggaacattcctgggccaatgaactaaggggccttgggaatctctccaccaaataaaaaagaaccgccccgggcgggtcaacccgaatgccggctcgtaaaaacaaaaatcccaaaatgggaaggtttcctgaagggcccatgtaactggggaattctatcccacccaggggaatctcccaaagccggaaggcctccgatatcatcaaaaatttaacggcccccggggccgcctgggccaacgtctattgcgtcaagagaactgggggtcgcaaaatttctaatattaaaggacaattcccagggccgggaacatgggggaaagggccccgttcccacaaaaccgggctctttggacttgaaaccccccggaaacttccggcccagagcggcggtattccagggcagacctctttggggtccgtccctcccgggagctaaataaataattgttcggccccctctgggaggtgaaaaacaaccnnnnnnnnncgcccacaaagaaaaggcgtgtggtgccattgtgttggggcggctacgggggtgtggtataatacgccaccaacacgcggtggggggggaaaaaattcccacgcgccacagggcggacttgtgtggccctgagcancacgcctaaccaaacaccttttttttgtcttctctaaaaaagaacgaccccctctttgtacatgggagaaacacatgaaggtgggctgcgggggtgcttttcttatcgcgccgcggtacaaagagatgcgtgcctctcgacatctattatgcgagcagcaaataatatattactgtggcgagagtcaacgaa

SEQ ID NO: 231702 - DNA, 755 bp, Homo Sapiens
  misc_feature (166)..(222): n is a, c, g, or t
  misc_feature (224)..(224): n is a, c, g, or t
  misc_feature (235)..(244): n is a, c, g, or t
  misc_feature (278)..(325): n is a, c, g, or t
  misc_feature (460)..(497): n is a, c, g, or t
  misc_feature (583)..(642): n is a, c, g, or t
aacttgtcggccagccctctcggccctcgaagaagtctttcatagaacccattctccgtttgggccggcggccggggcccccagttaaggggtaaaagggggaaaaaaccagtggggggccccataacccttgggttttcccctaaaggggaaaaatttccccggnnnnnnnnnnnnnnnnnnnnnnnnnnnnnnnnnnnnnnnnnnnnnnnnnnnnnnnnnanaatataaaaannnnnnnnnnccccccgccccgccgggggcggcccgccgcccgnnnnnnnnnnnnnnnnnnnnnnnnnnnnnnnnnnnnnnnnnnnnnnnntgggggacggctacggggtggctgacacagcgcagaggcacggggcggcggcgggggcaaacggatcgacaacagaccaccggcggaggtatgaagccagtaaccgcgcggatagcaggcagacgtcaccgtagnnnnnnnnnnnnnnnnnnnnnnnnnnnnnnnnnnnnnntgccgccggtgccgcttgagtctagcgaggtccaccctgattgctggttatgacccccgcgatgcgcggcgagtgaggggactccnnnnnnnnnnnnnnnnnnnnnnnnnnnnnnnnnnnnnnnnnnnnnnnnnnnnnnnnnnnncgacggggaggcgcgcgctgccacggtgcggcggccgggagagcgcaggtacgcggtccgcgcgggtcgtctacctcacggtcggatgggttgttgagccgccgcgacgctca

SEQ ID NO: 231703 - DNA, 501 bp, Homo Sapiens; identical to SEQ ID NO: 33071

SEQ ID NO: 231704 - DNA, 408 bp, Homo Sapiens
  misc_feature (52)..(120): n is a, c, g, or t
  misc_feature (145)..(156): n is a, c, g, or t
  misc_feature (209)..(221): n is a, c, g, or t
  misc_feature (253)..(294): n is a, c, g, or t
aaaaaattgtattaaaaccattaaaaagggcccggggccaaccaagagttcnnnnnnnnnnnnnnnnnnnnnnnnnnnnnnnnnnnnnnnnnnnnnnnnnnnnnnnnnnnnnnnnnnnnntcaagtggggccccgcccggccatnnnnnnnnnnnngggggaatttaagaaaaaattgggccaaaatgaaaggaatcccaaagggtttnnnnnnnnnnnnntcccccccggggatacaaaacttggaggcttnnnnnnnnnnnnnnnnnnnnnnnnnnnnnnnnnnnnnnnnnntggccatatggaacacgataaacccaaaagtgggaaaactcgccccggggtgggttaaaatccccaacggattaacagggaggcccataaagggaaaaaggccggggcctcctc

SEQ ID NO: 231705 - DNA, 699 bp, Homo Sapiens
  misc_feature (61)..(73): n is a, c, g, or t
  misc_feature (113)..(121): n is a, c, g, or t
  misc_feature (246)..(254): n is a, c, g, or t
  misc_feature (370)..(370): n is a, c, g, or t
  misc_feature (381)..(381): n is a, c, g, or t
  misc_feature (458)..(458): n is a, c, g, or t
  misc_feature (537)..(537): n is a, c, g, or t
tgaaaaaatttttcaacacttttttggggccccggcccccccaagaaagaggcatcccccnnnnnnnnnnnnnaaaaaaccctcggccattctaatgtgtttttctctccccnnnnnnnnnccccgccggcgaaaccggcttttttaataaaccggaggggtggttttggggtcttcttgtgggtccttgcgacgagggctcgcacttcttctttttatttacatattggccggctccgcttgcannnnnnnnnaagtcgttgtgtgtgggttatttctccgaggactctttttgcgcccccggtcgagggacagtatgccgtccgttggcgcgtcgctcttctttctacccccgcgcctccccgccgcncggcgcgcgcncccctcccccgctgccgccctctctctgggatgctgattcctgtttctgccagcggtggccgcgcgcgcggggggtntggtggagtagggggccggctgcctgtggtcgcggctctggggctgctggctgcgggcgtcggcgggttggatgggggntgcgccggagcgctgggctgtgcccgtgcgggcctggtgtggcgtcggctcttgtgttgtgcagtgcgcacggtgggttgttggaggagtggcgagagccgcgcggtgttccgtactgacgcgccgtgcgatgtgtcgggcgctgccgtgtcgtgcggcggt

SEQ ID NO: 231706 - DNA, 917 bp, Homo Sapiens
  misc_feature (69)..(149): n is a, c, g, or t
  misc_feature (161)..(170): n is a, c, g, or t
  misc_feature (287)..(295): n is a, c, g, or t
  misc_feature (775)..(784): n is a, c, g, or t
  misc_feature (826)..(834): n is a, c, g, or t
ggatagcaacttttagtctcagcttgtttcgttttgatgtcaataaatagtaacagcattcaagtgtgnnnnnnnnnnnnnnnnnnnnnnnnnnnnnnnnnnnnnnnnnnnnnnnnnnnnnnnnnnnnnnnnnnnnnnnnnnnnnnnnngtgaagaaaaannnnnnnnnnaaaaaaagattccaaaaaatttagtgtgggggcccgcccccaaaaaggtagggaaacggggcctaagcctgttccctagaaaacccccgaacaagacgagggttgggtttccccccnnnnnnnnncccccgcgggacgccctgtgctttcgaaaaaactcaagcagggagtccgggaggccatttccgggactcttcccccgggaggccccaggcggaggcccgaatataaaaattacggcccccgcccatggccgcatgacgcgggggacggggtggggaaatgccataaaaaatttccccgcccgaacagtgggagcccctccgcacaagacgggactgtggaaacaaccctggaacaccctggaggggaaaaagaaagccgccctttggggcgccatgggcggaattagactcatggcgcccgcggggcgtaaaacgcggcggggctaaaaaaacctgggcttctagcttgggcccccccactaaagactaaagattggggggaaacctcaccgcgggggttggggcgtggcataaaaaaactcgtattccccaaaatacccccctttaagggaaacgcggcacaggtctttccccgtggannnnnnnnnnttcttgagcaactttgtggtgtaaaaattgggcgggaaatcnnnnnnnnnatattctctcccaaacgcagaaaaaagagttcctattggcccccagcaaaacggggtaaacaaggggggaacccctttcccgg

SEQ ID NO: 231707 - DNA, 1030 bp, Homo Sapiens
  misc_feature (289)..(350): n is a, c, g, or t
  misc_feature (368)..(382): n is a, c, g, or t
  misc_feature (385)..(449): n is a, c, g, or t
  misc_feature (500)..(509): n is a, c, g, or t
  misc_feature (598)..(598): n is a, c, g, or t
  misc_feature (783)..(783): n is a, c, g, or t
  misc_feature (835)..(835): n is a, c, g, or t
  misc_feature (927)..(927): n is a, c, g, or t
  misc_feature (935)..(935): n is a, c, g, or t
  misc_feature (979)..(979): n is a, c, g, or t
  misc_feature (995)..(995): n is a, c, g, or t
  misc_feature (1001)..(1001): n is a, c, g, or t
agaacattattaaggaattatttagaaacaatgtgtctagtttaagaaagtggttttcagtattgtgacaatacaacgtttttacaaggttgttttctaccaccatattttaaagatatttttatgaccgtgtatactcacactttgcttgtattttaaaaggaggatatatttgcacttatgtatacttttacagtttgccaaaatattttgctgtaaaattttttttcaataaaatgtatataaccccccccacccaatcctccactacccattccccctccgcttnnnnnnnnnnnnnnnnnnnnnnnnnnnnnnnnnnnnnnnnnnnnnnnnnnnnnnnnnnnnnngtttcccctccttctttnnnnnnnnnnnnnnnttnnnnnnnnnnnnnnnnnnnnnnnnnnnnnnnnnnnnnnnnnnnnnnnnnnnnnnnnnnnnnnnnnttctccagatcttccctctattcaccttccccgttgcgggcgccgcgccgnnnnnnnnnngtttatatcccctaccattcgcgcccctttctgtcctgttcccctcaccacactttccccgttctctcccctgtcttccgcttgcgctncctctccccctcaaccaacaccaatactccccccgtgggggcacaccccgtcccgttttgttttagcaaaccttctttcccactttgttgtacccccttgccctaacatccctacccgcgttgtctactccacatataccacctgcgccctcattcccgctccgccgatctcgctatccgcactntctattattatctcgcacgcgtcttcactccggtttggcctatcacctcgantcgcccctatatcgcgcctgtatgccctaatatctccgcattcacctcgtctctccctcgcgccttctgacgattgacgaggcagccgcgcntctctctnatatcaccacgcctctgtagtcgagcataacctagcccacatcnccgtttgtaggtcggnatgctngtctcgattcgcgcgctcgctgcttctcg

SEQ ID NO: 231708 - DNA, 861 bp, Homo Sapiens; identical to SEQ ID NO: 96343
  misc_feature (434)..(437): n is a, c, g, or t
  misc_feature (444)..(444): n is a, c, g, or t
  misc_feature (449)..(449): n is a, c, g, or t
  misc_feature (456)..(456): n is a, c, g, or t

SEQ ID NO: 231709 - DNA, 863 bp, Homo Sapiens
  misc_feature (410)..(410): n is a, c, g, or t
  misc_feature (418)..(430): n is a, c, g, or t
  misc_feature (717)..(736): n is a, c, g, or t
  misc_feature (836)..(836): n is a, c, g, or t
ggggtcccaccgctgcccctactgcaaatggcagttttaatcttatcttttggcttctgcagatggttgcaattgatccttaaccaataatggtcagtcctcatctctgtcctgcttcataggtgccaccttgtgtgtttaaagaagggaagctttgtacctttagagtgtaggtgaaatgaatgaatggcttggagtgcactgagaacagcatatgatttcttgctttggggaaaaagaatgatgctatgaaattggtgggtggtgtatttgagaagataatcattgcttatgtcaaatggagctgaatttgataaaaacccaaaatacagctatgaagtgctgggcaagtttactttttttctgatgtttcctaccactaaaaataaattaataaatttatgtccccnccaccttnnnnnnnnnnnnnaatcccatgcccgccgccctcggcccctcaaaaagtttttctacaccatccgtttggcgccccgggccccagtacgtaaatcgaaccttggccataacctgttttccaaaggaaattccgggccccataactagtggcttgcgatccttcacccaacaaaaaaaccccccgggccgccaacctaagcggttccgaaacaaatcccagaatggcagctcttgaggccctttcactggcctcctataaacccggaagttccaacgcgagcttcaatattaaaaatttannnnnnnnnnnnnnnnnnnnttaatcggaaaaacatggtcggaaactcctctaaaggccattcgctctccacctcgtaaactccccccccaataggcactgaatgaacctcttaaattgnccccgcggctattaaccacccttgtta

SEQ ID NO: 231710 - DNA, 744 bp, Homo Sapiens
  misc_feature (134)..(224): n is a, c, g, or t
  misc_feature (309)..(376): n is a, c, g, or t
  misc_feature (552)..(552): n is a, c, g, or t
  misc_feature (712)..(712): n is a, c, g, or t
ccccacccaacaaaccaaacgcctcccaagactttctttctcccccttggtgcgcctacccgtttcccccaacttcacaccccttttgtccccccttcccttatccttccgagacccctcgcgcctctaccttnnnnnnnnnnnnnnnnnnnnnnnnnnnnnnnnnnnnnnnnnnnnnnnnnnnnnnnnnnnnnnnnnnnnnnnnnnnnnnnnnnnnnnnnnnnacctgtgatcttttcctacccccgcttttccaagccgcacccctcgatgctccacatttaccgtacccgctctcccgtctttttnnnnnnnnnnnnnnnnnnnnnnnnnnnnnnnnnnnnnnnnnnnnnnnnnnnnnnnnnnnnnnnnnnnnaatataaaataatcccgccattagggtcaacccttctacaccctctcgctaactcccccctccagtataccgtgctgtgcgtcctattgtccccaccaccgtctgcgcgtattacaaccgcgagtcaccacacttgggcgcgccgccacccaatcatttatataacctctctcttngcgccccttatttctatctctcgcccgcaactttgttctctcacacaccacgctctccataatacgcaacattttcccccgccctcgcctactctcccgcatctcctcccaccaccaataaacgcgcgttccacagacgcccacgacttcggtggacaangtctgtttttcatccgcgcacacactctttcc

SEQ ID NO: 231711 - DNA, 963 bp, Homo Sapiens
  misc_feature (77)..(90): n is a, c, g, or t
  misc_feature (145)..(241): n is a, c, g, or t
  misc_feature (362)..(370): n is a, c, g, or t
  misc_feature (385)..(446): n is a, c, g, or t
ggaagcagtggtatcaagcagagtggccattaggcggggtcgctttctatttctctttctttgtgtgaatttatttnnnnnnnnnnnnnnctttttgtaacgactatttgcagtttaaaaatcaataaaccccgttttttcaagnnnnnnnnnnnnnnnnnnnnnnnnnnnnnnnnnnnnnnnnnnnnnnnnnnnnnnnnnnnnnnnnnnnnnnnnnnnnnnnnnnnnnnnnnnnnnnnnngccccaaccaaacattaacaaagaccactaccaaacaccaaaacccttcactgatccgcgccttcaaaaccataccgcgcctgtctcgccggccccccgcttccgctccccgtgtaccgannnnnnnnnaccctctcccgcggnnnnnnnnnnnnnnnnnnnnnnnnnnnnnnnnnnnnnnnnnnnnnnnnnnnnnnnnnnnnnnatcgccgcttcgacccctgttggtgggctctgtccgtccccccactttccacccccttatacccgcctaccgggccccccatacgccccagagtgcttccgcaccctgcccccgccatccccctggaccgcgtctgtacgatgtgctttcccaccccctctaatcccaccgtccccccccacttccgttgggatgcccgcccggcgtatacccctatgctataccccctccccctattggcgaaccccacgtcaatttccggaaccccttcccctattatgcatcccctatagccggtcccggtattttgctcctctccctatatcatgcaattgtgctctcccccttacccggtgtccccctgtcctcagtatccgatgttcctggcaatcaccgccgtgggtggctcgtcacagcctcacacatccgcgtatgcaccgcgcgcgtgctatacatgatactaccacgttcccttattgtgtggagtattctagtgagccccccacttcgcacagcc

SEQ ID NO: 231712 - DNA, 873 bp, Homo Sapiens
  misc_feature (109)..(349): n is a, c, g, or t
  misc_feature (426)..(451): n is a, c, g, or t
  misc_feature (489)..(497): n is a, c, g, or t
  misc_feature (577)..(589): n is a, c, g, or t
agttagccattttatacgtgtttactgaacacctgtcctgtgcccatattctaagtgccttacctgcattaaactcatgtaaccttcacaacccgatgaggaagtgctnnnnnnnnnnnnnnnnnnnnnnnnnnnnnnnnnnnnnnnnnnnnnnnnnnnnnnnnnnnnnnnnnnnnnnnnnnnnnnnnnnnnnnnnnnnnnnnnnnnnnnnnnnnnnnnnnnnnnnnnnnnnnnnnnnnnnnnnnnnnnnnnnnnnnnnnnnnnnnnnnnnnnnnnnnnnnnnnnnnnnnnnnnnnnnnnnnnnnnnnnnnnnnnnnnnnnnnnnnnnnnnnnnnnnnnnnnnnnnnnngcccatgaaacccgtgtattcttcttgtttctccaaaaagaaacctcccgaaaagcaaaaaagcgttttgtcacttnnnnnnnnnnnnnnnnnnnnnnnnnnggcggcgaccccggatggtctttacaaaaaaccccccnnnnnnnnntctcttgggggcttcttttcgtggggtttccacaccccgaggtggcccccccgggccggtctttaaaaattaaacatttnnnnnnnnnnnnntcgcgcccctttttttagcggaagagggggggtaaattttctctaaccatctccctgcccacccaccggggaagaaacctacactccacacggcggttgtttgtcagcaaccttggaacccccgcagcgggagtcacccacaccccctctggtggccgcctctggaaaataaaaaactactcccccccgacgggaagagaagagcggggccaccataaaaaataactctcctctattgttccccccgcacccttatacacaccccatctagtggtgcgcacccc

SEQ ID NO: 231713 - DNA, 868 bp, Homo Sapiens
  misc_feature (52)..(67): n is a, c, g, or t
  misc_feature (375)..(400): n is a, c, g, or t
  misc_feature (813)..(813): n is a, c, g, or t
ccaaaaaaccccaacataaccaacaatcccatctctgggaccccaaccaacnnnnnnnnnnnnnnnntaaccttggtcgcccgcccctcggcccctcgagaaagtcttccataaacctattcgtttggcgcgcgcggggccccacgcagtttaccgtgaaacatggcccataccttgtttcctcaaggaagatcctggcccaatgaactacggtgccttggcattcctcacccaataaaaacaaccgccccgggtgggcaacctgaccggttcctgaacccaaatcccccctgggaatccccgagaggttctttcctgtggtacctcaccccacgaggaagcctccggggcgggcctcgatttatcaaaattacnnnnnnnnnnnnnnnnnnnnnnnnnngtaaggccgggcttgcccattccctttaactccttctcgccccgacccgggaacccttatccccaagcgggccgtgaatcgaactttgcaaccggccaaggggtacttaatccccctcttcgatcccccttgcgcatattcaaacttttcgccccggggagggaaacacgcgggggggacgcagaaaaaattcgcgtcactttcttgcgcccccacattttaaatttcccaaatatgtgggcctgaaacaacctcccccccagcgcgttttgtgtccctgatacacccccaaccactactttatttcttccacccttaaaagcgcccttctacggggcgatcaacatgcgaccactcgtctatttcttcagccggaagaccacgtcgcaccctccactcccgtgtgtgacatntatgccgcgcgcgcccaagaaaccgccgccctgcatcatagattgcaccctccgg

SEQ ID NO: 231714 - DNA, 787 bp, Homo Sapiens
  misc_feature (160)..(160): n is a, c, g, or t
  misc_feature (163)..(163): n is a, c, g, or t
  misc_feature (236)..(276): n is a, c, g, or t
  misc_feature (325)..(333): n is a, c, g, or t
  misc_feature (352)..(367): n is a, c, g, or t
  misc_feature (401)..(412): n is a, c, g, or t
  misc_feature (661)..(661): n is a, c, g, or t
  misc_feature (692)..(700): n is a, c, g, or t
gggactgagggcggagccaggggaaggcggccgagcgcggccccctctcctcccgggccggggcgggcccgaggcctcgatccgccttccccgcgccgtcctggtcacggccccgcggggcagccatgcctggccgtctgctgcggggcctgtggcaagncgnaatgagccggcccgttttacaaggttacccgcttccgttccctgggatccgcaccttggaaacccctaaaagnnnnnnnnnnnnnnnnnnnnnnnnnnnnnnnnnnnnnnnnnacaaaatatgtggctccccccccaagagggagataaacctccccccccnnnnnnnnncaaacaggggtgttttctnnnnnnnnnnnnnnnnaactcatcgattagagagaaaaaaggggtgcttnnnnnnnnnnnngggagggggaacaccgcccccctctctcctcctctccctcccgcggcgaaaggggtaggatatttgttctttctcttctcccgccccgcgccgcgacctccatgtatctctgatttgttctccccctcacctccctattatacgcccactccgaagcgaagagtttcaccgcgcgctcctccccatttctccccaaggaacccaataatcgcgcgccactcaccccacacccaaaaaaaccgcacgacncgcagtcctttattttctgttttttgtccannnnnnnnntccctctcctccccaccaccggcgccaagcctttctattttaactccccacaccccccccaacatacctctaactatcccctatccc

SEQ ID NO: 231715 - DNA, 611 bp, Homo Sapiens
  misc_feature (186)..(409): n is a, c, g, or t
ggatgatttttttcttagttgtttactatacatatacacacatatacatatgataagaatttggtgtactcagtgtcatttgacaaagaaaagaattgaggatgtaaaatgagtttgtttcttttggtggagtgagaattttgttataatcaagttagctaataattaagtagaaatattgaaaannnnnnnnnnnnnnnnnnnnnnnnnnnnnnnnnnnnnnnnnnnnnnnnnnnnnnnnnnnnnnnnnnnnnnnnnnnnnnnnnnnnnnnnnnnnnnnnnnnnnnnnnnnnnnnnnnnnnnnnnnnnnnnnnnnnnnnnnnnnnnnnnnnnnnnnnnnnnnnnnnnnnnnnnnnnnnnnnnnnnnnnnnnnnnnnnnnnnnnnnnnnnnnnnnnnnnnnnnnnnnnnttgattttttgtctctaatcaaaccatatttaacttgttcggcccgccctcggcccctcaaaaaagcttttctaaaccattccgtttggggcgcgcggggccccagtaaggtaagtggaaccatgggttcataagcttggtttccttagggaagaatcctgggtccatgaccatagggccttgggatttcctcccaccaaat

SEQ ID NO: 231716 - DNA, 998 bp, Homo Sapiens
  misc_feature (203)..(203): n is a, c, g, or t
  misc_feature (456)..(484): n is a, c, g, or t
ggtccagtgcccagtgtatgagtgtgtgccctgtgcccttgtccctcactccccacatgctggacgtagccctcttcctcgcacccctgggagggacccatccatctcccttgctctcctggggaaccctaaacccaactctgttgatgtgaaaaatgcagtgaaaaatattgacgaaaaataaaacggaaacaaatcctcgnaatactgagaaaaaaccactacgacactcccccaataaaatcaatacgagataagaactaacccctaccctagcaattaaaaaactgttaataataaataattgccgggcccacctcggccctccagaaaatttcttcttaaacccattccttttggccgccgcgggccccctaagggaaaaccgaaacatgggccttaagtttgttcccaaaggaaaaacctggggcaattagcctaagggctttggaattnnnnnnnnnnnnnnnnnnnnnnnnnnnnnggggggacacccgaaggcgtttctgaaaccaatccccaaatggggagttctccgcagggccctctcactgggaatctcttccaaacggggggcgtcaccgcgcgaggccttgaaaattcaaatttttacacccccgggcccccttggccctgtcttttttacaaaaaaccgtggtggaaaaatctccttatagaactcttttctgcccgcaaaaatgggagaacccctctccccaaaaatgggcatttgtaatgaaacccttggaatactccccaacggtggcaaccacaaccccctttggtgaccccttttggagcataataaaatatttccgcccccgtgggggtagaaaacgcggggcgcgcaaaaagaaaaatttttcccccactgtttgggcgccccccgctttgtaaaactctcaatagtgggtggggtgaaaacctcctcccccccgggccatatttggggttctaaacaccaactaataaaactcgtcttctttttccccaccgaa

SEQ ID NO: 231717 - DNA, 506 bp, Homo Sapiens
  misc_feature (64)..(138): n is a, c, g, or t
  misc_feature (195)..(250): n is a, c, g, or t
  misc_feature (252)..(370): n is a, c, g, or t
ggtggcattattaaaaatgtatctgatttctctgtgaacagtaatatttcatatttttaagttnnnnnnnnnnnnnnnnnnnnnnnnnnnnnnnnnnnnnnnnnnnnnnnnnnnnnnnnnnnnnnnnnnnnnnnnnnnccttttaagcctgagtttgagtcaggcctgggcaacatagatgtgagcacctatctnnnnnnnnnnnnnnnnnnnnnnnnnnnnnnnnnnnnnnnnnnnnnnnnnnnnnnnncnnnnnnnnnnnnnnnnnnnnnnnnnnnnnnnnnnnnnnnnnnnnnnnnnnnnnnnnnnnnnnnnnnnnnnnnnnnnnnnnnnnnnnnnnnnnnnnnnnnnnnnnnnnnnnnnnnnnnnnttttaaaaatcgtatatgtagtttaacaggtgtggtcaatatcaaaacttaggtatttaatcttgttaaattatataagcagaaaatgctggaaaaagtaccctgtcatagaaaaaaataaacttcctaaatcaaa

SEQ ID NO: 231718 - DNA, 878 bp, Homo Sapiens
  misc_feature (543)..(543): n is a, c, g, or t
  misc_feature (590)..(590): n is a, c, g, or t
  misc_feature (633)..(633): n is a, c, g, or t
cactcccgctacttacccaatcaataccatacatgttcggccgacttcggcccgtcaataaggtttatagaacccttctttttggcgcgcggcgccaacccacgcaaatcgacttatggtttctaagctggttcccctaagaaacattctgccccctcgaaccacccgactttgcaatttccctcaccaaacaaatataaacgtccctggaggcgacaaacccgacctgggccttgtccacaacaaaattccatgcaatgggccaccctttgcgcaggtgccatactttaattttgtgtcctctttatacccgccgcaccgagcgtaacgctaccgaatacgtctcgcgaaacacctctctttaaatacattattctcgcggagtttccagtgtcggcgcctccccaatgccgcccgcttttccccgcgcacactccttgcgcccatcaagagcaacgcggataaccactggcggcgtttttgtacaaacgctccctctgtgtgctaccatcaacgcgcagctgctatcagagtgcgctgccnctggccacgcgtgcgaaaacgcaagagttatcatcacactcataaanaccacccgcccctgttttctctccagcgaaacactttactccncctcgcgtattgatagtcccacaagagctgcggccttttatccccgtcttttaccccccacgcctacttactagaccactaatgtgcaaggtgaatgtaaagaaactatatatgatgcaccacctaataatggccgacacgtcactactcaaaattctgtccacgcgcccccattgtgggcccccgactccttgacctgtctcccgcattaatagtgtcacccagacctctgtcaacatgctaac

SEQ ID NO: 231719 - DNA, 1193 bp, Homo Sapiens
  misc_feature (571)..(571): n is a, c, g, or t
  misc_feature (725)..(725): n is a, c, g, or t
  misc_feature (771)..(771): n is a, c, g, or t
  misc_feature (881)..(881): n is a, c, g, or t
  misc_feature (1095)..(1095): n is a, c, g, or t
  misc_feature (1116)..(1116): n is a, c, g, or t
ggggtagaccggcggatgtggcatcgctggtggcctggctctttgataccagtataaaaaggcatttgtagccagcgtttactcctgcttttcggcgttctgggatgtgggggtaccagctgtcgggtgcggtccgtgcgtagagccgtcaacctgaccctgcccctgggctcgcagtgtggctcttgataaataacgtaggtaaatgaataaaccgggtaatctcaaaggcgtcattacccacccctctcctcgacctgtcctttgtctggccggcctcggttcctcggaaaaagttttcttagaaccatgtcagttgtggccgcgccgcggccccactcaggctaacccggaccattggtcaactaaacttgttttccctagaggcagactacctgggcacatggactaagctgcctttggcaattcctcccaccaccactaaaaagacagccccgcgggctggagcaaacagggaggcggatcttctcgaaatccaaaaactcccacacaatcgggaaagcttctcctgagaaggggtagcaatattaccgtggcggaactccctatnttccaaccgcagtgggacagttatccctcaagagacgggtcacgcgccttatacacctatattatcctcgctaatatatatggaggtagacctatctgcgcgcatccgcacaaagctggtccgaaatgcgtcgattggtgtccgcgcccggtgnatgtaccccgggggccgcgcggcccatacaactcgtccgaacgtgntcacagagccgtcaattttttccccgtgcgcctatggataaccacattgtagaacagtagtgctcacaattaacacaacagaaaacccccgcgcgccatagtgtgatatntcgataacgccctaatgggcaacatctccagcatcacatgcgtccgtgtaactgatctcgcaactcacgctccacttttgtgtctagtacgcccttattcgacggacgagtaatatatcaatcatcttccgtgctcccatgggttggcttaccacatatacaccatagtaggagcgtcgcaacaaacatacagatggccgaccgcacagatcanaatggaccccatacgcgatgncaacgaggccgcgatcacatgcggggcggacacagacactcgcccgcttacgtgggaattgtggcccccgccaaaca

SEQ ID NO: 231720 - DNA, 144 bp, Homo Sapiens
gccacttttgggaagaggggggaaatttataaaaattttcgccgaagggaaaaccccccaaagggggttggaaaacctaaaccccccggggaaaaacacccttggccctttggaaaaaatatttcccccggggaaaaaaggggg

SEQ ID NO: 231721 - DNA, 710 bp, Homo Sapiens
  misc_feature (76)..(86): n is a, c, g, or t
  misc_feature (206)..(227): n is a, c, g, or t
  misc_feature (255)..(274): n is a, c, g, or t
  misc_feature (327)..(367): n is a, c, g, or t
aaagtgaatttagaaatcagaggagtttttcctcttaaccaaactgcccaaagttgggttttttgggggctctacnnnnnnnnnnncagcacgcccctataattttttctttctcagcactctctcgcgcctcccgccctatcccccaataaaacagtttacgactagccccccccgacccacacctggggatcaagcggaacaannnnnnnnnnnnnnnnnnnnnnacctcaccgccctaattctctgggcaannnnnnnnnnnnnnnnnnnngttacgccgtaccacatccccaaacacccccgaccctaattcatccaaccacnnnnnnnnnnnnnnnnnnnnnnnnnnnnnnnnnnnnnnnnnggtctgtcgcggattacgtccacaacgtcacccctacccccttaatgcccaattccgagtcgccgtatcctcgatctttagccccgcgcgaaatataccactgcatctccctatataaagcgccgccacccgacccctggacccccctcccccgtgttcttcatgccgtgccccctccccgcaagatggaagaaagcctccccggcgcgcgacgcgtctacacgacccaatgccgccggggctgggggagagaccgcggccggcgccagacgcgcacggcacgcgagtgggaccagcggtgctcctccgataatcgttagtaaagcccaccaacccgtcccgc

SEQ ID NO: 231722 - DNA, 630 bp, Homo Sapiens
  misc_feature (52)..(216): n is a, c, g, or t
  misc_feature (225)..(264): n is a, c, g, or t
  misc_feature (280)..(293): n is a, c, g, or t
  misc_feature (311)..(364): n is a, c, g, or t
  misc_feature (396)..(510): n is a, c, g, or t
  misc_feature (524)..(532): n is a, c, g, or t
gggtgtgacctcctgggtgttgatgccattaaaaccaacgttggtgcccggnnnnnnnnnnnnnnnnnnnnnnnnnnnnnnnnnnnnnnnnnnnnnnnnnnnnnnnnnnnnnnnnnnnnnnnnnnnnnnnnnnnnnnnnnnnnnnnnnnnnnnnnnnnnnnnnnnnnnnnnnnnnnnnnnnnnnnnnnnnnnnnnnnnnnnnnnnnnnnnnnnnnnctttttggnnnnnnnnnnnnnnnnnnnnnnnnnnnnnnnnnnnnnnnngggggccgggcccccnnnnnnnnnnnnnncggggacatatttttccnnnnnnnnnnnnnnnnnnnnnnnnnnnnnnnnnnnnnnnnnnnnnnnnnnnnnngggggaaccaggagtttttaaaaaaacccaannnnnnnnnnnnnnnnnnnnnnnnnnnnnnnnnnnnnnnnnnnnnnnnnnnnnnnnnnnnnnnnnnnnnnnnnnnnnnnnnnnnnnnnnnnnnnnnnnnnnnnnnnnnnnnnnnnccgagatgggacgnnnnnnnnnaacgcgggggaaaaccttaattccccccggcgagaaaaaccccctcgggcctcctcttggaataaaaattttttcccccgagggaaaaaaagggggcg

SEQ ID NO: 231723 - DNA, 189 bp, Homo Sapiens
  misc_feature (64)..(73): n is a, c, g, or t
gggagtccgaaggtctttacggaatttacaaaaagaagcccaagcaactctaaaacaaaataannnnnnnnnnggcaaattatccaaaaaggggggaaattaataaagcttttggccaaccggaaacccatccaaacgggattgagaaactgaaaccccaaggggaaaccaaacctttgaccccctggg

SEQ ID NO: 231724 - DNA, 502 bp, Homo Sapiens
  misc_feature (60)..(68): n is a, c, g, or t
tgggtcgaacctgtttcccaacaaaaaaacgttcaaagaaaattgtttgaatcccccggnnnnnnnnncacccggaagataccaaaagttgtgaacaaagacaaatggagatataaggtgcttagagttcctatgaaaaaaagacccccgaaagctcacctggcgtattagaccccgcccaggagaaacattgaaagggccttttgggaatcacataaacgatgatccccgaacagggaaccccatcaacaattgggccccgaaaagagccccacactacacccaagaactattagaaaaatccgataaaccttagcgctaaaaaactttgcacccctgggcaaaaaaacggcaggagcaaaaaaccggtgtgatgcaacatagggggaccatcataacacattatcacaaccccggagcgggaaaactcaaatttggccaaagaggggattgaacacaagaaaggacaataaaaagttcggctgaaaacaattgtgtaaag

SEQ ID NO: 231725 - DNA, 585 bp, Homo Sapiens
  misc_feature (44)..(194): n is a, c, g, or t
  misc_feature (203)..(216): n is a, c, g, or t
  misc_feature (257)..(378): n is a, c, g, or t
  misc_feature (439)..(449): n is a, c, g, or t
  misc_feature (493)..(517): n is a, c, g, or t
ggaaggtaggaggcacatcaataaagaggaaaccaccaagctgnnnnnnnnnnnnnnnnnnnnnnnnnnnnnnnnnnnnnnnnnnnnnnnnnnnnnnnnnnnnnnnnnnnnnnnnnnnnnnnnnnnnnnnnnnnnnnnnnnnnnnnnnnnnnnnnnnnnnnnnnnnnnnnnnnnnnnnnnnnnnnnnnnnnnnnttttggggnnnnnnnnnnnnnnaaaaaaattttaaaaacctttttttggggcccgggccccannnnnnnnnnnnnnnnnnnnnnnnnnnnnnnnnnnnnnnnnnnnnnnnnnnnnnnnnnnnnnnnnnnnnnnnnnnnnnnnnnnnnnnnnnnnnnnnnnnnnnnnnnnnnnnnnnnnnnnnnnttcgggggcttttaggggttttaccaaagggggcccccagggggttttataataaaatttnnnnnnnnnnnggggacattttggggagagggggggaaattattaaaaacctttnnnnnnnnnnnnnnnnnnnnnnnnnaagggggggtagagaaaaccctgaaattcccccggggggtaaaacacaccctttttgccccccttggg

SEQ ID NO: 231726 - DNA, 297 bp, Homo Sapiens
  misc_feature (72)..(216): n is a, c, g, or t
  misc_feature (225)..(236): n is a, c, g, or t
gggatgtctgtgggaaaagctggggaacagttatccattcaacaaacattgattaaatgcctgcttggtgcnnnnnnnnnnnnnnnnnnnnnnnnnnnnnnnnnnnnnnnnnnnnnnnnnnnnnnnnnnnnnnnnnnnnnnnnnnnnnnnnnnnnnnnnnnnnnnnnnnnnnnnnnnnnnnnnnnnnnnnnnnnnnnnnnnnnnnnnnnnnnnnnnttggcggcnnnnnnnnnnnnaaaaaaattttcaaaaactttgggtgggggcccgggcccaaaaggaaaaggaaacgggccc

SEQ ID NO: 231727 - DNA, 348 bp, Homo Sapiens
  misc_feature (152)..(197): n is a, c, g, or t
  misc_feature (259)..(308): n is a, c, g, or t
ctttgtgggccgcctcgcccctccaaaagcttttcaaaagcatggcttttgggcgccgggcccccatagggaaaggggaacctgggcccaaaccttgtttccccaagaaggaaacccggggccaaggaacaaaaggggggttgggagatttnnnnnnnnnnnnnnnnnnnnnnnnnnnnnnnnnnnnnnnnnnnnnnaaaaaaacccagagaggttttctttgagacaaaaattcccacaaaaggggaggttttggttnnnnnnnnnnnnnnnnnnnnnnnnnnnnnnnnnnnnnnnnnnnnnnnnnntggtttccctccgcggaccagaggccgcccctcccgggtg

SEQ ID NO: 231728 - DNA, 1027 bp, Homo Sapiens
  misc_feature (737)..(737): n is a, c, g, or t
  misc_feature (808)..(808): n is a, c, g, or t
  misc_feature (831)..(831): n is a, c, g, or t
  misc_feature (903)..(903): n is a, c, g, or t
gggggagctgggggagcccccagcctggggcagcccagcaggccgctgaacaaacaccccagaagccagcactgtggcagggtgctggggagatgcccctctgagccttcctcccccctcagacctgaatgcactccacagttgggggctgcccctgccactcccctggtaatgcataaaaggggaggggaaggttccctggggcttgagctccctctgtggaggtgaggaggggagattccgttcacatccaggaggggcaaaatgactgatgtatttttatgtatctacacagagagtgcattttctctccagagatgctgtctggttaacaacggactaacttaagaaattgatcgattatcttaataaactgtgcccccccgccgcaccgaccgggacgggtatcgtctacccttaccgcgtactcccgaaccaccccatcaacccactatgaactctgcgaaccccgttgttataaagctcgtgtccccccggcccatcctcttcccaccgactttggcccgccccgtttagcccgattttattcttgtgggtggcccctccccctccctaccctccgaaagaaagatttttgcccaatcgaaccatcctttttttccgcgtcgcgagccccgccgcttccccgcttgcccggtagtaaccctaatcacgtttgtgcgcccccatgaaattcgcccgcccccccacgattacacaaccctaccttgtgggtnccccacgtaccgtacgcgtgcggccgtcgccattcccaccccacacgcacataacacacaaaacagcgacncaggccgtggcactccacccaanagtggtgccgcctttgtcagaaaccaccatcccgcccgcaatacgcttgactctctctcctacggcgatatnccaagtcgtgtggggggacccacacccgcaccaccaagatgcggcggcgtttactcatgcgcctagttaaccgcgcctccccattttatatatcgcatgctccctttgccgctccctctccacg

SEQ ID NO: 231729 - DNA, 1079 bp, Homo Sapiens
  misc_feature (64)..(125): n is a, c, g, or t
  misc_feature (161)..(161): n is a, c, g, or t
  misc_feature (198)..(198): n is a, c, g, or t
  misc_feature (201)..(203): n is a, c, g, or t
  misc_feature (406)..(448): n is a, c, g, or t
  misc_feature (549)..(549): n is a, c, g, or t
  misc_feature (627)..(627): n is a, c, g, or t
gggctgcctaagcctctaggtcttgagggaagcttacagttaagagccagcaaaagccagggcnnnnnnnnnnnnnnnnnnnnnnnnnnnnnnnnnnnnnnnnnnnnnnnnnnnnnnnnnnnnnnattaagcttcagttgagaatgcagcctgactgacanccatgcaatttggccagcccttggtgaaaaacccccnccnnnaaaaaaagacataaaatacacaaccccccatcccccgtccgcctgccgttggcgaatagccaccctcacggtcccgagcctcgtcacttcacctgcgccccgttccacccgtgcctaaccccaaatatccgctacacgcccatccgcgtcgcaccccggcggccatacgagccgggccacactaacaaaaacggcaacacggnnnnnnnnnnnnnnnnnnnnnnnnnnnnnnnnnnnnnnnnnnncttcgccacacccttccatccttctccacctcctccccgaccaccacattcctcgctcgccttaccttccccctcccctgttcccttctattcccgcccgngaaaaacgctggcaccaatcacgcggggaccagtagcatataccctactcccacgcgcgcctccgcgcggtacggccngcgccgtgcgacgccctcgcggccgtgtcgggagagcgctcaaggccggacaatgaagccccgctcgcgtgggaggggtgcgcgaccagggagcgcccttcaagtaagggacaccgccgttgcgcacgctcaacataatgcgggcatcacttcccgcggtgactcccctagtgtcaggattccatcgccgcttcacctccccatataatatgggtcgagaacctgctgccgcacccgccgcctgtgcccctgtgatgctcaccccacactccccagggccactcaccagcatttgatatactccggcgcgcgctgcccgctgcgacagacccgagagtgagtctacactctaccgcgccagcggggtgagcaaaagagcgcatgctctgtccgcctgccgactcacgcccccgatatggaccacccccgttccccacgcccgtatccgcccc

SEQ ID NO: 231730 - DNA, 792 bp, Homo Sapiens
  misc_feature (388)..(423): n is a, c, g, or t
  misc_feature (537)..(579): n is a, c, g, or t
aagaggaaaacccggtaatgctttcctgtttgagggttaggaggaaattgggggataggtgtttgatcttgacgtgtgttttttcgttagaatgaaggttttatgttgttaatgtggtgggtgcgtgggcccctttgtgttgtggccaatatgtcgagggactataggcttgttcctaatatgttgcgtcccttcttctcgtgagtgatttttgatcaggataacgtgttttctacccttcagactttttgccttattgttttagtggggggcagatccttctttaaccttcactttacccttttgttctactttactgttttcttgggggaatcctcgtgatcgttttgtaccgctttgtttttctcctctctattttcgcgtgccnnnnnnnnnnnnnnnnnnnnnnnnnnnnnnnnnnnncccgccccctgtacttatctcttaccttcttttctcttcctccctttcgtttttctccctgcagcttttcctctgggttctcccgacatctcccaattgtcctctttagactgnnnnnnnnnnnnnnnnnnnnnnnnnnnnnnnnnnnnnnnnnnngtacccaataaattctgtttgctccaattgctttttctcccccccatacactctctgggcgtgttttcctggttgaagttacactttccccacttttcggtcccttctctacatttgtccccgcctctcttctatgtcctctgtttctttcgccccttgttgctcgacattcttttcttccgttttcctttttttcgcgtccttgcctttccc

SEQ ID NO: 231731 - DNA, 116 bp, Homo Sapiens
ttgggcccttgggaaaaaattttcccccaggggaaaacgggggagaaaaaaatttcccattttggccccctttaaaaacaaaaggtggggaaaaccccccccgggggtgggggtgg

SEQ ID NO: 231732 - DNA, 651 bp, Homo Sapiens
  misc_feature (432)..(432): n is a, c, g, or t
gaatagagaaacatgtctcttccaacgcgaaaaggccctaatagtagctgcagccctcccatacaccgtgggagtgactattatgcgatggctggggaccgctagcacccaatttccgaaacacccccgcaatactactaaacttcttatgctccaggaggggaacgccgactctccaacctccccgtctttcctgccgctcgtcccatcccgaaattaaagaacccgcgcccccgggggcgccagacacgggcgacattcggttctacaccataaaatgaaacaccgctttggggctagggcactcccacttattccagggttgtggcccttacgggcggggacatgcccccgcaatagcggccaaaagcgggcgtgccctcgtggccacgcagcaaccatggttttctccacttaagggggtgcatccgncggggcgtacacttgaatctatacccgggcttctgtggcttctcccccaccgcccgactattacgaaaatctcactcccccggcggtatagatcccaaacctttcctttccttcaacaactaacttgtgcggaacggaacactcttctctggaagccccccttgtattctgtgcaaatttttctttcccatgggcggttcgcccaatgggcgcaggctt

SEQ ID NO: 231733 - DNA, 557 bp, Homo Sapiens
  misc_feature (57)..(65): n is a, c, g, or t
  misc_feature (201)..(227): n is a, c, g, or t
  misc_feature (262)..(320): n is a, c, g, or t
  misc_feature (342)..(424): n is a, c, g, or t
  misc_feature (460)..(460): n is a, c, g, or t
  misc_feature (472)..(486): n is a, c, g, or t
cctttgaagggtgccaccggaaaaagtttattgccccacttttctcgtttggttttnnnnnnnnnggggggttttttctttggttaaaccgggaaaaaacacccctaaaatccttcccacgaaaaccccttttttccctttttggaaggggaaaggggcattttccgggataaatcttttttaagattcggggattaaggnnnnnnnnnnnnnnnnnnnnnnnnnnnacttctcccggagcgacggtttttaagggcgttgnnnnnnnnnnnnnnnnnnnnnnnnnnnnnnnnnnnnnnnnnnnnnnnnnnnnnnnnnnngcgcggggtgtctctaaaaagnnnnnnnnnnnnnnnnnnnnnnnnnnnnnnnnnnnnnnnnnnnnnnnnnnnnnnnnnnnnnnnnnnnnnnnnnnnnnnnnnnnctcctcttacatgaaagaaccccccccgccggtgcntatatccgcgcnnnnnnnnnnnnnnncaatggtttcctcgtggccggggttttgttcgtaatgttgtattctttgtttccggcgcgccgtccgccgc

SEQ ID NO: 231734 - DNA, 719 bp, Homo Sapiens
  misc_feature (292)..(511): n is a, c, g, or t
gggacatacaaatgagatgcaaatgtatgtaaaggagaagggagatttgcaggtcaaagcagatgtggaatcaagtatacccctttagtaagtgctttctctgaaggtgcctgcaatgatatttaggcattggcctgtgagctatgggtgtgtttgcagatgacatgaggatgtgtttggaggtgatgtgggaggttgtagagaagttgcaggtgctttcgcagatgagcctcaggtgtgctgctgagatggggatctctgcaaatatgctggtgatgcatacagatgcgannnnnnnnnnnnnnnnnnnnnnnnnnnnnnnnnnnnnnnnnnnnnnnnnnnnnnnnnnnnnnnnnnnnnnnnnnnnnnnnnnnnnnnnnnnnnnnnnnnnnnnnnnnnnnnnnnnnnnnnnnnnnnnnnnnnnnnnnnnnnnnnnnnnnnnnnnnnnnnnnnnnnnnnnnnnnnnnnnnnnnnnnnnnnnnnnnnnnnnnnnnnnnnnnnnnnnnnnnnntacctacctttcttggacccaggccgcgaaaaatacccaggcccctggtcgcccgccctcggcccctcaagaaacttttctaaaacccctttcttttggcccccgcgggcccccagtaaggtaaaagggaaacttgggccataacccgcttcccccaggaaaaatcctgggccaaaggaccaaaggccttgggaattccccccccaat

SEQ ID NO: 231735 - DNA, 870 bp, Homo Sapiens
  misc_feature (102)..(113): n is a, c, g, or t
  misc_feature (497)..(497): n is a, c, g, or t
  misc_feature (515)..(515): n is a, c, g, or t
  misc_feature (638)..(638): n is a, c, g, or t
  misc_feature (761)..(761): n is a, c, g, or t
cttcgaccaaaaaacccccctcgccctccccgccgccgcctttccgccttccgtcccgccaatacgctcttcataaacccactttccccttggttacttcgnnnnnnnnnnnngcgacatttcgcaataatttggtctctccaccccgccgtttcctacccaataacgtctcgggtcccccgccccgccgttggcccgccgcacgtttccccacccaaatacagaagaaacacccccgccgggacccgcaaaaacgcgcgaaaccggggtttatggagaagaacaattggcagagcacgggcgacgctatcctgcggagggcgcccattataggcggtcgtaaagctcataccgccccgcgccccggcaggtcttccgcagagtgttagagatattttccgcgctcacttgtccataattattaagcgccggccctgcgatgcgtcgcttgagtacctaccgcgccccgccgcgggaatacactaccatcgtgtatnttgtgatcgcacctcccncgcgccataatcaccagttttctttgttatctcggacccccgcggcggcagagctctcactttcacaccctagactcccgcgctacttcgcgcgcgcctaaccaccccgcgccacttttattntccccggctatttcccccactccgccccgcccctcgtgctatgttctattcccggccccgcagtatatatatatcacgtccatacacaccgggtcagcgaacaaccccggggccgacccgaanagtcgcgatatttagactctattgacagttgggtccgccacgctcgcccgcacatatacgacacatacgtgtgagttaactaaccagccgcccgccccgcccgcccgcg

SEQ ID NO: 231736 - DNA, 647 bp, Homo Sapiens; identical to SEQ ID NO: 33074

SEQ ID NO: 231737 - DNA, 1020 bp, Homo Sapiens
  misc_feature (105)..(385): n is a, c, g, or t
  misc_feature (778)..(778): n is a, c, g, or t
  misc_feature (819)..(819): n is a, c, g, or t
gggattggccgcgcgcgtggagagccgacctgtattttaccacggcagatagaaccgaatttcccaaagtggctccgaaagaaccaaggaagaaatgggaagtcnnnnnnnnnnnnnnnnnnnnnnnnnnnnnnnnnnnnnnnnnnnnnnnnnnnnnnnnnnnnnnnnnnnnnnnnnnnnnnnnnnnnnnnnnnnnnnnnnnnnnnnnnnnnnnnnnnnnnnnnnnnnnnnnnnnnnnnnnnnnnnnnnnnnnnnnnnnnnnnnnnnnnnnnnnnnnnnnnnnnnnnnnnnnnnnnnnnnnnnnnnnnnnnnnnnnnnnnnnnnnnnnnnnnnnnnnnnnnnnnnnnnnnnnnnnnnnnnnnnnnnnnnnnnnnnnnnnnnnnnnaaatgatacaaccctctattcacaactttaccttgtcgcgccggcctcgggccctcgaagaagctttcctaaacccaattcgtttgcgcccggccgggccccagaagggtaaatcgaaacacgtggcccctacccttggttctccctaaagaaggaatccctggcctcactcgaactaggtgggctgggcgaagctctctccccccgaagtataaaaataaaccaccgcgcggggcggggacaaacccgcaaacgggatttcctggaagaaaaaagaccgccacgagtgggcagttcttcttggaagggttcattctgtagtgtggggattatccaataccaacacaaggtaagtctccacgaccgcgagtactcccgccaaactcgaaatanttatgggttccgcggagtctcgggccgaacgtcgaatgggngaaggaactttgtgttgggcgaatctccaattaacagacacattctacggccgataaatgggtataaaagccacatacaaacaagtgcggccatgcggaggaaaactctggaagtctcggcaagctggtgatatataagacccccgccctgtttagccgcttgcgcggcaaattataaatctcttagccacctgtgccgcg

SEQ ID NO: 231738 - DNA, 1074 bp, Homo Sapiens
  misc_feature (58)..(379): n is a, c, g, or t
  misc_feature (951)..(951): n is a, c, g, or t
ggtggaacaaagtttcatcaaagccaatttaaaagcctatgtaaaaaataattattcnnnnnnnnnnnnnnnnnnnnnnnnnnnnnnnnnnnnnnnnnnnnnnnnnnnnnnnnnnnnnnnnnnnnnnnnnnnnnnnnnnnnnnnnnnnnnnnnnnnnnnnnnnnnnnnnnnnnnnnnnnnnnnnnnnnnnnnnnnnnnnnnnnnnnnnnnnnnnnnnnnnnnnnnnnnnnnnnnnnnnnnnnnnnnnnnnnnnnnnnnnnnnnnnnnnnnnnnnnnnnnnnnnnnnnnnnnnnnnnnnnnnnnnnnnnnnnnnnnnnnnnnnnnnnnnnnnnnnnnnnnnnnnnnnnnnnnnnnnnnnnnnnnnnnnnnnnnnnnnnnnttgtttcacgaaactactacgagcgggccgaggacgcgggatacaaaccacccctcgtgtcggcccggccctcggccccctcggagaaacgcttccccacaaccatttcggtttgggccgcggcggggtccccccggacggtaacatgaaaccccaggggcccactaaatatgttgttcccctaaaggggagactcgccggggttctagtgccccccacgcggggctttggggatattccccgcccccgcccgatacacagaaaaatgcggccccttgggagccggcgaaatagcgggatggctggctttctctggcacacccagacactcccacagatggcgggaaggttctcttggaacagggcatgaatctaacctggcgggaattcctaatccacaataaaggagagcacttccaagggatcgagagtctcccgcagaatatccacaaacttttaggccgctccccgcaacgcattggaggccaccgattattactccgcagagcacccgtggcgcggcagcacatgttcctattatacccgcgcctcttctgttggcgtgccgccangtgtgagtcaacgcccaccctgttcatatacacacagcggcgccgcggcgatttagaccaactcgctcacgcatgtctgttagcctgcgcgcgcctcaccgagtatatatctctgtgtgctgc

SEQ ID NO: 231739 - DNA, 582 bp, Homo Sapiens
  misc_feature (180)..(180): n is a, c, g, or t
  misc_feature (500)..(500): n is a, c, g, or t
gcttgtccggccgctctcggccctcgaagaagctttcctagaccatctcgtttgcgcgcgcggggcccaagtagggtaagtggaacagtcggtcaatagcgtgtctcccctagggagcatccctggcgtcatagacctaggtggccttggaattttctccacccaaataaaaaaaacgcncccgcgcgggccaaacccgaagccggttcctggaaacaaaaatcccagaaagggaaggttcctggaggggtcatttaacctgggaattcttattcaacacaagggaaggtcccaaaggcgaaggcctccgaaatattccaaaatttaacggcccccccggcccccgtggtccatcttctaattggccaaggaaacggggtttggaaaaatttcatgtcaaacccactctctgtgcccgaacattgggaacaccccattccacaaaaatgcgccatggagtggaaaccgctggaaatccccccccgcgggggatatccagntaacccctttggcgcccccctttggggggtaataaagaattgcttggcccgcatgggggggaaaaaaagcggggggccccag

SEQ ID NO: 231740 - DNA, 999 bp, Homo Sapiens
  misc_feature (106)..(160): n is a, c, g, or t
  misc_feature (480)..(480): n is a, c, g, or t
  misc_feature (546)..(546): n is a, c, g, or t
  misc_feature (646)..(646): n is a, c, g, or t
  misc_feature (671)..(671): n is a, c, g, or t
  misc_feature (724)..(724): n is a, c, g, or t
  misc_feature (727)..(727): n is a, c, g, or t
  misc_feature (754)..(754): n is a, c, g, or t
  misc_feature (809)..(809): n is a, c, g, or t
  misc_feature (977)..(977): n is a, c, g, or t
gggcaggcgctggagccgctgcccatcgtgtactacgtgggccgcaagcccaaggtggagcagctgtccaacatgatcgtgcgctcctgcaagtgcagctgaggtnnnnnnnnnnnnnnnnnnnnnnnnnnnnnnnnnnnnnnnnnnnnnnnnnnnnnnnatgccctgaccttgggggctgtcatttaaggacacccgcgccccacgcccacctgagcgcccctcaaacatgcagagcgggccgcgaccgcccaccgcgacgccgcgccccgcgggccgcctcgggcctcgacaagctttctacacccctccgtttggggggcggccccggcaggtagcgcgcccctggggccacgccggcctcctacggacgtcaccgcgcctcgagtctgtgctcggcagttccccccaaccaaaacccccgccccggaagcgccaacctgcgttcccgccgtgacccggacatcccccgacgccagngcttttcgacaggccgcattgacctgggcgtccttacccggcccaggagaagtcgcctccacctcntaactctccgccagcggcccgcgatatttcccggccgcccgcgggcctcatggactcttctgtcccttctccgcaagtagcgctgccacccgaccccttncacgtcccacgccccccgtttacgnccacaccatcgcgcgaatgctcattccgacccaggaacgcgaccgcgtatggnagnaccggacaagctgcgccacagcggggngacttcgtgcaacccccgttgctccgaactttagcgccgaccccaccacacaatnccccacgcggcgaccaccccccgccgtcacccaaatacaccccacgccgccgatattcggcctaccggcggcgaaacgtacaaaagtgggcgggcgcggccccgcgtcccagggcccctccgactcggacaccacacccacaccatcgccttatcagaccccgccttntggccacgcgccggacgccccg

SEQ ID NO: 231741 - DNA, 1043 bp, Homo Sapiens
  misc_feature (529)..(529): n is a, c, g, or t
  misc_feature (537)..(545): n is a, c, g, or t
gggagggggagaaggaggggaagagagaggagccccacttcactccggcaggcagacctgctggagctgctttgcagaatgacttgggtcttgctggcccctgggtgtgcctggaggggggtcttcctatccccctccacctctccccttggtgcctaacccaggactttgtccccagagacccactgtgtgccccctggagctcctcctagagcagagtctgctgctgtctgttctgcagagggtagcctgaggcccaaggaggttgtcagggacacacagcagggggaggcagcccagatccctgctcatgcgtggtttgggcctctgctaacagctgggccacatgcgtgtatctagagcctgggtccccctctgtcctcatttccctgtgcatattcagggacatggcctcggcaggggtttgggcaagaaaaaggggggcattttaaataaatctccccccagttttccattccccttggggtccctttaacttccattggccacaggaacctttggtgggccnccattccnnnnnnnnngggaaaggccccttgggtcccttcccacctttggaaattgtggacacaggcccccggaggcccccaagggcccgccccggggttgggggactttccaaacgggccccttggggtaaaaattctccccccagtcccaccttttttgggggggaaaagggaacactaaggggccccaagggcgcggcggaatttcaattgtgcaagggggttccccgggggaaagaatggggaagaagcacccctttccccctggggggctttaaccccaccgcgggggggaaaacacccccccggcttcctcctttaacttatgaaagagggtccccccgcgggcccacgcctcactcaattatagtaagagccaccaatatacgttacttcctttgtgtccggggcgccgccctttcggggccctcctctagaagaaaggcctctctcttaaaaacccaatttcttatttttgtgggacgcgggcggggaccccacatcaaagacact

SEQ ID NO: 231742 - DNA, 1137 bp, Homo Sapiens
  misc_feature (68)..(261): n is a, c, g, or t
  misc_feature (269)..(270): n is a, c, g, or t
  misc_feature (280)..(296): n is a, c, g, or t
  misc_feature (353)..(437): n is a, c, g, or t
  misc_feature (472)..(484): n is a, c, g, or t
  misc_feature (552)..(552): n is a, c, g, or t
  misc_feature (556)..(556): n is a, c, g, or t
  misc_feature (666)..(666): n is a, c, g, or t
  misc_feature (668)..(668): n is a, c, g, or t
  misc_feature (670)..(670): n is a, c, g, or t
  misc_feature (687)..(687): n is a, c, g, or t
  misc_feature (723)..(723): n is a, c, g, or t
  misc_feature (769)..(769): n is a, c, g, or t
  misc_feature (773)..(773): n is a, c, g, or t
  misc_feature (790)..(790): n is a, c, g, or t
  misc_feature (796)..(796): n is a, c, g, or t
  misc_feature (801)..(801): n is a, c, g, or t
  misc_feature (819)..(819): n is a, c, g, or t
  misc_feature (867)..(867): n is a, c, g, or t
  misc_feature (911)..(911): n is a, c, g, or t
  misc_feature (913)..(913): n is a, c, g, or t
  misc_feature (1062)..(1062): n is a, c, g, or t
ggaagcagtggtataacgcagagtggccattacgggggctacttaaataaaccaggattcaaactgcnnnnnnnnnnnnnnnnnnnnnnnnnnnnnnnnnnnnnnnnnnnnnnnnnnnnnnnnnnnnnnnnnnnnnnnnnnnnnnnnnnnnnnnnnnnnnnnnnnnnnnnnnnnnnnnnnnnnnnnnnnnnnnnnnnnnnnnnnnnnnnnnnnnnnnnnnnnnnnnnnnnnnnnnnnnnnnnnnnnnnnnnnnnnnnnnnngggaaaannttgtgggcgnnnnnnnnnnnnnnnnnacaaaaaatatttttcaaaaaaccccctttttgtggggggcccggcggccccacccnnnnnnnnnnnnnnnnnnnnnnnnnnnnnnnnnnnnnnnnnnnnnnnnnnnnnnnnnnnnnnnnnnnnnnnnnnnnnnnnnnnnncaaggggggtgttggcggtttctcccaccccaccnnnnnnnnnnnnngaaaaccccccggcgcggggggcgccgacaccacacaaaagaagactgtctgttttttatgatcaganaaancaccacccgcgcgcacaaggagcggcgagtaccctctctccgttgcgagggaagcgcgcgcctcactccctcgctgcggcgggtgtagccgcctcccctcgcccgcgcancnancaagggaggagaggcgngcgcgctgtcactcgcacagcgagcagagagagccncacacgcatcgccactacaactatacaacatatataaaggattagngagngcgcgcgccccgcgcgncgccgngcgcngtgtggcggagagatgantaattctattatgtataatgtgaggagaaaagataaacgagaggaggnggggtgtagcacatacatacatctctattatgaaataaatgacntnttcttcttcgcgccgggcgccccgcacgaagtagtatgaaaaaccaccttctctactaatactaaaataagcgggggcggttggtgagagtggagagaataaacactccgcagagatccacgccccccacaaaggagacagcgacaccncaaacaagccccccagcctgtgtgtggtgccccccgctcggtagtgagaagacaataatatataaatactctcca

SEQ ID NO: 231743 - DNA, 803 bp, Homo Sapiens
  misc_feature (48)..(271): n is a, c, g, or t
  misc_feature (289)..(357): n is a, c, g, or t
  misc_feature (422)..(476): n is a, c, g, or t
  misc_feature (563)..(579): n is a, c, g, or t
ggggaagtgaccggtctggttcctaagcaataaaattgaccgtggtgnnnnnnnnnnnnnnnnnnnnnnnnnnnnnnnnnnnnnnnnnnnnnnnnnnnnnnnnnnnnnnnnnnnnnnnnnnnnnnnnnnnnnnnnnnnnnnnnnnnnnnnnnnnnnnnnnnnnnnnnnnnnnnnnnnnnnnnnnnnnnnnnnnnnnnnnnnnnnnnnnnnnnnnnnnnnnnnnnnnnnnnnnnnnnnnnnnnnnnnnnnnnnnnnnnnnnnnnnnnnnnnncttgtggcggcccccccnnnnnnnnnnnnnnnnnnnnnnnnnnnnnnnnnnnnnnnnnnnnnnnnnnnnnnnnnnnnnnnnnnnnnccgggcacttatttgtttctcacaaaacaaaccccgggaaaaagaaaagggtttgatatcctccnnnnnnnnnnnnnnnnnnnnnnnnnnnnnnnnnnnnnnnnnnnnnnnnnnnnnnnccaggagggaggctccggggggctcttttcgagaagatccttccacccccgcagtgctcccagaaaccctccttataaacccaaatnnnnnnnnnnnnnnnnnttgtgagattctttataaaaaaagagcggggttaaaaataccttctattaaaaaaacttgcccccgcacaaagttgaacaccccccctccacaaacggggccacgttgtgcaaacacctaaaacatcgccccatacgggaaaacacccccaacccttggggccccactttgcgagaaaataataatttttccccccccagggggaagaaaaacaaggcgggagc

SEQ ID NO: 231744 - DNA, 679 bp, Homo Sapiens
  misc_feature (113)..(207): n is a, c, g, or t
  misc_feature (290)..(353): n is a, c, g, or t
gggtcgagagccagccaatagatggaatggaggcctgcacctgcgtctaacttttgacgctataaataggttcaagaaactaataaaacgttctggttttcttctttgacaannnnnnnnnnnnnnnnnnnnnnnnnnnnnnnnnnnnnnnnnnnnnnnnnnnnnnnnnnnnnnnnnnnnnnnnnnnnnnnnnnnnnnnnnnnnnnncccttgtccgccccctccgccccccaaaaagtttttaaaacatttttttgggcccggggccccaaaaggaaaggaaactgggnnnnnnnnnnnnnnnnnnnnnnnnnnnnnnnnnnnnnnnnnnnnnnnnnnnnnnnnnnnnnnnnccccgggggaaacccaacggttttgaacaaaacccaaaggaagtttggaggggctttacgggatctatccaagggggggtccaaagcgaagccccaaataaaaatttaagcccccgcccctgggcctttttattggaaaaaaccgggtgggaacttcacttaaaagatatttctcgcccgcacttgggagaaccccttttcccaaaagggggatgggaagaaaacccttaaaaccccccccacgggggcttattccaaccccctttggtcgccccctttgggaaaataaaatttttccccccactgggggaaaaacacgggggggc

SEQ ID NO: 231745 - DNA, 655 bp, Homo Sapiens
  misc_feature (44)..(44): n is a, c, g, or t
  misc_feature (61)..(61): n is a, c, g, or t
  misc_feature (85)..(85): n is a, c, g, or t
  misc_feature (130)..(130): n is a, c, g, or t
  misc_feature (138)..(138): n is a, c, g, or t
  misc_feature (143)..(143): n is a, c, g, or t
  misc_feature (150)..(150): n is a, c, g, or t
  misc_feature (214)..(214): n is a, c, g, or t
  misc_feature (246)..(246): n is a, c, g, or t
  misc_feature (272)..(272): n is a, c, g, or t
  misc_feature (295)..(295): n is a, c, g, or t
  misc_feature (303)..(303): n is a, c, g, or t
  misc_feature (318)..(318): n is a, c, g, or t
  misc_feature (375)..(375): n is a, c, g, or t
  misc_feature (467)..(467): n is a, c, g, or t
  misc_feature (559)..(559): n is a, c, g, or t
  misc_feature (603)..(603): n is a, c, g, or t
  misc_feature (629)..(629): n is a, c, g, or t
gaacgcagggcgacacgcccacggcgggagggggggaggcccgnacggggcgggacagganagggaagacgggcgggcgccaganacgagggcgagacgcgggggaggggggccgcacgggcggccgggncaaccggnacgcnccgcggncgagagagcacgacagagacgcgagagcgacgcagggacgccaggccgcgcgagcgatggaggngaggcgcgcgccgagggcgggaagaggcgggncgccgggcgcccacccgcccggagangaaggagcacccgaggccggcgncatggacnatcgatggggatgantcagcccgcgtgtgacgcagccatgcggcgattgttgtaccagcgatggtgtgctgncgatcagcgccgcgtggtaagagacgggaatattactcgctgacgttcaccctctcgacgtttccccgatcatgggcaagacgcgcgcatcngtcgccacaacgtccaatggacccctccgccacgccagccgccgtctggggcaccgtgaccgaggagcgtggcacggcacacgagcagcacnatagcccaacgcggcaaaaaaagtgcaggggcgcgagcggggtngcgatgtctgccggcggcccgagcgnggtgacccagacacaacgcacaagca

SEQ ID NO: 231746 - DNA, 255 bp, Homo Sapiens
  misc_feature (104)..(121): n is a, c, g, or t
ggctggagcctcgggaaagtctggtcccacatctgcccgcccttccagcccttccccagcccctcctcttgtttcttcattcattcaacaaaatttggctgggnnnnnnnnnnnnnnnnnnccaactacacaacaccgactgcccgcccgtgtccatcactctccggtaacagcccttgcccccaccaaacacccgaattttcttctccaaaccaatcgcaaacgaaaccccaaaaattttcccttgtgtccgcg

SEQ ID NO: 231747 - DNA, 723 bp, Homo Sapiens
  misc_feature (490)..(490): n is a, c, g, or t
  misc_feature (583)..(583): n is a, c, g, or t
  misc_feature (663)..(663): n is a, c, g, or t
  misc_feature (685)..(685): n is a, c, g, or t
tccatattaccgccacccctgccccccacacacattataaaccccttcccacacacgcccccaaaatacacaacacaaactttgaaaaactgacccccaacaaaaacccccacataacacaaaaccactaccaccaacccacaattaaaaatcacccaaatccattcgccccctccgcccccaaaacatccgaacccgcctcaccccaactaattaatacccccacaatataccccgcccacaaaaatcaccacatcacccatgaatacaccaaatatatcttccaaacccacacaccactataccgcccaaaataatagacttgacacaacccttcaggtaattaaacccaccaaatcaattcccaacccaccccaaaaacatttcctacaggcaccccaacaactaactaaaaccccacccacataaccccaaattatattattaatccccaaacacccccccaacgacaattatatcatatataccncaatccaccccgacgacacccagaaatacgcgtgacaatacaacacacaacttcaacctccgccataataaaggcgagcataattagaggagnaggcgaatcaaacctccctagcaacatcaccttgtaattaatataaacacgacacacatacgaacacacaccaagaaganttataataagacatacagtatnaccactcaaactccacaccatgtacatacacaggcacg

SEQ ID NO: 231748 - DNA, 605 bp, Homo Sapiens
  misc_feature (163)..(217): n is a, c, g, or t
  misc_feature (353)..(407): n is a, c, g, or t
gggtttgatctttgggagacagcatttattaaccaaagttattctttctggatctgccgtgtccttataaagtggatgaaaaatgttttgtacccatctggaaaaccaacaacttgaaatctcaggtattccaggtcactgacatgaatttgaagatatatcnnnnnnnnnnnnnnnnnnnnnnnnnnnnnnnnnnnnnnnnnnnnnnnnnnnnnnnctggcttggttttaattatgttcttaaatttgtgcgccaataattgcatatagattttttttcttaaatatttgactgtggaacatgccattttaaatatgttgtaaggactgttttaataaaaagtttagtatgnnnnnnnnnnnnnnnnnnnnnnnnnnnnnnnnnnnnnnnnnnnnnnnnnnnnnnngaccgcgcattctcctacacacctcaaaaacccctccacctttgtccccccgccctcgcccttcaaaaaaacctttccaaaaccttttcttggggcggcccgggcccccttaggggaaaggggaaacctgggcccaaaccttgttcccccaaagaaaaccccgggcacaagaaataggggttttggaatctccccccc

SEQ ID NO: 231749 - DNA, 804 bp, Homo Sapiens
  misc_feature (144)..(287): n is a, c, g, or t
  misc_feature (308)..(356): n is a, c, g, or t
  misc_feature (370)..(378): n is a, c, g, or t
  misc_feature (389)..(397): n is a, c, g, or t
  misc_feature (528)..(536): n is a, c, g, or t
ggtgaatgtgtaatcagagtaggcaggagcttctccaattgaaaatgggttattaacaagtctttccactgaccaaatctggctttaacccacgttatatcttcactgatttgccattctttctaaaatggagtgtagaggggnnnnnnnnnnnnnnnnnnnnnnnnnnnnnnnnnnnnnnnnnnnnnnnnnnnnnnnnnnnnnnnnnnnnnnnnnnnnnnnnnnnnnnnnnnnnnnnnnnnnnnnnnnnnnnnnnnnnnnnnnnnnnnnnnnnnnnnnnnnnnnnngagaaagccaaggtggggggnnnnnnnnnnnnnnnnnnnnnnnnnnnnnnnnnnnnnnnnnnnnnnnnnggggggcggccggnnnnnnnnnttggagggacnnnnnnnnngatggtctccaaaaaacattttttctccaaaaagagaaaccacccccggcggcccaacaagaaaaaaagagagggggaggggaaatttctcctcccacaacagataagaataaaaaccgccgccgccgccnnnnnnnnnaaccaccaccagcggaggggtggtttcgggtgtaaagacttcctcccgcgcacggggggataattattccaaaggggccgccctctcgtggcgggatactacctttaaccaatggaggggaaacgccccaacacagggaggggggggcgtggaatattttccggagatagattgtcggccggcacggcggttgtggaaacaacaacgagtggggaaggaaaacaggggcggggtggcagctactcttttaattttaaaaacataatat

SEQ ID NO: 231750 - DNA, 635 bp, Homo Sapiens
  misc_feature (163)..(163): n is a, c, g, or t
  misc_feature (391)..(391): n is a, c, g, or t
  misc_feature (488)..(488): n is a, c, g, or t
  misc_feature (497)..(497): n is a, c, g, or t
gcatgtcggccgcgcctccgccctcagagaagctgttctaaaccatttcgtattggccgcgcgcggcccaactaagaaaagtgaaacatggtacataacctgctttcctaaggagatccctggacgatgaactaagtgccttggaatctctcacgaaataaanaaaaacgccccgggcggcgaacccgaacccgttccttgaaacaaatatcccaggatggggaagtttcctgaagggctccttttaactggggatcctattccaaacagggaaggtcccagacgcggaggctccccaatatatcccacaatttaaagccccccgcggcgccttgccacaccttcaattcgaccagagaacctggccttgcgaaaattcccattttaaaancacattttccttggcccgcgaacaatgggggagaagccgccactcccacaaatatgacggggccatgttgaatttgacaaccaccttggaaactacncggcccagncccgggagcacttacaaggacaacaccctttgtggatgcgcaccgccatgtgcgcgcaatgataacaaatgattcttggcgcgccccgcatgtgtgaaggggagaacacacacgcgggcgaggaccgagcaataaaaa

SEQ ID NO: 231751 - DNA, 702 bp, Homo Sapiens
  misc_feature (60)..(75): n is a, c, g, or t
  misc_feature (263)..(276): n is a, c, g, or t
  misc_feature (550)..(550): n is a, c, g, or t
cctggtcgggccgccctcgggcccctcgaaaaaggcttttctaaaacccatttcggtttnnnnnnnnnnnnnnnncccccaggaaaagggaaaaagggggaaacaaatggggtccgaaaagaccgggggttttcccctaaaagggaagaaaatccccggggggggcccaatggaaaaaataaaagaggggccttttgtggggaaatatttcctctccgccgcgccaaattttataagacaaacaacaagcggcgccccgcgcnnnnnnnnnnnnnncaaaaaaacaccggaaaaggagcggggtgttttccgggtggaaaaacacaaataatcttccccccaaaaaagaggggggagagatctttcctctaggagagagaggggccacatttttaacacgcggggggagatcctctgaatattgcccaaggaggggggggagaggtccccacaaaggggggcgaaggagcctctgcggaaattaatttccaaaaaatttttagaggcccccgccggcgggccccggttgggggcaaaattcgcatatgcnacgcaaaagaaacaggggggtggggaaaaaattgtccgattagaaagggatattttttcggggcgccgaaaaaatgggagaaaaacgcacgcttgacaaaaaagagggggaagtgggagatgaaaacccctgaaaatcccccgccagcgggg

SEQ ID NO: 231752 - DNA, 830 bp, Homo Sapiens
  misc_feature (457)..(502): n is a, c, g, or t
  misc_feature (520)..(594): n is a, c, g, or t
  misc_feature (619)..(669): n is a, c, g, or t
  misc_feature (777)..(789): n is a, c, g, or t
ggatgcggagggcgcagatgtcccactgcacagccggaatgaatggagttcatcccctccacctgaatgcctgctgtggtctgatcttaagggtctatatatttgcacctcctcattcaacacagggctggaggttctacaacaggaaatcaggcctacagcatcctgtgtatcttgcagttgggatttttaaacatactataaagtctgtgttggtatagtacccttcataaggaaaaatgaagtaatgcctataagtagcaggcctttgtggctcagtgtccagagaaaatcaaaagatgctaaaagctttaccaagggaaagtggcctcattgaatgaaatcccgggggaatgaaaccccagaaagaaccggggctggctttttgggaaaaccttaatccccctttttttccccctttaaaaaaaagagaggggtacctcttctcttatatttnnnnnnnnnnnnnnnnnnnnnnnnnnnnnnnnnnnnnnnnnnnnnnccgcgacacggggtgccnnnnnnnnnnnnnnnnnnnnnnnnnnnnnnnnnnnnnnnnnnnnnnnnnnnnnnnnnnnnnnnnnnnnnnnnnnntaatattttcccccacaaagccgcnnnnnnnnnnnnnnnnnnnnnnnnnnnnnnnnnnnnnnnnnnnnnnnnnnncttaaaaccttaaaccccctccccccagggggggaaatgcgcaaaaaacccccttggggttttttataaagggggcacaaaaatttttgggccccaaagggggggaannnnnnnnnnnnnaaaaaaccagagaagaaagtggggtaacaccggggccccca

SEQ ID NO: 231753 - DNA, 177 bp, Homo Sapiens
ccttgtcgggcggcctcggccccttcaaaaactttttctaaacccatttcttttggggggcccccgggcccccagaaagggaaaaggggaaccagggggcccataagcctggttttccccaaaaggaaaaaataccccgggggcccaagggaaccaaagggggcctttgggaaattt

SEQ ID NO: 231754 - DNA, 607 bp, Homo Sapiens
  misc_feature (61)..(196): n is a, c, g, or t
  misc_feature (203)..(218): n is a, c, g, or t
  misc_feature (225)..(412): n is a, c, g, or t
  misc_feature (438)..(447): n is a, c, g, or t
gggggtctctttcccccaacttttccacatggtcatcgtgaaataaaaagtccactctggnnnnnnnnnnnnnnnnnnnnnnnnnnnnnnnnnnnnnnnnnnnnnnnnnnnnnnnnnnnnnnnnnnnnnnnnnnnnnnnnnnnnnnnnnnnnnnnnnnnnnnnnnnnnnnnnnnnnnnnnnnnnnnnnnnnnnnnntttgggnnnnnnnnnnnnnnnnaaaaaannnnnnnnnnnnnnnnnnnnnnnnnnnnnnnnnnnnnnnnnnnnnnnnnnnnnnnnnnnnnnnnnnnnnnnnnnnnnnnnnnnnnnnnnnnnnnnnnnnnnnnnnnnnnnnnnnnnnnnnnnnnnnnnnnnnnnnnnnnnnnnnnnnnnnnnnnnnnnnnnnnnnnnnnnnnnnnnnnnnnnnnnnnnccccagggggtctaaataaaaatttnnnnnnnnnngggccatttttggaaaaggggggggaatttatataacctttccgccaaggggaacccctccaaaacgggtgggataaccttaaattccccgggggaataaaaccccttggcccccttggggaaaataatatttccccccaggggaaaaaaccggggggcg

SEQ ID NO: 231755 - DNA, 320 bp, Homo Sapiens
  misc_feature (51)..(52): n is a, c, g, or t
  misc_feature (55)..(55): n is a, c, g, or t
  misc_feature (57)..(57): n is a, c, g, or t
  misc_feature (59)..(81): n is a, c, g, or t
  misc_feature (115)..(123): n is a, c, g, or t
  misc_feature (175)..(225): n is a, c, g, or t
ggacttcccagcctggggaaaacagaagccaagaaccttgtcccccaaaannaananannnnnnnnnnnnnnnnnnnnnnnccttttgggggggccggcctctccggcccctccnnnnnnnnnttttttctaaaaacccattttcttttttgggggcgcgcgggggccccccccnnnnnnnnnnnnnnnnnnnnnnnnnnnnnnnnnnnnnnnnnnnnnnnnnnntttttccccctgaaggggagaaaacacccccggggggccacaataaaaaccataaagggggctttgtggggaattttctccctcccccccataat

SEQ ID NO: 231756 - DNA, 676 bp, Homo Sapiens
  misc_feature (457)..(461): n is a, c, g, or t
  misc_feature (548)..(606): n is a, c, g, or t
  misc_feature (611)..(635): n is a, c, g, or t
ggaagcagtggtatcaactcagagtggccattacggcggggaaataaattctagtctctccttagctatttgatggcttttcatataggccaagaactcattgcaaaacatttttgcaaggatgaatgcctgtatttggtctaggaacagtacattttagtctgatttagaattactggtagcttattttaaagcaaggaaaagcagctgagctcaagtttgctgtctttagaatggtttgtgaaaatatggtataaaggggttttcattttcctgttcttacctattattgtatagagctattcatgccaattttttggggaaaaacttttaaaaaattggcccccaaaataactgaacatttggaggtggccatttaaaattaaaccaaaattttatcccttttggaatacccatttaaaaacccttttttaaatttcccttcccatgggcgcannnnnagggccagacacaagcaccgccgtgcataaagacaaaaattattacaccctttgggttcggggggccccggcccctcttccgggggnnnnnnnnnnnnnnnnnnnnnnnnnnnnnnnnnnnnnnnnnnnnnnnnnnnnnnnnnnnggggnnnnnnnnnnnnnnnnnnnnnnnnnaaggtaaagggggtaaaaagggtgggggaaaacccttgtgc

SEQ ID NO: 231757 - DNA, 289 bp, Homo Sapiens
  misc_feature (53)..(145): n is a, c, g, or t
gggttagaataagatgtaacggaagccacgataaagactcggtcaaatcctgnnnnnnnnnnnnnnnnnnnnnnnnnnnnnnnnnnnnnnnnnnnnnnnnnnnnnnnnnnnnnnnnnnnnnnnnnnnnnnnnnnnnnnnnnnnnncttggggcccgccctaagccctaaaaaaatttttttaaacctttcttttgaaaacgggggccccgagaagggaaagggaaccggtggcctatactgtgttcccttaagaaatacccggggcctggaaaataggcgcttggaatc

SEQ ID NO: 231758 - DNA, 870 bp, Homo Sapiens
  misc_feature (140)..(140): n is a, c, g, or t
  misc_feature (142)..(230): n is a, c, g, or t
  misc_feature (394)..(402): n is a, c, g, or t
  misc_feature (543)..(555): n is a, c, g, or t
ggagtactagagcctggccaagtgaggagggaaagcagaaaggggacgattctcactcacctcttttgttgttaataatatcggccgctgtttgtacagacagcctgcgtgttgtaaataaagcagagtgggctctttantnnnnnnnnnnnnnnnnnnnnnnnnnnnnnnnnnnnnnnnnnnnnnnnnnnnnnnnnnnnnnnnnnnnnnnnnnnnnnnnnnnnnnnnnnttcttgggcggccgccctcggcccttgaaaaagtttctctaaaccattccgttggggcgcgccgggccccaagaagggaaagtgaaacatgggccatagcgtgttttcccaaggaaaaacccgggggcaatgaacaaagggccttgggaattcctcacacgatnnnnnnnnncggcccgggggggaaacccgaagggttcttttgaaacaaatccccaaaatggggaagttccgaggagggccatgttcgggggattctttccaaccaggggggcccccaaggcggagcctcaaaaaattcaatatttacggnnnnnnnnnnnnngtggcgccctccctttggaaaagaaaccgggggggaaaattccctttttagaggacttttccggggcgccaaaaattgggaaaagcccccctcgcaaaaaaagggggggtgtggggtgaaaaccctcgaaaatttccgagcccagcggggggtttcccaaaccccctctttggtccgccccttgtgggaggaaataaattatttgggcccccccgggtggggggaaaacaaccgggggcggccgacaaacaaaaagtgtggcccccaaatatgtgggggccaccacgcttttaaaaagccgcaaaaaggcgcggg

SEQ ID NO: 231759 - DNA, 994 bp, Homo Sapiens
  misc_feature (194)..(272): n is a, c, g, or t
  misc_feature (275)..(275): n is a, c, g, or t
  misc_feature (285)..(285): n is a, c, g, or t
  misc_feature (612)..(626): n is a, c, g, or t
  misc_feature (649)..(649): n is a, c, g, or t
gggaaacaaagcaggaaaatatattgagaagggatcgtgtttacagaggacttctttaaagtgtcacatttttaaaatgtaaacatatttttaatgcatacttaagtaatatttaagaaactaaacaaaataatgatacaattgcagtgttgtgcttggttgtcaatgacaaaaataaaaccattttggtggtnnnnnnnnnnnnnnnnnnnnnnnnnnnnnnnnnnnnnnnnnnnnnnnnnnnnnnnnnnnnnnnnnnnnnnnnnnnnnnntgnaaaagatganatcttgttggtcgcccctcgccccctgaaaaaccttttcataaaccttttcttttgggcggccgggccccgagaaggaaaaggagacactgggcccttaagctgtgttccctaagaagaaactccggggcacaggaactaaaggggtttgggattctccccacccaaaataaaaaaagccccccggggggggaaacccggaaagcggtttttgaaaacaaaattcccaaaaggagaaagttccgtggagggccgtttttactggggtaccttactacaaacggggagtgccccagaggggaaggtctccaaaatatcaaaattttannnnnnnnnnnnnnntgggcccattcaattttgaaaanaaatgtggggggaaaattttcctttaaaacccttttctcgggccccaacattgggaaaacccctttctcaacaaaagcggggtatttgaatgtgaaacccctgagaatctcccgccgagcgggggagattacagaacaccctttgtgggccgccccttgtggcggaaaatatataattttttcgcccccccgtgggaggaaaaaacaacggcggggggcgcgaaaaaacaaagaggtgtgtccacatattattgtgggcgccccgccggtttataattaacacgcgagaacagtgctggggtgtgggaacactcttccgcccacacagcgtggagatatgtgggc

SEQ ID NO: 231760 - DNA, 1032 bp, Homo Sapiens
  misc_feature (102)..(157): n is a, c, g, or t
  misc_feature (359)..(369): n is a, c, g, or t
  misc_feature (537)..(545): n is a, c, g, or t
ggaagtgtcggcatacacaggctgaatccctgtataaagtagtgccaaactgatttcagttgtgtaactagtttaaaacccaataaatggattctttttacnnnnnnnnnnnnnnnnnnnnnnnnnnnnnnnnnnnnnnnnnnnnnnnnnnnnnnnntaataaatttaaaagagaacaccaaaccccaaaataatacccaatattttcttttttgcccccctcggccttgttaaaaattttctaaaccatttcgttgggggcggggccccccaatagtaaaggaaatgggggcatttacctcgttcccaaatgaaaatctgggcacataaaaatgaggtgctggagattcccacaatgnnnnnnnnnnngccccgcggggggacccgactggggtgtgttgaaaacgttccccaagatgggatgttttgaggagggcctttttctttgtgctgcttcccaacgtggggtgggcccatgtgggagtcttcttagtattttgaattttgacagcctgcggcactctggtgacacctccnnnnnnnnncacggtggtggaaaaatatctagatatgaacgctcttctctcctacattctgggaatgaacctgtgttcaccaaagcggagatagtgtttggtcgccctcttaataattcgcaaagataggaaggtatcagaatacgagtctcttacgataacaactattgatgagaaaataattttattctgcccccacgcgtggcatgcactacatcgtggggagtaccgagaagatgtgtgttcgacatatgtgtggaggagcggagcacgtctcgcaaaagggtacagacttgtggataaagactcgcctacagacatgtgtactgttgtgtccggtagtccagcacgacatatatgcattttctttcgcacgtaatgataacacccgcaggatatatatgaagtcgaagatgatgaacactgatgattatactgttcatcgaatgatcgagcgcactcggcgagctatgatattagcccggctaagagtgtc

SEQ ID NO: 231761 - DNA, 957 bp, Homo Sapiens
  misc_feature (275)..(283): n is a, c, g, or t
  misc_feature (455)..(469): n is a, c, g, or t
ggagcttacctctgcgaacttctatctggtattgaatcagtttcagaaacacagacagatccaaggaaatgtctctttataatgttcttaggatggactagacccataaatgtgccatgaatcaaaatattacataaatttggaaagccttttcatggctggttaagcccccctgaatgaaaatttcctccagccaatttaaacctggggcccaagccttccccttcccgggaatttttcctggggccggggccctttggtggggccaaacaaannnnnnnnnttgtcccacaaaaaaataaatattcggggccggccaggttatactaaattgagaagagaggccggacctctcccccccggagtgtggggagcccgatcttaataattttattctcgccttccgatatcgccccacccacccttcggaatgcatctgtttctaaccagtactnnnnnnnnnnnnnnntatgcccgcgcaattttataaacgcaacgagaagcatctttgctacgtgtatcagtggcgcgtgcttttcgcacgcccgggcccaccgcatgctcgattcaagagaggaggtgttggcgacgcttagttttctccccggtcgataccggtgtgatggatggccgggcgccacacagccgttcgggccgtaggcagagtgaacctctttcaagaacgtggaacaccgcctgcgcagcctctcatgaatgccggtgcccccgccccttcctaggttaatccggcccacacccgcccacctatatcacacactcagggctccctaacgagccttcgtagcatccactattatgtcctgcgggtcacacgctatccccgctatcgagcagcccggggcgcacatacacggtgaggcgccgctttcccattcattgcgcataccgcagaagatcgtagatgtcaccgcccacctaccccctcgcgcagccgca

SEQ ID NO: 231762 - DNA, 838 bp, Homo Sapiens; identical to SEQ ID NO: 33077

SEQ ID NO: 231763 - DNA, 912 bp, Homo Sapiens
  misc_feature (482)..(482): n is a, c, g, or t
  misc_feature (589)..(589): n is a, c, g, or t
  misc_feature (641)..(641): n is a, c, g, or t
  misc_feature (674)..(674): n is a, c, g, or t
  misc_feature (735)..(735): n is a, c, g, or t
  misc_feature (779)..(779): n is a, c, g, or t
  misc_feature (791)..(791): n is a, c, g, or t
  misc_feature (810)..(810): n is a, c, g, or t
  misc_feature (828)..(828): n is a, c, g, or t
  misc_feature (834)..(834): n is a, c, g, or t
taacgacaaaaacaacttaacacaaaaaataacgttgtaggttcgtctgggcgcctccgacaatctataaaactttactaaaccatccggcgtggggccccgggagccaatgaggataaggggtaccttgcggcatatcctgtgtccaatacgtggatcctggatcctggactctggtggcctgcgcttcctacgcgaattaaccaacactgcgccgacgggtccaccccaaaagccgcctgaaaaaaggcccaagtacggaaagttcgctttgcgccccgtttacttgcaactcctcgcgacgtggggggggttcgcatacatgtctgttacatgtattgcagcttcaaacacgtgacgcgacctttgtacaagtaaatcccgcggagggcgcgggttcgatgttatgtaccgttgatcgcgcacttatcctggccctgaaccttgggtagaaagacagtgcgagaaagggattgggatancgtttaataaatgaatgggcgatcggcgacagacgcaaaactgacatatgtgaccgctgtggggctggatacttaggagaattgctagaccgatttgtgagaccgantatcgagcatgactaccaatcgtatctgggtgcatgtacagatcaacaacantctatccgcccaatcgtgtaccgcagttatccncgcatcactgtatcttcaccagcacgccgtgaatcctcagcatcatctatatcatctcatngagccgttttttggcagccacttcttcatacgcgctgtgcgctntgcctcgtgctntgttcggtgccctcggttnatccatacgactaccctntattgngagggcaacaatttagtagacgtatgttcgcgtggagatttgaacactccagcgcgcagcagtagatcgacaatgcta

SEQ ID NO: 231764 - DNA, 865 bp, Homo Sapiens
  misc_feature (148)..(281): n is a, c, g, or t
  misc_feature (297)..(297): n is a, c, g, or t
  misc_feature (300)..(301): n is a, c, g, or t
  misc_feature (311)..(325): n is a, c, g, or t
  misc_feature (350)..(362): n is a, c, g, or t
  misc_feature (403)..(427): n is a, c, g, or t
  misc_feature (449)..(460): n is a, c, g, or t
  misc_feature (506)..(536): n is a, c, g, or t
  misc_feature (593)..(604): n is a, c, g, or t
  misc_feature (626)..(634): n is a, c, g, or t
  misc_feature (677)..(689): n is a, c, g, or t
ggggccttggtgagcaacaccagctgaactgtctgcggcagcgggggaccaggaaaacatcatgggatggattgggaaagtatacagtttttgaccagacattggtacgatcgactccaataaatgtggttttattataactgagagnnnnnnnnnnnnnnnnnnnnnnnnnnnnnnnnnnnnnnnnnnnnnnnnnnnnnnnnnnnnnnnnnnnnnnnnnnnnnnnnnnnnnnnnnnnnnnnnnnnnnnnnnnnnnnnnnnnnnnnnnnnnnnnnnnnnnncaaactgcacaggaanaanntttggtccgnnnnnnnnnnnnnnnagaaaaattttctaacacccttttnnnnnnnnnnnnnccacaacgaaaaagaagaacccggccaaaatcggtctctcnnnnnnnnnnnnnnnnnnnnnnnnngaggcccttggatttccccccnnnnnnnnnnnnccccgcggggggaacaagacggtggttttaaaagaaacagcgcaannnnnnnnnnnnnnnnnnnnnnnnnnnnnnnatctctctgcgcgggggcccgcgcacggggcactcccaataatacaatatgtgctgnnnnnnnnnnnntgttattgttatagaggggaannnnnnnnnagttatttttttaaaaaaacgctcttcgcggacagttgggaannnnnnnnnnnnnaagcgcggggggtggagagaacccgccgaatgcgcgcgcgcgggggctctcaaccgccccccttttgccgaccccgccggcaaaacaaataattttatgtccgcccccgagggaacagaaaacggagggggggcgaaatagaaaaacggcccctctcataaatcgggcgtcacaca

SEQ ID NO: 231765 - DNA, 871 bp, Homo Sapiens
  misc_feature (185)..(278): n is a, c, g, or t
  misc_feature (438)..(459): n is a, c, g, or t
  misc_feature (590)..(624): n is a, c, g, or t
  misc_feature (776)..(784): n is a, c, g, or t
ggtgaaagtgtatgtaatgcagtaattataacagattttatgaacaacaaaatacctctgctggcctgaggcaactcaggacaccacagtgggaagggaattcctggctaccattgatgaacatttggacatgtgtccaattttgggctattattaataaagcttatatgaatattttacacatnnnnnnnnnnnnnnnnnnnnnnnnnnnnnnnnnnnnnnnnnnnnnnnnnnnnnnnnnnnnnnnnnnnnnnnnnnnnnnnnnnnnnnnnnnnnnntaatttttgtggggcccgccctcgggccctcaaaaaatttttttaaaaccgattcctttggggcccgcgggccccccagaaggtaaagggaacactggggcccataacttgttttccaaaagaaatccccgtggccctggaacaaagcggttggaatttnnnnnnnnnnnnnnnnnnnnnncccccggtggggaaaaaacccgaaggggttttttaaaaaacaaaatccccaagagggggaagtctcccgcaagggccccctcaactggggatcccctaccccacaggggggaggtcccccgaggcggaagnnnnnnnnnnnnnnnnnnnnnnnnnnnnnnnnnnnggcactctggccaccctttttcgcgaagaagaaaccggggggtggaaaaactcgcccttaaaaggcccttttccccgcccccaatatttgtgtaaaaccctcatcttctaaataaagcggggtgttggggaggtaaaccccctcgggaacannnnnnnnnactggcgcacgaattctcatcgcgtcctcttggttcaccgctcccgtttgggggcattaataacaaatatgttgcggaaacaggggg

SEQ ID NO: 231766 - DNA, 509 bp, Homo Sapiens
  misc_feature (112)..(212): n is a, c, g, or t
  misc_feature (234)..(389): n is a, c, g, or t
  misc_feature (406)..(421): n is a, c, g, or t
  misc_feature (449)..(462): n is a, c, g, or t
gggactttatctcattcatgaagtggagacgacaccttggatcccatgccctccctctgttgctggactaactcatgaagctactactgtgtgctttgcttctcgcagaggnnnnnnnnnnnnnnnnnnnnnnnnnnnnnnnnnnnnnnnnnnnnnnnnnnnnnnnnnnnnnnnnnnnnnnnnnnnnnnnnnnnnnnnnnnnnnnnnnnnnngagccaccgcgcccggccgggnnnnnnnnnnnnnnnnnnnnnnnnnnnnnnnnnnnnnnnnnnnnnnnnnnnnnnnnnnnnnnnnnnnnnnnnnnnnnnnnnnnnnnnnnnnnnnnnnnnnnnnnnnnnnnnnnnnnnnnnnnnnnnnnnnnnnnnnnnnnnnnnnnnnnnnnnnnngagagagatgggggggnnnnnnnnnnnnnnnnaaaaaaagtttccaaaagacattttgtnnnnnnnnnnnnnnacccccataaaggaaaaagggaaaaaggggcaaaaaccctgtgttct

SEQ ID NO: 231767 - DNA, 514 bp, Homo Sapiens
  misc_feature (182)..(276): n is a, c, g, or t
gggatgccagtcagaatttgcatttccctgatagctaacgaggttgggcatttttacatgcttgctagctgttaggatatctttctttatgtaatatcccttcagatgtttgcatattgattaatccgactgtctttttccagttaatttttcctttgttgaataaatatgttgcaaatatnnnnnnnnnnnnnnnnnnnnnnnnnnnnnnnnnnnnnnnnnnnnnnnnnnnnnnnnnnnnnnnnnnnnnnnnnnnnnnnnnnnnnnnnnnnnnnngaagcgcaaaacccaaaaaagacggaacaggaggacaccaaaaaaagagaaggagggaagaagacaagccacggggaaagagacaagaaaaagccgccctggagggggggcgcggggccggcaacaaaaaagaaagtctagacgcggacggtcctcattgagtgcgggggcgcaatgccccccaagtacccgagcaagagaaaagccccgcggagtgcgaccacccggtgtgtgatag

SEQ ID NO: 231768 - DNA, 376 bp, Homo Sapiens
  misc_feature (77)..(128): n is a, c, g, or t
  misc_feature (193)..(209): n is a, c, g, or t
ccaaaacaataatgtaagacaaacgggccaaaaaggtaaccaaaaagagactgggccggccactaggagaggatggnnnnnnnnnnnnnnnnnnnnnnnnnnnnnnnnnnnnnnnnnnnnnnnnnnnnccaggaggggttttaaagagaaatcacatggagaattcttaaaagaaaatctacagaagacaacnnnnnnnnnnnnnnnnngccacgccccacaaaaacaaatttagcaaccacagagagtgtgaaagtccaagcacagaaacttcgggggaagaaattgaaataacctaataaaaaacaaacgggtataaagccctcagaaagaccgcaagggaataaacacacaaaagatagacaaacctgagaac

SEQ ID NO: 231769 - DNA, 854 bp, Homo Sapiens
  misc_feature (163)..(174): n is a, c, g, or t
  misc_feature (202)..(212): n is a, c, g, or t
  misc_feature (489)..(489): n is a, c, g, or t
  misc_feature (561)..(561): n is a, c, g, or t
  misc_feature (837)..(837): n is a, c, g, or t
catgtggggccgccctgcggccctcaggaaagctttcttagaccctttcgttttgggcggggcggccccccaggggggaaaggggaacgtggggccaataggtggttttcccaagggggaaaaccccgggggccatggggataaaaggggtttgtgggaaatnnnnnnnnnnnnaaaaagaaagaaaaaacccccccgcccnnnnnnnnnnnccgcccccccagaagggcggtttttgttttggagaaaaacaagaagccccgcaaaagagaggggaggattgcttcttccgggggagggggcgcgcctctacattatatccgtgggggagggagaaatggacatgattgaactaacaacgcacgcaaggaggggggggagagtatacaccgacgacagggccacaccggggcgggagagagcaaacgcccttccacaagagtgagtacgcatataaaacgggataaaagatgagaaatatgaggggcngggccccctgccacgcccgccggcacgtcgggaggggaccaaaggaatgtatataatcaagaaggaagaagnaagaagaaaacgcagaaaagggagtgaggtagatggccaacacagatgcttcccacgcgtacaacagaagaaacaatgtgagttctatttgccgactcgcacgccaaagaagagggaagaggacaagaaacgggataccaacaacagaaacaaagaggagggcggagtgagatgagaaaaagagaccatgagggaggagaagagcgccgcgcaggcggcagaaaaagagagacaaaacgagcacagagcgggcgtggcccgggctgcggaggaaanaaaaaaagatgtgtcta

SEQ ID NO: 231770 - DNA, 514 bp, Homo Sapiens
  misc_feature (98)..(343): n is a, c, g, or t
ggctctttcaacgcatctcaaaatttggcgtggatgcagatcacctacagagtatgattattcatctttacattgccttgttttgagggtctcactcnnnnnnnnnnnnnnnnnnnnnnnnnnnnnnnnnnnnnnnnnnnnnnnnnnnnnnnnnnnnnnnnnnnnnnnnnnnnnnnnnnnnnnnnnnnnnnnnnnnnnnnnnnnnnnnnnnnnnnnnnnnnnnnnnnnnnnnnnnnnnnnnnnnnnnnnnnnnnnnnnnnnnnnnnnnnnnnnnnnnnnnnnnnnnnnnnnnnnnnnnnnnnnnnnnnnnnnnnnnnnnnnnnnnnnnnnnnnnnnnnnnnnntgagccaccatgcctggcctattactgatatacaaatagtgttttgtatattgttttcacttaataatgaacatcctttctgtatcagcaaatatccctctgcttcctccttgatgactgcataatactcgatttgtcttattccatattaaaccaatatcctacggttcc

SEQ ID NO: 231771 - DNA, 797 bp, Homo Sapiens
  misc_feature (60)..(73): n is a, c, g, or t
  misc_feature (160)..(190): n is a, c, g, or t
  misc_feature (345)..(345): n is a, c, g, or t
  misc_feature (572)..(572): n is a, c, g, or t
  misc_feature (744)..(744): n is a, c, g, or t
ccatttttgtggggcccgcccctcccccccaaaaaaattgttttacaaaatcctttattnnnnnnnnnnnnnnccccacactgaaacagaaaaccgaaggcgtacagtgtatcctcaccaaaaaaaacccggaagaaaggaaaacaagggtgggtgcttnnnnnnnnnnnnnnnnnnnnnnnnnnnnnnnggggggaacacacacgagggatgccctgagaaaacacaacaactctggacagaatacttcttcacgggcctcctaccctctaggggcggcatccctcccgctggcgcggggctcactccccaccgcacgaccccccggtgtaatcacaaagcacnacaccgccgccactcaacccgcccgcacgtctcccccctctctcgccgacgcccaacacagtcgtgggcgacccaccacctccggctagataggagaagagtgtgttatgcgacacacctgtaagtgggataacaatacacctctcccctataaccacacctgcgcgacgcgtctcacacccactcctctctacaaatccccccccgcgcatcgcggttcgcatatncatccaccgtctgctgagtctgctctgccgtgtgcggagcgaattaaccactactttctgcgccaccgctccgccccgactaacaacacggcgcgcgggcacaccaaaacaagactgcaccccggcacagatatacgccaccccaacactatcaacctctccctccgcgccncgcggtgcgccactcgctcactcttccgcgaagcaaaacctgcagccgagacg

SEQ ID NO: 231772 - DNA, 892 bp, Homo Sapiens
  misc_feature (366)..(366): n is a, c, g, or t
  misc_feature (585)..(585): n is a, c, g, or t
  misc_feature (604)..(604): n is a, c, g, or t
cacagaaaaaggaaaagaaacaaccctgtccggccgccctcggcccctcaagaaacctttcctagacccattcgtgtgggccccggcgggacccagaaagggtaaagtgaaccatagggccctagcctcgtttccctaagggaagatccctggggccctggaactaagggccttggcaatctctccccccaattaaaaaacaacccccccggggggggcaaaaccggcaaacggttcctcgaaaaccaaatccacaaaaatgggaaggcattctcggaggggtccaatttaccttggggaattctataatgcaaaacaagggggacgcccaccatcacccggaggcgcttccgaaacattcatccnagatatataatggaggcccgccggagcaccttgtgggaccacacttttctctattccgctacaaagagaagacagttggggggtcgggcacaaatatctctcccctgtttagagacgcccatttgctcctttgggcgcgcgacaaaaactggggggagaagagagcgcctatgttccacccgtatatcagtgcgcccccactctgagcatgaggataantcctgtggacaaaacaccncgtccccacgtggagagcgtaatttcacagaaaacaagcccttttttggtcccggccccctcgggcgtcgggatatgtaaaaactattttcggccccccactggggctcgcgcaagataaccgcggtgtgggcgcgtaaaaaaagacagagcttggtgtcaactttattttgggagcccccgcgctcttctcataaaaaccccaacaaagcgcggggggaagaacacctccacccccgcaccgggcaataacagctgctcgtagaaaccacccaaaacaccactctct

SEQ ID NO: 231773 - DNA, 1185 bp, Homo Sapiens
  misc_feature (481)..(535): n is a, c, g, or t
  misc_feature (836)..(836): n is a, c, g, or t
ggggccccaaatgtccgtggaaccggccccactaacctgcatccagctgcctcttccacctgggccctgctctcagatggaagtgtcaccaaacacccagatcgccgtgctcctgcttctctgggcgcctggcctccatcacagcatgcccactctgtgcccgctgcaacctcctctgactctcccactagaccggtgcctggtacacatgctcctgcgtgcatgaacatcgggcaactatgggtcctcaggaagacaaaagccccctgctcctgtgccctccggggatctgcaccagcactgggctgaacactctccctgcaatctgtcagtcccccccttctgtacacattttctttctggcaacagcggttggggggcctttaaaagtgtcttttagaaaggcccacgccacaacagttcgtaattagcaaggaaaagaccccgggaggggccagcctacaggacccatcaaaaaacnnnnnnnnnnnnnnnnnnnnnnnnnnnnnnnnnnnnnnnnnnnnnnnnnnnnnnngcgcgaagtggcgaggatttctgagcacagcgtcaggctgatttttttcaccttaggggcaggagttcccacttgggccccacccacacaccacacggggcatctgtgggaaaatatctccctccacccacacaagtgaataagacagaaccctcccctccacgcagtgctcgtcggcgaaatccggcgagcgaagtcatggtttctctgggaaaaatacacacaattgacgacagaaaatagaatcaaagtgttctttttggacaagcgcctccctcttaaaactgcgggggagactccntcagccacacgccgaccagggtgaggacgcgccgcaccatgacgcctaggggctctccgcggtagttttctcccgtggctgtggtatggtttatatctacatgcgtcgaatttaagagtatattttccaacttcacccccaccgcggtactcgtccacctaacacaaacgcttcggtgttacacaccacacaacatttttcttctccccctacaaatacaaataaaagcgtgcaatctaccgtggcgaaggggccgtcgtagacgaggaggtacgggggtgacacttcctactctcgttggagcgtgatctgccacgatcggttattcactgaagacctggggagggtg

SEQ ID NO: 231774 - DNA, 971 bp, Homo Sapiens
  misc_feature (400)..(416): n is a, c, g, or t
  misc_feature (441)..(441): n is a, c, g, or t
  misc_feature (486)..(527): n is a, c, g, or t
  misc_feature (542)..(551): n is a, c, g, or t
  misc_feature (600)..(600): n is a, c, g, or t
  misc_feature (759)..(759): n is a, c, g, or t
  misc_feature (860)..(860): n is a, c, g, or t
  misc_feature (862)..(862): n is a, c, g, or t
tatgccggaagaatccctttcaaccccggtacggccccacagctccagctgagtcccaccatttatgcgcacccccacctcccagcgcttgggccgcaccgaagccttggactcctgcctttttgtaatacccgcggccaccgtccattacgtgtcccgtcgagctgctacaccaccaaattaatctttgttcccccgccgcgccttttaagtctcttccgccccgataaacccctcgctccttaaaacaccaccccaccccggtccggtggtagtgattattccccgcgggccgcctctccatagccgccacacgggcccctacggacgtagtcaataaccccctttgtgcggtgtgccccgcagcccccaagggtctactgtttgtttcccttcccgnnnnnnnnnnnnnnnnntccgtgtatatataaatactgtatncgacgccgggggagaacaaaccataccgtttaaataatttttttnnnnnnnnnnnnnnnnnnnnnnnnnnnnnnnnnnnnnnnnnnacttcctattttcgnnnnnnnnnnaaaagagtgtatatacgggccctcccttccccgggcgccccccgggggngtcaatattgcaccgataccggccgctccctcgtttttttgccggaacaacaaccgaacaacccctgtttctacaaaacttcccgcgccgacgtttttccattcgatggaggagggtgaatatgcccgcaccacgggggcgggaacttcgttttattcngctcgatagaggggcggcgagaagaacataaaaatttcgtcgattgcgctttccggcatcggcgggccgcgacgcgcccgtaaggagtcgccccctctaantnaaaccttagtcgatctctagcagcgcgcgcccgcccgccacccccacgcctcttcccaatctctcgctatattttatggcatattcccctgtgctataaacacttaccg

SEQ ID NO: 231775 - DNA, 1311 bp, Homo Sapiens
  misc_feature (692)..(692): n is a, c, g, or t
  misc_feature (1090)..(1090): n is a, c, g, or t
  misc_feature (1224)..(1224): n is a, c, g, or t
  misc_feature (1245)..(1245): n is a, c, g, or t
  misc_feature (1276)..(1276): n is a, c, g, or t
  misc_feature (1278)..(1278): n is a, c, g, or t
gggggaaagatttgaggaggctgggaacctcctggaaaaccactccttgaagaaagatatgagagacatttagaagtgattcctgctttcagaaggaggcggattcaaatacatcaaaagtcccttcctctgctaagtgtttatagttcaatgaataatttcaatatttgtatgtgttcttgtcattttatttttttctgaaaaacttccacaaatttgaaaataaaattacagtcttttcttcttaacgggcggggacaaaacgagcgagaagatcaataaataacccgcgtttcccctcgccccccctcttcacgatgatttaccccaccccgccgttgcgcgcgcgtggagtgagcggagacgccgactttccaccatcggcggatacccgccagcccgtaccgcgtgcccgcggccctggcgttacgcccgcggataaacgcgttttccgcgcataacctatgctcgccccgcctcgcgggcatctggttccgcgtcggtgaagaaacaccccgcggcgacacggccgggccgtggcctaaaagagataactggcgcatccccacacaccacaccacggtgttttgcccggctcccacccccgcctcataaataaaccacgccgccccccattggtcgcgcggccgcctcgcgccgcccggacttctattcatcccaccacacgacgngtgtagcggtcgtcgtgtcgcctccccccccgctctctcacaacaggcgttgtctgcggcttccacgagattatgagcggagggggaggccgcgtacagccccgcgacacctagatcaccacaccccacgtgcgcgggcactgtgccagcactcctccatctcatatctggggataaagagcggccctccacgcccgcccgccgttgctttcatattttttttctccccgccgctcggtgcttgctttcccgccacacaccgccgcgcctgagttataacaatcacatccgtagtgagtcagcacccccgcgcggcagtagaccggcaatttatgaggagtagtaggcgcacggtacgcatcgctcgtacccatgtgacgcaaggtcgacgcggcctnacttactaggtgactgacagcgggatgggtgtgtcgtcacccggtccgcgccccaccacgcccatggtgatatgacgtttcactatagtcctagacagacgtactcgtatttgcccacgggtctctgatgctanacacccacgctgttgctccancgttattacccataccacaagaatgacgagncncccctctattttattacacagcgacgccacggg

SEQ ID NO: 231776 - DNA, 882 bp, Homo Sapiens
  misc_feature (639)..(647): n is a, c, g, or t
ggaccctgcctttctgacttactatgggcttactctattactgactttgctggtcttttctttctcaagaaatcaacaattaatggatctgttcctttatgactttggagttttgtataatattaggaaggccttccccaccattaagatgatttttttaaaatcccgtgttttcttctaccatttccatggatatatttttgaggcttgcattgtttttcaaatcccgaacttttgttggaggttgttgtaacatgtacaatatatattccacatttggccaaatggcggccttattgccacaacatcatttcctgaaaaatccatttccctcccaactgattgaaaatagaaagtcaaaattatataggttctcatatgcatatgtcactcttttataaattcttatgtggccctatacctaatataaatttacatatgcgaggaaattcattaagatttctgccgaaatggacgtgtctcgccgcctcggtccatcaacaagatttcctaaacgattctttttgccgtggcgggccctggcaaagtaaattgaaccctgggcgataacatgggtccctaaaaaaatccctgcccattgagctcccgcctttgaaactccccaacccggtaaaaaannnnnnnnnggggagtttgcccgtggcgccccaaaaaaccaattcccccaggggaactcccttagggggaataacggggcaccgttttctccccgggaaacccaagcccaaacttccgagtataaaaattaggggccccaaaacctggcccgaataattcggggggggctgtgtcgccatcccaattaaaggaataacacgccctccccgggtacaccccctgcgaaaaacggggggtaaaaaa

SEQ ID NO: 231777 - DNA, 655 bp, Homo Sapiens
  misc_feature (215)..(225): n is a, c, g, or t
acaaaaaaggcacaaagataaaaacccccgcccacaaaccacacaatcgggcagcgacttgtgcggccgccttcggcccctcaagaagtttttctaaacacattccttttgggcgcggggggcccacttagggaaaggggaacatgggtccttaggctgcttccctaagggaaatccctggctcatggattaggggccttggaattctccccccnnnnnnnnnnncccccccggggggcacacccgcaccgtttcctggaaaccacaccccagaagggggagtttcctggaggggccaattaaattggggatcgctatccaaacgggggaggccccaaggcggaggcctcccgactattcaatatttaccgccccccggtccccggccccacctcattcggaagaaaatgtggtgggaaaattttctcgcacgttttttcggcccgaaccttggtagacgcccctttcccaaaaccggccatgtgattagacaccccgaaatcggccgcggggggctctcaagcaccccttttgtcccccctcgcccgaataaatattcttgccccctcgccgcgacaacccggggggcacaacaaaattttggccaatattgggccacctctgtaaaatataaaaggggcgggacatctccccc

SEQ ID NO: 231778 - DNA, 635 bp, Homo Sapiens
  misc_feature (97)..(180): n is a, c, g, or t
  misc_feature (205)..(218): n is a, c, g, or t
  misc_feature (251)..(260): n is a, c, g, or t
ggattctacaagttttgagttagcattacattttaatatttactattgctacattgtataattgagtttgaaataaaacccagcttatgacaatgcnnnnnnnnnnnnnnnnnnnnnnnnnnnnnnnnnnnnnnnnnnnnnnnnnnnnnnnnnnnnnnnnnnnnnnnnnnnnnnnnnnnngaaagtgaacatgcgtcaaacctgnnnnnnnnnnnnnncctggtcctgactagccgcttggattaataacnnnnnnnnnncgccctggtggcaaccgacccggtgaagaacaagtccaggatggagttctggaggtccttactgagatctatcaaccggagtccatgcgaggctccaaaacaaataacgccggggggctgacactcatcttctgaactgtatgcacatgggttaccacgtaggtgccgaaaatggaatattcatccccaaacccggccgaatgaaacctggaatcgtgtagagagtctcctacacccttgcttgcccttgcggaataatattctcccccctggaagaaaaacaccgcggatatagacaattgtccccatatgggcccttgggcgccaaatggaaaaccgggagggggcctccagccccgggaattcggccggcgg

SEQ ID NO: 231779 - DNA, 1216 bp, Homo Sapiens
  misc_feature (159)..(220): n is a, c, g, or t
  misc_feature (320)..(332): n is a, c, g, or t
  misc_feature (987)..(987): n is a, c, g, or t
  misc_feature (1088)..(1088): n is a, c, g, or t
  misc_feature (1128)..(1128): n is a, c, g, or t
gggccatgatagtgtcatagtgcaacacattactcatgtgtttgtggtgatgctggtgtaagcaaacctgtgctaccagtcgtgtaaaattctagcacacacggttatgtatagttcataacacttgatcattataataaatgattatgtcactggtcnnnnnnnnnnnnnnnnnnnnnnnnnnnnnnnnnnnnnnnnnnnnnnnnnnnnnnnnnnnnnnccaataattcagagaacgcaaacgaaccgaagaaacaccaaaacagagaatgaatactaacgcgcgtctcccccccgcccaaccataactgtcttttctnnnnnnnnnnnnnaaatacccacccttatatttgcgcttgcggttttccccctagagcgtacacgaccccgggcttagccacccccgcatgcttgcgctaacccccggcttatccccgcaaaggcccaaaaacaagactccgccgcctaccgcgtatcctctcgccggatgctgcttggcgctgcctcgccgccccggccaatgttcctatcttaaaggtgacgccagcgacccctccctgaacgaaatattatgggcggcacccgcgccccatattaccatcccgacgcccccgccgcatatttctcgcgccgccctccacgcacgcgcactaatatacgacccacgcactggtctgtatgttgattcttttgttaccgccaccgacaccgccgactgctcagagggcacgtaagataccccactatctcacaaagcgtgtgtactctccatcgacgcgttccgtttatgtcgctccccccacccccttgcactcccgtccttcctcgcgttgcattcttccggcgttacgtcaacctcacattccttgccacgtttattattatttttgtcccccgcgcctgtgttatctgcccactccgcgcgcgccctctattatgttttcgcaccttgttgctgcccccgccgccgaagccgctatagacacntcctccgccgccacaacaagctggtcatgcagcagcgtcttcctcgtcatcccgtctgcttctaaccctccctgtccctccctgagcacccaccccccccnttaacctgtgcgatttcgtctgccatcccatatgtccacnccatacgtactgggttggtacccccgctctacgtggccgatcaccattaaaaaacgtgtggcgactgttatggtgtatcaacgaccgc

SEQ ID NO: 231780 - DNA, 319 bp, Homo Sapiens
  misc_feature (48)..(108): n is a, c, g, or t
  misc_feature (180)..(188): n is a, c, g, or t
  misc_feature (211)..(274): n is a, c, g, or t
ccccgagggcattaagggaattttaaaaaagaccccaaagaaaacttnnnnnnnnnnnnnnnnnnnnnnnnnnnnnnnnnnnnnnnnnnnnnnnnnnnnnnnnnnnnnccctttcccgccaactgtaaaacccaatccaaaaagggagtgtgaaaaaacccttaaaccccgcaaaggggnnnnnnnnncccccttgaacgccccactgggnnnnnnnnnnnnnnnnnnnnnnnnnnnnnnnnnnnnnnnnnnnnnnnnnnnnnnnnnnnnnnnngaatatcgccccccacaaaaataatcccgccccccgccttattat

SEQ ID NO: 231781 - DNA, 1000 bp, Homo Sapiens
  misc_feature (76)..(183): n is a, c, g, or t
  misc_feature (551)..(560): n is a, c, g, or t
ggacagggtggttgacatcagttttcttcaggttactttttaataatgattaaaacggggaacttcattatcatgnnnnnnnnnnnnnnnnnnnnnnnnnnnnnnnnnnnnnnnnnnnnnnnnnnnnnnnnnnnnnnnnnnnnnnnnnnnnnnnnnnnnnnnnnnnnnnnnnnnnnnnnnnnncaattaaaattgatccgtgggcccggccgggcaaagaaacttgacaaaaaattgttttcaaaggatacccctggaagtggggagcgctgggattcacacgaattaaaaacgcccggggtcaccaaagggggttggacctttcccaatggtgttctgcggggtctttaaagaattttccgggaggaatcccaagggggctcaagatgaatttaagtccaggttcctccccagtcgttaccaaaaaatggtggaaattattttaaacttttttccccagattcggaccccccgccgaaaacctgtcaaaattgaaccctggaattcgccccacaaaaaaataaagccccctttgaacgccggttgggggnnnnnnnnnntttacaccacatgggtgggaaaccaagggggcggcacaaatagggagcgcttcggaacaaaaaaatttgggccccaaacctctgggaaaacataaaaatctaggggggggaaaaactcaattccgaaagcgcataccggcagggagagacgcggcaataaaccaacagtctcccggttaaataccccccctcagggggaattttggggcccaaacatctgtccaccgtttttttataccgcaaaaaacgctgtttaacgtaataaggggaatttacagttgtgcatgaaaacaccgccggaagaaatttccgcccccaaaaccctctctaaaaaccttttccaagaatgctctccgggggaactccttgcaaaaaaggggggtaaaaaacggtccccgtttaaccccttgttcaccgggtttcctatggggcaaaaagaa

SEQ ID NO: 231782 - DNA, 608 bp, Homo Sapiens
  misc_feature (89)..(233): n is a, c, g, or t
  misc_feature (246)..(257): n is a, c, g, or t
  misc_feature (283)..(292): n is a, c, g, or t
  misc_feature (353)..(414): n is a, c, g, or t
  misc_feature (484)..(492): n is a, c, g, or t
  misc_feature (540)..(566): n is a, c, g, or t
ggggcgtgcggcggggcggggcatcagaactcaggtgttttttatttacgcgtcagggcttttcttgtttaataaagttatgatagctnnnnnnnnnnnnnnnnnnnnnnnnnnnnnnnnnnnnnnnnnnnnnnnnnnnnnnnnnnnnnnnnnnnnnnnnnnnnnnnnnnnnnnnnnnnnnnnnnnnnnnnnnnnnnnnnnnnnnnnnnnnnnnnnnnnnnnnnnnnnnnnnngctgtgggggggnnnnnnnnnnnntaaaaaatttttaaaaactttttgtnnnnnnnnnncccccaaaggtaagggaaagggggcttacttttttccaaaaaaactccgggcatgaaaagnnnnnnnnnnnnnnnnnnnnnnnnnnnnnnnnnnnnnnnnnnnnnnnnnnnnnnnnnnnnnnggggggcccggggggcttccggggtctttttccaggggtggccccgccgcgcccccaaaaataaaatttnnnnnnnnngtgggcgtattttttgaaaaaatgggggggaatcattttaaacacctnnnnnnnnnnnnnnnnnnnnnnnnnnnacacggggggggagaacactcgaacgcccccggggggattaa

SEQ ID NO: 231783 - DNA, 568 bp, Homo Sapiens
  misc_feature (49)..(156): n is a, c, g, or t
  misc_feature (203)..(212): n is a, c, g, or t
ggaagcattagaacaaaccatgctgggttaataaattgcctcattcgtnnnnnnnnnnnnnnnnnnnnnnnnnnnnnnnnnnnnnnnnnnnnnnnnnnnnnnnnnnnnnnnnnnnnnnnnnnnnnnnnnnnnnnnnnnnnnnnnnnnnnnnnnnnnttgccgccccccccaacccaagaaaactttccaaaacaatccttgtnnnnnnnnnnccccggtagcaaaagaaatggtaatatctttttatttgaaaatcgggctcatgaaagaggctcccatccccccaataaaaaacccccagacggagaccaagaatttgtgacgaaccccaagggaataaaaaagcccttaacgggactctaccggccggaacccaccccgagtaagaatttcaaaagcactcccccggcgggggacaaaaaaggggaaaaagtggggggaaccttcataaaaattcttgttcccagacgggggaaacccccctccaaaaagccggggtgataaaaacctctgaaacctttctaaaggggagaaatcagggacaccctttatcccgcaactggggcct

SEQ ID NO: 231784 - DNA, 527 bp, Homo Sapiens
  misc_feature (93)..(280): n is a, c, g, or t
  misc_feature (290)..(304): n is a, c, g, or t
  misc_feature (378)..(475): n is a, c, g, or t
ggaaacgaggcaagagagttaacttgtctagctggcgttaagatttcttccgtatgcaagtctaatggaaagtgaaaaccaagaaaaaacccnnnnnnnnnnnnnnnnnnnnnnnnnnnnnnnnnnnnnnnnnnnnnnnnnnnnnnnnnnnnnnnnnnnnnnnnnnnnnnnnnnnnnnnnnnnnnnnnnnnnnnnnnnnnnnnnnnnnnnnnnnnnnnnnnnnnnnnnnnnnnnnnnnnnnnnnnnnnnnnnnnnnnnnnnnnnnnnnnnnnnnnnnnnncgttggccgnnnnnnnnnnnnnnnaaaaaaatttttcaaaacatttttgggggggcgcggcccccaaaagaaaggaaaaagggtcataatgttttccnnnnnnnnnnnnnnnnnnnnnnnnnnnnnnnnnnnnnnnnnnnnnnnnnnnnnnnnnnnnnnnnnnnnnnnnnnnnnnnnnnnnnnnnnnnnnnnnnnccttttttgggtctttaacaagggggtccccccgaggttttatttaaatatt

SEQ ID NO: 231785 - DNA, 704 bp, Homo Sapiens
  misc_feature (103)..(291): n is a, c, g, or t
  misc_feature (295)..(303): n is a, c, g, or t
  misc_feature (315)..(324): n is a, c, g, or t
  misc_feature (353)..(443): n is a, c, g, or t
  misc_feature (507)..(507): n is a, c, g, or t
  misc_feature (537)..(547): n is a, c, g, or t
ggggcagggagcagccggccagcccctggccccaggacctggctgccatactttcctgtatagttcacgtttcatgtaatcctcaagaaataaaaggaagccnnnnnnnnnnnnnnnnnnnnnnnnnnnnnnnnnnnnnnnnnnnnnnnnnnnnnnnnnnnnnnnnnnnnnnnnnnnnnnnnnnnnnnnnnnnnnnnnnnnnnnnnnnnnnnnnnnnnnnnnnnnnnnnnnnnnnnnnnnnnnnnnnnnnnnnnnnnnnnnnnnnnnnnnnnnnnnnnnnnnnnnnnnnnnaaannnnnnnnncccccgggggcnnnnnnnnnntttctaaaactttttttggggggcccggnnnnnnnnnnnnnnnnnnnnnnnnnnnnnnnnnnnnnnnnnnnnnnnnnnnnnnnnnnnnnnnnnnnnnnnnnnnnnnnnnnnnnnnnnnnggggggaaccgaggcctgggaaaaaaccgagggggggctcgggaggttcccggggctttacccnagggggaagaaggggggtcatataaaaaannnnnnnnnnngggcaaattttaaagagggggggaaaaactttaacaccccgcgcgcaggggaaccctccccccacgggggtaaaaatatctcacaaggcgccgagaggaaaccccccccgggccgcctgtcataaaaaaatctccccccgggaaaaagagggggggg

SEQ ID NO: 231786 - DNA, 628 bp, Homo Sapiens
  misc_feature (262)..(439): n is a, c, g, or t
gggagcggcggagctggctgctggcctcagttctgcctctgtccaggtccttgtgacccgcccgctctcctaagggagcgtgtcctggccccctcccgcagcggctcggaaaaaaggcagcaccgcgtcgttgacggcgcgggctctggactcgctgcttggtaaaaaccttcctcttcctccagtgcgggacgcactctctggtatctcttttgacctcccggaggctttcctttgtcggtcgcggcgccactgtactatnnnnnnnnnnnnnnnnnnnnnnnnnnnnnnnnnnnnnnnnnnnnnnnnnnnnnnnnnnnnnnnnnnnnnnnnnnnnnnnnnnnnnnnnnnnnnnnnnnnnnnnnnnnnnnnnnnnnnnnnnnnnnnnnnnnnnnnnnnnnnnnnnnnnnnnnnnnnnnnnnnnnnnnnnnnnnnnnnntctgcgaaaagagaaggcaagaacaaaatctactaccttgtcggcccgcctcggccctcaaaaaactttcaaaaccatttcgtttgggcgcgcggggcccagtaagggaaaggaaattgggtcaatagctggtttccctaagggaaatccctggaccatgacctagcggcttggaattctcccccaaat

SEQ ID NO: 231787 - DNA, 605 bp, Homo Sapiens
  misc_feature (78)..(225): n is a, c, g, or t
  misc_feature (232)..(245): n is a, c, g, or t
  misc_feature (318)..(338): n is a, c, g, or t
  misc_feature (356)..(416): n is a, c, g, or t
  misc_feature (467)..(477): n is a, c, g, or t
gggatatttgtaaaaattcccccaagagccgcatatgaatctgccctttaataaagcattattgagattgctggcctnnnnnnnnnnnnnnnnnnnnnnnnnnnnnnnnnnnnnnnnnnnnnnnnnnnnnnnnnnnnnnnnnnnnnnnnnnnnnnnnnnnnnnnnnnnnnnnnnnnnnnnnnnnnnnnnnnnnnnnnnnnnnnnnnnnnnnnnnnnnnnnnnnnntgggggnnnnnnnnnnnnnnaaaaaattttttaaaacctttcttgggggccggggccccaaaaggaaaggaaaaggggccatattggttcccnnnnnnnnnnnnnnnnnnnnnggggttgggatccccccnnnnnnnnnnnnnnnnnnnnnnnnnnnnnnnnnnnnnnnnnnnnnnnnnnnnnnnnnnnnncttttcggggttcctttaaagggaggcccagggagcttcaatttaaatttnnnnnnnnnnngtgctttttttaaaaaaaggggggaaattccttaaaccctctcggcccaagggggaaacccctcccaaaggggggtgggaaaccctgattcccccagggggggttccgccccctttggcgcccttggg

SEQ ID NO: 231788 - DNA, 1016 bp, Homo Sapiens
  misc_feature (288)..(296): n is a, c, g, or t
  misc_feature (416)..(427): n is a, c, g, or t
  misc_feature (475)..(491): n is a, c, g, or t
ggtacttcaccttcaagttaagatgtaaggttttgtgctgtttctggcgagctgctgaactggcaggaaaggaataaaccagaaacaataaatcagaagcaatttgcttcttccctcatttcatgctcttcctccagcaaccagcgaaagagatcctcacatagaggccttttatttgagatcttttcacatcctgaagggagagagctggagaggtttgacctgagagagaagtgattatttccaagcctcaggaaaaaatgaaataaaatctgctaatagcaaccnnnnnnnnngtcagaggaatcagaacgaggatatggcaaatggtctctttgactaatcacccaaaaaccaaccaacttaaccagattctatttaccaaaacaaggaaataaaggcttactttccccacnnnnnnnnnnnntccttgctaaacaatacatgttcgggcgactttgggccctccggaggnnnnnnnnnnnnnnnnnaaaattgtttttcaaaaacactattttgtgacagggcaaccccgccgcaaaatttagggttcacacggagaactcccgggcctctttcaactaaaagagacttgggtgttccccacacccagagacagggagtggctctcccgccccgaaaaaaacagaaaccccccctcgggagccacactccacgcattgggtcaatataaaaaacgcgccctatagagggggatctctgacagacgactttctgtggcgacaatctttgaactccggacgtagtttccagcgcgaagggtgtccttttaactaaaaacaaatcccactccctcagagccagtagccttactacaagacgcatatagacgcgtgtgctcttttcttaactatgcaacacctcctctcccctcacagctgggtatctacctatcaacccgcgcgaatttcgtctgaagatccataaaaccattccacacccgctcgggtgacgactcccggaacacatatatataatctctcgcgaagaaaata

SEQ ID NO: 231789 - DNA, 631 bp, Homo Sapiens
  misc_feature (58)..(92): n is a, c, g, or t
  misc_feature (141)..(291): n is a, c, g, or t
  misc_feature (301)..(314): n is a, c, g, or t
  misc_feature (354)..(483): n is a, c, g, or t
  misc_feature (535)..(543): n is a, c, g, or t
ggatacttgagtggaatcctttcctcacatactcccacagacgtctgggcctggaaannnnnnnnnnnnnnnnnnnnnnnnnnnnnnnnnnnagaaaaacaccacttttattatgtacaataaaatatttcattagcttgnnnnnnnnnnnnnnnnnnnnnnnnnnnnnnnnnnnnnnnnnnnnnnnnnnnnnnnnnnnnnnnnnnnnnnnnnnnnnnnnnnnnnnnnnnnnnnnnnnnnnnnnnnnnnnnnnnnnnnnnnnnnnnnnnnnnnnnnnnnnnnnnnnnnnnncttggggggnnnnnnnnnnnnnnaaaaaatttttaaaaacttttttgggggcgggggcccccnnnnnnnnnnnnnnnnnnnnnnnnnnnnnnnnnnnnnnnnnnnnnnnnnnnnnnnnnnnnnnnnnnnnnnnnnnnnnnnnnnnnnnnnnnnnnnnnnnnnnnnnnnnnnnnnnnnnnnnnnnnnnnnnnntgtttgtgggtttttccaaaggggggccacaggggtcctttaattatatttnnnnnnnnnggggaattttttgaagtagggggaaatatctaaaaaattcccgccgccggggggaccccccccaaagggggtgtggaaaacacttaat

SEQ ID NO: 231790 - DNA, 1171 bp, Homo Sapiens
  misc_feature (449)..(512): n is a, c, g, or t
  misc_feature (674)..(674): n is a, c, g, or t
  misc_feature (1086)..(1086): n is a, c, g, or t
gggactctccaaaaagcagagacagcaggaagaggggagtggaggcagcccattcacctggggaaatgactgggttgtcgatggacggcggcggcagccccaagggggacgtggacccgttctactatgagactatgagaccggtcgcaatgggggcctgatcttcgctggactggccttcatcgggggggtcctcatcctcgtcaacagaagattccgctgtgggggcaataacaagcgcaggcaaatcactgaagatgagccggaacagcagccttcggcgggcccccccactcgcgttggggcgcacctgcgaaaccagggcagggcccctgccgcggggcgccctctcctgttctccccaggggctataaaaaccgcgcgcgccgcgttctccggccccggcccccttcggggccggaggacggtacaaccccgcgccccgccgnnnnnnnnnnnnnnnnnnnnnnnnnnnnnnnnnnnnnnnnnnnnnnnnnnnnnnnnnnnnnnnncgtgtgctggcctctgggcaaacacacacacggcggccgcgccgaggaaaccctgggccgcgggcgcgccgcgccgtccggcgtgggcgcggtaggtggatgggttcggcgcgcgcgcgcgttgtgaggggcgccggcgagaggcggccgcttggcctgctntgtcgccccacctgcgtgcgtgtgcgcgagtggtaagcccgggcgagcgtggcgctggtggcccggagcgagacgggtggatgacttcgctcccccgcaatgcataccgcgcttttttgtcctgtcccccctcgaggatatggttgcgccgacccgcgagccgcgggctatcgtgtcgcacgccgcgccacgcgcggcggctaggagtgtgcgcgacgcggcatcgctgcccagtgactcgcgtcgggtacccgcagtgtgggatccgaggcggccgagtgtcggcgtgtgcgaggcgcctgccacagacacgctcgttcgcgggcgtgcgcgaccgacgcctgcagcccgacatggtgcgatcgcgccgaggggacatacgcggtggaggaggccgcgcgtgcgccccgtntcggagtgtggggccagcactcccagcgcttcgcccgactcgccggctctgagctcgcatgccgaccctatgtcgacggaccccc

SEQ ID NO: 231791 - DNA, 1144 bp, Homo Sapiens
  misc_feature (45)..(212): n is a, c, g, or t
  misc_feature (639)..(639): n is a, c, g, or t
  misc_feature (943)..(943): n is a, c, g, or t
cttccgtcaggactaaggtacttatacaaaagtatttacggcctnnnnnnnnnnnnnnnnnnnnnnnnnnnnnnnnnnnnnnnnnnnnnnnnnnnnnnnnnnnnnnnnnnnnnnnnnnnnnnnnnnnnnnnnnnnnnnnnnnnnnnnnnnnnnnnnnnnnnnnnnnnnnnnnnnnnnnnnnnnnnnnnnnnnnnnnnnnnnnnnnnnnnnnnattattctacgggtgagccaaggaataagccccttgcacacggcggctccgggtaagggccgccgattaagaacgcccactagcggccgctagggcactcgcacggacgcggcgcggccggacagactgagccgccctcgccccccgctgtcaccaagaacccctccaaggcgcctgatggccgatctcttctcggccgcccgccaccccactgccccgcggggaggccacaccttggtcgcgtgaagctcagcagacccgccgcggccgagcccctcgtgatcgtggctcgtcgctgcaggaagtatggaaacaggggttactcactcggggagagcgtgaggcccacgcgagattagagaacgtcaccagttgcgcgcgcgaaatggggaaaccagtatcgacgtacgacttggcgaatcccccntctcccccccggaacctcatcagccttctaggcacgcgagtgactagtcgacatccggcgcgcacatagcgtcacgggctctgacggccgccctgcgagtcgacacccgcccccgcgcgcgccgcgtggtatccccgcagacatactccggtggtgccgcaggcgctcttcgcgtgtgtcagtgtggcggagcgcgtcgtgaccaatgttcgaacaacgcctcgaggccgtggtgcgcgttgtggcctgaatgacgggcacacggtggggcacgtgcgcgtcgcgcgaccccgcgtggtcgccnctaccacgccaaagcgcacccacacgcgcgtactctccacccacccaaaccgcatgatctccccgcctaccacctgttctacgtcatacccacgccgccgccagtcaagagcctctacatgtctggtgagtgcgtgcccgctggatgtcggacctcgcagggggagcgtgctgatctgctgaccctgtcgccgccgagctt

SEQ ID NO: 231792 - DNA, 970 bp, Homo Sapiens
  misc_feature (170)..(202): n is a, c, g, or t
  misc_feature (227)..(276): n is a, c, g, or t
  misc_feature (357)..(440): n is a, c, g, or t
  misc_feature (671)..(671): n is a, c, g, or t
  misc_feature (795)..(795): n is a, c, g, or t
aacataacagccggcaaaaacgaactacccccccgccctcttcccttcgtcggccccctccggccttcgagaagccctctaaaccatcccgctggcgcgccgccctactaggcaaccgaacgtgggcccgcccgccgtccccgcgacacccgtgtatcggcgcacgctcnnnnnnnnnnnnnnnnnnnnnnnnnnnnnnnnngcgacttgctttttgtcgacgacannnnnnnnnnnnnnnnnnnnnnnnnnnnnnnnnnnnnnnnnnnnnnnnnngtgtccgccccgatacggcggtcgtaccgtgcgcccgccacgtcccccaacccacgcccggcgctcgcccttgtgcgcgtnnnnnnnnnnnnnnnnnnnnnnnnnnnnnnnnnnnnnnnnnnnnnnnnnnnnnnnnnnnnnnnnnnnnnnnnnnnnnnnnnnnnccatacactcccggctcccccctcattctccatccccgtctcgctacttcgcctatacacagtacccacgacactgatcatagacaccgcacccgcccgacgtgcagtatacatctctgtgtcgggcgcgcaacgattcaccctccgcgagtggcgcacccatcgcgtgcgcgcctcgctgcgcactacccctctccgcgctatagatctcgtcccgcgccttctcagcgnacgggtgccgtggcgcggtgtctcgcctgctgcggcgttcttgttacctctctccccctcccggcctgcttgttgtcgccctcgccatcttgctgcacggccatatcacccgcgcgctgcccantgtgggtcgtctcccccctcagctagcgtgccccaccacgtgtccccatatgtctgtacccgctctcgctcgctgcgccgcctgacacctttacgccgtgcccctcccccgccgcgctcacgagtgcgtcgacgggcgcgcacgcccctactcctcaccgtgtctgtcacgtttg

SEQ ID NO: 231793 - DNA, 251 bp, Homo Sapiens
ggggtccctggccagggatgctgggagttatggtctcttaacggtttccagcgatggcccccggcctgcagactacaatcccagcagccaccgggcttcgaggcggttcctgcgaattaagttgcaaatattgatgaagataatactactgccttgctgtcaaacagtaacagtcacctttttttgcatctccaattataaatgcaatgcgtactgtaaaaagaaaagaaaacatcataaatatctttatg

SEQ ID NO: 231794 - DNA, 663 bp, Homo Sapiens
  misc_feature (102)..(189): n is a, c, g, or t
  misc_feature (198)..(210): n is a, c, g, or t
  misc_feature (324)..(332): n is a, c, g, or t
gggtttctctgtgccacgaccgttcatgtgtatttgaaataaagaagtttaaaaagccatgttgaattcaagattccttctaataaaaataggtgaaacttnnnnnnnnnnnnnnnnnnnnnnnnnnnnnnnnnnnnnnnnnnnnnnnnnnnnnnnnnnnnnnnnnnnnnnnnnnnnnnnnnnnnnnnnctttgccgnnnnnnnnnnnnntcaaaaatttttcaaaaccatccttgggggcggcggccccagaaagaaagggaacttggccatagttgttcccaagaaaaccccggcgctagataagggctgggcttcccaccnnnnnnnnncgccggggggaaccggagctcttgaaaaaaccccatagggtgttccgaggggccgtccggggcatctaccaacgggaagccaggcggcgccgcaattactatttacccccgcccctgggacattaagccaaagagtggggttgacactctctccaaaccatttttgccagaaataggaaacccccctcctaaaaaccgtgtcttcacgccaccccctctttttcccgcacgcgcggttatcccggcacgctcccttgcccggcccctgcggccactgcctacgcgttgtctgggaccccacgtgggatacaaaaaaacgtggcggcactcc

SEQ ID NO: 231795 - DNA, 326 bp, Homo Sapiens
  misc_feature (52)..(67): n is a, c, g, or t
  misc_feature (111)..(122): n is a, c, g, or t
ctccccggggaactccggttttttaaaaaatccccggtggggccgcgcgagnnnnnnnnnnnnnnnncccaccgctggggtcccagggccacccaacatattgaaaagagnnnnnnnnnnnnggggccccttggggaaaaataggggttcgaaaaattaaaaaaagggccttttgtcgccgcttgcgggaagcccccctcccaaaccgtgcgtttgtgcaagaaaccctcgaaccgccccgggggtgagccaaaaaccccccttttgttctgccgccgcaataaaatacctccccccccgcgggcgaaaaaaagacgggcggcagc

SEQ ID NO: 231796 - DNA, 1103 bp, Homo Sapiens
  misc_feature (638)..(646): n is a, c, g, or t
gggtccatccgcaacgcgcacagcatccatcagcggtcgcggaagcgcctcagccaggacgcctatcgccgcaacagcgtccgttttctgcagcagcgacgccgccaggcgcggccgggaccgcagagccccgggagcccgctcgaggaggagcggcagacgcagcgctctaaaccgcagccggcggttcccccgcggccgagcgccgacctcatcctgaaccgctgcagcgagagcaccaagcggaagctggcgtctgccgtctgaggctggagcgcagtccccagctagcgtctcggcccttgccgccccgtgcctgtacatacgtgttctatagagcctggcgtctggacgccgaggggcagccccgacccctgtccagccgcggctcccggccaccctcaataaatgttgccttggagttggacccgagggctcctgcaggaaatgcaagggaggggcccgggcctcccgccccccaggggtgtttttccggaggcggcgggaagacggcgttctgggagccccgatactacgccttgctcccggccccgctctccgggcccccttgtggagaacacgccttctccctagaacgccctttctctccttcttctgacgccctgagcgcccggggnnnnnnnnnacggtcacgggggggcatcgaaaatgcgagaaaatcacactgcgtcgatttcccatctaagacaagtgttgcgagttcccccccgttagccgcgcgcgaataactccctcgttgaggcctacaattttggcaacctacacgagtggcgcttcgggggagaatctcgccgcacgaccgcgcttatatgacagcaattaaaccctgcccccgcgggacacggagacgacatcaccgcctcctgggggccgcctcttaaagccccgagacatccccctcacgtcacggcgcgccctccaaccctaggagcgggggactctgaggcgccggcgcgcgcaatgcgcagattctgccacgcgccggcacgctccggcatacgggacggagcacccgcccgctctagctcagcgccgggtcgcgtcctcgcacagcggggtgtattcaagtacacaatatacta

SEQ ID NO: 231797 - DNA, 1037 bp, Homo Sapiens
  misc_feature (173)..(184): n is a, c, g, or t
ggtgcctcttcagtttggactcagctctgacagcccctcctccaggaaggccttccaggacttcctcctctgggtcctctagctctgaccctatagggactccagatctcaacctgttccctggaagtagggcctgctctccatcccagtgaaataaacatgtattagacccnnnnnnnnnnnntaaacccgactcactaccaccaataagtactggcgcgccgcgcactaccccccacatccactacccttcccctctgcccaaaacccccctcctcgacagcaccacctttcccggccgcgcggcctcggatcggccggcgccgcccccgcccggggcgcttatcccttcccgacgcctcccgctcccttccgtctcccccccttcgtttctctcgccatagccatcgcttccgcgcgcgctgtgccgccgccgccgtgcccgacgcccctactcatcgcgcgctgcgggcctcgaggccgggccttgcgggcgggcctaacgtgtccgggcgtcgtataaggctcccctccgcctctcacgccataggcgcgcacgggcggccgcgcgcaccctggtgctacgcgccgtcggcacacccgccgcaacccattggacggccgcgcatgacccacgcgccctcagtacatggagtgttccccatcttcctccgccgtggtctggtcgccgccccctacaccctctgtatgccgtcctggtcggatcgcgcccgtcgggcggcggcggtgcccgcttcctcttcattccagcccctcgcttacacttatcgctctcgtctcgctcagctcgccagtgtgtcccggacaccgcctctgcctatgcctctgtcacctatcctctctgtgttcctgtccccgccccccggcggcgccggtgatattcggttcttcgctccaccgctctcgccgaccggcgtgtggtcgctacaaccgctatggccccatcatggtggatctcctgccgctcatcgccccgccgtcactatgttccccattgccgtgcctctcaacccaca

SEQ ID NO: 231798 - DNA, 893 bp, Homo Sapiens
  misc_feature (423)..(423): n is a, c, g, or t
  misc_feature (562)..(625): n is a, c, g, or t
gagacgctttcaatatcattccctttgccccgccgtgcctcctgagccatagtaaccagggcccacagttgctttcccgggggaaagcccgggggcgtgaaacacccgaccgggacccccgaaccccactaatcaaaagggcccggagggcgtcaaccggcctgcagttgctatacccccacccccctccctcgcggggcttctctctcacgatgaccccaactacaccgcggggggatcgcccgtgccgaaccgcgtcgcggacttcccttcacaaccttcgcacctgcctccccgctgtctgtcgcactcgatggtgcccctgggggtgccgtgccgcccgtttggtggtcgctgctgggctccctcacacggcgggctgacgtgtacgtctgcccacacctttctcgccgacaccgaacnaacgcataaccggcgctctatgcctgtgcagattactactctcccgtctacttcctcccggcgacccctgtattatgtctccgatgccctcctcgccgaggtcccggtggccgcgatcgcgcactgacgcccgtatacnnnnnnnnnnnnnnnnnnnnnnnnnnnnnnnnnnnnnnnnnnnnnnnnnnnnnnnnnnnnnnnntctttccgccgcgccctggcttcccaaccggcgagtaggacgactgagaggcccgcgcaacgcacctctcccctcgccagttcacttgcgcgtcgctagcaataaatagcgctagaggggcggcctggcgactgttgctcgagccgatagcgctgcgctccacgcgacggcaccgtgtaaccagactgccatcgagtggtcgctgcccccgggtatcccaccaagtggatgtttgtgccccgtcgcgccagctggccctcccctcccg

SEQ ID NO: 231799 - DNA, 1468 bp, Homo Sapiens
  misc_feature (640)..(640): n is a, c, g, or t
  misc_feature (728)..(728): n is a, c, g, or t
  misc_feature (802)..(802): n is a, c, g, or t
  misc_feature (807)..(807): n is a, c, g, or t
  misc_feature (905)..(905): n is a, c, g, or t
  misc_feature (1176)..(1176): n is a, c, g, or t
  misc_feature (1427)..(1427): n is a, c, g, or t
ggacaagaggaagctgaggctccgagagaccctgtccttacactcggctctaagtggggaaggccagccctgtccatctcttgtacccatgtcctttccaaagcatagggaatggcacccacatgccaccttctgggaactgctagcttcttgttgaacagggaaacggagtcccagagagggtaggcagctctccaggtcagtaagaagcccagccaggcccagccctcggtggtgtgggaagccccatccccacacgccatggcccccacccctaataaacttgccacaccccccacctttttgcccccgcccgccagtataagaacccccgtgtcggcccgccctccgcccctcccaaaaaccctttctaacaccttctccttttgggcggcgccggggcccccattagcctaagatgggaaacaccggcgtactctaagccgtgtttctccccctaggcgcacaactccccgcgggttcctttggaacataagggtgcccgcttggcgaatttgctccccaccgcaatataaataaacgacaaccgcccgcccgtggcgcgcgccccataccgtcggcgaggcggggttattctgtggagaatccacccacgtctccccgcacattatagtggggncaggcgtctccccctcggggaagaggacgggctcacgctatgttcacgcgtgcggcggggagtctctctctttacattgcgccgaganattgttatgggggggacggatgctttcgtctccacacgacagcgcgagcggaaaaaattatactcgtcgtcggncgcgnacgcctcgcaagccttccccggggaaaagaggctttgattataatacggcccgcccccccttatccttcgtgtgtcgctccccccccgttcggtcggncccacagaaaaccgattgtcaccaacatgccctgccatggggcggaagaagcacatacgactacctggggggtttttgtggggataccacaaacatacgcttgttccctgttttttataaatgagaggcgaaccgaatttttcctgtcttggggagaccccgccccttaataaatattgttggggggtaccaccaacaaccccgtacatatttatcttttcctcaaaaaacaccccggagggccttatgctctcgcgccgactcgcgaaangtacaccgaccctcctaggagaaaatcatcacctgccgcggcgccgaggggcggaggagggggcattatatttagaagtgcgcggaacgccgcggccttggcgccccgtcgtcccgcgctcgctgtcagggcggatgtgaagaaccgaagacgatatatttctacgtcgccccccctcccattggtcgcgggcgcacaaaaatgacacatcgtgcgcgcggcgggccggaatagaaaaataaacctacttntggtccgcccgtgtagactcttgcgcgcgcccgccatattt

SEQ ID NO: 231800 - DNA, 828 bp, Homo Sapiens
  misc_feature (79)..(93): n is a, c, g, or t
  misc_feature (251)..(278): n is a, c, g, or t
  misc_feature (431)..(446): n is a, c, g, or t
  misc_feature (475)..(475): n is a, c, g, or t
  misc_feature (593)..(593): n is a, c, g, or t
  misc_feature (743)..(743): n is a, c, g, or t
gaatactcgcccggaagccccgaccgccaaaaatcccccccacacacccccgtggcgttatgccgccacacaaagaagnnnnnnnnnnnnnnnttgtgcggccggccttcggccccctcaagaaagttttcataaacccattcgttttgggcggcgcggccccccgtaagggtaaagggaaacatggggcccataacctggtttccttaaggaagaatccctggcccctggacatagtggctttgggattnnnnnnnnnnnnnnnnnnnnnnnnnnnnggggggacaaccccgaacgggtttccggaaaacaaattcccaagattgggagtttcctggaggtggttcttttacctggggattctttatcccaaccgcggggaggcccccaagggcggagagcccccttatataattccaaaatataccggnnnnnnnnnnnnnnnnttgggcccacttttatttgggaggagganaggtggtggggggaaatatctcctttaaaaggatttttctttggcccggaacaatggggaaagccctccttcctccaaaacggggggtgtggaaggtgaacaccctggaaaatccgcnccaggggggtggttctccacccaccccctttggcgcgcgcctttggcggaatataatatttttttgcgcccccatggggggagaaaacaagcgcggggggcgccacaagaaataatttgctctctccataattgtgcggccccctcggtnttataaaactcccaaatgacggtgggggggaaaacccctctccccccccacgtgtggtatttgtggcctctgcacacacaaaata

SEQ ID NO: 231801 - DNA, 1202 bp, Homo Sapiens
  misc_feature (178)..(188): n is a, c, g, or t
  misc_feature (441)..(464): n is a, c, g, or t
  misc_feature (790)..(798): n is a, c, g, or t
  misc_feature (812)..(812): n is a, c, g, or t
  misc_feature (872)..(881): n is a, c, g, or t
  misc_feature (897)..(897): n is a, c, g, or t
  misc_feature (1066)..(1117): n is a, c, g, or t
gggattgataaaatattaaatgagaacaaactagatatgattaggacatttgaaaccctaattgtgaatttatttttaatagttactgaaatgaaaatatttaaaataatgcacaatgtcttaagtcttcctaaatcaagattttggttaaaaaatacttctaataatagtaaaagannnnnnnnnnnaagtaaatcataaaacggttctaaatgtaaaataaagacatgtcaaataccaaccaaaggcccaaaacacgaaaaaacaacgatccaaaaatccaccaagccaccttgcccctatttacaccccgtccccccgactagcgccaacaccagcctatcccccccgcgcgtacaggtgagtgcacaagagccacgaccgggcggtcttcccccccgcccgttcgttgtccccggtgccgaagccacccgccatgannnnnnnnnnnnnnnnnnnnnnnntaaatcccgggcgtcgcggccaggtcgccgcgcagacccctgccccccgatttccccctgtgttaccccgaaccccatcccgccccggccctttgtgaggcgcgtgccgcagcggggccggcccggaagccccccgcgcgccgccaacgcaaataattacgctacgcgccgccaccacaccgcgcccaccccgacaagttacgcgtgtcatgctccatgccccgcgccccccatatcgaaaaacgccgccccgtatagcactcctgcgcacacgagtaggggggtgcgcggaggacctcgcgatgcggagaccgcgatgctcacgnnnnnnnnntagtaggcggtgtnagactcagcccgccccactgcagatgacccgcccgcgcatatgatacccggatgcgaatnnnnnnnnnntttccagccaacgcangttgtcgcccacgacgcgcccccgccgcggggattgtaccctccccccctataccccgcgcccctaacctttgtgcgcgccggatccacttctcctttgcccgcgcccgcgatgctaatcgtgtgccggcctcatatgttccccctcacccggttgtgcttcctgcgcnnnnnnnnnnnnnnnnnnnnnnnnnnnnnnnnnnnnnnnnnnnnnnnnnnnnggataatcaccccgcacttgcgcgtacgcgaaggttgagcatgagtacctccgcgccctgcacgccgcccgcatgcaacgcccgc

SEQ ID NO: 231802 - DNA, 1124 bp, Homo Sapiens
  misc_feature (191)..(208): n is a, c, g, or t
  misc_feature (486)..(486): n is a, c, g, or t
  misc_feature (499)..(499): n is a, c, g, or t
  misc_feature (545)..(545): n is a, c, g, or t
  misc_feature (551)..(551): n is a, c, g, or t
  misc_feature (684)..(684): n is a, c, g, or t
  misc_feature (926)..(926): n is a, c, g, or t
gcgcagagcgcgcgcgggacccatatctgtgccgtgcgggccgttctcggcccgtggagaagtttctctacgaccacttctgtttggccgcgcgtccccctatacaagctaacctcgaccccggggttctaattcggtcctccctacggaacatcccctgggcccatgaacctccgtggccttggggaatnnnnnnnnnnnnnnnnnnaccaacaagctcctctgggcgtgatccacaccgcacgccggcttctcgtgaaacgcgaaattcaccaggaaggcgggaatgttctcaggggagggtccgccttcaccactgggtaatcgctctgctcaaccccggagcgagctcctccacactgttctcagaactcttccacaactcacccccacataccctcaaaatgctccacaccgcgcgtgcgtttgtggtatcacaccctgccccgcgccgccccagaaggtgtatagccgctcgcgtattcntctataccgcagntcctatgctcactctactccaggaacgcggatagtgctcgcagggncggggnctgctcggggcaaatgtgtggggggggaggctgaaggttatgatattgtcacccccccagccagctgttgcccggcacgctttctccgcccgcgatgaaccctcctcgcgcgcgcccgttgtttgagatgcgntgtagtacgggcggcccacccccgccctggatacaggcgacctctcgccggccctcgcgtacccattcttgcgcccgccgtactgcacacatgagtcggcacttctccggtgcgcgcccacgtcgagctggtggcgatgcgcacaaaacaccggtcccgtcgtggtcctcccgtctcgcctacccaccccgacctggtccatcacccaccattagtttttgagtggcccggccccctcgcgncccccccgccatagttcgcccccgcagcctggggcgggggtcggcgacaaaatagccaggagcacgcgcatgcgaagggaacagtctgctgcccagtcggagaggacggccccgagaatatgccgcgccctcccgtaatcgcttactacaagcagaaaatactatctcggatgtttgttgtgaacggtcccgcgtagc

SEQ ID NO: 231803 - DNA, 1219 bp, Homo Sapiens
  misc_feature (528)..(536): n is a, c, g, or t
  misc_feature (756)..(777): n is a, c, g, or t
  misc_feature (997)..(997): n is a, c, g, or t
  misc_feature (1166)..(1166): n is a, c, g, or t
ggagcagggaacaaagctcttattcaactgcgaattccatagtgggctctggcttttcttgaatagatatcacaaggttgcttattatcaaaagaataattaaaatcatgtaaccatttaaatgtcactgttaacacttttcactctttctgttgattcacctaactcattattttgctttattaaaagtcttccttcaccaccgagatatgctaatttaacttacaaatgattttaataaaatcttgagtttgtatcaaaaaagcccaacgcggaacaacatgcaaaagcaaaacaatccggccgccgagaacgatgtggcaaaaaaactggcgggcccgcccccggcccctcgaaagaagctttcttaaaaccatttcctttgggggggcgcgggcccccttaaaggaaaagtggaaacagggaggccattggcctgggttctcccaaggggaaaaccccgggggccaagacgactagggggcgtggggagcttcccccacccaaataaaaaaaacaccctcctcnnnnnnnnnctacacccgcggcagtggttgttcctgtgcaaacacaaaacttcccagacgaggggggggaagttttccccgggaggcggcgccacatttccacgccgtggggaaatccccctatctcgcaccccactcgggtgggcggacgcgtctctcctcgacacgtcggagcacacgccccccttcttgaatgatatattcacctcctgcgcgcgcatttgtttgnnnnnnnnnnnnnnnnnnnnnnggagctcatctgtcgcggggggccgcgatccccactctttctagttgttggtgcaccggagtgagagtgagcgcgcggtggggtcgagagatgatacacactgcgcgcccactgtatgataaaaaacgcgcctattattttcccgcgcggggcccccacagaaaacgccgcgtggggggggagaatcgcgctcgctcgtgtttgttaccggcaagcaccnagcgggcggggggacgggttcgggcggtcgggaaagaaaaagtctcgtgatgcaaaaaaagctgcggccccaccgagcgggcggtggggcttgttatctctgccggacacccgccccggttgggtgttgtatgccgcgcctgcctagtgggagcgacgtaacacccaanaacttctattgtgtgtgcgccacccccacgcgagggtgtttaatatacacccc

SEQ ID NO: 231804 - DNA, 1086 bp, Homo Sapiens
  misc_feature (653)..(665): n is a, c, g, or t
  misc_feature (915)..(915): n is a, c, g, or t
gggagaacggcgcgggacccgagaggcctacgttggcaaacgcagcccgctgcccctttgctcgcttcccccgggcctggagtggctcctgtcgcttctggcgctccgatttcgagaaatgactttcagctgtgcaaggcgagaatgctactttagatgatgagaaaaaaatctctcgaatggctcccaaaatgaggtccttgtttaagaggccacaggaagccgccagccgaactctgataccacagaggaggccaagaagcggactgcggcttggtgacctgtttggtattgccaaattttcagcttttattacagctgaaacaccttggctgtttaaaacgttcgacaaggacttttttatgaacgttaacggaacagcatacgggcttttttgggagagcacctccccacgggggcaaacagacccctggtccggccgccctctgcccctcgaagaacgctttcctgaaaaccacttggctttgggcggcggcgggccctccgcccgggtaaaggtggcaccatggggtcccataacggtgggttttccccccaggggaaaattcccttgtggcgcagtgcgaccttaggggggctttggggaaattttccttcgcccccacgtataaaagtaaaagacgcgccccccnnnnnnnnnnnnncgaagcacccggcaaagtgcggggttttctctggggacaaccacacgcacccccgccataaataggggggagggctctcccctctgaaagcggaccccatatttacaacctggggagaatgccgccccattaaacactccgggggcaacttcacccaaaacttcgccgagtgatcttcccccatatattgcccccccctctgtaagtgtcgcccccggataccgttcttgggcccaaccctcatttctgngcagatgcaacctgtgtatgggccaaacatgtttgcgtctagagcgcccagtcctctgttttcccgcccccctgtgggcaaggcccctctgcctcgtaaccaccggggtgccctcctccgcgaagcccccttggaaacccctcgcaatccccccacggtttagtcggccgc

SEQ ID NO: 231805 - DNA, 1180 bp, Homo Sapiens
  misc_feature (255)..(265): n is a, c, g, or t
  misc_feature (513)..(513): n is a, c, g, or t
  misc_feature (656)..(656): n is a, c, g, or t
  misc_feature (664)..(664): n is a, c, g, or t
  misc_feature (988)..(988): n is a, c, g, or t
  misc_feature (1043)..(1054): n is a, c, g, or t
aatcggactgccaaattctccggtttgccccgggatattatagaaccttatctgtatgaccaatgaaaataacccccacctcgtgcgcacgcctggttcgatattggcacgaccccgctcttaccgccccccgtactattatatacgcaaccccttgggttggcccgcttggggcctgcgaaaaaaatctttgcgaaattttcttttttcgcggaggcgggggccccccataaggaagcggtggccctacggggnnnnnnnnnnnttttctctctaagggaacacccgcgtgggcagagagaaaataagggggtgtcgggggggtcttttgcccccgctattacaaccaacaacggaatgtgggtgtggcgcccccaccgccccctttgtggtgtttcggggacgagacacaacacgcgtgcccaaggttaggcgagcgacgctccttccgaggggacagtgggtgtatattgtgcgacccccccggagaccaacaccctcattctttttttnttataacccgtgcgaggcggaaggatccctcttctccccaggaggtttggcgcaaagagagcctctccctgttattatgatacaaactcacccccacaaagaaatttttatgtatataaacacacactcccccgtccggaggngcgcaacnacactcgtgttggcctgcggcgtagcctacttcactgtagttgacgcgtgaagagcgagaagagtacacaacgggtggtgggtgtgggcataagacgtacaacattttgttgatattttcaccatccgggcagcgggctttaatttttctgtcttgcggtgcagcgccgccgacaaccatggttcgggtggggaacgaaaaaggccgcctcaactttttttcctatacaactatattagcgctccgccgggagccataagagtgcgtacaatgaagaaaatatcaatccttgaggaaaacaaaacccacgactccgcgcaccantgtggtccgcgcaatactcgctccatctgcccgcactgtttgtgattttggtcgnnnnnnnnnnnngggttggggagatgcccggagaagatataagaaattcatatcgtggggccgcccgccccatggggcggagcgagaagaaataaaccacctggtggcgccggccccccaccccaccacatattgtat

SEQ ID NO: 231806 - DNA, 475 bp, Homo Sapiens
  misc_feature (152)..(152): n is a, c, g, or t
  misc_feature (229)..(229): n is a, c, g, or t
tggaataaataaaatgtaataatgattcgacccagaaagggggaatggaagtagctgatataccactacaaccatggcttggaatctttgacccacagttattgctaaactggaaccattagcggccggagatacgcgccgggagaccaaanaccctttggcctcgggcgcgccccttccgggtccctttccgaagaaaagcctttttcctcaaaaacccattctcgtnttttggggcgccgcgcggggccccccaggtaaagtgtaaagcgtggaacacctggggcccattaaacctggggttctcccctaaaaggaaaaatcccctggggcccattggaacctagggggctttgggaattttctccccccgaaattaaaaaagacaccccccgggcggggggaaacaccgaaggcggtttcttgtaaaccaaaatccccccaaatggggaactctccggaagggccccttttc

SEQ ID NO: 231807 - DNA, 1335 bp, Homo Sapiens
  misc_feature (152)..(191): n is a, c, g, or t
  misc_feature (693)..(693): n is a, c, g, or t
  misc_feature (734)..(734): n is a, c, g, or t
  misc_feature (762)..(788): n is a, c, g, or t
  misc_feature (852)..(852): n is a, c, g, or t
  misc_feature (890)..(890): n is a, c, g, or t
  misc_feature (1253)..(1253): n is a, c, g, or t
  misc_feature (1304)..(1304): n is a, c, g, or t
gggaaaatgtgtctaaagtccatcagtgttaactccctgtgacagggatgaaggaaaatactttaatagttcaaaaaataataatgctgaaagctctctacgaaagactgaatgtaaaagtaaaaagtgtacatagttgtaaaaaaaggagnnnnnnnnnnnnnnnnnnnnnnnnnnnnnnnnnnnnnnnnaagtgataccttaattaataaacatgccaagtttattgctgcccaccccgtacaccccacaaatacacaaccgtgtcggccccgtcgacccccataaatcccttctaaaacgttcttttggtttcgcggccctccgcacgtcatgggaacccggacaatagcctgcttcccaaggaacctcccggcccactgaccaagcgcatgggaattcccccaccggccactaccaccccccccgtcgcgccgcaccatggaccgtgtttgggaacaataaaaacgccggcaacggcccgcccccctccgggtgcaccaatgtccccctcggcgggctccctcctctcccacccaccggggagcgtatacctccacacgatccacacaccctactcccccatgctccggctgccacaaagatcttttctcccatttgcgctcggaccggcaagacacacgccgctcgtgcgcggcgcaagaatctcccctcttgcgccccgctggcgcnccccgcaccttctaaatcagaccctgccccgtccccggttnttgttggccgcacctgccagatccgcgnnnnnnnnnnnnnnnnnnnnnnnnnnngccttcccaccgcgagaagtcggcttgttcgcgacccccccaattggccctgtttccacagggntaaagcaaatccgccgcgcccgagtactcaaaatggcnccccgcctctcctttttgttggaaccgcctcggcaagcgcgacctcgccgacggggcacgcgactgtcgcgcgcaatcgtgtgtgtagcataacaacacgccctgctcgggcacacaattctcccggacgcccccaactccaagccccgcgtgagaatgtacttcacctcctccacccccacaaatataaatatttagtggtagacaggctacacccctcacccgcttttccctcgaccccgcgaataattatttgacagcgaagctctcgcggtcggaatgcccaacacgcaggtgctgtcgggtgacgaacacatacgagcgcgcaggacggggcggggttttaaaaagtcaccgcacacnatagtcatgtgccacgctaataacacgaatcgcgcgcgtcgcccccgcgtnacctatccaacgaacactgcatctgcccacg

SEQ ID NO: 231808 - DNA, 275 bp, Homo Sapiens
  misc_feature (62)..(70): n is a, c, g, or t
  misc_feature (211)..(234): n is a, c, g, or t
caaagggggcgccggataatattcggcacttataacggcttgtccgtgtgcgcaataaatannnnnnnnnttctaaaggcaccccagaaataatgggacagtagcaactccggtaactgggtataggctggttaattaatcaacaccccctacggtggaaaattaaactttttggacccccgctccgaggttaataccccgtatcgcaagnnnnnnnnnnnnnnnnnnnnnnnntttgtttccggccatggggcctatcagggccgccacctccc

SEQ ID NO: 231809 - DNA, 975 bp, Homo Sapiens
  misc_feature (167)..(222): n is a, c, g, or t
  misc_feature (335)..(346): n is a, c, g, or t
  misc_feature (386)..(394): n is a, c, g, or t
  misc_feature (425)..(437): n is a, c, g, or t
  misc_feature (465)..(474): n is a, c, g, or t
  misc_feature (485)..(524): n is a, c, g, or t
ggtgccccacacgccgcgggacctccaggggcgactctagtggcctgaggagatgtatttataggcccccagcagggctgctcccccctcggccggtgccccaggatgggctcctcccggcgggggcttggccaaagctttcttaataaaatgcctttcccctcatnnnnnnnnnnnnnnnnnnnnnnnnnnnnnnnnnnnnnnnnnnnnnnnnnnnnnnnngacccgcacaaaaaatcccacaaacgccaacgcccaaacaccgataatatacggaccccgaaagaccccttttccaacccccccgatctgggcgccgcgtttttgtgtggggnnnnnnnnnnnntaagaaaatttccccgaaccttcttttttgggcgcccggnnnnnnnnnagaaccagacaaatggggatacctttccttnnnnnnnnnnnnngtaccacgagaacaaggtccttagtttnnnnnnnnnnacaaaaacctnnnnnnnnnnnnnnnnnnnnnnnnnnnnnnnnnnnnnnnngaggggttcccggacccgttcctctttgtcgcccccctcttcacgcggggggcccgtttccgccgggccgcttaccccttctcatttccgcgcccccgcccggcctttccccgcttgcgcccgcaggggaagagaggtgtggcgcgtcccccatccaaatgccccccacgcggccccgggtatggcgcgccccttcctatacgcgcgggggcgcagagaaccgcaccagggccgcgggaacgcgcggtttttccatattgtggggaggccaccccgcgttaattaaattttcctccaccgccggtgggtaaaaaacacggcgccccctcaccgataacattccccctccacttttcccgccgcattaatatatcaaccccgaagtgcgccggccacaccctcccgcccgcccgtttgttttctgcgaaccaatatacccgcctttcttgcc

SEQ ID NO: 231810 - DNA, 571 bp, Homo Sapiens
  misc_feature (244)..(256): n is a, c, g, or t
ttggttatactttttcccgaagaaacccggggtaaaaaaccgtcttgtttttccccataaaaaacaccccggcgccaaaccaattcttcaaaccttccccaaagtgtcctttaaccccttttgtggattcccaagccgtccccccgtcgtatccccatatttacctttcccccccctcttcgtccttttggcgaaaggatgggggttttttctttttaacccttctcgcgcaaactggggggannnnnnnnnnnnnggcggggtatgtccaataccctcgcgttcgcccgccgcgttttttcccgtttattgcgccgggcccgcgggggaaatactcctccccccgaggtggggaaagattcgcgcggcgccacaaaaaattgtccccctttgtgggcgcccccaataacacctcacaaatggttgggacactccccccactaggcgttccgcgttggaataagaataaaccccttcctttccctataacccccttcgcgggggggcgaaatttagatcacggcgtttcgccatggaagaaggggctcatcgtgtttgggcgcctatattg

SEQ ID NO: 231811 - DNA, 631 bp, Homo Sapiens
  misc_feature (62)..(197): n is a, c, g, or t
gggggtgcttcccaggtggcccatcctcaaactttttgcttgaataaactctctaaactagnnnnnnnnnnnnnnnnnnnnnnnnnnnnnnnnnnnnnnnnnnnnnnnnnnnnnnnnnnnnnnnnnnnnnnnnnnnnnnnnnnnnnnnnnnnnnnnnnnnnnnnnnnnnnnnnnnnnnnnnnnnnnnnnnnnnnnnnggattggggggccggccggcacgagaaaaggaaaaaatttgtttccaaggggatcggggccaggccaagggatgaaattggcccggaaaaaaaccgcccgaaaggaaaccgggggaactgaaaaggtctcgaaagaaccccaaaggaaattgcgggggcgaaccgcagggatccaaacgaactcgataggaatttatggcccgtctgggcactcatcgaaggaaggtggaaaactgttaaaatttctgccgccctgggagcgattggaaacggagtgaggagcattaattaacgggatttccgaacgtgtaccccttgggaaaaatattgggccaagtggaccccgggggcaacaagggcggccaaattgggccaaataaactcgaccggggggaaacccgggccaagaaaaccttgcgactagcccaccaatt

SEQ ID NO: 231812 - DNA, 443 bp, Homo Sapiens
  misc_feature (93)..(146): n is a, c, g, or t
  misc_feature (162)..(341): n is a, c, g, or t
gggtgcccacgctggggtgacgcaagaagaaaactcccgggcctcagagtcggcgccggaaacctaggtctgggtttccctcgtggtggttcnnnnnnnnnnnnnnnnnnnnnnnnnnnnnnnnnnnnnnnnnnnnnnnnnnnnnncagcggttaggattcnnnnnnnnnnnnnnnnnnnnnnnnnnnnnnnnnnnnnnnnnnnnnnnnnnnnnnnnnnnnnnnnnnnnnnnnnnnnnnnnnnnnnnnnnnnnnnnnnnnnnnnnnnnnnnnnnnnnnnnnnnnnnnnnnnnnnnnnnnnnnnnnnnnnnnnnnnnnnnnnnnnnnnnnnnnnnnnnnnnngttattgaaactggtcttttgggtcccccaaaaaaacgggggcaaacccaggacttggattttccccaaaaaaacagccccgggggaaaccgaggtattccc

SEQ ID NO: 231813 - DNA, 690 bp, Homo Sapiens
  misc_feature (66)..(121): n is a, c, g, or t
  misc_feature (147)..(266): n is a, c, g, or t
  misc_feature (275)..(289): n is a, c, g, or t
  misc_feature (295)..(313): n is a, c, g, or t
  misc_feature (399)..(407): n is a, c, g, or t
gggtaccaataagtggagattcctccttatgatgtatgctaggttatggaagatgtaaaatattcnnnnnnnnnnnnnnnnnnnnnnnnnnnnnnnnnnnnnnnnnnnnnnnnnnnnnnnnaatcaataaagagtaaattgtccttnnnnnnnnnnnnnnnnnnnnnnnnnnnnnnnnnnnnnnnnnnnnnnnnnnnnnnnnnnnnnnnnnnnnnnnnnnnnnnnnnnnnnnnnnnnnnnnnnnnnnnnnnnnnnnnnnnnnnnnntttggcggnnnnnnnnnnnnnnnaaaaannnnnnnnnnnnnnnnnnnggggcgggggccccaaaaggaaaggaaaagggggaaagttttttcccaaagaaacccgggcaagaaaaagggttgggttccccccnnnnnnnnncccccgggggggaaccgagcgttttgaaaaaatcccaagggggttttgggggcctttctggggtttttccaagggggggcccaggggagctctcaataaaaatatgcgccccgcgccgggcccttttttcgggagaggggtgggaaattttttataacagttctggccccgaggggaaacccccccaaaaagggggtgagatgacccggagaccccgggggggcttccgcccctttggccccgtggggtataaaattttccccctgggggaaaacgggggggg

SEQ ID NO: 231814 - DNA, 446 bp, Homo Sapiens
  misc_feature (177)..(179): n is a, c, g, or t
  misc_feature (183)..(183): n is a, c, g, or t
  misc_feature (185)..(191): n is a, c, g, or t
  misc_feature (198)..(317): n is a, c, g, or t
ttataaaggtagaaaataaacctaaattgtgtcgtaattaagattattaaaattagaattatacaatgacttatttttggtggcaaatactttaggagcaataatgccttatggtaattattgatgtatagtttcttttgtttatgaagtcaaatttgtataaattctcttaattcnnngaanannnnnnncaaaccnnnnnnnnnnnnnnnnnnnnnnnnnnnnnnnnnnnnnnnnnnnnnnnnnnnnnnnnnnnnnnnnnnnnnnnnnnnnnnnnnnnnnnnnnnnnnnnnnnnnnnnnnnnnnnnnnnnnnnnntcaaaaaattttcaaaaccatcttttttggggggccggggcccccaaaagagaaaggaaccaggggcccaaagttgttccccaaagaaaaccccggggcaccgaaaaagggcgtggggctctccccccc

SEQ ID NO: 231815 - DNA, 132 bp, Homo Sapiens
  misc_feature (55)..(55): n is a, c, g, or t
aaaaaaatttttttataaacacttttcgttttgggcgcggccggggccccccccncagggggaaaaggggaaaaatgggggccaaaaaacgctggtgttttcccccacaaaagaaaaaaccccgggggggac

SEQ ID NO: 231816 - DNA, 692 bp, Homo Sapiens
  misc_feature (211)..(344): n is a, c, g, or t
  misc_feature (353)..(366): n is a, c, g, or t
  misc_feature (391)..(401): n is a, c, g, or t
  misc_feature (477)..(486): n is a, c, g, or t
gggtgccaacattccatgtattttgaatatgagcaaaaactgatcttaagagcagacttaaagtagctttgtacgccttaatgttcattttgatttattttaaatctttacattcagaaatgagatactgtattatcagaccaggaggcattgctgtgaaagataatttcctattctaaaatatcaaatttaaaataaagataatgaaagnnnnnnnnnnnnnnnnnnnnnnnnnnnnnnnnnnnnnnnnnnnnnnnnnnnnnnnnnnnnnnnnnnnnnnnnnnnnnnnnnnnnnnnnnnnnnnnnnnnnnnnnnnnnnnnnnnnnnnnnnnnnnnnnnnnnnnttggggggnnnnnnnnnnnnnnaaaaaatttttaaaaaccttttttnnnnnnnnnnncccccaaaggaaaggaaaaggggaaaaagcggttcccaagaaaacccgggcaagaacaggggttgggctccccccnnnnnnnnnnccccggggggaaccggagggtttaagaaaaaccaaaggggagtttgggggcttttcggggtctatcaacagggggccccggggagctccaatttaaatttacccccgcccctgggcatttatgggagaaaggggtggaaattcttataaaactttccgccccacggggagccccctcccaaaaggggggtgggagaaactcttgaa

SEQ ID NO: 231817 - DNA, 1191 bp, Homo Sapiens
  misc_feature (453)..(481): n is a, c, g, or t
  misc_feature (602)..(602): n is a, c, g, or t
  misc_feature (889)..(889): n is a, c, g, or t
ggtggtcatcagcataatgacttatgctaatttttagctctttgataacttccccacccttaaaattgatgtcattgaatatcttaccattttgttaactcttgaaatttttattgcgtgactacttttgtttcattgtgattatgtggacagtcctaacagaattgtaaagaaataaaagcagaatataagtagtgtaatatttgtttcttgcttttatctcaggactattaccagttagtgtttttgattatcacgggagagtccatgtcagcagaaaatatgtttatgggccaacaatttgcttatgtgaaattacaattttataacatcgttctgagaccaataaaaatgtaaaatggccccctcaacacgccgcggcatcgccgtcgttccgatgcggcgcctgccgcgccgaacgcccccccgggcgggcgcactaccttgcttgannnnnnnnnnnnnnnnnnnnnnnnnnnnnaccacaacaccgcatgcttgggggcagggacctgtctgcgcgccccctacgggaaaaaacatttgttacaaacaaccacaatggggattttgtggaggcgcgggcgcgggcgcccaccgantagcgagcctaaatcacgggcacctgtcgaggcgagggacagtagcagaggtgggaggtgcttcccgcgcgacaggggagccgcacgcgtcccctacgggggttgatgtcgcttggctccccaatcataaagtgcccgctctggcgtagcatataagtatctcccccacactatctcctgggtacgctcccactgctcgcctctccggcccctcggtggccattactctacgtggcgtggggcggagtgagtgggcgcgaaggatgacgacaccgaattccctcctncatcatatatgttcgtataaattatcccttagagggtggcgagatcactcctaatagccgcgcgagaccctatcgtcaccagacaacgcacagggagtgtgcgcacaaagaccggccccccccgtagagcgaatcctcataaacacaaatggtagggactcaactggacgattctcggcacttcacgaatggtaggcgatagcgacgcctggcttctataaccccggcactcactttagcatgagtacactcggcccacagcgtagagagagagcctaatctccaagacggtcgtcacggcg

SEQ ID NO: 231818 - DNA, 892 bp, Homo Sapiens
  misc_feature (239)..(531): n is a, c, g, or t
  misc_feature (555)..(555): n is a, c, g, or t
ggtgcctttaggtgctcaataaatgcttcatgagtacattaataaaaccaagacctgaatatcagatttcatcaaattgaagacatgtcaattgtaagattaacatttctttttatatgccactaaggaagataaaagcactgctaattcaaatatggcacagtcttatgacttaacatattttctgaatattgaaagagttatttagacttatctagacatagatttgaattatatannnnnnnnnnnnnnnnnnnnnnnnnnnnnnnnnnnnnnnnnnnnnnnnnnnnnnnnnnnnnnnnnnnnnnnnnnnnnnnnnnnnnnnnnnnnnnnnnnnnnnnnnnnnnnnnnnnnnnnnnnnnnnnnnnnnnnnnnnnnnnnnnnnnnnnnnnnnnnnnnnnnnnnnnnnnnnnnnnnnnnnnnnnnnnnnnnnnnnnnnnnnnnnnnnnnnnnnnnnnnnnnnnnnnnnnnnnnnnnnnnnnnnnnnnnnnnnnnnnnnnnnnnnnnnnnnnnnnnnnnnnnnnnnnnnnnagcccagaaccttgttcttacagnactgcggacctagatgaacctatatattatgactccttggttcgggcccggccctccgggcccttcgaaagaaagtctttctttagaaaccattttccgttgtggcccccgcgcgggcccccccacttaaggttaagatggacaccgtgggcgccataaagtgtggttttccctaaggggagaaacccctgggggccatggaacctaagggggctttggcaattctctcccccacaaatataaaaaagccagcccgggcggggcaaaacccgaacgcgtttcttgaaaacaaaaatccccaaaaatgggaggatttcctgaaggggcccctttacca

SEQ ID NO: 231819 - DNA, 1045 bp, Homo Sapiens
  misc_feature (502)..(502): n is a, c, g, or t
  misc_feature (534)..(534): n is a, c, g, or t
  misc_feature (772)..(772): n is a, c, g, or t
  misc_feature (774)..(774): n is a, c, g, or t
  misc_feature (846)..(846): n is a, c, g, or t
tacacgaacaaccacaccgccacaacaaaaaacgtggccgcccgcctcgggccctccgagagagctttcaagaccatgtctttttaggcccccccggtcccccgctagtgtaaacggaaaccctggcgcgctcagcgtgcttcccgatagggagaagtctcgcgcgcccacggcactaacgggcctcgcggaatttcgtccagcaaaagtaaaaaacacacccgccccaaggaagaaacaccaacacaatcgacgcgttttttcttgtcaacaccccatattcccacacgaatgtgcgcacgatattccctgtgaaaggtcgcgaaactttctacctgtgggagaattatctgatcgttccgcacccgacgtgcgagccccctctctcacctagatgtattgatgtaagactccgcgggccggcagaggtcctctttcaccctaccacctgtgtgcaaccccgcgccccccggcacccgcgccaccgtccccgcgttagccncccgtcgcgcacctctccctttttaccccgcnatacgggctctcagccatttccgatattgcgggcttacactaacaaccaccgactgtagcgcgtcgaaccccccctcttttatacttgagtgcccgcgcccaccactcctgggttggaacgaacaacggcacttgcccgacccccacggacagtggggggctcttcgtcgtgtgatgtggcgcacacgcgctcctccaaaaagatttagtcgtagtatgacgagagcgacgatgcatngngtatcccgcgcccacctcacgcgcgactgcccgcgccctctcgtccagaagttggtatagcaaatatactcntacgcgccacccccaggcgcggcgggcggatacacagcacgcatggagtcgaacgcgcagacacgacaacgagccgcgcccgaaccgcatctcgtctgggacatacactagcgtgctgattacgaattctcttagtcgcatcgctgcggacgcgaccacactctacgcaattggtacgcgggggtggcagcgtgggcgg

SEQ ID NO: 231820 - DNA, 1347 bp, Homo Sapiens
  misc_feature (232)..(320): n is a, c, g, or t
ggtgacttgattttaaggggagggtgaggccgaagagggaagcccaaagcagatcttaatgtttcaaaggagtgcagcccttcacagccatcatatatgagggcactgttctgtctggtgttgtacccatctcaagaacaaatcaacagcaacaaaagagaaagaataaatttttaacatttagaaaacaaacccaaagaacgcgctgaatacaagcaggagcagagagacnnnnnnnnnnnnnnnnnnnnnnnnnnnnnnnnnnnnnnnnnnnnnnnnnnnnnnnnnnnnnnnnnnnnnnnnnnnnnnnnnnnnnnnnnctagaaaattcttccccaccacttcctttgggcacctccgcccaccccgaagaacgcggaacaccttgcccctctccctccgctttcccacgaaaaaccaggggtacacaacataggggtttgtgattttccccgcgagaaaaacaaaacccccgccggcggcgccaccaccgactccgcgtctctcaaacccgtccttcccaatggggagccgcgcgcacgagcgccctctctgatcgggggactccctcctcccacgcggggtggaccgcgcaattagccgctcggtcctcgcttgtatcgtaattgtcttcccgcgcccacgccccgctccctgcttcacccctacttctcaccttcacgtccacccatcgcataggtgctcgctagaaaataaattccgccgctcacgcacacgccagcagtttcttactcgcgctcgacactaaaacacgccgagtgcccaaaagcgccacgcccgccgcccctataaaatggacgcgcacgaacgaatcatgtaagatcgaacaccacccccgccttccacacagacacccctcttaataacaaaaccgagcccgcgtctctctttccctccaccctctcttgcggtgagacacgaccgctaacttagggatgaaaaatgttatacaaacaagaaattcaccaccccccgcctgaccgcggggggccagagacaacgtatcgagcgggggcgcacatacaaaccgaatatattcatcttctcgcgcccagactattgcgcatgggcgagagcccagtgaggcatgttacgaacgtcgcaccatacggcacggtagtgtcgagaccacaatgatctcactcgctccgctaggcgccctaaatctgcttacctcccatttttaccacaatacaaagataccctttctcttctcattccccgcccttatacgccacaccttcgtttccgacgtgagaataccacacctaggtcctccacgattcttcttctactacactcgccccgcgtacgcggccgcgcaag

SEQ ID NO: 231821 - DNA, 646 bp, Homo Sapiens
  misc_feature (87)..(238): n is a, c, g, or t
  misc_feature (247)..(261): n is a, c, g, or t
  misc_feature (285)..(295): n is a, c, g, or t
  misc_feature (336)..(465): n is a, c, g, or t
  misc_feature (480)..(489): n is a, c, g, or t
gggtagaataagtgggaggccctttttacatactcttttctcatgagagctcactattttaacaataaacaataaacgttgtttctnnnnnnnnnnnnnnnnnnnnnnnnnnnnnnnnnnnnnnnnnnnnnnnnnnnnnnnnnnnnnnnnnnnnnnnnnnnnnnnnnnnnnnnnnnnnnnnnnnnnnnnnnnnnnnnnnnnnnnnnnnnnnnnnnnnnnnnnnnnnnnnnnnnnnnnnctttgcggnnnnnnnnnnnnnnnaaaaatttttaaaaacattttttnnnnnnnnnnnccccaaaaggaaaggaaaaggggccaaagtttttcccaagnnnnnnnnnnnnnnnnnnnnnnnnnnnnnnnnnnnnnnnnnnnnnnnnnnnnnnnnnnnnnnnnnnnnnnnnnnnnnnnnnnnnnnnnnnnnnnnnnnnnnnnnnnnnnnnnnnnnnnnnnnnnnnnnnnctcaaataaaaatannnnnnnnnngggcaatttatggggaaagggggggaaatttctttagaatttcccgccgcagggggaaccccctccccaacggggttgggaagaaacctaaaattcccccgggggggattagagaaccccttggcggcccctgtggggaaataataattctcgcccc

SEQ ID NO: 231822 - DNA, 1103 bp, Homo Sapiens
  misc_feature (50)..(204): n is a, c, g, or t
  misc_feature (234)..(249): n is a, c, g, or t
  misc_feature (255)..(312): n is a, c, g, or t
  misc_feature (338)..(346): n is a, c, g, or t
  misc_feature (424)..(444): n is a, c, g, or t
  misc_feature (893)..(893): n is a, c, g, or t
gaagaaaaaataaagccctcctggggacttggaatcagtcggcagtcatnnnnnnnnnnnnnnnnnnnnnnnnnnnnnnnnnnnnnnnnnnnnnnnnnnnnnnnnnnnnnnnnnnnnnnnnnnnnnnnnnnnnnnnnnnnnnnnnnnnnnnnnnnnnnnnnnnnnnnnnnnnnnnnnnnnnnnnnnnnnnnnnnnnnnnnnnnnttcggggcccccccctggcccaaaaaaacnnnnnnnnnnnnnnnngtgggnnnnnnnnnnnnnnnnnnnnnnnnnnnnnnnnnnnnnnnnnnnnnnnnnnnnnnnnnncgagaaaaagggttggactccccacnnnnnnnnncgccggggggggaacgcccccgccccagaaaaaacccccagggggatcccgaggggcttgtccgcgggatctgcccannnnnnnnnnnnnnnnnnnnnaccccccaaaacaaaagaagggccgcgccccccgtgggccaccttccagggacataaagacggttggaagaccctgccttgagaacaatcttctcccgcggagaagtggtggagactagttcattcttcaaaaagcgggcatgctggtacgtcaagcccccgcagcaagggagccgcccaaggcgggcgcaaactctggccagtacgccagattggcgggcgcacgcccgtgcgtggagccgagctatcacacgcggcgtcgtggtgcccgccgggccgggaggggagaacgacgtagggccgcggccgcgcaacaaaaagatatctgtgcccactccacctataatgggcggacaccacgcgccgcgcgcggtaacgccaagaagagggggtggtgagggggacactttcctcaccccacgagcgcgtccatttgtgacctcgcttgnagcacgagcaggaagtccacctaatcgtcgcccgcctcggcggaaatcgctgtgttgggaggggaaaacaagagtaagtccctcgcttctacgaacgagacgcatcccccgcgggcggcgccataatcgcgcagggcgaatatttgttgttccactcaaaaagaccgcgcgcgatgacgaggtctcggcgacattgtacaacttcccccc

SEQ ID NO: 231823 - DNA, 1146 bp, Homo Sapiens
  misc_feature (68)..(205): n is a, c, g, or t
  misc_feature (493)..(517): n is a, c, g, or t
  misc_feature (695)..(695): n is a, c, g, or t
ggcagtggtatcaacgcagagtggcatacggccgggtggtgtgttctgtgataatgaaaagcatcagnnnnnnnnnnnnnnnnnnnnnnnnnnnnnnnnnnnnnnnnnnnnnnnnnnnnnnnnnnnnnnnnnnnnnnnnnnnnnnnnnnnnnnnnnnnnnnnnnnnnnnnnnnnnnnnnnnnnnnnnnnnnnnnnnnnnnnnnnntgaatcgtaaccacagacacacgaaggcgaagcgcaagcccggccacgaccacactgggacggacggaacagagcgccgcgggcggggcgacgagccgtgagaggaaaccaagaaccggagcgcacccggtggccggctgcgcctgcgcgcagggcggttcggggggggatgacacggcaccaccccggcccagggatgggcggggggtttcgaggcggcggcgaggaacgcgaacccccgtatagcctgagccgcgcgaagcatatagcgacagggccgcccgaggnnnnnnnnnnnnnnnnnnnnnnnnntaacaaccggagtacacgcggcggcgacccccgcgtgcgcacgagggcggactgggacgaaggcggcaatcaacggctcttcgtggccggtcacgccgcggagataggctagcgccgcctcgcgccacagggcgagtgattggccgtgggctcggggaatactctaatctatggatanagctccaccacgcttactatgaggaggagccggggagaggatagggagtggcggaccgaagcgaatgatgacagatgcgcgccggcggttatccgtatctgtacagagctggtctccacaccccggactgctctgtacacagatgctgtgcgccgcccaactcaatcctccccgcataatggcatcatccggccgcctgatgtgggcgagactcgctaccgacgcaaggctgaatagagtgcgcggcgcgagaggtggcttgatgacttgcgggctccgctcgagcgtggcgcgtggcgaagcccgcctgctaaactgcgcgccaccgcctcggggggagttgagggcgcctgtacatagtagcgacaaggcgtggatcgcgatacacgcttgaggcacaagtagcagcacgactgacacgtactgtgcgactccgcatgtgagtgttgga

SEQ ID NO: 231824 - DNA, 1016 bp, Homo Sapiens
  misc_feature (574)..(582): n is a, c, g, or t
  misc_feature (668)..(668): n is a, c, g, or t
  misc_feature (692)..(692): n is a, c, g, or t
  misc_feature (835)..(835): n is a, c, g, or t
  misc_feature (871)..(872): n is a, c, g, or t
catcggagcacaaggaaaacatgtcactgaacatgccccgcgcgcccgcggcccctgaaaaaccgtttctccaaccgattgcggctgggtatcggcgggcgccccagtaacccccacctcgaccccctggcgcccgcccaccctgttctccccttacgggaagaaccccgtgggccccgaagcaccctaagtctgggcctgtgggcaattttcttccgactccagaaatacaaaaaaacaagaccgaccccgaggcgtgggtggcgggtcgaagacgcgcgagagtacgccggtgcttctccctgtgtcgcaactccccgtatatgcttctcccccctgcaagaaactggggtgcggaaaggacccctttctctcaccccaaaacaaggggcggccaaccccccccgatttttcttcgacaccccccgggggtgtggagcggagaattccctgcgtcgagggcgccccgcggtcccgattcctgccagcgagtgtgcaaacgtgccctccctcccaaataataaggcccgacgaccgaaggaaaacctctcctggcgcgccaactgttgtccannnnnnnnngcgcaatgttttcgctcttgaatactgctttgtcgtcttacccttcgtcgagtgctcttctctctctgtgtgatacggcccacccncgcttctcctcaaatacgatcgcnctaaaaacgaataaactgcctaccacgcatgttcctggccggctaaagaacgataattctgtctgccaagcttgcgtaagaaggaggcgcccccagcgtaccaatcttattgacccgctcccgaagacacccaactatttganctcacgtcgcgagccgcgagcgtgtagtttagtcannacaggggtgacgctacgcgagataatggtcgagacaacgtcacaaaaaacccgtctgtcgactaatcatgtcttctctctcagtaaccccctcatacacaatatatatcacgctggagccctattccttttcgcacgccacccc

SEQ ID NO: 231825 - DNA, 570 bp, Homo Sapiens
  misc_feature (294)..(297): n is a, c, g, or t
  misc_feature (299)..(299): n is a, c, g, or t
  misc_feature (305)..(305): n is a, c, g, or t
  misc_feature (307)..(413): n is a, c, g, or t
  misc_feature (441)..(463): n is a, c, g, or t
  misc_feature (472)..(488): n is a, c, g, or t
ggagagtggtatcaacgcagagtggctattacggccgggcaattcagggacagcaatggaaggggaacactgctatgttattttaaatactttttagtaagctttgaaccatattaatgtattacctgttcaaaattatacttaataaatttaacaagaaaaccatattgaagggcataaaaataagacctgacaagtgaaaaaacatcaagttttagaaaggatgatttaatactaaaatatacatttcttaatatataacttaatgtaaacctaataaataatttaataccnnnnanaaaaanannnnnnnnnnnnnnnnnnnnnnnnnnnnnnnnnnnnnnnnnnnnnnnnnnnnnnnnnnnnnnnnnnnnnnnnnnnnnnnnnnnnnnnnnnnnnnnnnnnnnnnnnnnggggggggcggcggccggggcccccccnnnnnnnnnnnnnnnnnnnnnnntggtggcgnnnnnnnnnnnnnnnnnaaaaaattttccacagcccttgtgttgggggcgcggggcccccccaggaagaaaagaaaagggggggcaaatccgtccctcc

SEQ ID NO: 231826 - DNA, 1244 bp, Homo Sapiens
  misc_feature (571)..(580): n is a, c, g, or t
  misc_feature (836)..(836): n is a, c, g, or t
ttccgacgaggggcgctacgaggccgctttccccttcctctcgccctgaggcagagagcgcaacttcctgcgctgcgaggaccggccggtggtcttcacgcacctgctgaccgcggaccacgggcctccgcgcctctcctactgcggcggtggcgaggccctggccgtgcccttcgagccggcgcgcctgctgcccctgggcgccaacgggcgcctgtaccacccggcgccagaacgtgcggccggcgttattatttagcgctccggcctggtcttcgagctcagcgcctgcttcgagtacgggcccttctcgcctaaaactgacatcccccaccgtccccgatgaaaccctaaggccccccctgctaactccagctcctgcaggcgcccctccgaccgccgcccggcgggccaccgggcgcctctttggcgcgccccaaggttgcacgtaaaccccttcctgttcaccgggcgctccgcctctgatgtgacgaacccacgcccagcctctccggtgcatcccgcccccctaatggaccgcgcgcttgaaatgttcgacacggtcctgcgnnnnnnnnnngcgcgccacacctatcctacaccgccccccctctattacacaagcccccccgcctcggagccataagtgacaagccacaactctcccctggccctgctcttctacagcacgttggtgttgggcggggggggcgcccaacttcagtgtttttgttgcgccttcctccccccacctccgccgtcatagtcgagtcgcggctcgcgccattcgtgtcctaccgccctcggcgatcggtttttcacccagcattttctcntctctcgcgtcccccgcgcgcgcctcctctctgtcttctcgtttgtccgcgccgagatttctcggtgtctcgccccggccgccggctcgtcgtcccgcccggtcgtgcctctagccgggcggggcggttgatcgtctgcgcgtcgcgaactttacccccggcggaccgactgatcacacctatcttcctccctcctgtttcccgccacgacggggcctctagtctctcgccttaacccgcctgcctttcgcctcacacttacgccactttccgcgacaccgcccgttaatatgcatcgcctccctcccttcgttcctctacggtggccgccgcaccccctgccgactgaggtggtgccgttatccggcgcccgcgcttcgcgtcctgcaaccggccccctcttccgcg

SEQ ID NO: 231827 - DNA, 747 bp, Homo Sapiens
  misc_feature (320)..(320): n is a, c, g, or t
  misc_feature (486)..(486): n is a, c, g, or t
  misc_feature (523)..(523): n is a, c, g, or t
gcgtggtccgccgccctcggcccttcaagaagctttctgagaccatctcgtttgggggcgcggggcccacgaagggaaaggtgaaccatgggtccatacctggtttccatagagggatccctggtccatggacatagtgccttgggatctctcacccaaataaaaaacggcccggggggggcaaccggaggcggttcttggagacaaactcgcaggagtgggaggttcgtggaggggtccttgtcacctggggatccgtattacagaccgggggaggtcccaagggcgaggcggtcgggaaaatgccaaaattttacggnctccccgggcgccgttggccgcgcgtcgattgcggggagagaaagccgggcgtggggggagaatgtgcgcgtataaagagaggagtgctctgtggccggcggagccattggggggagaacgccccacctccacaccaaagacgggtggagatgtgggaagagaganacccccgttgtggatactctcgctcgcaagggcgggngggaatctccgagggagaccccttatgtggtgcccgccccctttgtgtgcgcgagagatatacaataaagtttgtggggcgcccccgtggggcggggggagacaacccgtgcgggggcggcggccgaaaagaaaaactgttggggtccccccacgtaatgtgggggcgcgcccccgcgttttgtttttaaaaagatgcccacagcaaaccccgtggggggggtg

SEQ ID NO: 231828 - DNA, 1058 bp, Homo Sapiens
  misc_feature (244)..(252): n is a, c, g, or t
  misc_feature (579)..(579): n is a, c, g, or t
  misc_feature (619)..(619): n is a, c, g, or t
  misc_feature (818)..(818): n is a, c, g, or t
  misc_feature (934)..(934): n is a, c, g, or t
  misc_feature (991)..(991): n is a, c, g, or t
cgccacaaaccccgtccccattatcccccttgtccccgcctcctcggggcccgcgaaaacgcttcccaaaccacctcgccctggggtcgccgggccccatttacgcaaaatcgaaccctcgccccaatatctggtttcctctaccgagcatcccttgtgcccatgccccacgcgtctcggccactctttcatcgcccgccaataaagctcccccgagcggcggcactccacgcggtttccctgnnnnnnnnncccccccggagggggagcgctccccgcggcggctcgctctgccccggagagcgctccgatcccgaggcccggggaaacgccccggcacgccccgccccctctattctgagctcgcccgccgcctatatctttattggccgcccgcccggaaacccccgctggttgccgcccccgcgccatttttctgcctacacgcataccaccctgggggctccgcgccccccgacagctatatctgcgagtcttggagaaacgaggccacgtgtcgccccatgcggcgccacgaaatactacgttgggccgcagacacaccccccgcatgttcanagtgtccataaaccgcccgccccgctcctttataatgtgngaagatcatatgggggaccgacgctcgcgcgcgcgaagagacgtcggcgtgcgcctccccacacccgacacccggcgttttgagtagtcaatcgcgcggcgcggcggggggacgccggaatcacgcccatctagtgtactcacaccgcgcgacctaaacaccaaatactaggggggggaccgggcgggcaagaggatgncgcccggcacgccccctcatctccgggagagtctcgctccgggcgccccgccctttggattgcaccccgcgcggagagaacgcaccctccgcttatcacaccgccggcgcattatngagcgttgcctatcacgctttatatgacgccccgctcgctgtcgtcggaacgcaganacgcccactgtgtagagaggagaaactatacccgccgctcctgtttttcccagctcgcacaccacga

SEQ ID NO: 231829 - DNA, 958 bp, Homo Sapiens
  misc_feature (643)..(651): n is a, c, g, or t
  misc_feature (859)..(867): n is a, c, g, or t
ggagaacacagtggcacagtgctgggtcccagttgctagcagagtctctctcatcatgggaagctagaaagaagcttccaggaggagataaccacggcctcagggatgccacatccagagccgccctgtcaggctgaggagatcaagtaaccaccccgcacctgcagctgccaagctgggcacacagggcggcacccttctgggctgtccacctctacctcgaggctgatgctagtatgggcacagcagttgctatgtcttttctctcacacttgattttgtaagacggctagcagttacaccttaattcaaaaaatcattctgaaggctccacaattatttgccacacattgcttaagtataaaactcagaaaaaagctacgacttcacgaccagctgccgcactcagggagacccctgcccacgaagatagattggcccgatgatagaccccatagatagatacgatatatagatagatcgagtgcatggaacccctaggaccgggtgggagcccgtctcgtccttggccggccccgcctttgttccctccgcgaaagtttttccgcgaacccattcccctcgtggcggcgccggcgccccccggagggtaaggcgggcaccgggggttcaatatcctcgnnnnnnnnngccgagaatacccccgccctttgagcctcggggccccgggcatttttcccgtcaattaaaaaacaggcctttcgtgggggcaaatggcgagcgggccttttgaaccattttttcccggcggggcgggcccggggggtcctcttccctgggttactatcttcccccccgcgcggttctatggccaggcctcccccgcttatacatcgtnnnnnnnnngtgtgcgggtcatatcttatcccccgggtacgctggggggcccgcccgtttgacaacgttccccgcccccagatggggcagagccctctcc

SEQ ID NO: 231830 - DNA, 1011 bp, Homo Sapiens
  misc_feature (277)..(277): n is a, c, g, or t
  misc_feature (279)..(279): n is a, c, g, or t
  misc_feature (323)..(332): n is a, c, g, or t
  misc_feature (373)..(391): n is a, c, g, or t
  misc_feature (427)..(480): n is a, c, g, or t
  misc_feature (582)..(630): n is a, c, g, or t
  misc_feature (706)..(715): n is a, c, g, or t
  misc_feature (718)..(726): n is a, c, g, or t
  misc_feature (816)..(816): n is a, c, g, or t
  misc_feature (850)..(882): n is a, c, g, or t
  misc_feature (946)..(960): n is a, c, g, or t
ggaagcagtggtatcaacgcagagttgccattacggccgggtaacaaatttgtattttattttgcattgccacacatctgcttatttaaaaactacatccctttggtagtaatgtttcaggacaagtaggtattacagcttgatgtttgtgtgttctaattctaagagttctttattccagatcatatagaggagttaagaccactggaaccagcattttttgaattacattgtaaaatatgaaaggggacctaattaaaatccattgggttttgcncncggaccgcggaacgcccgccagtccggagcggttatcgcacttnnnnnnnnnnggtaccgctatttaacgaggaaggcgaaaaattgtgggggnnnnnnnnnnnnnnnnnnnaagaaaaattctttttaaaaaaacttcttttttgtnnnnnnnnnnnnnnnnnnnnnnnnnnnnnnnnnnnnnnnnnnnnnnnnnnnnnncgacacaaagggtggggttttccccccccaagagaaaggaaaaaaccacgccgcgcgataaataaaacaacaacaagaaggggggcggtggcgggcggtttnnnnnnnnnnnnnnnnnnnnnnnnnnnnnnnnnnnnnnnnnnnnnnnnngcggggctggagaaaaagaaacaaaacgccccggcgccgctctttattaataaaaaaataccccccctcccgtctnnnnnnnnnncgnnnnnnnnngcggagaggccgaattactgtgctggtcgcgcgggtggtgttacaccagagcacgagggcggcggggcgcgcttcacgcgcggcgggggnggcgccaccactaaacaaaaaactaatgacaagnnnnnnnnnnnnnnnnnnnnnnnnnnnnnnnnngttattatttccacgggaggaggggagtggggggcgcttctgttcataatacaatatattattnnnnnnnnnnnnnnngcggcgagcacccattctccgccaaccgccccgcgggtgtgtgtggcgtcc

SEQ ID NO: 231831 - DNA, 1128 bp, Homo Sapiens
  misc_feature (577)..(593): n is a, c, g, or t
gggagcagcgattgcagcagttgctgccgctgcgccgcgcctgaagccgcgccgcgcgggccgagggctcctgcagctgctcgcgcgcactcggaggcggagaaggacgaagactgagactgacacttctgctcccggccgcccgggtacttacgcgggggccccccaacccggcccagagcaacgtgatcttcgacgaccgctcctccgacccctatcccaccccgctgtgccgccccgcccccccagaatttttctaaagcactcgctcggtggggccgcctcccaggttaccgcaacacgcccctacctgtttcccaagaggacccggcgtctccccccggctttgcattctcgccaatcaaaatcgcccgcgggccatctcgagcttttctgcacagacctatctgcccggcccgcagcccccttattgaaccgcacttcccagccgcgcaccaggggacccgccttttccgataatttagccccgcggcccgtggccgcccatcggcactcgcgggggcgggccctggccgtatacggccggtcccgcccatattacgggcgcccttttctnnnnnnnnnnnnnnnnntggcgccggcgttttgataacgcggcccgcgccgggctcatacattagcgggccctggggccggcgctttatgttgctgagccagagagcagcggtgtggggggctgtatggggggcgcgctaataatcggcgtcggggtgcgcccaccgcgcacgcatatggcctcccctcttcctcttggccccccgcggcgctgtgttattagacgccgttctctgcccgcgggccgcgaaaaggatccgcccacgctgttgcgcgcgattgcgcggtcgcgcgcgcacccggtaatcccggtcgccgtgtcgggttgcgccctgctacggggcgccgcgccgcgttttggtataccgcgaccgccgcgcggagcgcccgcctttttctcgccccggcgcctcagcctgatagtgcacgacttcattttttaggagacacgggccgcttctcttttaggggcgggcagacacgaatgccggatatgtcgaagcatttttcgaccccccacagcgcttaatacgcagaggccgccgcggaggc

SEQ ID NO: 231832 - DNA, 944 bp, Homo Sapiens
  misc_feature (44)..(64): n is a, c, g, or t
  misc_feature (101)..(110): n is a, c, g, or t
  misc_feature (228)..(350): n is a, c, g, or t
  misc_feature (758)..(778): n is a, c, g, or t
tggtcagataattgttatctgagattccatctccatacttttcnnnnnnnnnnnnnnnnnnnnncccatctccatacttttctaatgtaatgatcagggannnnnnnnnnacctaccagcctagacactctgaccccctaatccaaatacttcatattttgaatgattttctcttatctagtttccatttcataaatatctttttcccctttaaaatttaatctggannnnnnnnnnnnnnnnnnnnnnnnnnnnnnnnnnnnnnnnnnnnnnnnnnnnnnnnnnnnnnnnnnnnnnnnnnnnnnnnnnnnnnnnnnnnnnnnnnnnnnnnnnnnnnnnnnnnnnnnnnngggtgtgggatagaaagataaaaaagccttgtcggccgctctcggccctcagaaaacttttctataccatttcctttgggcgcgcgggcccccggaaggtaattcgaaccttgggccctgacctgtgttcccaaagggagatccgtgggccactgaactacggcggcttggggatttctcaaccaaagaaaaaaaacacgccgcgggccggggaaccctgggaacggttctttgtgaaccccaatctcctcgccatgggagagttgttctgcaggggtccattttgttggggaccttttatccccgccgccgtattgttccccccctgtgttttctgcccagtccagcgtttatgtcgcgcgcccgcttggcagcagttttttcgcgtgccaccggggccgggagccnnnnnnnnnnnnnnnnnnnnngcggaatttcggcgccttctttccccacccgggtattgatccacaccttggaaccccccgggggggcgcttcaccggggtcgttccgcttgggattgccaattaggggcgctgggaaaagagggccggcacaataaagcctccctattgtggcccgttgtcgatga

SEQ ID NO: 231833 - DNA, 1023 bp, Homo Sapiens
  misc_feature (101)..(127): n is a, c, g, or t
  misc_feature (180)..(198): n is a, c, g, or t
  misc_feature (245)..(256): n is a, c, g, or t
ggtcacctggggtcccccctctccctggttccacctttctgaggaggagcctggagtcagggctgggttttggattaacccatccttcctaggtaacaccnnnnnnnnnnnnnnnnnnnnnnnnnnngcttgctttctccgggtgtgtgttttcctaatttatttacctctggttccccnnnnnnnnnnnnnnnnnnnaattaaagagcaaagctttttattactttgtaatttacacaaactgnnnnnnnnnnnnctgaagaactttggggggaatttcggactcttttcctgcgtaaatatcggacttttttgagctttaccgggggtgttactcttgaacgtaataaagtacacaagacgcagggggcccaggcccattccgtatatgatcctaacttgtgggcccgcctcgggcccccccgagaaattttccccagaccatttcctttgggcgcgggggggcccatgtattgtaatggggccatgggcccaaacgctggtctccctagggagacccctcgggccgtagaccaccggcgtgcgggatttcttccccccattaaaaaaccgccgcccccgcgcggggcacaccgttaagcgtgtccgcgggagcaagattccaagaagagcgggggctgccgggagggtttaatctcgccgcgcggggcgcctgatttattagggcgcaggtttctcacggcgcaacgccgcccgcgagtactcgacatgttgcgcccccccgccaccccttggaccacctgccgtttcgcgcgggcagtgggtgtgtctggatttgttcttgacgacccgtgccctgggccggatgctgtgggtgaactctttagggagatgaggcgggccgcgctatttatacacgccgtaaggacgccccctatgcgggcctctcccaggcggggtacatgtggtctatctttgcgccgcggagataaatgcgtggccgcccacgggaggcggacaaacaggggcggcgcggccaaaaaaagcaagtcgcgcgcctcc

SEQ ID NO: 231834 - DNA, 999 bp, Homo Sapiens
  misc_feature (321)..(385): n is a, c, g, or t
  misc_feature (875)..(875): n is a, c, g, or t
gggtgtattttctttttcatgattatcggtgactggtcagtgtactcatcaatttccaaaatttgtataaatatcacaattagaaaaatgcctgaggtactaaagttatgttggctttttgtgtcttaacacacataaatactattgttattgcagcagatgccttttgaatccattttccataattgcggatagtcataaattgcttgctcaatttttagtaattattgctgttgacaccagcgttgtagatttttggtgttgttgaatgcagtagagagaccaagacactattctgtaagatcaataaaagtaattggnnnnnnnnnnnnnnnnnnnnnnnnnnnnnnnnnnnnnnnnnnnnnnnnnnnnnnnnnnnnnnnnncggacacagacaacagacgcgcaactgacacctataccacgaacatcagcgcatgctccccccagagacaaacccgccgagacccggtccgcggagtacagtgcgacccaccggacccgccaggcaggggtaggcccagcgcccgaataccgcagccccgacgccacgcatacaaggcaaaacgcgtgcgctgggctcccgccccctcccccctcccacgaaggccctcaaaagacacgccatgttgggccgcgtgccccgcacaagacaagaggaggcccaccagccgctcctccttctgttctcgtgcacaatacatcgcccgtgtagcgacgcctgttaggtcgcttcccctccccgcaccaaaataaaccaccccgtgggccggccaaccaccagtggcgctagacaaccaaccgatccgcggacgtcagccgcggcggcgattccgtcggccggcgtccgtgcgcccgcgctggccgcgctccgnagaccgtcgactccgtgtaaatacacatgcccccgccgcctcgctctgctgcctagtttcgcgcccgagggtgtgtgggggagtacgtgacactcactcgtactgcgcttgctgaccctgcgca

SEQ ID NO: 231835 - DNA, 136 bp, Homo Sapiens
  misc_feature (50)..(50): n is a, c, g, or t
  misc_feature (66)..(67): n is a, c, g, or t
aaaaaactgtcggccgcctctgccctccagaagatttctattatcattanaccatttcccgttttnngcgcgcggcgcctcagataggtaaagtggaacatggggtcatagccttggtttccataggaagaatcct

SEQ ID NO: 231836 - DNA, 1143 bp, Homo Sapiens
  misc_feature (161)..(221): n is a, c, g, or t
  misc_feature (396)..(507): n is a, c, g, or t
  misc_feature (1085)..(1085): n is a, c, g, or t
ggtcatgaaccattgatatttcctgtatatttcatgaatgtgacttcagtcattctagtgttaatactgtggaatgtcattggtgtagcaacgtgggttcaccaaaacacctttttatacaaaagacagatgtgtgaattaaagagattacaggataaaannnnnnnnnnnnnnnnnnnnnnnnnnnnnnnnnnnnnnnnnnnnnnnnnnnnnnnnnnnnntatgaactatcgcgaaccagcagccacctgaacaatgcctccagcgcccgcccagtttgctctgccagcccctaccgtcctcccccggaccagccttgacaccctccgtacatgcggatcactcggagaaaacaccaccgctgcagcgattccttgttagataaaagcttactcnnnnnnnnnnnnnnnnnnnnnnnnnnnnnnnnnnnnnnnnnnnnnnnnnnnnnnnnnnnnnnnnnnnnnnnnnnnnnnnnnnnnnnnnnnnnnnnnnnnnnnnnnnnnnnnnagccgcctaacctgtggcgccctcgttatgccgacccacgtagactagcggcaggcatagtggggccgcactcgagatagaacaaacgccgccgcccagcctatcctcgcagtgtccccgagaagctagcgggctgcacaacagtttttgacgccgccttccgttcagaacccgccagcaccgccccccgcacgactagcgctcgccgacgcccgttgtcatgcgttacgcccggacgcccgctggccgtccccgctcgcccttatagcgacgcggggactgcgaatcgctggtcgtttgatcaccgacattgctggggtcggtaattcggcgctacgcgtgtcttcgcgtgatcaccgcctcgcaccggacttgaaacctcgtgcgaccgcgcaacacgcgccacatccgtgcgtgagccgttggctcgtctagcgcacacaacaacacgcgcgtgaaatgacgcccacacctcatgcgcggagcctcgaaaatctatcgcccgcccatagtccctcctcccgcactgtcgtcgaccgtgacttatgcgcccttctccatatcctgttacgccacantgcgcgttcgcacgccgtacttgtcctcggtgtttgcctagtgcacgcaggtgatact

SEQ ID NO: 231837 - DNA, 879 bp, Homo Sapiens
  misc_feature (163)..(213): n is a, c, g, or t
  misc_feature (287)..(347): n is a, c, g, or t
  misc_feature (349)..(475): n is a, c, g, or t
  misc_feature (786)..(786): n is a, c, g, or t
gtcctacttctcccttctttttccttttctccccgccggttggctcctttttcctgtttcgcggtctcctgcttcttctttttcttgctacggttgtgttgttcgtctctggcctgtttgtttgttttcttttctcgtgcgtgtctgttttgttgtccgttgnnnnnnnnnnnnnnnnnnnnnnnnnnnnnnnnnnnnnnnnnnnnnnnnnnngctctcctgtttttctcctcttcctgttcacctgtgttgcttgcttctgaccttgttcctcgttttgccttgtnnnnnnnnnnnnnnnnnnnnnnnnnnnnnnnnnnnnnnnnnnnnnnnnnnnnnnnnnnnnngnnnnnnnnnnnnnnnnnnnnnnnnnnnnnnnnnnnnnnnnnnnnnnnnnnnnnnnnnnnnnnnnnnnnnnnnnnnnnnnnnnnnnnnnnnnnnnnnnnnnnnnnnnnnnnnnnnnnnnnnnnnnnnnccgtcttttgctcctcttggcgtcgtcggttctctctggtgtgttgcccctcctctgcgttctctttgtttgtttgccgccctctgttttgcgcctgttgctgctctttcgctccccttgtcttcctctcttttttcgtcttcgcctgtccgcttctctctccgtcgtcgatttcttcttctcctccgcccttgtttcgttctgcgtcctctttttactcgcttatcctctccgtgtctcgcctcgccggctctcgatcgttactctctcttctctctccgtgtttctatgtttgctgagtttctttgtcngtggttcgcgcggttcgcgttgtcggtgtcgtgtgctccactcgactattgcggtttcttgtggttctgcgtgctgctctggagtacgttgtt

SEQ ID NO: 231838 - DNA, 1097 bp, Homo Sapiens
  misc_feature (619)..(630): n is a, c, g, or t
gggaccacccagagggatgagctagcctgtagaggggaactggggtccaaaggtctttggggagggaggcagagctggctggctcagctaagtggcacgatgacgcatgaaggagattatgttgtgctctttattgccaaaaataaacacttttagaaagacgaggaagaacatgccgccgcagccacgccagcccgacggacaccgacaacaccgaaaacagtaaaaaacacctgtttgcgagcagacccccccaagagacaagcgcgcgcccttgtgggcgcgccccggccccctcaaagaaagtttttccgaacccttctcttgggggccggcgggccccctgaggttaaaggcgaagcgggggcctagaccggtttctctaggggaaatatccgccgcttaggcatacgtgcgtgggaattctcccaccaagaaaaacaaccccccggggggggacaccgcggagggcgttttacaacaacactgcgcagaggggcggggccccgggcggcccttacgcggggcgctactacgcagcgaggggtgccccaccggccgggctcaagaaccgaaatttagcgccccgccggccggtggccccatatagaggagggannnnnnnnnnnnaagccccattacaacctgctgttcgcccgcgcgcgtgaggatgccctacccacagaggcgggggagggaagcgaaccgcttacagccaaccgacggcgccacccccggcgcacccccgttgccgcccatgctgcgagcatgagagtacttagggcaccgcgcgggcggccgccagacgcgggggggcgagacaaaccagctcgggcctgatttttgtgcgccaccggtgcaagaacaccagaagatggcgggcagcacatccccctccccccgtgaggtttcgggccgcgagccggcctagctgcgtcgtctgtcccttccgagaaacccccctttctgggaggcccacaatgcgccgcagagtgtttttcgcccggcataaacaccttctcgcccattgtatccgcgcaaaaaagattcggtgcgaaagaaaatacgtgctcacaatctatactcgttccgtggcg

SEQ ID NO: 231839 - DNA, 850 bp, Homo Sapiens
  misc_feature (44)..(44): n is a, c, g, or t
  misc_feature (58)..(86): n is a, c, g, or t
  misc_feature (101)..(113): n is a, c, g, or t
  misc_feature (145)..(154): n is a, c, g, or t
  misc_feature (179)..(188): n is a, c, g, or t
  misc_feature (218)..(228): n is a, c, g, or t
  misc_feature (232)..(232): n is a, c, g, or t
  misc_feature (493)..(515): n is a, c, g, or t
  misc_feature (556)..(556): n is a, c, g, or t
  misc_feature (753)..(753): n is a, c, g, or t
tacccctttggtttgggggccccggcccctttcgggcccctttngaaaaagaaaaggnnnnnnnnnnnnnnnnnnnnnnnnnnnnngtggggccggggcgnnnnnnnnnnnnnaaaagaaaaaagaagccggcgggcactcttgnnnnnnnnnnaaaaagaaaaacccccgccctgagnnnnnnnnnngcgggctggttttttctctccccccccacnnnnnnnnnnngaantcccccgccctgggcgctgcgggcgtggggcggcgaccacgatgccccctcccgccgacccgtggcagattgtgagggaagcggggcccgcacgccacgcccgcgccggatgtgaaggatggtgccggttccggaggagaccggcgcacgtgcccgccgccgccaaccgactccacgtgtcccacatattcagaggcgcgcgccgtccacgcgttgcagcgggggtggccggcccgaccctccataattcccacacccccnnnnnnnnnnnnnnnnnnnnnnnttctcactttcttcacccccacacacccgcgcccatcttanatcaaatacagggccgggcgcggagagacgtgcccgcgcggcagttacgcgtgctcgatatgttaacgcggccccgcgcgacgcgagctgtgacgacgcccgccagctgctctacgcctggcccactagcgagtatcgaccattcgctgcttatatttcgcacgatgtcttgtgcgcgccggatcagtggtctcgtnattcgtgcctggacgtccgctcccccaggccgcgctccgtgtagtcaggcacggcaccacgcgcctgtctgtattggaccgcgctccgagcgctccc

SEQ ID NO: 231840 - DNA, 1058 bp, Homo Sapiens
  misc_feature (273)..(320): n is a, c, g, or t
  misc_feature (477)..(486): n is a, c, g, or t
  misc_feature (875)..(875): n is a, c, g, or t
  misc_feature (1023)..(1023): n is a, c, g, or t
  misc_feature (1037)..(1037): n is a, c, g, or t
ggattctgtatgtccctccatatttttggtcacttttgataagtttgcatgaaaccattttggtgcatttttagttgggaatggtacatttttgtaaatccacccagtgaacatgaaattgtacattgtgtataattgttcattagaaaggacagttttacatgaatattcatatatttattttgttttaatttgaattgcctgttcagggttccttatgcagagaaataaagcagattcgggaacaaccaaacaaccaaaccacaaccaggnnnnnnnnnnnnnnnnnnnnnnnnnnnnnnnnnnnnnnnnnnnnnnnngccttggtcggccgcctccgccccctcaaaacatttttctaaacacctttctgttggggcggcggggcgccccaaaaggaaaagggaaacttgggccataagctggttccctaaaagaaatcctgggccatgaaaaaagggcttgggatttcccccnnnnnnnnnncccccccgggggaaacccaagcttttttgaaacaaattcccgatgggagtttcggagggtcattaccgggattttatcaaacgggggtgcccaaggggaggcttcgaatataaaaatttaagcccccccggccgttggcccattcatatgggaaatagaggtggtgtaaatattaaataaaagcgattttctgcccggaacgtgggaagacgcccccccaccaaacgcgggtttggaataaacctttgaaattcgcccggggggaggaatataagaacaccatttgtgtcgcccttggcggacaaataaacatatatttcgccccacgtgcgagagaaacaaaccggcggggcgccgtacacacagacattcgttctccgactttattntgggcccacacacctctattataatactatacacacgacgtgtgctgtgaagagatacactcccaccacccgaggggagtatcgcgccctgtggcaaacacacacaaacacactactatattctctctacacataagatcaccccttnttatatagagagangaaacatatggagccgcgccg

SEQ ID NO: 231841 - DNA, 1112 bp, Homo Sapiens
  misc_feature (253)..(368): n is a, c, g, or t
  misc_feature (691)..(691): n is a, c, g, or t
  misc_feature (877)..(877): n is a, c, g, or t
  misc_feature (994)..(994): n is a, c, g, or t
gggtgagagatgtgagactcttcctttcacttggacacttagagggcattttaaggttattaattggcctaatttcagtattgttatgtctcaggaaatgaagagagatccaaggagagggagagatgggggatcagccagtcagtggagcagtccataacacacaaattcatcaattaagtttgctgtcttacatgggtgtggttcttggcatccctgaaaccaattacaatagtaacatcagagattattnnnnnnnnnnnnnnnnnnnnnnnnnnnnnnnnnnnnnnnnnnnnnnnnnnnnnnnnnnnnnnnnnnnnnnnnnnnnnnnnnnnnnnnnnnnnnnnnnnnnnnnnnnnnnnnnnnnntgtttctacaaggagagcaaaaaccgaaataacccagcccagtcatagtgggcaggggctttggtaagtcccttagcaaactcggaagaacaagacgcacggtagacacaaggcgccacgcctggtcgggccgcccttccagcccctcgaaaaaaccttttccttgcaaccatttcggttatggggcgcgccggcgccccccgtccagggaaagtgtgaaacattggcgtcataacgctggttcttcctcgaaggagaaatcccccggggcctatggagactaggcggggtttggcgcattcgctcccccccaagaataaaanagaaagcgcgccgcggggtggccaaatccgcgagggcgtttcctggaaacccaaattcgcgccagtggcgagagtttcccgcgaagaggcccatttacatggccggacacccatctccaccccgtggaggctctcaacgcgcgtgggggtttcgcgcgtcacttaccaaatgtacacccgcccccncgcgcgccttgaggcccacttttctcattgtgcgcaaccagaccctggctgagtcgaaccgatctgcatttagaagcgccgctgttcttctcggccgcgacagtgtgtgggagatanctcacttgctacacaacgacgcggggacgcgcgtcctgcgcgaaactcttgtgaatactgcgcgacacttgcgggcgcaaatctcagaaccactactcttggcctcgtccccctctaa

SEQ ID NO: 231842 - DNA, 977 bp, Homo Sapiens
  misc_feature (901)..(901): n is a, c, g, or t
gggggagaggagttctctggatcccttccggttctaagtattgcccaattcataaatcatcctttgctcaaataaactgtttaatttattctgcctaaagtttactaggctatctctccccgccttcagctgctctcagtttccatgtagcttatatagtgtacttcaaccctgcagtatgattttaatgtttaaaatgtataatgttccctaatcctttatccaatattaaaagagtctttatactatactggagggggaaaaaaaactggccttttttagacaccctactgtagactctaaatgctgaattttgctttattctctgatttcaaaaacctaacttcaaagaacttgattcataaaatttgaatctgccagaaaacagttttctggaccaagtcagtaagattgatccttaacaccattttaaataaacagtggaaagcgcggcgaggcggggcgttgagggagagaaggcgtcctgggcgggccgccctcggcccctcgaagaaagttttttaaaacccttttcgtttgggccgcccgggccccccagtgagggaaacggggacccatgggcccataagtcgggtttcccctaagaggaagaaccccccgggggccatggacgtaaaggggcccttgggaattttctcccagccagataaaacaaaaacgccccgcgggacgggcgaacccgaagaggcggctcctttgaagacagaaccctcccacgacggggagctttcctgggaggcggcctcatttacgtgtggagctctcataacgcgaccagatggagaaccgcccaagacgcggaaccgcctcgtgagatatcttgagagatttgcgcggcccccgccggtgccttgaggcacgccttccactctgtcgacgngtaccccgtctggtgggacagacacgtcgtgtagaaaaggcgaatttctgtgcgcgcgagacaaggggtggggaga

SEQ ID NO: 231843 - DNA, 1135 bp, Homo Sapiens
  misc_feature (53)..(124): n is a, c, g, or t
  misc_feature (127)..(130): n is a, c, g, or t
  misc_feature (132)..(133): n is a, c, g, or t
  misc_feature (135)..(135): n is a, c, g, or t
  misc_feature (140)..(141): n is a, c, g, or t
  misc_feature (143)..(182): n is a, c, g, or t
  misc_feature (811)..(811): n is a, c, g, or t
gggtcttcattgttatattctcatagttttaaaagagtaaagattttttttgnnnnnnnnnnnnnnnnnnnnnnnnnnnnnnnnnnnnnnnnnnnnnnnnnnnnnnnnnnnnnnnnnnnnnnnncannnncnnanatcgnnannnnnnnnnnnnnnnnnnnnnnnnnnnnnnnnnnnnnnnnagcaggattatcggcgggttccgctgcacgcacgcgcgcggctcccgtgccccctcacactcgccgcctcccgtatgcggaacatcgagagctgaaggcaccctccccattgtccctagcgccgctccaggcggtcatcacaagcccggaccgaacccaccaccggatgaaagggcaccatcccagacagtgtccctgacgcctcgccgacccccgcctaccgctgtccggtgcctcactttgtcctccgtcgatccggcggcctctgtctgccccgtggggccccggaacgggcggacgagcaacagtcggctgttggcccgtgctcacgcctcgtccgcgcgaccgctaagcacgacgcccccccatagtctcgtatacgtgagcgatacgccgccgcgagcgggcggtcgggcggccatctccgcgtgctcacttattcgcctttctccactcgtctcgtcattattgaacctctatctcgccatgtcatcaacgtgtcacattgatcctcccaccgcgcgcccccacagactgtcccgctacgttggcacccacacgcacacacccttaccagttttcaccgccctgatgcgtagaaatttcgccacaccgttcacacacgtgcnaggctgccccctttcacccgtacgccgccttgtcctgccccgttatcacccggtctgtcactttccgcccccccctttttgtcacatccacgcccgctccttgatacggacgatcgagtcacccgcctatgtgggagcggcctaataccgccgacagacgtcgcacgccccttctacggaacatgcacccactaacgtgtttaccacactcgtccacccggtgataacgtcacgagcccgacctggcctcatgcgacccgcgtgaccccgcgtctcgttagggcgcccctgacgacgcgctcacccccccttccactgtgcaca

SEQ ID NO: 231844 - DNA, 1115 bp, Homo Sapiens
  misc_feature (1014)..(1014): n is a, c, g, or t
ggaatattaactcaaggtaaattataataggattgtagataaattaagcatctttatctttgattacagagatatttagcatatgactatagataatttccccttcatattttcttgggcttctagtatttatgtatcaagaaaattatttccttatgtttgaaatggtgacatttctgaaatgtaccagcagaggatacagggatttttgtttgcttttcattttcttatttactgaagaaataaaggcattttagtttatgacaacggagacgctacgacgcagtgagtccacatctacccaaccgccccggccccgcaccgttggcatgtcccccccgtgaccgggaggatgaacggcggcaggagggagacaaatggggtgtgtggggggtccgcgctcgggcgccctcaaaaaacgtttgtaaaaacacttttcggtggtgggcgcggcgggcgcccccgcacggggaaaagggggaccacggtgcgcgcgcgccagcgtggtgcttttacaggaggcgaaagcacttgcggggcccgaagcaacagcgagggggccgggcgggaccttgcgggggccccaggagaaaaaagaaaacgccccgccggggcgggctccaacacggaggagaggggcgctgttcggtggaaagaagggaaactgcctgcgggagaggggaggcgcgccacgcggggcggggtcgttgcttctcggggtggggcctcttcgtacgccaacgggggcgagggcccacgcaaaaggcgtagggctcctggtgtaatagaggagcatggcatgtctgggccctccgccgcgcgccctcgaccggaacctcgcgatgcgacagcggtgacacggacgtggtggaggatgtgttccgtatatggacgacgggttggtcattgggcgagcggagaatcggtggagagaacagacgcctccacgagagaacgggccgctaacgtgtatgagtcgagcgcgcacgactgagacgtcgcgcggcgggaacngctagaccgatacaacacacacgatagagcgggcacggagcgcgcgcaggatcgtggtgcttattgtcggcccgcaggcgtgcacgagaatagcggacggg

SEQ ID NO: 231845 - DNA, 989 bp, Homo Sapiens
  misc_feature (82)..(171): n is a, c, g, or t
gggacgccatgttgggagacttccaaacaagtctagagagttggcacttagggatgaagaaatcatcttctgaagtaacctnnnnnnnnnnnnnnnnnnnnnnnnnnnnnnnnnnnnnnnnnnnnnnnnnnnnnnnnnnnnnnnnnnnnnnnnnnnnnnnnnnnnnnnnnncagtggcccggacaatgcttttgatgaacagatgatgagtgacaatgcaagatgaactgtgacaaggatcccgtgggttgtcaaatgagttaagaggaaggaaaaattcctttgggttgccgaggccaagacaagcttcatttcgagcttagtcttgaagatgagtgggattaagataaaaaataaagaatggaaatgagcatggccgcgctgagccccgcggtttcggtcggagggggtagaagaggggacagcgcgcgcggcgagcgcccccggctgcgagcgtaggggcgcgcggggggaagaacaatggcgcacgcgcccccgtgcgcctccagaggagccttttccgggaaccttcccttgtgggcggcggggggggcccctgctgaggcaatggagaacttgtggggccgcgccgccggttttccggagagggacaccccttgtgccacatgatgcaacgtgggcgctgggaatcctcctccgcccattaaaataccagcctccacggcgggcggtaccccccgaagggcggcgtgcgagcgcgataaccccgcgttattgtggactcccccctcgcgggggttttgcccgcggggtgctcctctggcgtgagcggccggcttcctcgcagcgacgacgcccaccgacatattgcaaagatgtagaggcgctcctgggcgcgataggagcgtcgacacgatgttacacgagctcctcggtgtgggcacgccttgcccgacgcatggtgggcccgttgcggtgcaaaacgacgtgggggaatcgctaactcccgccatgcgccgtgtcgtcca

SEQ ID NO: 231846 - DNA, 640 bp, Homo Sapiens
  misc_feature (177)..(300): n is a, c, g, or t
  misc_feature (306)..(322): n is a, c, g, or t
  misc_feature (329)..(347): n is a, c, g, or t
  misc_feature (361)..(441): n is a, c, g, or t
  misc_feature (542)..(552): n is a, c, g, or t
gggtgttgcctcctaccttgcccccaagttctgatttttaatttctatggaagattttttggattgtcggatttcctccctcacatgataccccttatcttttataatgtcttatgcctatacctgaatataacaacctttaaaaaagcaaaataataagaaggaaaaattccaggnnnnnnnnnnnnnnnnnnnnnnnnnnnnnnnnnnnnnnnnnnnnnnnnnnnnnnnnnnnnnnnnnnnnnnnnnnnnnnnnnnnnnnnnnnnnnnnnnnnnnnnnnnnnnnnnnnnnnnnnnnnntttggnnnnnnnnnnnnnnnnnaaaaaannnnnnnnnnnnnnnnnnngggccccgggcccnnnnnnnnnnnnnnnnnnnnnnnnnnnnnnnnnnnnnnnnnnnnnnnnnnnnnnnnnnnnnnnnnnnnnnnnnnnnnnnnncccccgggggaaaccgagggttttaaaaaaatccaaagggggtttggggggctttttgggattttttaaagggggcccaagcgggttctaatttaaattannnnnnnnnnntgcccttttgggagagtgggtggaattttttaaaattttccgcccaagtggggacccctccccaacggggtttgtgagactttatacc

SEQ ID NO: 231847 - DNA, 1373 bp, Homo Sapiens
  misc_feature (656)..(656): n is a, c, g, or t
  misc_feature (689)..(689): n is a, c, g, or t
  misc_feature (691)..(691): n is a, c, g, or t
  misc_feature (855)..(855): n is a, c, g, or t
  misc_feature (903)..(937): n is a, c, g, or t
  misc_feature (984)..(984): n is a, c, g, or t
  misc_feature (1082)..(1082): n is a, c, g, or t
  misc_feature (1112)..(1112): n is a, c, g, or t
  misc_feature (1234)..(1234): n is a, c, g, or t
  misc_feature (1251)..(1251): n is a, c, g, or t
  misc_feature (1294)..(1294): n is a, c, g, or t
aaaagtggcccaatatgctcatcactgataaatgctccctggccttaaaaactaccaacatataatatatatgctgtcttaaaagttaatgatccaagtggcacctctctgaacctactttggcttgggaggctgcccagttaaaacaaaaataagttactggtacagaaagagaatgaaaaatgaaagcctccttttatcctatcatcctaattccttttcccagcaataatgactgctgtgtcggattccttctgcaaataaaagtgtatacatatatgtagcaaatcttacttacgcgaaggacactgccgcgccggaaccgcaatggccgaaaggggtaggaacgagagcacgggccgccccctccggtctcggcccgccaccggcgcgagcgcggcctttgttgggcccggcctcgggcccctccagaaaaagtcttttcgcaaacccatgccggtgtgcgggggccggtgcggcccccaggggtgcggtacgcgggcagaacagggggaccgcgggcataggtgcgttgtcgcgtaacgagacgaatacccgcgtgggtggcacggaggggcgcgcaaagcggcgtcgccgggaatcgcccgcctcgcacccatcaactacaataaacgacccgcgcgccgcgcccgtgngtagcacaccaaacccgtgtgatggtacggggntngcgcaggacacaaaaagagagcagctcgtctcacccagcggagtgactgccgaacaccccatgctttcgtgttcagacgcgccggttaacgccccacctccacccgtcttgccgggggaggagaaagaatttacgttatacaagctcacgagacactcgcccgnttgggtttgtttctgttccgcccccacacactgttggcccgaggcggnnnnnnnnnnnnnnnnnnnnnnnnnnnnnnnnnnngcactttgtttgattcggcgtcgtggttctctccgcccctcgctgtnttgtctgggccgacccccgccttcgttattgtgggccggcggtatacaaccatgcaccaccgctgtcgagactgtgggtatcacccaccccccccgcngtgtgccaaaatcccccctctatttgtatntcgtactgtgccaaaaacgtggggatggggaaacgagcccacgccccccacgcgcatcaaccgacggagcaatgtcgacgatcgtaacaacgctcgcgtgatacgaacgacgcggccgcgtnaccgggtggtgtgtctnctcaccgcacctcccgtagtggcaccacgcgggctccgcccgngtagatggacgcgctatcctggttggcgccgctccgggtgagaaataagcagccccggctgctcacaagacgtaccact

SEQ ID NO: 231848 - DNA, 504 bp, Homo Sapiens
  misc_feature (43)..(47): n is a, c, g, or t
  misc_feature (49)..(50): n is a, c, g, or t
  misc_feature (53)..(156): n is a, c, g, or t
  misc_feature (250)..(272): n is a, c, g, or t
  misc_feature (289)..(298): n is a, c, g, or t
ggagggagatgggggtcattaaaggaaactgaacattgaaaannnnnannaannnnnnnnnnnnnnnnnnnnnnnnnnnnnnnnnnnnnnnnnnnnnnnnnnnnnnnnnnnnnnnnnnnnnnnnnnnnnnnnnnnnnnnnnnnnnnnnnnnnnnnnccttggcgcccccctcgccccccaaaaatttttcaaaacaattctttgggggcgcggccccaaaaggaaagggaacagggccaaacttgttccnnnnnnnnnnnnnnnnnnnnnnngggttggaatccccacnnnnnnnnnncccccgggggaaaccaaggtttataaaaaaacccaaagggagtccggaggacataacgggatcaataaacgggagcccaagcgaccccaaaacaaaataagcccccgcctggcaattaataaaagaatggtgaaaatacataaacaattcgcccgaatgggaaacccaccaaaaacgggagggaagaaacttaaaaccccaagggg

SEQ ID NO: 231849 - DNA, 830 bp, Homo Sapiens
  misc_feature (172)..(210): n is a, c, g, or t
  misc_feature (582)..(592): n is a, c, g, or t
cgccgacgcgaaccgagctatagaggaggaagtgtcggccgcctcggcccctccaaaagctttctaaacccatttcgtttgggctcgcggggccccactacgtaacgtgaacattggccacagcctgttttcctaggaaaatcccggctcaatgactaagcgctttggaatnnnnnnnnnnnnnnnnnnnnnnnnnnnnnnnnnnnnnnnaagtgcgttcctgaacagacattccccaaaatgggaactttcctgcaacggttccactttcccgcggcagtgctcatttcaccctcggggcggtcccccagagagttgaacggccttcacaaccctagttccgcaccttgtaagacgcgccaccccagtcaccccccgtgtggcgcacagtcttctaatattccagccaaaattccaacccctcgggtgtatgcccaaaatattctccacctctttaaaaccgcccatattctttatctggtccgcgaaagactaaatttggctggacacacgcccactcttctctatgaaaaaacacgggggcgcacatcgggacgggtgaaaatcgcctgtccaatgatnnnnnnnnnnnatatgcggggggacctttgcgtagaaaacccccccttgtgtgggttgggcccactttctgggcggtgtgtaattaacccggggagtgttgtgcccgccacatggggggtttgagtaacacaccccgcggtgcgggcagcgctaatataccaaatttttgactccccccgggagggctccggatcgcgaaggctgttgtttcagagtctcccaccgacacccggcggcgtgttagacag

SEQ ID NO: 231850 - DNA, 900 bp, Homo Sapiens
  misc_feature (153)..(205): n is a, c, g, or t
  misc_feature (598)..(606): n is a, c, g, or t
  misc_feature (732)..(732): n is a, c, g, or t
  misc_feature (814)..(827): n is a, c, g, or t
ggaataaacacgttgcggccgcgtcccccgccccaaaaatgtgttaaaaaacgtgtttttgggcgccgggcgcccccacgcgggagggaaccgcgccgtgccgcgctgtccaaaggaaaccccccggtccacgccccaggggcgcgggcactnnnnnnnnnnnnnnnnnnnnnnnnnnnnnnnnnnnnnnnnnnnnnnnnnnnnngaaaaaaaccgccaaagcgcggtgctaccccagcgcccgcatcactgggcgaccattcttcccccccgcgagtgccgccccttacgcgccaccctcctcggttaacacacccaattattgccccgctccggcccgccccacgtgcgcccgcgcgtaaaacagacggcgcagagcacgttcgctctcggcgacactaattcatacctcactcgcctggacggcgcggcgccttctctgtgccgagggcccacaaccgggccccgcgagaaaggcggcgtggtctctctagactcggtcgccgcccgcgaactggcggccagccacacacactcttgggaagagtcagcgacggccaactcacgtgcggcgtcaactcggtgaggcgtgaccgtnnnnnnnnncgggcgcaactcgctcgcggcgcacgacggtgtgtaacggcgcgtcaccccacgctggcgggcgagggcaacgaaccaccccgggccgcgcgatacataacacagggtgatagacggcggtagccnacgctgcgcggtggcgggcgcccgtaatcgctcatcacaaatgacgcgcacgccatggcgcgcgtctgggcccacacacctnnnnnnnnnnnnnnaatggaggcagtgtgcgccgccccccacccaaacaaaaaaaggctacgccttcacgcctcaaacagaaccacg

SEQ ID NO: 231851 - DNA, 572 bp, Homo Sapiens
  misc_feature (238)..(411): n is a, c, g, or t
  misc_feature (417)..(417): n is a, c, g, or t
  misc_feature (419)..(422): n is a, c, g, or t
  misc_feature (433)..(447): n is a, c, g, or t
  misc_feature (475)..(487): n is a, c, g, or t
gggggttttgttttttctttaagaaaaagaaatgtacaccactcctcatgtgccattttgtcctcagagggcggctttacttttttggtaaaggaacaagctgctggccttgaccaggagttcatatataactgttattacagaggaattgttataactactaatgtttttaaaaaatttattaaacattattaaacttgatcaggtcaggccaaataaagttttattggaacacagnnnnnnnnnnnnnnnnnnnnnnnnnnnnnnnnnnnnnnnnnnnnnnnnnnnnnnnnnnnnnnnnnnnnnnnnnnnnnnnnnnnnnnnnnnnnnnnnnnnnnnnnnnnnnnnnnnnnnnnnnnnnnnnnnnnnnnnnnnnnnnnnnnnnnnnnnnnnnnnnnnnnnnnnnnnnnngggagngnnnncccgtgggcgnnnnnnnnnnnnnnntcaaaaaattttttaaacaccctttgtnnnnnnnnnnnnnccccaaagggagaagaaaaaagaggcacaattgtttttccccaaaaaaaccccggggaaaaaacaaggggggggtttttcccccc

SEQ ID NO: 231852 - DNA, 489 bp, Homo Sapiens
  misc_feature (59)..(247): n is a, c, g, or t
  misc_feature (257)..(268): n is a, c, g, or t
  misc_feature (293)..(303): n is a, c, g, or t
  misc_feature (322)..(438): n is a, c, g, or t
ggtctttttttaaagacaacctgccattaccacatgactcaataaaccattgctcttcnnnnnnnnnnnnnnnnnnnnnnnnnnnnnnnnnnnnnnnnnnnnnnnnnnnnnnnnnnnnnnnnnnnnnnnnnnnnnnnnnnnnnnnnnnnnnnnnnnnnnnnnnnnnnnnnnnnnnnnnnnnnnnnnnnnnnnnnnnnnnnnnnnnnnnnnnnnnnnnnnnnnnnnnnnnnnnnnnnnnnnnnnnnnnttggcccccnnnnnnnnnnnnaaaaaatttttaaaacatttttttnnnnnnnnnnnccccaaggggaagggacannnnnnnnnnnnnnnnnnnnnnnnnnnnnnnnnnnnnnnnnnnnnnnnnnnnnnnnnnnnnnnnnnnnnnnnnnnnnnnnnnnnnnnnnnnnnnnnnnnnnnnnnnnnnnnnnnnnncctcctcgcggctcccacaaggggccccagggggcccccatatcataataa

SEQ ID NO: 231853 - DNA, 1234 bp, Homo Sapiens
  misc_feature (458)..(477): n is a, c, g, or t
  misc_feature (513)..(570): n is a, c, g, or t
  misc_feature (639)..(653): n is a, c, g, or t
  misc_feature (945)..(945): n is a, c, g, or t
  misc_feature (1061)..(1061): n is a, c, g, or t
  misc_feature (1097)..(1097): n is a, c, g, or t
gggttctcagagactggagaacgtgtctggttattatgcagatgcacggctggaggtgggatccacacagctcagaacagctggatcttgctcacactctttcaagagaagcttccttggagaataacacagcccttctgggagtccacgccagcttccaaatgtctgtggcagctcttccttcattctcaacacttacgaacaggaacataaataaatagaaggaaaaatatccatttatattaagatgctcttcttgttaaatccaattaacaattaaacattctctgttacgataaagaaagagggacacgcgacaggcggagggcgggaggggaaggaaacgggaacacggcgaacagccggacggagaaacgaacgggcgcgggggacgcgcggctaggggcgcggggcgcgggacagcaccgcctggcccgacccgaaaaattgcgcgcggnnnnnnnnnnnnnnnnnnnnagaacaaattttttcttaaaaaaccctttcgttgtnnnnnnnnnnnnnnnnnnnnnnnnnnnnnnnnnnnnnnnnnnnnnnnnnnnnnnnnnncacaagggggtgttcttccgaagagaacaaagaacccgcccgccgggacggatgcggcaggagcgtgcnnnnnnnnnnnnnnntgctcccgcgcgacgtgaccaataaggaagaaacaacaccccccgcgccccggggcgtggggggcgacacccccggcggtaaaggcgcgttctgcttcgtgtgggcatacacataaccaccccctcagacgatcgagtggggcgggtggcgtcgcgctgggggggcgccgcgttattcggcgaggcggggtggggctgtacttgaggctggacgcaagggggtcgcagactctcagctgagagcgccgcgacggctcgccctgcgcacctgtcaatttcccctattttttgnggggtgcgggcggcggacgcgggcggcgcgggtggatgctgcccgggtgtgcgcggcgcgcgggacgaggggtgggaggtctcaacatcatatatatcaaaaagagaggtgttctngctgtcccgccccgccccggcagtgacagcaatatnttcctctctcccacccacggcccgcgcatgcggcagaaaacaacaccgtacagagctccctccggcgcgcggggccgatgcgacgcgccgtgctcgttgggcgacgcgtggggggggaggcgcgattattatggcga

SEQ ID NO: 231854 - DNA, 353 bp, Homo Sapiens
  misc_feature (119)..(260): n is a, c, g, or t
  misc_feature (263)..(266): n is a, c, g, or t
  misc_feature (268)..(281): n is a, c, g, or t
  misc_feature (289)..(307): n is a, c, g, or t
gggggggctactgacttggttaccttcttgtctcttgtcccaaagatttaaactatgtacctttgtatagctcttctgccccattttgacttcttagatgaaagtatttactaaaattnnnnnnnnnnnnnnnnnnnnnnnnnnnnnnnnnnnnnnnnnnnnnnnnnnnnnnnnnnnnnnnnnnnnnnnnnnnnnnnnnnnnnnnnnnnnnnnnnnnnnnnnnnnnnnnnnnnnnnnnnnnnnnnnnnnnnnnnnnnnnntgnnnngnnnnnnnnnnnnnnaaaaaaannnnnnnnnnnnnnnnnnngggcccgggcccccaaaaggaagggaacggggcccaacctttttcc

SEQ ID NO: 231855 - DNA, 1043 bp, Homo Sapiens
  misc_feature (64)..(194): n is a, c, g, or t
  misc_feature (326)..(351): n is a, c, g, or t
  misc_feature (379)..(389): n is a, c, g, or t
  misc_feature (481)..(542): n is a, c, g, or t
ggcattacggccgggaaaacagcttatgtaattaaaggttgaatggcacatcataattccagcnnnnnnnnnnnnnnnnnnnnnnnnnnnnnnnnnnnnnnnnnnnnnnnnnnnnnnnnnnnnnnnnnnnnnnnnnnnnnnnnnnnnnnnnnnnnnnnnnnnnnnnnnnnnnnnnnnnnnnnnnnnnnnnnnnncacccaaccaccccacacaacaaccacaactttctcccacatgcgcccctgttataaccaccgctatgcctatcccctacaatcctccgccccgtagccccccgaggtcgccctcaccacaccccctaatannnnnnnnnnnnnnnnnnnnnnnnnntgctttccctgctcccctcactccatgnnnnnnnnnnnttcgcagttaataaccgggccccccacccctttaccgcccccgatttatccgctccgaatcccccgctacgccccactccccttttaccatnnnnnnnnnnnnnnnnnnnnnnnnnnnnnnnnnnnnnnnnnnnnnnnnnnnnnnnnnnnnnngggcgggtacttcggcaaccacatcaccgccgctccgacctccccccatttgtcgtgacaccactcagcctaccctcccaaaaactgcccgtcacaccccgggtcggcgcgcccccgaacagcgtgagcatacgcgaatcaccccccgttcacccaaccacactatccccctccattactccgccatatgacccatcccccacccccttcacactactacccccgccctttcttgtccgcccaccattcagagccccgccactccaatctctaatttccacgccacctattgtcacccgccaccccatgggctttttacgccccacatctactcttcctcaccgtgagatataagccactacatgcataccgcgcccgcacatttctcccccccggtttacccgcacccgccctcctcaattattatgtgattcttcccgccaacgcccctcggtgccgtcgcatttacgcccccatcccgataccgcctagacgagcttt

SEQ ID NO: 231856 - DNA, 802 bp, Homo Sapiens
  misc_feature (42)..(60): n is a, c, g, or t
  misc_feature (394)..(419): n is a, c, g, or t
  misc_feature (606)..(614): n is a, c, g, or t
  misc_feature (725)..(725): n is a, c, g, or t
gggaaattaacactaagaaaaagtcatcaatatttttcaacnnnnnnnnnnnnnnnnnnnactttggaaaggacaataactataaacctatatccagattttctttctgctgaagctgttgtcagaatcttcctttggacaaaacatcactagctgactataaaaacaaaagtgtcatcattgaagccctgaagaggcagggaattgagcttcagcaaaatacaggaaaagaactactccagtataaatgtcagaagacagatttcctaaacaaggaaaagagacatcaaaaattttaacataatcacaatgaaatcattttttaccactttcaacgtggtgtttcaagcggactgtcactcacacctggcgagatgaatattacccaaacaannnnnnnnnnnnnnnnnnnnnnnnnncaattaccgcaaaggttttaccccatttctttcggaccttgagggaccttttggtaactcctaaatccccctagtgggttagcactaggctaaaacagttcgcacttatcccggggggggcctcgtccttggccgcacctccccttttttcctatcccaacgcgtttttctcctggttctttctcgnnnnnnnnntgtgtgtgctcctcccacaagaaaattttgtttcctgagacacccccttcctgttttggggcgcgccccccgtgtcccccacgcgtacggtcaacagtgagaactctgggncccatccccctggttctcccgtcgtggagatatcttggcggccccggaaaaaaagggccccttgaatcttccccccc

SEQ ID NO: 231857 - DNA, 144 bp, Homo Sapiens
ctggcgcgccccctccgcccctccaaaaatttttcaaaaccctttctttgggcggggggcccccaaaagggaaagggaaacggggccaaatgtggtttcccaagggaaacccgggaccaaggaaaagggtttggaattccccac

SEQ ID NO: 231858 - DNA, 1106 bp, Homo Sapiens
  misc_feature (378)..(387): n is a, c, g, or t
  misc_feature (402)..(412): n is a, c, g, or t
  misc_feature (431)..(443): n is a, c, g, or t
  misc_feature (662)..(662): n is a, c, g, or t
  misc_feature (816)..(816): n is a, c, g, or t
  misc_feature (862)..(862): n is a, c, g, or t
  misc_feature (1057)..(1057): n is a, c, g, or t
ggggctgtacatggagatcttgctgggaaaatccgcttgctcccctcacgtcgtccagcccaggagaaccaccgccgtacccccggagcttcctcggccaccgcgcagagccctccgagagcccgagccgcggtcttcgagctccaaggctcattcagggccccagatccttgccccgaaaggagaggatctgagaaaatggatgcactgagacctctctgaaaaccctccgagagagcgcgaaaggagcgaaggacacctttactccccagcttaaaaacccaccttttttagggggccccgaaaccccccaccctaccccgaccgcctttattcccctctttcccatacccacggctctccgccctgtttggcggnnnnnnnnnnttcttccaccccccnnnnnnnnnnnttttctccaaccacacccnnnnnnnnnnnnnggggggcgcgccgggcgccccccccgtgggggataaacgccacaccaagacgcgggcgaacacttccgcgggctctccctcccggcaaacaaaatccaccgctgtgtttctctaccaccctcttatactcacagcgtcggtccgccctcgtctgatttctttcgctctccacccgccccgtccctaatacacttccataagtaatgctccccctcgctntgtttggcgcgcgctgggcgtgccgtttactaaagacgagctcgccgcggtcccgcctgtttgtggtcgtgctcctagacacaacgtatctccataataaataacagcacccggcttatatcgctcttcgtatcaccctcgctcctcgcgaaanacacccgcactcgccgcatgacccctcgatcaacacctctagatanacacacctccgcaagaggcacataacaatctcacgcgccccagacgactccaacgccaccgcacacacagcgctgtagattagcgctattattaacatataatatacgatcaccccgcacgcgctccccccgcgctctgtcctcatgtcacgcgcacccccgacctctaccgcctgttatatgcagacaacgacncgcggcgccagtttgtacatatcccccacacgtgcccaatgtcgcctgg

SEQ ID NO: 231859 - DNA, 332 bp, Homo Sapiens
  misc_feature (76)..(85): n is a, c, g, or t
  misc_feature (105)..(163): n is a, c, g, or t
  misc_feature (190)..(200): n is a, c, g, or t
ccccaaaagaaaaggaaaagggccaaaattttttccacaaaaaacccggggaagaaaaagggttggattccccccnnnnnnnnnnccccggggggaaccgaggtnnnnnnnnnnnnnnnnnnnnnnnnnnnnnnnnnnnnnnnnnnnnnnnnnnnnnnnnnnncccaagcgggttttaaatttaaatttnnnnnnnnnnntgggacttttttgggaagaaggggggaaattctttaaaaatttccccgcaaatggggaaccccctccaaaaaggggttgtgagaaaccggaaatccccccgcgggaataacaccaccttggggcccctgggg

SEQ ID NO: 231860 - DNA, 747 bp, Homo Sapiens
  misc_feature (45)..(60): n is a, c, g, or t
  misc_feature (73)..(92): n is a, c, g, or t
  misc_feature (108)..(117): n is a, c, g, or t
  misc_feature (158)..(241): n is a, c, g, or t
  misc_feature (276)..(295): n is a, c, g, or t
  misc_feature (504)..(514): n is a, c, g, or t
  misc_feature (537)..(537): n is a, c, g, or t
  misc_feature (543)..(543): n is a, c, g, or t
  misc_feature (545)..(545): n is a, c, g, or t
  misc_feature (564)..(564): n is a, c, g, or t
  misc_feature (614)..(625): n is a, c, g, or t
gcgaaactcgtccaaaaacaggtatccaagggagaaaccaaagcnnnnnnnnnnnnnnnnttgaaataattgnnnnnnnnnnnnnnnnnnnnacaaaaaaaatttttnnnnnnnnnntttcgcggtgggggccgccgggggcccccccaaggaggggnnnnnnnnnnnnnnnnnnnnnnnnnnnnnnnnnnnnnnnnnnnnnnnnnnnnnnnnnnnnnnnnnnnnnnnnnnnnnnnnnnnngggcgggggggtgggtgcctctccccctcccaacnnnnnnnnnnnnnnnnnnnncaaacccccgcgggcgggagggagaaaacaacaaccagagaagagtgcttcttttaatgaaaaacaacaaataaatccccacacgaaataggagggtgcgccttctcttcttgaaggggggggcctcctctttcagagtggggaggaatttcatctataaaaacaaccagccgcgcggggatggtttcccccaatcccggagcgcagannnnnnnnnnnacaaaaatatataaaaaataaantattangnccccgccgcgcccacccgngtgtgggggggaggaatatttttttggtagaaagaaggagagaacaggannnnnnnnnnnnaaggagaaatattcctcttcttaacgatggcgcccagttttgctcctccgcgcgcgaggaaatgattagaagaaaagaagatcacacctccctcaatagataaacggcaactttgttgctat

SEQ ID NO: 231861 - DNA, 935 bp, Homo Sapiens
  misc_feature (227)..(227): n is a, c, g, or t
  misc_feature (248)..(367): n is a, c, g, or t
  misc_feature (408)..(428): n is a, c, g, or t
  misc_feature (673)..(725): n is a, c, g, or t
gggatgatggctttttaggtacgtgccagagataaatggcccagaatatgttgattcttttagattgttttaggcagactttaagtagagggcttaaatgcatgtttggttttgccgatgcttcactatcttttttaattggagagagtgaaaattgctaaaaattgctgtccaatagaaatttatgagcccatatgtaatataaacttttttactaaccacattanaaagatagaaatggtgaaaannnnnnnnnnnnnnnnnnnnnnnnnnnnnnnnnnnnnnnnnnnnnnnnnnnnnnnnnnnnnnnnnnnnnnnnnnnnnnnnnnnnnnnnnnnnnnnnnnnnnnnnnnnnnnnnnnnnnnnntccagcgtggttttgtgcctccccccttataacccttgggnnnnnnnnnnnnnnnnnnnnnaaaaaatttttctacaaatttctcctttttcgggcccggggccccccaagaaaaaccaaaaaaggtccccgtttccccctctttcacatatgaaaacacccttggtccccacccccgttgtctgtttctcccccccacaaaaacacattccgcggcgcgggcaccattccccgtgtttcaacaacacccccatagcgggcgttccccgggccccctttagcggcgctttttccccccggggcctnnnnnnnnnnnnnnnnnnnnnnnnnnnnnnnnnnnnnnnnnnnnnnnnnnnnntttgtttgccacaggagtgggggggaaccggataaaccccttcccttgcgcccctccggagccatccctccctcacccggtcccccacaatacaggtcctttacccgtgcctcgtggacatttccacctttccccctcgcggtttgtttccaataactacctcccccaccgggagaaacaacgggggtggcccacaaaaacacgtctcca

SEQ ID NO: 231862 - DNA, 572 bp, Homo Sapiens
  misc_feature (66)..(205): n is a, c, g, or t
  misc_feature (215)..(228): n is a, c, g, or t
  misc_feature (254)..(348): n is a, c, g, or t
  misc_feature (353)..(432): n is a, c, g, or t
  misc_feature (448)..(457): n is a, c, g, or t
ggtaaaggagaaagaagccatagaaaagtacccgagggaaaataaatacagtgatattcttacgcnnnnnnnnnnnnnnnnnnnnnnnnnnnnnnnnnnnnnnnnnnnnnnnnnnnnnnnnnnnnnnnnnnnnnnnnnnnnnnnnnnnnnnnnnnnnnnnnnnnnnnnnnnnnnnnnnnnnnnnnnnnnnnnnnnnnnnnnnnnnttttgggggnnnnnnnnnnnnnnaaaaaatttttaaaaacatttttttnnnnnnnnnnnnnnnnnnnnnnnnnnnnnnnnnnnnnnnnnnnnnnnnnnnnnnnnnnnnnnnnnnnnnnnnnnnnnnnnnnnnnnnnnnnnnnnccccnnnnnnnnnnnnnnnnnnnnnnnnnnnnnnnnnnnnnnnnnnnnnnnnnnnnnnnnnnnnnnnnnnnnnnnnnnnnnnnnctcaaaattaaattannnnnnnnnngggcccttttggaaaaagtgggggaatttctaaaaccttccgcccaatggaaaaccctccaaaaggggttggagaaacctgaatcccccggggaatcaaccccttggccccttgg

SEQ ID NO: 231863 - DNA, 1106 bp, Homo Sapiens
  misc_feature (151)..(164): n is a, c, g, or t
  misc_feature (172)..(214): n is a, c, g, or t
  misc_feature (353)..(627): n is a, c, g, or t
  misc_feature (909)..(909): n is a, c, g, or t
  misc_feature (1080)..(1080): n is a, c, g, or t
gggacccccagcatgattgtatttctttcccctccagtcaaaccgtaatacagtttccagaaaatttgacagtctgcaatgccaaaagggtaaaaatctgtatttcacagctgtatagaataaaggctttagttacaccacaacaccccgnnnnnnnnnnnnnncctctcgnnnnnnnnnnnnnnnnnnnnnnnnnnnnnnnnnnnnnnnnnnnacacaaaaaaatttcttcttttacaaacccccactctccccttactcctggacacctcttcccgccgcaatcccccccgatataagagcgctataaaaccatatccccccgcccaacccatttgccctccccgtctttnnnnnnnnnnnnnnnnnnnnnnnnnnnnnnnnnnnnnnnnnnnnnnnnnnnnnnnnnnnnnnnnnnnnnnnnnnnnnnnnnnnnnnnnnnnnnnnnnnnnnnnnnnnnnnnnnnnnnnnnnnnnnnnnnnnnnnnnnnnnnnnnnnnnnnnnnnnnnnnnnnnnnnnnnnnnnnnnnnnnnnnnnnnnnnnnnnnnnnnnnnnnnnnnnnnnnnnnnnnnnnnnnnnnnnnnnnnnnnnnnnnnnnnnnnnnnnnnnnnnnnnnnnnnnnnnnnntactacagctgatatagtctctcatgcaccccgcccctcttatacccgcgatcacctttccccccctatttctcttttctcgcccgatcttacgcccgctcgcccgcgcctttccttcttatcgcgcgtcccctcgttgttataccgcgcgggaaataccactgagcgtctcccgcgccgcgcgtcctatatcccactccgtgaacccaaactccactccttatcgtcgccttcgtgattaagccgccgccccgccacgccgcataaatccccgcgcgcatncatcatttacccctttattaagcccatcatgcacccgcagagtatagcctcccaaccgcgcccccctttattacaccacccgcccacccgcctcctcgattgcacccccatccttgcgccgtatattgacaccgtattcacctatggactgaagcgagataccccctagcntaataccaagagccctcatcgccgct

SEQ ID NO: 231864 - DNA, 904 bp, Homo Sapiens
  misc_feature (424)..(469): n is a, c, g, or t
  misc_feature (718)..(787): n is a, c, g, or t
ggggggttgaattttgcttacagagtcccgtctcaccatcctgggcttccaacggaaactgcggtatccgcggctggagacccagcggcgagtagccttttgctcccggacggacttgagaggcttaaaggatggcctcgtcagatctggaacaattatgctctcatgttaatgaaaagattggcaatattaagaaaaccttatcattaagaaactgtggccaggaacctaccttgaaaactgtattaaataaaatacgagatgagatcattgtaataaatgaacttctaaatacattggaattggaaaatcccacatcaagaacaaccccaacccttccctccaggcaatgctctcctctaatgacggaaccgcaaaaaaggacgatacatacaaacctccctactcctcttttgcactcacnnnnnnnnnnnnnnnnnnnnnnnnnnnnnnnnnnnnnnnnnnnnnnttcctttcgtacccccgcccaaatactccattaataccccttcccctaccccattaatacccatgcactaccccaacacctctgtgtgggtgcacgctcccaggtcctaaataaaatatttttctcccccaacctacgcttcttcgcgggcccgggcccccatcagacgaaaaacgaatagtgccgggcatcacaaggcttttttctctaacctatgccgggaccagaaagattaacgtattttaccannnnnnnnnnnnnnnnnnnnnnnnnnnnnnnnnnnnnnnnnnnnnnnnnnnnnnnnnnnnnnnnnnnnnntcaagaattgcctcgtcttcacaagttttaatatgccctggcgaccgattttcccaacagtgagggtttcgccccattctccttattttatttcccccccatctcctctcccccacc

SEQ ID NO: 231865 - DNA, 867 bp, Homo Sapiens
  misc_feature (202)..(202): n is a, c, g, or t
  misc_feature (204)..(213): n is a, c, g, or t
  misc_feature (389)..(397): n is a, c, g, or t
  misc_feature (769)..(769): n is a, c, g, or t
  misc_feature (786)..(786): n is a, c, g, or t
  misc_feature (788)..(789): n is a, c, g, or t
  misc_feature (808)..(808): n is a, c, g, or t
ccagccacactacaaaggccacgcaaccccaaaacaaccaatactacccccaccaaaaaaaataacaccaccacgaccccagatacaaaaacacatccaaatcgccctcccccggctaagcccccgcacagaacattccctccccaaaaccccattcataccaggaccacgtaaccccaacagacaaaggtgatgtcacccntnnnnnnnnnngcggccccctcaagcgcacagtccttctcttcccggcccgggccccgcgccacatcctatatcccccgcataaagctccccttcccaaccccccttccaccagaagaaccaaccccataaccctccgcccaccacaggggggctttgccgcttgtgcgccccgccatgaaaaaaannnnnnnnngagaccggtccacctgccccccgccttacccagacctccacacccactctacacagtccgacccgccaagcagcgcaggccaccttttttatatgcttgaacgtatcttccccaccgcagaacgccccaaataccgctcacgccgcccgcgcccagaccctttgccgacaacccgctctctcgatcccacggccttaccacacacaccctacccgaatccgacgctgctccctctccacgcctctcctatccgctatttctgcactctatacgcccgaagaccgcctgtgcgtgtaccttcatgctctcacacgtattctcgaacagatcgcaaatactaagacgcccgactcgcacatcgacagcggcgcnccagagtgatctgtggngnnccactgtatgttcccgccnctatgccataattgtgaccctacatccccaccccactgggagacacagcacacaacccc

SEQ ID NO: 231866 - DNA, 238 bp, Homo Sapiens
  misc_feature (48)..(64): n is a, c, g, or t
  misc_feature (106)..(135): n is a, c, g, or t
cctcataaaaagaccacgcgggggtgtgtgcgaaactcctcccccacnnnnnnnnnnnnnnnnncccccccggggggcgggacacacaaaaagagttctttttctnnnnnnnnnnnnnnnnnnnnnnnnnnnnnngggtcttcccttcgagggcgcctccctatacccaggggggacccaaattaaaaaccaccccggggggggtgcccccaccataaagcacaccccctgccttctt

SEQ ID NO: 231867 - DNA, 807 bp, Homo Sapiens
  misc_feature (138)..(311): n is a, c, g, or t
  misc_feature (327)..(340): n is a, c, g, or t
  misc_feature (375)..(388): n is a, c, g, or t
  misc_feature (474)..(484): n is a, c, g, or t
  misc_feature (567)..(579): n is a, c, g, or t
  misc_feature (628)..(648): n is a, c, g, or t
ggggtatttatttgtgttttgaggtcttgcaatgtttttgtgtttctgatgctaataactaaagtttgtaagactgtagaatgcaaaactcggagatgctaaactgtcttattagaggaaaataaatctgattatggnnnnnnnnnnnnnnnnnnnnnnnnnnnnnnnnnnnnnnnnnnnnnnnnnnnnnnnnnnnnnnnnnnnnnnnnnnnnnnnnnnnnnnnnnnnnnnnnnnnnnnnnnnnnnnnnnnnnnnnnnnnnnnnnnnnnnnnnnnnnnnnnnnnnnnnnnnnnnnnnnnnnnnnnnnnnnncaacacacccgtgcgnnnnnnnnnnnnnnacaaaaaaattttctctaacactttttgttggggnnnnnnnnnnnnnnaaaaggggtagatcacgaggcaatcttgtttctccacaaaaaacaaaccgtggcactaaacaaagtagtgtctcttctcccccacnnnnnnnnnnngacccgggcgggaagaaacaccacaccttttttctcacaacacacccccatcgggggtttttccaaggccattcttcttctcnnnnnnnnnnnnnagaggggtgtcatatcccggggcggcctaataattataaagattcttcnnnnnnnnnnnnnnnnnnnnntactatcttagaaaggattgtgtgtggtttaaaatttactaacccccctttctccctgacaaggggggggaagccaccctaaaacaaaggagggggatgaaaaacacattcactttcccggcggcgcgaaccacataccccccgatcccccgcatgggg

SEQ ID NO: 231868 - DNA, 389 bp, Homo Sapiens
  misc_feature (133)..(329): n is a, c, g, or t
  misc_feature (331)..(339): n is a, c, g, or t
ggcgcgcctattgatttgtttctgaggagagtacaccgttcactattgtagagtaacccctgtgactcaatattaccatagtgcgatgtcgttttgtgctattttgaacaattaaaagactttttttgaaatnnnnnnnnnnnnnnnnnnnnnnnnnnnnnnnnnnnnnnnnnnnnnnnnnnnnnnnnnnnnnnnnnnnnnnnnnnnnnnnnnnnnnnnnnnnnnnnnnnnnnnnnnnnnnnnnnnnnnnnnnnnnnnnnnnnnnnnnnnnnnnnnnnnnnnnnnnnnnnnnnnnnnnnnnnnnnnnnnnnnnnnnnnnnnnnnnnnnncnnnnnnnnnccgaccccctctcaaaaaaagtttcctggggcttttttgtgggccggggg

SEQ ID NO: 231869 - DNA, 927 bp, Homo Sapiens
  misc_feature (191)..(244): n is a, c, g, or t
  misc_feature (284)..(285): n is a, c, g, or t
  misc_feature (290)..(292): n is a, c, g, or t
  misc_feature (299)..(508): n is a, c, g, or t
  misc_feature (647)..(659): n is a, c, g, or t
ggtccagcctgttgatgcaaccctggctcaaatgtctgttgtagtgagctctgaggcgagcagtgaggacgggatagaagtgccctcgctgccaccagccaggccgcatgcttgcacgctgaccccatgctctcagacaccgaggagaatgcatggggtcttcctcctacccccaggccacaaggctggannnnnnnnnnnnnnnnnnnnnnnnnnnnnnnnnnnnnnnnnnnnnnnnnnnnnncagacgaagtttcactctctgtgcctaggctggagtgcanngccgnnncaaaaannnnnnnnnnnnnnnnnnnnnnnnnnnnnnnnnnnnnnnnnnnnnnnnnnnnnnnnnnnnnnnnnnnnnnnnnnnnnnnnnnnnnnnnnnnnnnnnnnnnnnnnnnnnnnnnnnnnnnnnnnnnnnnnnnnnnnnnnnnnnnnnnnnnnnnnnnnnnnnnnnnnnnnnnnnnnnnnnnnnnnnnnnnnnnnnnnnnnnnnnnnnnnnnnngtgcgccatcttcccctctcagtgtgcccgcttgcgtcgctgagccctactttacctcgttcgcccctccggttctatgtgcgtatgtgctgcacaccctccctggcctggcacccccgccattattccccgaaatagnnnnnnnnnnnnnagtcgtcctgtatattcccccatcccgcgccctacgtagataacaacctacccacccctacacccacccgctcttccctctttcccacccacccgacgctcctctcctcgtcctaccacccccttcctcctcgttccactcataaaatcccactactccgcctataataccctcgcacctgccacgcggcgtcgatcacctcgtacccgttagccgcgcccatatccgtccgatgttcacacacgcacctcacgctctcctcacactg

SEQ ID NO: 231870 - DNA, 450 bp, Homo Sapiens
  misc_feature (41)..(192): n is a, c, g, or t
  misc_feature (198)..(212): n is a, c, g, or t
  misc_feature (237)..(247): n is a, c, g, or t
  misc_feature (253)..(364): n is a, c, g, or t
  misc_feature (368)..(393): n is a, c, g, or t
ggttagtattatacccacacccacccaagaacagggtttcnnnnnnnnnnnnnnnnnnnnnnnnnnnnnnnnnnnnnnnnnnnnnnnnnnnnnnnnnnnnnnnnnnnnnnnnnnnnnnnnnnnnnnnnnnnnnnnnnnnnnnnnnnnnnnnnnnnnnnnnnnnnnnnnnnnnnnnnnnnnnnnnnnnnnnnngggggnnnnnnnnnnnnnnnaaaaaaattttttaaaaaccttttnnnnnnnnnnncccccnnnnnnnnnnnnnnnnnnnnnnnnnnnnnnnnnnnnnnnnnnnnnnnnnnnnnnnnnnnnnnnnnnnnnnnnnnnnnnnnnnnnnnnnnnnnnnnnnnnnnnnnnnnnnnnnccannnnnnnnnnnnnnnnnnnnnnnnnntattaaacaaggggacccagagaccctttaaaaaattatacccccccggggtccatt

SEQ ID NO: 231871 - DNA, 651 bp, Homo Sapiens
  misc_feature (89)..(195): n is a, c, g, or t
  misc_feature (205)..(220): n is a, c, g, or t
  misc_feature (269)..(283): n is a, c, g, or t
  misc_feature (324)..(336): n is a, c, g, or t
  misc_feature (394)..(403): n is a, c, g, or t
  misc_feature (509)..(518): n is a, c, g, or t
  misc_feature (576)..(584): n is a, c, g, or t
gggatgatcccaaaatatggtaaagtgaacccatctgtctgcattttctactctgagcccatttgttaataaacacttatttttatatnnnnnnnnnnnnnnnnnnnnnnnnnnnnnnnnnnnnnnnnnnnnnnnnnnnnnnnnnnnnnnnnnnnnnnnnnnnnnnnnnnnnnnnnnnnnnnnnnnnnnnnnnnnttgatgaccnnnnnnnnnnnnnnnnttgatgtgaacaaacaacagcaagctaaacaaaaagtggtgtgttccgnnnnnnnnnnnnnnngaaactcttttaaaaccttttcgggggcgggggcccccccnnnnnnnnnnnnnggggatacatctgttttcccaaaaaacaccgggaataaaggaggttggtgaacccccnnnnnnnnnncccccggggaaaaccccgggattttaaaacaacccaagggggacctggggggtactattgggttgcctccacgggggatccccagggggctcttatatattttctnnnnnnnnnnggggcccttcgggggaggaggggggaataaatataaacatcctcccgcacaagaggannnnnnnnnacaaggcgttagataaaacctttaaacccccgcggggggttctccaccccccggggcccccgctggg

SEQ ID NO: 231872 - DNA, 627 bp, Homo Sapiens
  misc_feature (158)..(335): n is a, c, g, or t
  misc_feature (347)..(347): n is a, c, g, or t
  misc_feature (349)..(349): n is a, c, g, or t
  misc_feature (351)..(352): n is a, c, g, or t
  misc_feature (364)..(385): n is a, c, g, or t
  misc_feature (443)..(471): n is a, c, g, or t
ggtatggttgttaaaaatgtcatctcaagtcaagtcactggtctgtttgcatttgatacatttttgtactaactagcattgtaaaattatttcatgattagaaattacctgtggatatttgtataaaagtgtgaaataaattttttataaaagtgttnnnnnnnnnnnnnnnnnnnnnnnnnnnnnnnnnnnnnnnnnnnnnnnnnnnnnnnnnnnnnnnnnnnnnnnnnnnnnnnnnnnnnnnnnnnnnnnnnnnnnnnnnnnnnnnnnnnnnnnnnnnnnnnnnnnnnnnnnnnnnnnnnnnnnnnnnnnnnnnnnnnnnnnnnnnnnnnnnngggggggccccnancnncccacaaaaaannnnnnnnnnnnnnnnnnnnnnggcgcggcgggcccccaatagaaataaagaaaagcggctatattacttttgttccccnnnnnnnnnnnnnnnnnnnnnnnnnnnnngatctcaattctttccccccacaaaataaacaacccccccggcggccgacaaccgtgttctttttccccaacaaaccccccgacggcgccttcttccggggccttctttccccgggttattttccaaataggcggccttccatacggctcccaaat

SEQ ID NO: 231873 - DNA, 488 bp, Homo Sapiens
  misc_feature (231)..(352): n is a, c, g, or t
  misc_feature (362)..(378): n is a, c, g, or t
gggaccaattgaagagttaggaaatgtgagtttttgttacttctgttattccagtcttggtttcattgtctcattctttatttttaaaatcttgtgcctaaaagtttttttgcttaattatgaagtagacatgcatgtttacatttatgtaaaatatttgctgtgtaaagtattttttgtttattctcttaaaagatcactatatttaaataaaagtgaaggtcagcaacnnnnnnnnnnnnnnnnnnnnnnnnnnnnnnnnnnnnnnnnnnnnnnnnnnnnnnnnnnnnnnnnnnnnnnnnnnnnnnnnnnnnnnnnnnnnnnnnnnnnnnnnnnnnnnnnnnnnnnnnnnaaactgtttnnnnnnnnnnnnnnnnnaaaacttttgctagaattttctttggggcggggcgcccgggggaaaccgaaagttgggaacaattcttcacgaaaaacccagggcattactggatgtttgaacccccccc

SEQ ID NO: 231874 - DNA, 562 bp, Homo Sapiens; identical to SEQ ID NO: 33093

SEQ ID NO: 231875 - DNA, 897 bp, Homo Sapiens
  misc_feature (542)..(593): n is a, c, g, or t
  misc_feature (675)..(768): n is a, c, g, or t
  misc_feature (879)..(879): n is a, c, g, or t
gggaggggcgcgcggtggagaggcaccggcgaacttagaattggcgcctctggaaagtctcggtgcgtcttgcggtcctgcagcccggagtccgctggccacctcccgggtcccggagatgcttcagaattctgtgctgaccttatattgcccatagacaagttgaggagtgatgcagaccgagaatcctccaagacccagttttcagatgctcccggtgttgtgaagagaggcccgtctggattatgtgtttcccagacagactagctacctgctaacaatggataggtgcaagcacgttgagcagttgcagcttgctcaaggccattccatcttggaccctcagaaatggtactgtatggcctgccacacaacccagtccatttgggcttgcctcagctgttcccaagtcgcctgtggggaagcccctccccccagcatccgcttgaaacactttttaggaccgccggctattcctcctccccttccattgcccaacaacatccccgtcttttttggcaatccttcggcaccgttcattnnnnnnnnnnnnnnnnnnnnnnnnnnnnnnnnnnnnnnnnnnnnnnnnnnnntacgtcttaatttaccttcccatttccccacccgctcacctcccttccctgcccgcccctaaacggaccctagcgccccccnnnnnnnnnnnnnnnnnnnnnnnnnnnnnnnnnnnnnnnnnnnnnnnnnnnnnnnnnnnnnnnnnnnnnnnnnnnnnnnnnnnnnnnnnnnnnnctccgctctccactttttaccccggcacatcgcccgactgtctactctcactctagtcaccgtaaccggccggtcccttttttattattttcccccctccgcctctctctnttatttcgccaccccctc

SEQ ID NO: 231876 - DNA, 613 bp, Homo Sapiens
  misc_feature (247)..(327): n is a, c, g, or t
  misc_feature (335)..(336): n is a, c, g, or t
  misc_feature (552)..(572): n is a, c, g, or t
ggaacccttttcttcacaagttgcttctgagcatggcattttatcacctcaaatagaaagttaactaagagatactgctgcttcagagggccgaagttcagtttcctacacccctgtagggaggtgcacaagggcccttaattccagcttcaagggaattcaacgcctctggcctccgagaatacatgcgctcatgtatacatacccccaccataaccacatacacacaaaagcaaataaaccttannnnnnnnnnnnnnnnnnnnnnnnnnnnnnnnnnnnnnnnnnnnnnnnnnnnnnnnnnnnnnnnnnnnnnnnnnnnnnnnntatttggnngccccctgtcggcccaccaaagaacctttaaaaacctttttaatacgactcgcggtgccccggaggggccaaggaaggggtggcgatgggtgcttcacagagggataccccaggaaaataacgtgggggggaggaatgccccccgaaaaaacaccccgccgggggaaccccccgggaggggtttaccgaaaacctttccaaaaagggaacccccannnnnnnnnnnnnnnnnnnnntactcttaaccgggggaggtatttccacaggggaaggcctc

SEQ ID NO: 231877 - DNA, 762 bp, Homo Sapiens
  misc_feature (716)..(716): n is a, c, g, or t
ggggccacagtcaatagagagctgctccatcagcaatgatgtgagccagagtcctctccaaagctgtagaaacccaggaagccctgagtccagcctggctaggcggtctccttggtagtgatggaatgaccaccgacatagttgttggtggcatcctttggttgggtagcataagctggcaatatggctcatttcagatctcaccagttactgtgggctccagatccacagagactgcctgtaactcggcaccagtttccatcaggctaaatccttgtgtgacagtcaggctcacaacagtccttacccatccagacacacgaactgagaggcaattacacctgaagaaccctggtgttgcctctcatatcgtcgggatcaaaggttacagttcaatgtcaacaacacgattcttcacccagagatcgtggaatgccgagtgttcaagacagacatggaactagaggttttgcgctacacaaatcggatctccagcgaggcccaccgtgaggtaatgaaggctgtaaaagtggggatgaaggaatacgagatggaaagcctgttccagcattattgttactctaggggcggcatgcgccacacctcttacacctgtatctggctgtagcggtgagaacgcggccgtgctgcactatggccatgctggagcccccaatgaccggacgatcaagggatggagatatttgcctgtttcnacatgggtggggagtactactggcttttgctctgacatcacctgct

SEQ ID NO: 231878 - DNA, 940 bp, Homo Sapiens
  misc_feature (864)..(864): n is a, c, g, or t
gggaggctgggaagttggcactgatggaggtctgagaggtctttgggagcatagcaggcattgccaggcgagtttgtgtgcgcccagcgatggcgccgtaagttccaacggtcactgaggccacgcacagtctcaagtctcttactcataggtaccaacagggctctgactacggagcactgcactgagatcttggagtcggttcccaaagttccagctcttgtatcatttcattgggcggtacatctgcgctctcaggactcagagcttggagctgacaccctagcgcaacagcttgccttgggcttgaaaggggatataaactcagtcttagccaccccatgccttcgatccccagctttcacaagatacccgggatttaccaaaccttcagcgtgtcggtcccggaagctattactttgcatgacagcaaaagatcctgaccctctttctacccccttccggaaaaagcttttccccggcacgcccgtggtgggaacctcctgaccccgtcctacgtttcaagcctccccccaatccttatgaaaaaccggaccccgcttgtactgtccccttttgtggcgcccttctttcgggcggggttacccccaaaatattttccccaccgcctgcctggccagtttaagaaaccctttcagagctggacccttttccacaaaaactccccccttcgccttcctaattctcggtgtcccccagttccttactacaatcaaccctccgttcagtttcgcccccaccgcaaaagtccccccagccccaaggctcctcttctataaaccacgcgggctcctctcacattgggggtctcctagcacaatacatatcccctcttttgttttntttttatacctcgcccccggtggtaagttgttactcataattcgcgatcacaccctggtacactatgttaaccctg

SEQ ID NO: 231879 - DNA, 768 bp, Homo Sapiens
  misc_feature (652)..(702): n is a, c, g, or t
ggggagcgggcgggcggggctggcacagggggctgccgcggaccgagtggctcgcccctcggcctctgagacccggccctaccgtacgcccccgggttggagctgctttctcgggccttctcatctgctgctcacccggggttggcagggaaatggccaggaaatgactactgtcccattgtgcaggaaactgagactcacaagtgaggagactcgactaggaacgcacagcaaggtcagagctaaccaagaagcattcagaagccaaaccatggatccacctgcccggaaagaaaaatccaaagctaaagaaccagccttcatagcggagaacgctaagcagaaatctgcccagcaggagctgaaccccagacagagagccagagatctctgcctctcaacagagtccatgaccgagctggacccccccgcattctgaatgacccccgtaagcagatgcagtccgccgggggagtgagcccgcctggcctccccggcctaaggaactggtgcctggctcttcgtctgcgcgccccctttcccaattgttacccctgcagcttggccccacgggcagccccttaagaaactaatcacggacctgtgggaaaacctttttgcccttgccactttcccccctcagcctaaactnnnnnnnnnnnnnnnnnnnnnnnnnnnnnnnnnnnnnnnnnnnnnnnnnnnacagggcctttgggtggggtaccaccctttttcctcctttattaacccccggggtacttttttaca

SEQ ID NO: 231880 - DNA, 820 bp, Homo Sapiens
  misc_feature (486)..(550): n is a, c, g, or t
  misc_feature (767)..(775): n is a, c, g, or t
gggagaaaggaaacagactgccccattgctttcttattgagagggttcagaatagcaccagagagctgcaaaccacactccctggagtaaaagccttgcagattttcaggacactgcagccaccacacttggcaaggacccagagtgtgcaacagcaaccaaagaagaaaaaaatccactcaatcaagatgagaccagatacctacgtcaagaaacacttcaaacatttgtctggatccaactgcaaaagcaggaacatgaacaaccaagacaacaggcctcctctggaagtcagcaattctattgccataagcaatatttgggaaaagcagtgtagctgaagcatgaaacagggaatggcatgactgacagctcaggaagaaaatgatgatctaactgaacatggttattactgatggtgactacaatacatttcataacattctaataaaacttaatatgattactataagctaaacacttcannnnnnnnnnnnnnnnnnnnnnnnnnnnnnnnnnnnnnnnnnnnnnnnnnnnnnnnnnnnnnnnngtgtcacagatttattcccgcgtcggccgtacaccgcgccccccgaatccggtttgcgcattccccaccctcgttcgctgtgacacccccccatttttttcgccaggccccccttctttcgccccacctccctttaggccacaacatgttccgtggtgtacccgtatctccccggacttttccctctcccaaacaaacccaccttgctcttgttttnnnnnnnnnaggacatgatagttagttccccaaccacccccacctggaatgggg

SEQ ID NO: 231881 - DNA, 908 bp, Homo Sapiens
  misc_feature (598)..(625): n is a, c, g, or t
  misc_feature (636)..(636): n is a, c, g, or t
gggggatgctcaagccagcggagagtaaaatggagtctcccaagaccttcatgagaaagctgcccatcactccaggatactgcggcttcataccatggctcacttgccaggaaagctccagcgaggaccgcatgaatccctgtgtgaaagcgttccaggagagaacgcagagatacaaggaggaccagcagggattaaactgctctgtggccaacaccccacccctgaagcccatctgttctgaggacacggtcctgtgggtgttgcatgagtatgccaagaagtaccatcccctgactctggaatgcaaaaacgagaagaaaccgctgcaggagccccctatccctggactggcgaaggctacctggcccctagctagggttactgaactgtgggttatgcccacaaagcccgtccattcatgggcccaacaagggcttacctcggatcttccgagaccttggcgggaccacaacaataaagggcctccgctgcaaagccttgtgggtacacttttccaaagcgtaagggctactcctgaccaccttaattcccctcccttcaaaaccccttgccaccactacaagggtaccctcgnnnnnnnnnnnnnnnnnnnnnnnnnnnnttggccctctntcccatttcactttccgccaaatcaacagagtcctcgttaatatccgcgaatttcacatccatgtcttagaccccctaattggcaccctctctctttccgtccccgtttaccaaaattgtccccccggttgtgacgtttcccctcccgccccccagaataagaaacctctcccgctgcccacacacttatcgccgcccgaacgctccgcctttccccccacgagcgcggccaaaagtctcctgccacacctatatccgcggctgcaccatta

SEQ ID NO: 231882 - DNA, 289 bp, Homo Sapiens
catctgggatagtggcctgtgtgtacttatgagccagcaggaaactggaaacgggtatctaatactcccatggaactaacagtgaatagggagaaaggaggaagatgagtccactggggaccgacagcaactgtccacggccaggagggaatgaatgaggaaatggagcccccagaggaaatgctgaaagttcttcttctaatagacagcccaggaaacaaggatgaacggctgactactcaagacagttcctagacatgtgggaattttccctcaccaaagagcaatt

SEQ ID NO: 231883 - DNA, 992 bp, Homo Sapiens
  misc_feature (326)..(334): n is a, c, g, or t
  misc_feature (434)..(442): n is a, c, g, or t
  misc_feature (651)..(661): n is a, c, g, or t
  misc_feature (675)..(675): n is a, c, g, or t
gggaggctgggacccagcgctccggggaagccccgccccgtgccagcgctccgcccgccgagctccgctcttcgccctccgggactggcgcgtggcaccgcactccacgtgtttccccctgcccaatgaaagcgggcgcccgggcgtgaaggggcgggaggaagaagaccacttggtggcgtcgcgcgaagggggcggggccctgccccgcccgccttaactactgcgactccccgccacgctcgttgcattcctttgttgcccctctgccctccggtatttccttgacacttcctcccgccattaacatcccctccaagtaccannnnnnnnnggtacacctatcttcgttccacctaaaggggcttctcccgccttccggccttaacgccctgacccgcattttggttgacccctccccctcgcgcatcttnnnnnnnnngtctcacgaccatccaactcctgccctcccctctctccctgcccccgacctatagtggtcccgcccaccccccccagggtgctccacttgcggtggtcccccaccccccgcgcacacctctgtcacctacgtgtctttccgcccgactggcctccgccgtgccacgaccctgagcatatttccacttgcggtattccccttttctcctnnnnnnnnnnnttatatcccccgtntcgtttccgacctacgcgccaaccacgcccactgtgcggggtgctctatcgcgccgttcgccatacccattatatcatctcgcccgtcactcgcgacccggggtcttcctactccccccgcgggtttcccttctgtcaccccccctgtgtggatgttgtcctctcacgctcacccccatgatctagtttcttatcgcgcgtaacactccctcctagttcgcctgggccgctccatgccgccgctgtccaccccatctgtccgctctccacaatagtgtcgtcctcacccttttattcgtcgcggtagcaaccactct

SEQ ID NO: 231884 - DNA, 544 bp, Homo Sapiens; identical to SEQ ID NO: 33105

SEQ ID NO: 231885 - DNA, 845 bp, Homo Sapiens
  misc_feature (381)..(544): n is a, c, g, or t
ggggatggacttggggtgagggagagggatgacggggagaacagccagaggatattatttcaaccagaacctcactgctgaccagagtttggaaccttgagaagatggcgaaagcctgtacgtgttggtgtccaacatgttacatgaagggtttcccacagagacacaaagcaaagaaaacacctaagagaaggaacaaaagtgaggcacacatgctttggctgaagaagcttctagacaccatgaagtaccaagtcacatttgttcccattgttgactcaaagaacgatgggtcccgatgcaagcctaaggccaccgtaatcatcgtcgagcttgcttctccaccccagggtctctaaataaaacctcttctttctcggnnnnnnnnnnnnnnnnnnnnnnnnnnnnnnnnnnnnnnnnnnnnnnnnnnnnnnnnnnnnnnnnnnnnnnnnnnnnnnnnnnnnnnnnnnnnnnnnnnnnnnnnnnnnnnnnnnnnnnnnnnnnnnnnnnnnnnnnnnnnnnnnnnnnnnnnnnnnnnnnnnnncaagggcccatgccaaccgggtttttcgcccgttttcctacgcccacccggggcccttatctacccccttggggtgtctccccaacgaaaacaccccccgggggggcaaccccgaccgctctctcaaactctcccacaggggatttccccggcgccgcccttccgggggcccccctccccgccgggggaaacaaagggggtgggttcccccttaaaaattggggcctcccgggccaggtgccgcatccgtgggagaaaaaatggcccgcccatagtcttttaataaatatcccggcccccc

SEQ ID NO: 231886 - DNA, 840 bp, Homo Sapiens
  misc_feature (756)..(756): n is a, c, g, or t
  misc_feature (772)..(782): n is a, c, g, or t
ggatcatagaagggcaggaggctgagctgggtgagtttccatggcaggtgagcattcaggaaagtgaccaccatttctgcggcggctccattctcagtgagtggtggatcctcaccgtggcccactgcttctatgctcaggagctttccccaacagatctcagagtcagagtgggaaccaatgacttaactacttcacccgtggaactagaggtcaccaccataatccggcacaaaggctttaaacggctgaaccatggacaacgacattgccttgttgctgctagccaagcccttgacgttcaatgagctgacggtgcccatctgccttcctctctggcccgccccctcccagctggcacgaatgctcgcggtggcacgatggggccgtaaccaactcacctgacaaagaatctatgttccccggatcctgatgaaggcgcccttgccttatccttatacatggccacgaaacgccctaccacactgttttccccaatctaatcccccaccatgccgtcgtgcccttatttgggcaattgataccccacataaggccttgcccaggggtggcccgtcgggggtaaccgcccttttcccgccaccccctgatttaccgcccatctaacccggggtacccgcggtggggctatcccccccttctgtgcggcaaatgacacttcgggaataaaaccccggcccctccacacagaattttaccttcggacttttcccaccactatccaccccccggcgngtatatttaataatannnnnnnnnnnaacaacaaaaggggcaaagaccccccccaaatctttgttataaggcctatcggcatct

SEQ ID NO: 231887 - DNA, 885 bp, Homo Sapiens
  misc_feature (401)..(409): n is a, c, g, or t
  misc_feature (488)..(537): n is a, c, g, or t
  misc_feature (540)..(576): n is a, c, g, or t
  misc_feature (649)..(723): n is a, c, g, or t
gggagacccgagtctggcggacccaagtaggcgagcgagcgactgaccgtgcgctgaggtgggcaccgcggcccgtttcggtcgcaagctgctgaggcttctttgtaggatcgagcacgccctgcactcgagagtctgtgaagtcgctcgcccggggctttggtgggcgaggggagctcttgtgagtcagtggcactggagggcttcgaacccgggtccaggataccggtctcggcggcggtgtccaggctgccaggcaccctagggagccgctgccgccctgggcggattccctagatcgccacctcgggtgacacctccgcccttccatggacggcggatccttaggcccgggaacccgtgtccagaccccttcgcgcccggaatttttccctcgaatnnnnnnnnnggacaccctcattggcgttccccgaacgccattccccgcccccttctccttcccccctcttcgcttccttttcttttannnnnnnnnnnnnnnnnnnnnnnnnnnnnnnnnnnnnnnnnnnnnnnnnntannnnnnnnnnnnnnnnnnnnnnnnnnnnnnnnnnnnncacacggtcgcgctctatatcctgtcgttttccgaacgcgtacggattccttacctcgccgcaatttcatcgnnnnnnnnnnnnnnnnnnnnnnnnnnnnnnnnnnnnnnnnnnnnnnnnnnnnnnnnnnnnnnnnnnnnnnnnnnnaccgccctccgcttataccctccttcttcacccccctccgctcacccgatgttacacccgcgccactgcactcttgatacccactccgtttgctccggatcggcgggtccgcatatctcttattacgcccgcccctctgctctgttcgttccacgccccccc

SEQ ID NO: 231888 - DNA, 835 bp, Homo Sapiens
  misc_feature (692)..(702): n is a, c, g, or t
gggcccagcgctcgctcgcgcggtcctgccacggccttcctgctgcccgcgccatgggcctcagctccaactccgctgtgcgagttgagtggatcgcggccgtcacctttgctgctggcacagccgctctcggttacctggcttacaagaagttctacgctaaagagaatcgcaccaaagctatggtgaatcttcagatccagaaagacaacccgaaggtggtgcatgccttcgacatggaggatctgggggataaggccgtgtactgccgatgctggaggtctaaaaagttccccttctgcgatggggctcacataacgcacaacgaagacactggcgacaacgtaggacctctgatcctcaagaaaaacgaaacctaatggacagttgctaggctgcaccccaccgccgttctgatgtcacctgaccgatctacgtataatgccccccacacccaccagtatgaccgggcccccccgggtccttgatgtcgttgatccctcgcaaaccaaaaccccccaaaacacccagaccccatgccttcccacatttacccccttgtgcaccgccgcatggccgcaattaacgacccccggccgcaaaacaaaacccccgaaacatcagagaattactttacccgcccgccttcccgtaagacaaccacccctatagccccctggccccaatcaaannnnnnnnnnnactggccgccccattgagggtgtataacccgtttgtcccgccaactcacagcaggcgaacaggcacccgacataatatataaacccccccataaaaaatacttatattcccagaccacctacatttcaataca

SEQ ID NO: 231889 - DNA, 873 bp, Homo Sapiens; identical to SEQ ID NO: 33117

SEQ ID NO: 231890 - DNA, 988 bp, Homo Sapiens
  misc_feature (225)..(282): n is a, c, g, or t
  misc_feature (341)..(384): n is a, c, g, or t
ggctgtgcactgatcgcgactgtaatgtcatcctgggctctgcgcaagagttcctcaagccttctgattcattttctgcgggcgaaccccgtgtgctgggtctggccatggtaccaggacaccacatcgtttctattgaagtccaaagggagagtctgtcggggggcccgtatctctgaccacaattgcacttctctttgagaccattaaaccctatgaccaatnnnnnnnnnnnnnnnnnnnnnnnnnnnnnnnnnnnnnnnnnnnnnnnnnnnnnnnnnntcccaccaaatacgcatacataatcgcccacaaaacccccaaaacaaacaacttgtcgnnnnnnnnnnnnnnnnnnnnnnnnnnnnnnnnnnnnnnnnnnnntttcctacccgcaccctacggaactaaagccccctccacccactatttacccacccaagaaaacccccccgccgaaaaccaaaggcatttgggttactaccacacaacaaatccgcccgcccccataaacgaaccaccacagcatctcttcccactgtggatcataccgctaaactcaccgcacgcatccattataaccccaacaccttcgtgcccccccaccccaatcccaggtccaacaactagccctccatttaaattataccccgcaccccaccccgcttcacttaaatttatcggttgcattatacggaaaacagatcccataatcaaaacactccccgccctttataaggcgcgcccaatacccctccccctccaaatatatgctttttcccccaccccactctttctccctggttggttaccaacccctagattgttgtccgccgccccctatcatcccaccttaatttctctccccaccccagcacactagtaacattcgacccctcgtgcaacgtaaatctctcacctaatccccgccaccccggatcgctatatacatattctccctccctctctcttatgctccgcacccccg

SEQ ID NO: 231891 - DNA, 851 bp, Homo Sapiens
  misc_feature (399)..(468): n is a, c, g, or t
  misc_feature (523)..(549): n is a, c, g, or t
  misc_feature (576)..(625): n is a, c, g, or t
  misc_feature (657)..(767): n is a, c, g, or t
  misc_feature (805)..(805): n is a, c, g, or t
gggagtgagggtgggggtggggtgctctctgcttgaagtttgcgtttgacggcctagatcccgagcgctgttggcccggctctgacctggttgggtgttttgagtcaccaacgacctcctgacagcttcagcactagttttcacctctcctaggccacctggtgaccccaggactgattggggaatgattctgagcgatgtcttactgctcatgacctcacagggaccagctgaccacagggctgggcagcgagacaggtgtgccccgttagagtctggatttgagtggaaggacactcgccagagtcccctctttctgctgggcccattttatcgcctctaaacccaccggactccagcgtttccccttcgacatgccgaagccatctctcctggagnnnnnnnnnnnnnnnnnnnnnnnnnnnnnnnnnnnnnnnnnnnnnnnnnnnnnnnnnnnnnnnnnnnnnngttgtatcactttcgtggccacaccaactcccgccacttctccctcactgtcttnnnnnnnnnnnnnnnnnnnnnnnnnnncaatgcgcccttttcactccctttttnnnnnnnnnnnnnnnnnnnnnnnnnnnnnnnnnnnnnnnnnnnnnnnnnncttcgttgttcttctcggcattccactccatnnnnnnnnnnnnnnnnnnnnnnnnnnnnnnnnnnnnnnnnnnnnnnnnnnnnnnnnnnnnnnnnnnnnnnnnnnnnnnnnnnnnnnnnnnnnnnnnnnnnnnnnnnnnnnnatattcgctcgccatccctccgcgtttcccacctctcngcattcaccaattttccgcccccctttattctccgttgcctcccct

SEQ ID NO: 231892 - DNA, 866 bp, Homo Sapiens
  misc_feature (501)..(509): n is a, c, g, or t
  misc_feature (612)..(622): n is a, c, g, or t
  misc_feature (776)..(785): n is a, c, g, or t
gggaggctggaccgcgggccccggcctgggggccacagctgccacctccgccgccacctcatctcctccctgtccctcgtcccgccccgcgtcttcccgccgtagtcgggccggaggccggggtccctccccgccgccctaccctgcgcggatgccgaaggtgaaggcgctgcaatgcgccctggcgctggagatccgctctgtaacttgtccaggagtggtgctgaaagacaaggaggacatctatcttactatctgtgcgtttcggccaatacaaaaagacacaatgtgtcccagccacttttcccctggtcttcaatgccacaatggtgtttgacaaggtgttcccggaaagcagcacacccccgcaatgtggtcgcacagcctcgagcatgaccccgcaccgtttggacctgataccgctaccctcacccaccgggagataaaacactgctctaccctatgcccgaccacaccccaacacttcccggttcccggggnnnnnnnnnaaatggcctgcgccatatcgacttcatacccccccaattttcccttgacggatgatttcttcacacatccgagccattcccccccatcaattataaccttttnnnnnnnnnnnaggccgatacaatcttaacccgcttttttcccacctcatcgtatcctcctcaacccccccgcccacctttcttctacctgtctacttttccactctcgcaccacccgccacacgtgtaataattatcccccccttcatgccaaaatagaccctnnnnnnnnnnatccaaccccttacgcaaccccgcgttcccaattaccccgaaccctctccccactatagcacataccgaaaatcaccccat

SEQ ID NO: 231893 - DNA, 920 bp, Homo Sapiens
  misc_feature (321)..(418): n is a, c, g, or t
  misc_feature (562)..(572): n is a, c, g, or t
  misc_feature (643)..(752): n is a, c, g, or t
  misc_feature (851)..(851): n is a, c, g, or t
gggggagagcgcgcagctgctgcagagcgggtcggacgcagaagcggagagcagccggagggcgccccgccccaagcaaggtgcgggggccctcgaacaccgaggcctccgcctgtcacctctgcctgtcacctccgtccgccacctccacggtctcctccccttgctcaggtccactcggtccctcccctgggccgcccagagcaccaagctggcgggagcctataaaagtcggacggtgccacccgccacactctctgcatgaccgccagacggacgaccccttctgctctgtcccaattaccggcgtgatcctgtctnnnnnnnnnnnnnnnnnnnnnnnnnnnnnnnnnnnnnnnnnnnnnnnnnnnnnnnnnnnnnnnnnnnnnnnnnnnnnnnnnnnnnnnnnnnnnnnnnnatttgacacccctcacatggccacgcccggaccctggccggggaacctccggcctcctatcccccggcccgaaacccgcccccaccgaccttacgtttcgaaagcccccacctccctttccagttcgtgaccccatccacgttnnnnnnnnnnntttcgtccgcgtttaaccctgtgttttccccccgtggcacccgctcacttaaaaaatacccacattttccnnnnnnnnnnnnnnnnnnnnnnnnnnnnnnnnnnnnnnnnnnnnnnnnnnnnnnnnnnnnnnnnnnnnnnnnnnnnnnnnnnnnnnnnnnnnnnnnnnnnnnnnnnnnnntcttttggccacccacgctttccccaccctggattctctcccctcacctttcacttcgtggccgcggcctaactcgtcgctaacccctcctcgctttcnccacgcccgtctcgttgcccttaactttatttccccgctacaccctcgcttattcctaccctctcccca

SEQ ID NO: 231894 - DNA, 889 bp, Homo Sapiens
  misc_feature (604)..(618): n is a, c, g, or t
ggggggatgggaagtgaagccccagcgagcggctgcggcggggctgtgcggagcagccagcgggaggcggcggcgcggcggtgagcagccgagagctcggagcggggcggaggaagcacctgcaggcacaggcggcggctccaccatggcgattcgcaagaagagcaacaagaacccgccgctgctgagccacgaattcttgctgcagaatcacgcggacatcgtctcctgcctggcgatgcttttcctgctggggcttatgttcgaggtaacagcaaaaggagccatcatctttgttgctcttcactgtaatgttacccgccctgcaacagaagaacgcgctactgaattagcatcactataccactacggtatcaaacacttggccccagccttgtcctcaacgctattggccgatctccttcccgccccatccccccccgaatatttgttggatcaaatccgctcgccggatgctcttcttccttaataaattacccccaagtttccccaacccggttcaacctccattttcccccccatcttttccttccccgccggtgcgcccacgtttcgttcctttccccccgcaacatttattttnnnnnnnnnnnnnnntctccctcgtggtagataccccttttctcaccaaccctgtccggttcgtttcacaatccggcccacttcttacgtatattcttccctcaccttggttcgacattcgggctcccgcctgctttcttctcttatataatttccccgtttcccgggtgatagcattatggttgaccgccgccctttccgaatgcggttaccctttccctcttcacccctttaccgcgctctctcctccccccctctcttgtcaaattccttatgaaaaacccca

SEQ ID NO: 231895 - DNA, 933 bp, Homo Sapiens
  misc_feature (458)..(458): n is a, c, g, or t
  misc_feature (705)..(766): n is a, c, g, or t
  misc_feature (768)..(778): n is a, c, g, or t
gggcccggaagtgacgggcgaaagccggctcagagctctggaggtagaggtgaccgatcctgggggtcggtgttaggccgtgggaggtttttcgcgagactgagccacgcgtctatcttctgtcccagggccgccgtcaccatgggccgcgagtttgggaacctggcgcggatacgcgcttgtactggtctatctgctcttccgcctgccgcccctgcattttgagctttcttccctccacattccccccctgtatgcaaatgacccggagcacggcatgcacccgacttcccttcttccttccgccacaatgacccctttctgctcacatgccaccccctttgttcctcctggcgcattcctcttccgccccgtccttccatcccctcctccccttctttgcgcgtctccccacccttttccttccccgcccctgctacctccgcctccgctgccanttccttaatacaacctcctaccccccgcggttttttcctcccccctctgtactttccccattctatactccgctcacgtctccggcctcagtttcacccaccttcttcgttccccaccccccctttcctttgcctttttcccgcctttgtttttcccctctgtccccccggctccttcaataatcccttctttgtacgcaacccctccccattcctaacacccgcccttattacaccgccccgcttnnnnnnnnnnnnnnnnnnnnnnnnnnnnnnnnnnnnnnnnnnnnnnnnnnnnnnnnnnnnnnannnnnnnnnnnccacccgcgctattctccttccttctttctccctctccctgatcctactttaattccgcgcatcgccacgcttatcctctcttcgtattcatctcgccgcctcttgcctttttatattattctcaccacccccttccgttttctccgccccccca

SEQ ID NO: 231896 - DNA, 736 bp, Homo Sapiens
  misc_feature (80)..(97): n is a, c, g, or t
  misc_feature (147)..(166): n is a, c, g, or t
  misc_feature (609)..(686): n is a, c, g, or t
ggggcctgctgcctgagggtgccctgcaggggctcaatcttttttccagagcttcctcctcattcataccgccccaccgnnnnnnnnnnnnnnnnnnagcagccatgtgagtttggaccagtcacccaagctcacgaggcctcgacnnnnnnnnnnnnnnnnnnnncttctccgaagacagggtctccttatatagccctggctagcatggaatctgtgttgaccaggctggcctccacgaagacccacatgtctcgtctccccagagctgggatagaaactttgtgctgaacctgggaaaagacagcaacaacctgtgcctacacttcaatcctcgcttcaatgcccatggagacgccaacaccactgtgtgtaacaccaaggaatatgggacctggggaaccgaacaccgggaacctgccttccccttcccgcccgggagcatcacagaggcgtgcatcccctttgaccagcctgacctgaacatcaagctgccacaccgacctgaactcaaagtcccccaaccgcctcaaacctggacgcccccaatttacccggcggcccccgccaaactcccgaattaaccgccctggccctttcatatacagnnnnnnnnnnnnnnnnnnnnnnnnnnnnnnnnnnnnnnnnnnnnnnnnnnnnnnnnnnnnnnnnnnnnnnnnnnnnnngccgcacgccccacattgggcgcaatttcccttctcaaaaacattcactt

SEQ ID NO: 231897 - DNA, 890 bp, Homo Sapiens
  misc_feature (272)..(372): n is a, c, g, or t
  misc_feature (375)..(375): n is a, c, g, or t
  misc_feature (740)..(754): n is a, c, g, or t
gggccaactgagtggcatcctcacacatgttatctaaaggtgtccactgcccataatagagctgtgttccaggagttctccagtgcagagctatagcaggtcacttttggaattgtattcttaaatgtgtttataaaaatgccaaaatctagcccctgttctggactgacttgctctggtttcttttgtgttgttgatctaaaacagtaagcctcatagttactttgttatttatttgaactctcttaataaaattgtgttcagacagttgnnnnnnnnnnnnnnnnnnnnnnnnnnnnnnnnnnnnnnnnnnnnnnnnnnnnnnnnnnnnnnnnnnnnnnnnnnnnnnnnnnnnnnnnnnnnnnnnnnnnnttncaaaaacaatccctttaacccccaaaccccaccccctaaccgaaccctggccaaaacatgtttccccaaacaaacccttgaacccacaaaccgtctcgattttccccccacataacagatagcctccgggtgggttccccgacaccgttccggaaccaaattacaccacgggggtccctagccgccctttacctgccccctctttccccccgggagtcccaaccgcacccttcaaaaaaattatataaccccccgccgccacgggcaacttcagcccgaaacataccgtgaagagagattcccctcacgcgactctcgccttgaaaatagaaaccccctttcaacaaagaggcccttgaagcaannnnnnnnnnnnnnnacgatcctaaaacaaggcgtctggtgtgcccctttcctcccacacaactttgcgcccatggagaaaaaacccggaggcgcgaaaaaaataccgccccccacatccggaccgccttttgcctaccataattgtcgtg

SEQ ID NO: 231898 - DNA, 858 bp, Homo Sapiens
  misc_feature (411)..(542): n is a, c, g, or t
  misc_feature (576)..(611): n is a, c, g, or t
ggggcaaaagaagctacacagtgtggctaatggggtgccagcttgcacatcaaaactgactaaatctcttcctgcctcaccttctacttcagactttcgccagacacattcatgtgtgtctgaacacagttccatcagtgtgctgaatataactcctgaagaaagtaaaccaagtgaggttgcaagagaaagcacggatcagaagtggagcgtgcagtcgaggcccagctcgcgggaggggtgctacagcggatgctcctcggccttcaggagcgctcacggggaccgagatgacttaccttaaatgtgcgggctgcagtgctgttcccagatgtgcgctagaggagttgacacagggtgtaccatacagtcagtcgtctaacttaaaaccaccaaccactatctcccaannnnnnnnnnnnnnnnnnnnnnnnnnnnnnnnnnnnnnnnnnnnnnnnnnnnnnnnnnnnnnnnnnnnnnnnnnnnnnnnnnnnnnnnnnnnnnnnnnnnnnnnnnnnnnnnnnnnnnnnnnnnnnnnnnnntccagtccttagtgcgtacaataatacctccttnnnnnnnnnnnnnnnnnnnnnnnnnnnnnnnnnnnnttctcctgatttttaaccccctattttccccaacatatcattatcctacacaacccacccccgccaccatatttctacctcacctcttacgaactattcgcacccccccatgccgtaaaataaatatccccgcatgcctcggaaaaattctcacccgcccccgcttgacgttacaatacccgaattccccatccccctaaccaccccgtccactcccctcctttacacaatccttaaatatccaacg

SEQ ID NO: 231899 - DNA, 857 bp, Homo Sapiens; identical to SEQ ID NO: 33134

SEQ ID NO: 231900 - DNA, 901 bp, Homo Sapiens
  misc_feature (395)..(403): n is a, c, g, or t
  misc_feature (463)..(473): n is a, c, g, or t
  misc_feature (530)..(531): n is a, c, g, or t
  misc_feature (538)..(538): n is a, c, g, or t
  misc_feature (543)..(543): n is a, c, g, or t
  misc_feature (545)..(554): n is a, c, g, or t
  misc_feature (641)..(703): n is a, c, g, or t
ggggctgaaggtgagccggacgctatggcgttctgcgctcccccggcctacctgacccaccagcagaaggtgctgcggctgtataagcgcgcgctgcgccacctcgagtcatggtgtatccacagggacaagtaccggtactttgcttgcttgatgagagcccggtttgaagaacataagaatgagaaggatatgatgacggctacccagctgctgagggaggcagaagaagaattctggcagaatcagcatcctcagccgtatatcttcccagactctccggggggtacttccctccgacagatatcgactgccacaaggttccataatggtgcttacactcccggtatccctctgcccccgccctgtatcccgattccctcctcctataccgnnnnnnnnnacaataccgacgctcggatcccccggcatgcgccagggatgtgctataccccaactccannnnnnnnnnnttttcctccccctccttcattgcccccgggaagaccctgtcccggcgctcagcctanngcccacngctcntnnnnnnnnnnatccgatccaccactaccacatttttttcccccatcccccgctcgcgttattttacctccctttactcccgctccaccttacatccnnnnnnnnnnnnnnnnnnnnnnnnnnnnnnnnnnnnnnnnnnnnnnnnnnnnnnnnnnnnnnnttccacttttttttgccaccctcctctgttttccccacctcgctatcacaacttcttacgtcacacccgctcccctgacaccttcttatcttgcctcgactcgccggcgtaatctctctactgcatctccccctctcccgctgttcccttaatctaattttccccacccccgcttgcgttttctttccgaccacccca

SEQ ID NO: 231901 - DNA, 890 bp, Homo Sapiens
  misc_feature (166)..(224): n is a, c, g, or t
gggagtccagagagacaggagtgggcgatgggttcccgctgtgccaagctcagcactggccatggcccagcccagaacactggtcacagccgtggccacgagtcctccatgaagaagctcgtggcctgtgtgagtcaagacaacttttccctgtcatcagagggcnnnnnnnnnnnnnnnnnnnnnnnnnnnnnnnnnnnnnnnnnnnnnnnnnnnnnnnnnnngcaaatcccggcgaagggcaagctgctgctgctggagcccgaaaagcaagagagcgccgaggatggggaggcccagcccaagccccgagcccaagcagacacactcctgagccacaaggcctgcctggcaatgggtgcccattgccacgccagaggacattcccaaaagaaataagagtctccctgcccaaaccttaccacccccccaaacctcctccttgctggggcccgcctcgggccctccaaaaaacttttctcagaccctctccctttgggggccgcgggccccagtaaggtaaagtggaacatggtccctaactggttttcctaaggaaatccccgggtcatacaccagggttttggcttccccacccatataaaaccccccccgcggtgccatccctaactgtttctgcaccacaatccccaagggggggtttcttgggggcctttccaaaccgagtttttttccccctcgatgcgccccgtgcttctacttcccccgttattccaattttaacccccccgtgttctgtggtcccctccactcccccttatatctcttctctccccctccactcccaattttgcacggcgccacattctcgtaacccccctcttcccttacacattctgtttccaaccctttttaccgcccgccctcca

SEQ ID NO: 231902 - DNA, 964 bp, Homo Sapiens
  misc_feature (246)..(246): n is a, c, g, or t
  misc_feature (277)..(277): n is a, c, g, or t
  misc_feature (359)..(375): n is a, c, g, or t
  misc_feature (404)..(462): n is a, c, g, or t
  misc_feature (485)..(499): n is a, c, g, or t
  misc_feature (505)..(518): n is a, c, g, or t
  misc_feature (527)..(565): n is a, c, g, or t
  misc_feature (644)..(644): n is a, c, g, or t
  misc_feature (728)..(728): n is a, c, g, or t
  misc_feature (929)..(929): n is a, c, g, or t
ggggctgcggcagctgaggaagtggagcagtatggccaccagaccgcagccgttgggtatggagcccgagggctcagcagacctgctccacgggcctgagggggccagagggcagtatgggtccacacagaaaattgaagacttaatggacatggtgaaaaagttgcagaaagtgggaagcctagagccccggattgaggtcctgattaaccgtattaatgaggttcagcaagcaaaaaagaaagnccagtgagggagcttggggaaaaaggccccncaaaacggtgctcgtggggcaaaaccccccggcccaaaaaaaagagaaaacgggggggctttttttctcctttctcgggagnnnnnnnnnnnnnnnnntctctcccctccccgtaggaagaagatannnnnnnnnnnnnnnnnnnnnnnnnnnnnnnnnnnnnnnnnnnnnnnnnnnnnnnnnnncggccgtgttttttccctttttnnnnnnnnnnnnnnngccccnnnnnnnnnnnnnngaagggggnnnnnnnnnnnnnnnnnnnnnnnnnnnnnnnnnnnnnnntttttggccctgtgccgttccccaaaaaaacacaaaaatttatcttcccgcttcctgcgccccccctcttcacaccccnacgtggttaagaataagaagatgcccgcgcccgccccccactcacataacaaccccccccacccggggctcggcctgtttctcntttctatcctaaataaaaaacgaccgagccccgctcttacgaatacgcccctccgcctccccttgtgcgcccgcaccatcgtggtgtgtcggatcatccccgctctcttccccccccgccttttcgggtgttccaaccccaccgccccgggcctgaggtatataagtaaccgccccactcgacttatatcactctatattntcccaacccccttccggtcccttgtctctcttctt

SEQ ID NO: 231903 - DNA, 600 bp, Homo Sapiens
  misc_feature (474)..(474): n is a, c, g, or t
gggggaggctagacgggccgctgcgagaagtcgctctggctcgccttccgctctctatggtcgggagcgcgagcccctcctcttcccggaacgagccctcttgctcgacgcgcgcgcagcgctaggagggagttccgtttccggtctggtggctttcgatttttggcgttcagtagtcgcggttggtgggtaacaaccgagccaagatgttgcggaatctgctggcccttcgtcagattgcccagaggaccatcagcaccacttcacgaaggcattttgaaaacaaggttccagagaaacaaaagctgtttcaggaggataatgggatgccagttcatctgtgaaaggcgggggcatctgatgccctcctctacagagccacaatggctctgacgcttggtggcacagcctatgccatccatctgtttggtatggttggcgcgccatttccctaacagcgagaacttaacggtnggtcaccccccgccctccccgggggttcagtttcctccacccctcctgtgcgcccaggcccctgggtcgataaaccccgttcctctcccctgggggccccctacttcctccccctgcgtgcccctc

SEQ ID NO: 231904 - DNA, 989 bp, Homo Sapiens; identical to SEQ ID NO: 33140

SEQ ID NO: 231905 - DNA, 851 bp, Homo Sapiens
  misc_feature (338)..(338): n is a, c, g, or t
  misc_feature (674)..(731): n is a, c, g, or t
gggagaacagggtggtggaggctgacagggacgtgtgtgctcaagtatttcctggaatggacatccagccaggccttcgtggatggccgtgcttgcctttgcgccctgagctggtggagttaggaaacattcagagccgcttgccagacctatcgagtcatcctgacttcagcaccttctggggactggcagggaccttctcagatgtgctttcatatcagctacagctggtgattactattccaggtaatcactttccaccggacctggacaccagaaactcctcagtaactacactctcctctccagggttgacttgagactcatctgcagcccanatataattagacagccttctgagaccatctaagtgcgagactttcctcctcacaccagtgccaagtttccacgttcaagaacttaaacggccatataaaatgctctggcaaggatgatctcaactaccgcaaatcaagcacattttgaaagaaacgatccaggggggaagaatggaaaaagaaggctaggaaaaccaccccgcaaaataaccctctccctgcaacaaaaccatgaacttcctagggaacccaggactaagccttgcggaccatggtcaaactcaaccttttattggctcacaaaaactgccctttggaaatctttaattttaacannnnnnnnnnnnnnnnnnnnnnnnnnnnnnnnnnnnnnnnnnnnnnnnnnnnnnnnnnaaaaacccttttcgagaaaacctttccttttgggggcggcgggggggccccctttcggtaaagtgggaaccttgcggttaataaaactcgctttccccagaggaaaaatccccggcacct

SEQ ID NO: 231906 - DNA, 855 bp, Homo Sapiens
  misc_feature (288)..(429): n is a, c, g, or t
  misc_feature (541)..(581): n is a, c, g, or t
  misc_feature (650)..(720): n is a, c, g, or t
gggacagcgggagtcagcttttccaaggcagctacaatgaagctgaatcagaacaccatgctagtgggcaagaaggtggtcctggtaccctacacctccgagcctgtgcccagataccacgagtgcccgacgtctcaacaactgcggcccctgacaccctcccatcccctcaccccatcgctggcgcctcacatgccccgcccccggcgttcttaccttccttccgcaccctcccccccctttgtacgacaccaccccccggccataccacgcgcaacgcatcaacannnnnnnnnnnnnnnnnnnnnnnnnnnnnnnnnnnnnnnnnnnnnnnnnnnnnnnnnnnnnnnnnnnnnnnnnnnnnnnnnnnnnnnnnnnnnnnnnnnnnnnnnnnnnnnnnnnnnnnnnnnnnnnnnnnnnnnnnnnnnncctgtccttcgctttaatacaccctcaccccgctccccatactcctccccccacttcgttcccccttttgcacccctcaactctcctccatcggttcaccccatcacatggnnnnnnnnnnnnnnnnnnnnnnnnnnnnnnnnnnnnnnnnnactcacacgctgatttaataaccgctcattacgaaacccgaccaatccattaccccccaaaatacacgnnnnnnnnnnnnnnnnnnnnnnnnnnnnnnnnnnnnnnnnnnnnnnnnnnnnnnnnnnnnnnnnnnnnnnnaccgcccatacaccccttcttctccccatcccctcacctctttaacccaccctccgccctttcatacctctgcaaacaacgacctgccgttccatttttattattccccaccccctctctatacttccccaaccc

SEQ ID NO: 231907 - DNA, 873 bp, Homo Sapiens
  misc_feature (397)..(476): n is a, c, g, or t
  misc_feature (523)..(557): n is a, c, g, or t
  misc_feature (583)..(621): n is a, c, g, or t
ggggggtcctgcaagtatggcggcgtcgaaggtgaagcaggacatgcccccgccagggggctacggccccatcgactacaagcggaacctgccccgccggggactgtcggggtacagcatgtttgctgtgggcatcggggccttgatctttggctactggagaatgatgaggtggaaccaggagcgcaggcgcctgctgattgaggacttggaggccaggatcgccctcatgccgctcttccaggcagagaaggaccggaggaccctgcagattctcccggaaaacctggaggaggaacccctcatcatgaaggatgtgcccaactggaaggcgggcgagtatgcgttcaatccccgaaacccgattgccatcttccatccccctccatcaccgctnnnnnnnnnnnnnnnnnnnnnnnnnnnnnnnnnnnnnnnnnnnnnnnnnnnnnnnnnnnnnnnnnnnnnnnnnnnnnnnngatccatatacttattcccccgccatttccgccatccccattatcannnnnnnnnnnnnnnnnnnnnnnnnnnnnnnnnnntttgctaacccatttacctccctttnnnnnnnnnnnnnnnnnnnnnnnnnnnnnnnnnnnnnnnatctccctttatattttacccccttaattcccactcatttccttttccttcaaaattccccccaccgcccccataatttataccttcctattttcgcaccacacccaccccccctacactcataattaatatccaccgtcttgacctactaaataagcctcacccccccacgcaaaagcaataaccattggcgccgtaccccattacccgccctccgcccgccgcattggcccatcccttaatttctcccgc

SEQ ID NO: 231908 - DNA, 1014 bp, Homo Sapiens
  misc_feature (519)..(519): n is a, c, g, or t
  misc_feature (521)..(521): n is a, c, g, or t
  misc_feature (523)..(523): n is a, c, g, or t
gggcctttccgctcggccgttctcctgtataggaggcagccatggcgcccagccggaatggcatgatactgaagccccacttccacaaggattggcagcagcgagtggacacttggttcaaccagccggcgcgcaagatccgcaggcgcaaggcccggcaggcgaaagcgcgtcgcatcgcccctcgccccgcgtccggccccatcaggcccatcgtgaggtgccctacagtgagataccacaccaaggtccgggctggcaggggcttcagcctggaggagctcagggtggctggcatccacaagaaagtggctcgcaccatcggcatctctgtggacccgagaggcgaaacagtcccggagcactgcagccactgacgctgagagacgtcagtctctgtccagagcttgtcgaaggaacgttgcgaactagtgcacactaccgctggtgcatcgatggacaacgaagcacatccgaaaccatttgtctctcccgcccatcattttgggatcgcttccnancnaccacattgttggtccaatttatccgtggtcgcctcaccaaacccactcctggctttacactacccggaacaaaccaaaacaacttgcacgcctccttgccctctcactacggattgtgtaccaatcggttcttcccacttttatcccccacccccctccttattccccatcggtaccctcttgccattcgccccccacacccccatggtgtgaggctcttctcaggcgcttttcacagatccaacgaggtaacagccggcgtaactatcggccgcgttcttcctacacccccccgcgaatacatatatcttacccccgccttgtacttgttgtccctcccactcccccctttatcttataatatctcgcccatttccaatctacaatatcgcgtgctcgccaaccttgcgccgttatcggccccctgcttcgcactaactcaactatgtcggtgcccgccgcttctataaaggcggtgtgctctctcgct

SEQ ID NO: 231909 - DNA, 906 bp, Homo Sapiens
  misc_feature (321)..(432): n is a, c, g, or t
  misc_feature (501)..(517): n is a, c, g, or t
  misc_feature (519)..(527): n is a, c, g, or t
  misc_feature (529)..(536): n is a, c, g, or t
  misc_feature (538)..(539): n is a, c, g, or t
  misc_feature (541)..(547): n is a, c, g, or t
  misc_feature (549)..(551): n is a, c, g, or t
  misc_feature (553)..(714): n is a, c, g, or t
  misc_feature (758)..(758): n is a, c, g, or t
gggagtgaggtcacacttggacaatagtgcaggcagggcttccagtaaatcacgaaagaaatcactctaccagtacctcataattgctcttttcttccttactatgcttcattagcaggcatctggtcacagagaaggaactaatctgtgaggcgattacagctatgtatgagctctgtccaacacaatcagcacctcagggctgggaagatggcgactgcattgctgccacgctgccaagctgagtcccatctgcaggtccacagggtagaaagaaagactgactcccacaagctgtcctctcacctctttggctggggnnnnnnnnnnnnnnnnnnnnnnnnnnnnnnnnnnnnnnnnnnnnnnnnnnnnnnnnnnnnnnnnnnnnnnnnnnnnnnnnnnnnnnnnnnnnnnnnnnnnnnnnnnnnnnnntgggccccgctcaatttaactcttggcggcctaaaagaggcaatgtcaacggcgaagtgtccaaacacnnnnnnnnnnnnnnnnncnnnnnnnnncnnnnnnnncnncnnnnnnngnnngnnnnnnnnnnnnnnnnnnnnnnnnnnnnnnnnnnnnnnnnnnnnnnnnnnnnnnnnnnnnnnnnnnnnnnnnnnnnnnnnnnnnnnnnnnnnnnnnnnnnnnnnnnnnnnnnnnnnnnnnnnnnnnnnnnnnnnnnnnnnnnnnnnnnnnnnnnnnnnnnnnccgccccgttttgttcccccttcttttgtttccacacccggcanttcaccgtctggcttccccccgatgcgcttaacctctgtatagcgctccatacgaccacgtgaatcactctaccaagcatccgggcgcgctgttcgctattaatctttttccccgcgcacacctctgtttatctatcccgcacctcct

SEQ ID NO: 231910 - DNA, 847 bp, Homo Sapiens
  misc_feature (326)..(326): n is a, c, g, or t
  misc_feature (399)..(411): n is a, c, g, or t
  misc_feature (577)..(604): n is a, c, g, or t
  misc_feature (705)..(792): n is a, c, g, or t
ggacaggcaggaccactgctccctgctgaacggacacttttggacctggatgctgaggggcagagccaggatagcactgtgcccctatgcagagctgagctgaatgcacacgggccttccccatatgagatccaacaggagttctggtcttagtataaaaaaggccagggtgggcaagggagaagacggaggaggccgagggagctggctggcacagcccggtctcaggccccctgggatccagacctcctccttgcactgagaatgcactttgaagatggaaggggtgggagcagggccacttcggagggtctcctgccctgcangattttttctccatgttcactagaagggctgtgtcacctctgactgtatacaaaaggggtgttgcaccatggnnnnnnnnnnnnngggtcttcccttcccttctcggggggcaactatcggcccacttattgctgcatcccgcccacagggcctctccctccccaggccaaccataacccgtactggggctcacccttctttcacccccctggccccctctcctctcccctccatctatccatcgggtcgnnnnnnnnnnnnnnnnnnnnnnnnnnnntctttcttgctccagcccgcacaaaacccccgtcgggtatcttacaccgactccacaccccttctttgtccccttttatccacccttgttctcttcccccnnnnnnnnnnnnnnnnnnnnnnnnnnnnnnnnnnnnnnnnnnnnnnnnnnnnnnnnnnnnnnnnnnnnnnnnnnnnnnnnnnnnnnnngttacaccaccctcgccccccccagacgtctcgccctttatacgcgggcacgccc

SEQ ID NO: 231911 - DNA, 867 bp, Homo Sapiens
  misc_feature (572)..(614): n is a, c, g, or t
  misc_feature (668)..(677): n is a, c, g, or t
  misc_feature (714)..(724): n is a, c, g, or t
gggtagagggcggtcgcggcggtcgcctgggcagcggtggcagaatgttggcttccagagcgctgagcctgattggcaagagagccatttctacttcggtgtgccttcgagcacatgggagtgttgtgaagagtgaagactatgctttccccacttacgctgatcggcgtgactaccccttgcctgatgtggcccatgtcacgatgctgtctgccagccagaaggcgctgaaggagaaggagaaggccgactggagcagcctttccagggatgagaaagttcagttgtaccgcatccagtttaacgagagcttcgccgagatgaacaggggcactaatgactggaagacagttgtgggcatgcccatgcccttccttggcttcactgcgctccttctgacttgggataacagctatgcgccatggccccctccctcccaatttcaatccctgactcgttggccatgcccccccaatcccttgcctttatatgtatcgcccaccccacttccggcccttttccgcgcccctttgtccccctatccctccctgactcgtagcccttccattatnnnnnnnnnnnnnnnnnnnnnnnnnnnnnnnnnnnnnnnnnnngggctcgtagtttaatcgcgcttttttcccaccgtgtccttggcctattatttnnnnnnnnnntcccatttttattccgttgattctttcaccatccctnnnnnnnnnnntcgctcacaatattttttcccgctcttccctcgtaaaataactcgtacccccgcccttccctatcacatacccaatctgcgcctaccccgcttcctcaccacccccctccacgctccggccaatatccttattatctccgtgg

SEQ ID NO: 231912 - DNA, 915 bp, Homo Sapiens
  misc_feature (737)..(737): n is a, c, g, or t
gggacaacaaagtagagcaattcgtggtttgaagatcttctgacattggaacaattacatagctcatctcccacctttgggatagactcaacccagaggactgacagacagttcaagactatgtatacagagtactgtaccagtggggatgtacttggtgaactaagctgtttgctgaagcgtgaaattgaatatacggccatctgtgaaactacgttgcaggccttcttcatctccttggaggatttatatgaaggttttgatgtcttctggccatctctagaatataaaatgtggctcaagcttgctcttagtattgcaaatcagtattttgaaccaaatattgctggtgaggatttacagcttccccagtgtgcgttgcacaatcacgcatatgtgggaaactcctgtaagctataatgagatgactcctaatcacgctgatcctgaaaactcattattcccggcgggacggacctccgcatccgtagttaccactgggaaacccttttggggggacaccagcatccctcacctcgtgtcgccgcgacccagacgccaccggcaaccccttgattgtcccctccaggaccccgttggcgaataaaataccttcctgaacccctcggcgcaccaaaccattacgcgcccacctatcagcctccgcggatcccgcccctggcttttttctctttttccccccacccacacgtgcccattgttttgtccacccatgngttttattacccccccgcgcatttacacctgctgggatgtccgccccctccgcagaaccttcgttatcacgcgccgatcggaccataggatccactctacgttcctccgcgcccgcggcgatcgctaaatatcaatttaccgcgcttaccctatcgctctttgatccccgcgcccaca

SEQ ID NO: 231913 - DNA, 766 bp, Homo Sapiens
  misc_feature (188)..(261): n is a, c, g, or t
  misc_feature (433)..(433): n is a, c, g, or t
  misc_feature (435)..(441): n is a, c, g, or t
  misc_feature (443)..(443): n is a, c, g, or t
  misc_feature (445)..(446): n is a, c, g, or t
  misc_feature (448)..(448): n is a, c, g, or t
  misc_feature (451)..(542): n is a, c, g, or t
  misc_feature (652)..(674): n is a, c, g, or t
ggggagaaacagcactctggggttcagcgcttccgtatgttcctaagctcactgattcaggtccattaagtgctcacagagaaataagctactagaccctgagaatacacaaacagctctacagagctggcccacagtgaagagcatcctacatccagcaagtgctgaggcctctttccagcaccggnnnnnnnnnnnnnnnnnnnnnnnnnnnnnnnnnnnnnnnnnnnnnnnnnnnnnnnnnnnnnnnnnnnnnnnnnnggatgctcagaactgggggtgtcctgaaagcccagagtcagaatcctcctgccaagcccctcccacattcccaactcagagaagccctcacattataaatggctgtcgatttctcctgctgagattggagataattttactcagacagataaaatccacattgccatcatcntnnnnnnnanannanaannnnnnnnnnnnnnnnnnnnnnnnnnnnnnnnnnnnnnnnnnnnnnnnnnnnnnnnnnnnnnnnnnnnnnnnnnnnnnnnnnnnnnnnnnnngactttctcttacctttttccctccttcccccaccctccattttcgccgctacaccacccccagtcaccaaatattttccctcttttgcccggggattcccatccccacnnnnnnnnnnnnnnnnnnnnnnntcttcctgggaggggcggcgggcgcccacccggcggaaagacaatatttttttcgcccactgcttttgttacaatagaaaaacccccccggg

SEQ ID NO: 231914 - DNA, 772 bp, Homo Sapiens; identical to SEQ ID NO: 33161

SEQ ID NO: 231915 - DNA, 1024 bp, Homo Sapiens
  misc_feature (121)..(122): n is a, c, g, or t
  misc_feature (158)..(158): n is a, c, g, or t
  misc_feature (276)..(316): n is a, c, g, or t
  misc_feature (389)..(399): n is a, c, g, or t
  misc_feature (417)..(476): n is a, c, g, or t
  misc_feature (862)..(870): n is a, c, g, or t
gggccccagcaaccgggctatggacgcgtaggggcctccaggctgctaaatcacaaaccctggggttcttccttcatctaccctgcgggtttccggcactatgtcggttcggactctgccnngctgctctttttgaaccttgggcgggggaagatgcntttacgtccctagacccagccgactggaggggcccagaaacattcccccgggagaacaaaggtccccggacaaaggtttctggaaccgaaactttcattttctaaacccatgtgttcnnnnnnnnnnnnnnnnnnnnnnnnnnnnnnnnnnnnnnnnntagccttccccccacacccacacaccttcgtatccccatatcgggcaaccaccccatccgcgtcaattcccgnnnnnnnnnnngaattttatctttcaccnnnnnnnnnnnnnnnnnnnnnnnnnnnnnnnnnnnnnnnnnnnnnnnnnnnnnnnnnnnnattctctttcccccccttcttaaactgccccctctctacacacccatgtgggttaccacatagaacgtgcgccacaccacaacacccaccacttgtgttcaccactctgttcttttcccgcaccactccaccccgcctccaccccacatgaaatagcttacccatcgcgtcttccccattaccctcccccccacctcttagaacgccccttcaatctgattcacttcacccccaaaaaaccacagtcgtggtgggcttatcacggagattttcaataacacaaagtgtgaatcgcccgctcatatactcccgcgcctctgttcctcccaccaccacgtgatatcccttcatgttacccccccatgtgtctatcttatccctaccannnnnnnnnattagtctcatatatttctcccgcataacaaacactacagatctcacccgcgcactatacatatcccccgtatatctcacacccctgtactcacttacacaaacacttcttcgttccaccgcacttatatatactcagcgatacaaacatacat

SEQ ID NO: 231916 - DNA, 624 bp, Homo Sapiens
  misc_feature (260)..(346): n is a, c, g, or t
gggatagaattatggagctgaggcctggtgacaggagcctagtgtatgggagggtggcaaccttccttccatcccttgaagagttatctgctgggtctccgggattttaacctagctcagccagacaagaggctgcctttcatggtcacacaggatgatttaaaataagggcaaactaactcatgacggatggaatcaggcatcagaatgagtgtctgttcacactgcttttgcctaatctgctgtagaagaagaagaannnnnnnnnnnnnnnnnnnnnnnnnnnnnnnnnnnnnnnnnnnnnnnnnnnnnnnnnnnnnnnnnnnnnnnnnnnnnnnnnnnnnnngagataatagcactggtgaaaggttgccctgctgactactccagcaatgctccagagtgctagagaataatattcagaaggctatccacaactgggaaagaagagggattttgaaccttcatgtctgtaagaaagctatgggtcctgcttacatgctgggcacctgtagcctgtcactgcaaatctgctgatcgctaaggaccatcatccgataatcgttatagtcgacagatctatggcgtgcgtagctgatgtaactgaagctcggccaaaccggg

SEQ ID NO: 231917 - DNA, 836 bp, Homo Sapiens; identical to SEQ ID NO: 33163

SEQ ID NO: 231918 - DNA, 899 bp, Homo Sapiens
  misc_feature (701)..(709): n is a, c, g, or t
  misc_feature (817)..(817): n is a, c, g, or t
ggggggctacctggccctcctactttagagaaaagggacccattggcggttggagcagaagtaggaccacgacagggatcagctttgtgtccggcagaatatctttccgagtgagcagacggctttgccagctgtatctgtgtcagaacgggtgctcgggagtgttgggagatggttggacagtctgcccagagccctttatcccagggtccaagacactgtggccggctcctcattctggacctgcccccgcgtgtcagctcaggaacctcagctctacctttctgaggactcctccgtgagcagccacctacccttcatctccagggccaccatcccaaggccacggggaggcctcctaaccttcctggacacccctaaccactgtggaatccgaatccctttctgccccagtttgggtgcctgccagttctgccccggaagtaaggccgtctctaaggggctaacagcctggctccttgccgttccacaatataatttggcccccaagcctccacaaggcgcaatgcccttgccccataatccccccctacaacttcatggaattgttacccctttccctagtttacattgcattaacccccgccccttccttttttcccgccgtataataaccccccctcctccccaaggtgggtccggataatggccccacctttgccctccccaatttattcggnnnnnnnnnaccatttttgttccgtgttatctcttacccctaccgtgcccccgcgccgggctttgtattttattttcccgaaagacctttttctaaatacctccccacccccgtgcngtcccgtaggtattcccattcgccgcgtcccgcgataccacgctccccctccaccccgtttcacttgctgaaataatccccg

SEQ ID NO: 231919 - DNA, 841 bp, Homo Sapiens
  misc_feature (357)..(432): n is a, c, g, or t
  misc_feature (450)..(459): n is a, c, g, or t
  misc_feature (688)..(698): n is a, c, g, or t
gtgaggggtgatggagggaataggtatggcagcagtattcttgcggagcaaggccacctgtcatcttctttgtgcatgcctccacccaagcaatctgagacagtccccagtctttttttgtgttctcctgccattcctagagtgacgttcaaggacatcagtcagacttgaacgcacgtgaccgcctcgacagctaaggtggctttccgaggcggagagcacgagagggacagcgcctaccgttgtgaccccatgacaggagcccacccccagagctgctcccacctaaatatacaggtacgcccctctaccctaaccgcctttttgtatccccttcctcccgcctgaaccctttannnnnnnnnnnnnnnnnnnnnnnnnnnnnnnnnnnnnnnnnnnnnnnnnnnnnnnnnnnnnnnnnnnnnnnnnnnnattccttatatcttttannnnnnnnnntacctccatcgccattttaacccgccattataccccaattacccccatcaccctctcatttgtgctacaatcttaaccttccttttccccccaccctccttatttacccgcttctctccccgcccttttcccgtatttttatcccctaatttttccgactttatacccgtccctaactctttccccccacccctaaattatttcttccgttattcgttcacaatcttannnnnnnnnnntagtctaataatttttatcccctcctttcacttgttaaatacgcctgccaccccttcttacgtaacaattacccatatgcccttcgcgcctttactcgccgtccccacaccccgccttgtctaaatgccttatttcacagaat

SEQ ID NO: 231920 - DNA, 896 bp, Homo Sapiens
  misc_feature (105)..(117): n is a, c, g, or t
  misc_feature (221)..(229): n is a, c, g, or t
  misc_feature (545)..(546): n is a, c, g, or t
  misc_feature (549)..(550): n is a, c, g, or t
  misc_feature (627)..(627): n is a, c, g, or t
  misc_feature (782)..(782): n is a, c, g, or t
  misc_feature (816)..(816): n is a, c, g, or t
accgcggggggcgggggacgggatgccctcttccccccgccccaccaaaacacaaaaacacccacccgagttgttgtggtgggtcgggcgccgcactcccaccgnnnnnnnnnnnnntgtcgtgaggtccccgccatcggtggaagcgcgcaagacgagatggatacaaaacaccacgcaggtaggcgctatcagtgcgtgctctccccccctattagacnnnnnnnnncacaaccgattgcgccacagcccacaccgccccgaaccccccgcaccaccactctataacgacctggcacgcacgcacctgtgtagagcaatcacccgtaagcatgcaccctcccatcacaccacacattcgacgcgagccacactggccggcgtttccatagtttatatatacccgtacgcagatacaacacgcgtgcatagcgacaacgattgatgtagagtggctagcacccgcataagtgagtaatggtatgtcgcgggttacacacagcgcgctgacggagagccagacactcctctcctcgcccgccacnncgnntcctcatcatatgcgagagggcgagccctcatcgcgcctgcgcgtgccgctatcgagcctgtcgtactcaggccacncaaaatcactcagctcgggcacccgcagattgtcgccagacgtcgaccgcacctacatcacctgaacaggggtgacactctcggctagtatcctcatcacgtcgacctcaccactaccacgtcggtaccgcacctcacaccactaccgcgcatgntcgcccagcgctcccagttggtacctcatatagntcactggctcctcaccgccgcttaggacgcagcacgctacctctcagcgaggtagatcagtcaccaccagccacacgccc

SEQ ID NO: 231921 - DNA, 748 bp, Homo Sapiens
  misc_feature (115)..(115): n is a, c, g, or t
  misc_feature (126)..(126): n is a, c, g, or t
  misc_feature (257)..(316): n is a, c, g, or t
  misc_feature (352)..(361): n is a, c, g, or t
  misc_feature (383)..(436): n is a, c, g, or t
  misc_feature (445)..(453): n is a, c, g, or t
  misc_feature (462)..(465): n is a, c, g, or t
  misc_feature (558)..(558): n is a, c, g, or t
  misc_feature (565)..(565): n is a, c, g, or t
  misc_feature (567)..(568): n is a, c, g, or t
  misc_feature (654)..(674): n is a, c, g, or t
  misc_feature (682)..(682): n is a, c, g, or t
  misc_feature (684)..(684): n is a, c, g, or t
ggggagtgaggcccaggccaggactccacaaggctggtcccctgccctggagcaacttaaacaggccctctggccagcctggaaccctgagaatggcctccagctcaggcagcangtcctcgcccnggcccccctgatgagaatgagttttccctttgggtgccctcccaccgtctgccaagaccccaagaccccagggctctctgctgtgcaggctgtctctctgaaaaccccaagtgaagtgaatgaaggaccgnnnnnnnnnnnnnnnnnnnnnnnnnnnnnnnnnnnnnnnnnnnnnnnnnnnnnnnnnnnncaaaaggaccccctgggaacttccggggggggaaannnnnnnnnncctggggggcctccaatttttnnnnnnnnnnnnnnnnnnnnnnnnnnnnnnnnnnnnnnnnnnnnnnnnnnnnnnttggttgtnnnnnnnnnaaaaagggnnnnaaaacaaaaccaaccccccccacaggcgccggtggcaaacaaaagaaaatttatttttttgcccccacaccattagctattaaacgcccacangaatgtntnntgtgtgtttttttggggggggcgctccttcccgccccccctccaaaaaaagaaattcttttttaaaaaccacatccttttgttttnnnnnnnnnnnnnnnnnnnnncgccgccntntggcgggcgtggtgcgaaaagaaaaccgcggagacggcccaaaatttgtgtgtgttgcctcctt

SEQ ID NO: 231922 - DNA, 748 bp, Homo Sapiens
  misc_feature (44)..(207): n is a, c, g, or t
  misc_feature (215)..(349): n is a, c, g, or t
  misc_feature (454)..(463): n is a, c, g, or t
ggcctcactccctaataaacatgagtctgatgttctccagcccnnnnnnnnnnnnnnnnnnnnnnnnnnnnnnnnnnnnnnnnnnnnnnnnnnnnnnnnnnnnnnnnnnnnnnnnnnnnnnnnnnnnnnnnnnnnnnnnnnnnnnnnnnnnnnnnnnnnnnnnnnnnnnnnnnnnnnnnnnnnnnnnnnnnnnnnnnnnnnnnnnnnttggcggnnnnnnnnnnnnnnnnnnnnnnnnnnnnnnnnnnnnnnnnnnnnnnnnnnnnnnnnnnnnnnnnnnnnnnnnnnnnnnnnnnnnnnnnnnnnnnnnnnnnnnnnnnnnnnnnnnnnnnnnnnnnnnnnnnnnnnnccggggggggaaaacggagggttttgagaacaaaacaaaaggggaatctacagacgcacttatgggaagccacacaccgaagggtccccacaagggatcgagatnnnnnnnnnnttaccccccaagagagggcaaacccccctaaaagaaaaccgcgggtataaaacccccccataaaaacaccttttttgccgcccatctatgataaacaacactccaccacaaaaaccaagaatataataataaacacccctctattaatatacgctcgactacggaagaagacccatagtaacagaaaacccttgtgtggccgcgcccttagtatcaccacaaaacgaaaaatctattcgagacctcacacggtgggcgcaccaacaaacgcagagggcgacggac

SEQ ID NO: 231923 - DNA, 865 bp, Homo Sapiens
ggggacacggagaagaaggtgttcctcttggctggcaggaaacgaaaacggagcaagacagccaattacctcatctccatcgaccctaccaatctgtcccgaggaggggagaatttcatcgggaagctgaggtccaacctcctggggaaccgcttcacggtctttgacaacgggcagaacccacagcgtgggtacagcactaatgtggcaagccttcggcaggagctggcagctgtgatctatgaaaccaacgtgctgggcttccgtggcccccggcgcatgaccgtcatcattcctggcatgagtgcggagaacgagagggtccccatccggccccgaaatgtgagccccgcacctccctggaccctggctccctatgtgagaaacaggagtcggggctcagcttaggaaatagcccactccctgaggacatccatcaccctccaacagaaattcattctggccaactaaggaatggacttggggcttttggaaattgaattccctggaaaccccacgcacgaccaccccgatataacaaaatatacacctggccgggccgcccccggaccctccaaaaaagttttttctaaaacccttcccttttggccgccgcggggccccccccagggtaaatcggaacaccttgggccctcagcttgcctttccctagggaaaaaccatgggcccccggaccaaaagggtcttgggatttcttcccccaattataacaaaccgcccccgggggggcgcaaacccgcagggctctctttgtaacccaccctcccccagcaggggagaactcctccagaaagagccctccctttaattggcgcacccctatatccaatcaacggcggcggcc

SEQ ID NO: 231924 - DNA, 568 bp, Homo Sapiens
  misc_feature (172)..(315): n is a, c, g, or t
  misc_feature (462)..(470): n is a, c, g, or t
gggacggacgcgcagccttacccgaaaggccatggcggagcacgcccctcgccgctgctgcctgggctgggacttcagcacgcagcaggtaaaggttgttgctgttgatgcagagttgaatgtcttctatgaggaaagtgtgcattttgacagagatcttccagaatttggnnnnnnnnnnnnnnnnnnnnnnnnnnnnnnnnnnnnnnnnnnnnnnnnnnnnnnnnnnnnnnnnnnnnnnnnnnnnnnnnnnnnnnnnnnnnnnnnnnnnnnnnnnnnnnnnnnnnnnnnnnnnnnnnnnnnnnnnnnnnnnnnaacaaaaactgcgaaagacgaagaacttcatgataactgcatggatgacccatttcttagataggactgttctgaaagaagaagaaacgtctgaaaagaaatgtggaagggccggcccgggcccctgaaaaagcttttagaaacccnnnnnnnnngggggcgcgggcccccaatgggggaaggaaacggtgggcccatatgggggtttccctaaggaaaaatcccggcgccccagaaaaaacgaggccgggga

SEQ ID NO: 231925 - DNA, 982 bp, Homo Sapiens
gggacagcactgctgggctggagacggcgggagccgctgctctccggctgagggaatcagagacagctccgtccctagtggagcgcaggggaggcagaagtcatgacaggcgaggtgggttctgaggttcacctagaaatcaatgacccaaacgtcatttcacaagaggaagcagatagtccttcagatagtggacagggcagctatgaaacaattggacccttgagtgaaggagattcagatgaagagatatttgtaagcaagaagttgaaaaacaggaaggttctacaagacagcgattccgacacacaggacacaaatgcctctccagagaaaactacctatgacagtgccgaggaggaaaataaagagaatttatatgctgggaatacccctaacctcccaactacttaaaaaccttgtcgggccgcctcgggccctccgagaagcttttctaaaaccattctgtttcggggccgcgggcccccagtaggttaacctggaaccgtggtgtccccagcctggttccccccaagggataacccctgggttccccgcacctcaatgggccttggggcatttcttcccccccctgttaaaaacaattttccccccggagtgcgtacaatctccgcaccgggtgtttccggaaaacaacatcctccccaaatgcggatctttcccgcggagggcctttccacctgggggactcccattcccacacgtgggggtgctccccaccccgcacctcccccctattctctgaattttacgcccccccggcccctgggccaccttctatacccgcacgttacacggtttcgggatattccgccaaccgccacttttttgcccgcgacttgtgaaccgccttctcacgcatatcgtattttggtaacacacccctggaatccggaacgctggtgttttccccaccctctgtgccccacctccgcccacattcatgttttcgttcccccgg

SEQ ID NO: 231926 - DNA, 1134 bp, Homo Sapiens
  misc_feature (101)..(123): n is a, c, g, or t
  misc_feature (130)..(176): n is a, c, g, or t
  misc_feature (234)..(326): n is a, c, g, or t
  misc_feature (434)..(502): n is a, c, g, or t
  misc_feature (531)..(603): n is a, c, g, or t
  misc_feature (840)..(840): n is a, c, g, or t
  misc_feature (927)..(927): n is a, c, g, or t
gggggaccttggtcgtttttatactagcaaaatgtcttgttttaatttgtgttttttggggggagggagggagtgaacttgctgattctgtagcaaaaccnnnnnnnnnnnnnnnnnnnnnnntagcccnnnnnnnnnnnnnnnnnnnnnnnnnnnnnnnnnnnnnnnnnnnnnnntctgcacttgaaacccaaccttaccgcttcaccccatcggttatgtattatttgtcannnnnnnnnnnnnnnnnnnnnnnnnnnnnnnnnnnnnnnnnnnnnnnnnnnnnnnnnnnnnnnnnnnnnnnnnnnnnnnnnnnnnnnnnnnnnataacctcttcaatgtggcccccactcccccctgacctgccagtattacagcacatccctacaaacccgccgccgcgcgtccgcgaataccctgacttaacaaccaannnnnnnnnnnnnnnnnnnnnnnnnnnnnnnnnnnnnnnnnnnnnnnnnnnnnnnnnnnnnnnnnnnnngctttacacaccctcaagccgtagctgtnnnnnnnnnnnnnnnnnnnnnnnnnnnnnnnnnnnnnnnnnnnnnnnnnnnnnnnnnnnnnnnnnnnnnnnnngctcagtagacccgcccggccatctatatttccgaccctatttcactcccccgttatactccaccctctattttatagttctatgcccaccgcgaacaatacgatccccttagcagcgcgaagtgcgagtgtaaccaacaacatcgatgctcccagaggccgagaacacgccacacgcgacctccactgcccgagcgatattattacagactaataagtttgcaccatgatctacanctcactattgtatgtacatcacattaccgtcacctacagcacgctgtcccaactttacagcaccgacgcgaggctcagacgcgctcncccgtatacactacaccgcaacagacgtatgtacagatactgagcagcggattatgccacgatttcgcactctccactccccttctgcttaacacacgcccccctcccgcggtcgctccagaaccaatttactcactaaactcccacctcctacctcgacagcgccaccgcacctccattatatatttctctcctgtgtacaccacg

SEQ ID NO: 231927 - DNA, 1018 bp, Homo Sapiens
  misc_feature (252)..(252): n is a, c, g, or t
cagccgaacagaaaacagcatcagaaacgtgtcgggcccgcctcggaccctcaaagaaggtttcatagaccattccgttttggccgcgcggagcccaagtagggtaaagtggaacatgggatcattagactgattccgctagggaaaaccgctggcccgatgaactgagatgccttgggaattcccccacccaaaaaaaataaaccggcccccgtaggacaaaaaccccaagccggattatctcgcaaccanaaattccccacaaaatcgggccgcttcccctgtgaaggcgtcccgtttacaccctggggaaaccccgtgaatccgaaccagcaggcggacagtgttgcctctggacgctcgaagaacgacgttccagaaagatccctctccactctcaaactatatccgcccagatcccaccccccctgcaataacacactcttggtgtagcccccacaactgctttggtgatttgcggtgtcaacggaacgatcaaaaccaccctgggggctccactcgccaaaaaacaaaaatcgtacacagacatcgtataccaaaagagacacgaggctttttaccactgcgcccccctccggaaacacactctttgggtagtcaagagagcaatatccatacttcgcacgagatgtacaccacccccagctctacaccgtctcccatgtgtcaaaaaactgccctcgcgctcaaactctccccaagatctccgccacgccgcacaagaaactccctagtacaccacattcactcttccgcgactgaacacagggactttcgtggcacgcgtagtaagtacgacactacaaccttatttggggagcacactgcgcggggcgggtaagtatcacaaaacggctcgcgcgcagcactataacaacacacaacacacgatcgagtgcgcccccccacagatatttgcggccgcccacaccaataccctcccacaattaatagcaccacaccctttgggacttgtgaacccccactctccgccgcg

SEQ ID NO: 231928 - DNA, 701 bp, Homo Sapiens
  misc_feature (114)..(348): n is a, c, g, or t
  misc_feature (478)..(482): n is a, c, g, or t
  misc_feature (484)..(484): n is a, c, g, or t
  misc_feature (491)..(580): n is a, c, g, or t
  misc_feature (637)..(650): n is a, c, g, or t
ggtactataggctgtttgctgtggtttagtcaaaaagccatgtagaatgcctgccttttgaagaccacttttaaggtgtctagtaagacagcagatggagtcttgctctgtcannnnnnnnnnnnnnnnnnnnnnnnnnnnnnnnnnnnnnnnnnnnnnnnnnnnnnnnnnnnnnnnnnnnnnnnnnnnnnnnnnnnnnnnnnnnnnnnnnnnnnnnnnnnnnnnnnnnnnnnnnnnnnnnnnnnnnnnnnnnnnnnnnnnnnnnnnnnnnnnnnnnnnnnnnnnnnnnnnnnnnnnnnnnnnnnnnnnnnnnnnnnnnnnnnnnnnnnnnnnnnnnnnnnnnnnnnnatgagccactgcgccccagcctatacatttttttaaaaataatggtttttgtaattaataaagggagagcctgcatttctaatctgtactgttctttgaagaggagtaaaatatcattaccgtcattaannnnncnacaacannnnnnnnnnnnnnnnnnnnnnnnnnnnnnnnnnnnnnnnnnnnnnnnnnnnnnnnnnnnnnnnnnnnnnnnnnnnnnnnnnnnnnnnnnccttgtggggccgccctgggccctcaaaaaaatttttcttaaaaccttttctttttnnnnnnnnnnnnnncccccaataggggaaaggggaaacctggggcccaaaacgtggttcctcccg

SEQ ID NO: 231929 - DNA, 166 bp, Homo Sapiens
aaaaatgggctgggtggggggataaaaccgggggggcccctggaaaatttccccggcctaaccttcaaaaaggtctttaggggcaagggaaaaaattgggccgggaaaaccccccggaaaggggcggggaaacttttttttaaaggggccccccaaaaaatttggt

SEQ ID NO: 231930 - DNA, 642 bp, Homo Sapiens
  misc_feature (189)..(213): n is a, c, g, or t
  misc_feature (303)..(306): n is a, c, g, or t
  misc_feature (308)..(372): n is a, c, g, or t
  misc_feature (376)..(376): n is a, c, g, or t
gggtgaatgggctcagtggactctgggaccaaaccttctgtaatctctaaaacaatgggaccaagagctggatggaacctggagtcaaaaagaactgcttcagtccccgctgtaccgcctgcctagctgtgggagcaggcagggcgcctgggagcctgcgttttctggaccgttccatgggactcatcnnnnnnnnnnnnnnnnnnnnnnnnntgttgtgtgactgcgtgtcctgcaaacgcccagctcggtgcccagccagcggtgggcacccaataaacgctacaacataaatgtgaaaannnnannnnnnnnnnnnnnnnnnnnnnnnnnnnnnnnnnnnnnnnnnnnnnnnnnnnnnnnnnnnnnnnntggncggccgccctcggccctcaaaaaagttttcaaaacctttcctttgggccccgcggccccaaaagggaaagggaacagtggccataccttgtttcctaagggaaatcctggcccatgaactagggctttggtattctcccccaaataaaaaacgccccggggggaaacccgaaccttttctgaaacaaattcccaaatgggagtttctgaagggccattactggggaatctattccaccggggaattcccaagccgaggcctcgaat

SEQ ID NO: 231931 - DNA, 718 bp, Homo Sapiens
  misc_feature (190)..(324): n is a, c, g, or t
  misc_feature (332)..(346): n is a, c, g, or t
  misc_feature (417)..(476): n is a, c, g, or t
  misc_feature (503)..(541): n is a, c, g, or t
  misc_feature (570)..(579): n is a, c, g, or t
  misc_feature (592)..(606): n is a, c, g, or t
ggaactccatttgacatgaggtgacagaagagagtctgagtctacctgtggaatatgttggtttattttcagtgcttgaagatacattcacaaatacttggtttgggaagacaccgtttaattttaagttaacttgcatgttgtaaatgcgttttatgtttaaataaagaggaaaattttttgaaatgtnnnnnnnnnnnnnnnnnnnnnnnnnnnnnnnnnnnnnnnnnnnnnnnnnnnnnnnnnnnnnnnnnnnnnnnnnnnnnnnnnnnnnnnnnnnnnnnnnnnnnnnnnnnnnnnnnnnnnnnnnnnnnnnnnnnnnnntttggggnnnnnnnnnnnnnnnaaaaattttttaaaacctttttttggggcgggggccccaaaaggaaagggaaacgggccatagttttttcnnnnnnnnnnnnnnnnnnnnnnnnnnnnnnnnnnnnnnnnnnnnnnnnnnnnnnnnnnnnacacggggtttttaaaaaactcccaannnnnnnnnnnnnnnnnnnnnnnnnnnnnnnnnnnnnnncccccgggggtcctaatttataattttgnnnnnnnnnngtggccttttttnnnnnnnnnnnnnnnaaaattataaaacattttccgccccactggggaaaccccttccaaagggcggtgtgtagacccctttatctcccccccgggacttcaaccccccctgggccccgcttggggg

SEQ ID NO: 231932 - DNA, 893 bp, Homo Sapiens
  misc_feature (199)..(224): n is a, c, g, or t
  misc_feature (226)..(226): n is a, c, g, or t
  misc_feature (229)..(230): n is a, c, g, or t
  misc_feature (235)..(267): n is a, c, g, or t
  misc_feature (273)..(286): n is a, c, g, or t
  misc_feature (316)..(317): n is a, c, g, or t
  misc_feature (327)..(346): n is a, c, g, or t
  misc_feature (353)..(374): n is a, c, g, or t
  misc_feature (378)..(390): n is a, c, g, or t
  misc_feature (470)..(481): n is a, c, g, or t
  misc_feature (605)..(617): n is a, c, g, or t
ggttccagtgttgagatgctttgcatctctgcagaagaaatttattttaaattgtttaaatatctggaaatacttttagctatcatttataaagatagttttgttctcagtttcactataaattatagaacaaatgggaaacaagggtttaatttagttcagccattttacaaggaaataataaaatactaaaatctgnnnnnnnnnnnnnnnnnnnnnnnnnnanccnnccccnnnnnnnnnnnnnnnnnnnnnnnnnnnnnnnnnaacaannnnnnnnnnnnnnacaaacaacccaaccccaaaccacccaaannaaacaatctnnnnnnnnnnnnnnnnnnnnaaaaaannnnnnnnnnnnnnnnnnnnnngggnnnnnnnnnnnnnaaagttatcgaaaaccttgctttttcctcttctcccaacaaaaaacccgggcaaccaaaaagggtctggttattcccacnnnnnnnnnnnncccccccggttaaaccccggtgcttttccaccaaaattcccaaaacgctctctctcgagggccctcttggggggactcatcaccccagggtcttccgtcccgcccccccaatcaccagcatatnnnnnnnnnnnnngggggcgctaatgcgccacaaaaaaattcggtacaaaactctctcccaccacatttctcccccccaagacacggagacccttctcttcccccaccaacttttgccatatgaacccccccaataatcgtaccagggcgattctattcacacacccacttttcgcccatccctcccatatatacaattatcttcccctatccgaaaaaaacacgcggcacggcgcctaacaaacaagccccttccctcttgctctgccgcgggtactattttttgggg

SEQ ID NO: 231933 - DNA, 678 bp, Homo Sapiens
  misc_feature (81)..(304): n is a, c, g, or t
  misc_feature (364)..(373): n is a, c, g, or t
  misc_feature (533)..(542): n is a, c, g, or t
gggcatgaaactagttgcaaaacccactattttggaaataaaaatgtattttgacatatacaaataaaatgaataaaactnnnnnnnnnnnnnnnnnnnnnnnnnnnnnnnnnnnnnnnnnnnnnnnnnnnnnnnnnnnnnnnnnnnnnnnnnnnnnnnnnnnnnnnnnnnnnnnnnnnnnnnnnnnnnnnnnnnnnnnnnnnnnnnnnnnnnnnnnnnnnnnnnnnnnnnnnnnnnnnnnnnnnnnnnnnnnnnnnnnnnnnnnnnnnnnnnnnnnnnnnnnnnnnnnnnnnnnnnnnnnnnngggaagggcccccgagccacacaacacccacaaaggaccccggcggaaaccggccccccnnnnnnnnnnccgccccaggaacgaaccgccaacgcgccgagccaagagaacaaaaacccccgagccaccgacacaaccgggcccgaaacacgacccacaacaagagacgcccgcccgacgccgcacccagcacgaggggcccggccccacaacacccaaaacgagacgnnnnnnnnnnacccggcagacacccacccgacaaacaaagcagcaaagcaccacccacccaggagaacccccaacaagagaaacaccgggccccaccgccccggcggcgcccaaaaaaagccaaacgccccagacgcgggagggcc

SEQ ID NO: 231934 - DNA, 440 bp, Homo Sapiens
  misc_feature (177)..(293): n is a, c, g, or t
ggacttcacacggcggcttcggaccaactccctcactcccgcccgaggggcaggcctcaaagcccgccttggccccgctttcccgcccctgaaccccggccccgcgggcggcgggcggcgcttcctgcgccccgggactcaattaaacccgcccggagaccacgccgggcccagcgnnnnnnnnnnnnnnnnnnnnnnnnnnnnnnnnnnnnnnnnnnnnnnnnnnnnnnnnnnnnnnnnnnnnnnnnnnnnnnnnnnnnnnnnnnnnnnnnnnnnnnnnnnnnnnnnnnnnncctttggggggcgccctggccccttaaaaaactttttaaaacctttgtttgggccgggggccccccctaggggaaagggaacggggccaatacggtgttcccaaaggaaaacccgggcccagacaaaaggggttggaaatccccacc

SEQ ID NO: 231935 - DNA, 871 bp, Homo Sapiens
  misc_feature (248)..(248): n is a, c, g, or t
  misc_feature (250)..(251): n is a, c, g, or t
  misc_feature (259)..(259): n is a, c, g, or t
gggactgatgattttatatgtaaatcaagactcacatccctttcctagtcccccacatccaaagcccctcagcctgccttgcagaccaatgggctccatgttctgtagccccctcccctacgcctcacccctcctccctctcacaggttctgggcggccagtgagagaaacgcagtgggggaggcagggagtctggtgcctgcagagattctctgcttctttcctggggggaggtggggaggtcttancnngagcgggncctgtacccacctgctgacctgctgcttggtacagaaataaaggctgtgtggactggggggaactcgcactgtccccttccaaacaacacttccctgtgtggcccgctttccgccccccggagaaacctctcctgagacccatccccctccgcgccccgggggctccctgtacgccaatcggaacctggcgccccccgcttggttccctccgggaccaccccccgcgacctgggacccagccgcccagggagtcgtccctacaccacacaccgaaacccacgtgctgcccgatcttaccccctaactctcccctcgcaaccaaaacgcaccgcgccatggcgcacatcccaacacggcaccgcctcacaacgtgtcgtgcgcgcaccgaagccttacgaccccgacgggcggtggggacacctatcaggaaacaaaaaacggcggcaccgctgctaggccccgcaaggagagaaacaacacgaacagcgagtgatgccccactaaatggctcgcttttaatgacggaacaagccgtctgcgccccagaaccgcgagtgctcaccggaatagaatccgcaccagcgctaggtcgcacagccctttccgccgcg

SEQ ID NO: 231936 - DNA, 726 bp, Homo Sapiens
  misc_feature (97)..(267): n is a, c, g, or t
  misc_feature (271)..(271): n is a, c, g, or t
  misc_feature (273)..(287): n is a, c, g, or t
  misc_feature (334)..(384): n is a, c, g, or t
  misc_feature (420)..(482): n is a, c, g, or t
  misc_feature (590)..(598): n is a, c, g, or t
ggggggttgtggggagggggaaagcggagcactagaacatacaatctctctcccacgacaatctttttttattaaaagtctgctgttgtatactttnnnnnnnnnnnnnnnnnnnnnnnnnnnnnnnnnnnnnnnnnnnnnnnnnnnnnnnnnnnnnnnnnnnnnnnnnnnnnnnnnnnnnnnnnnnnnnnnnnnnnnnnnnnnnnnnnnnnnnnnnnnnnnnnnnnnnnnnnnnnnnnnnnnnnnnnnnnnnnnnnnnnnnnnnnngggnannnnnnnnnnnnnnnaaaaaaaactcttacaaaacactcttattctgcgcccggcccccccnnnnnnnnnnnnnnnnnnnnnnnnnnnnnnnnnnnnnnnnnnnnnnnnnnncacccgggcataaaaacacatggtttgttattttcnnnnnnnnnnnnnnnnnnnnnnnnnnnnnnnnnnnnnnnnnnnnnnnnnnnnnnnnnnnnnnncacaaagaaggaaattttagggaggcgctttattattgggggtcatcatacaaaaaggggaaggggttccgtgagaaggaacttcataaaatatataaataataccannnnnnnnnagccctgttgttgacctttttaaaaggagaaagaaacggggggtggaataaaaatcttataaaaaacactctcctccccccgccctcagaagggaaaacccctccccccaacacaaaagggggttgtg

SEQ ID NO: 231937 - DNA, 844 bp, Homo Sapiens
  misc_feature (131)..(434): n is a, c, g, or t
  misc_feature (492)..(717): n is a, c, g, or t
gggaaatgtagcttgctaataagatagaatgatacaaaagtgaagtagtagccacagtacaacactgactgctcagacacatttaggttcagggtggacctttatgtcttgtcaagatgtctaggcccgtnnnnnnnnnnnnnnnnnnnnnnnnnnnnnnnnnnnnnnnnnnnnnnnnnnnnnnnnnnnnnnnnnnnnnnnnnnnnnnnnnnnnnnnnnnnnnnnnnnnnnnnnnnnnnnnnnnnnnnnnnnnnnnnnnnnnnnnnnnnnnnnnnnnnnnnnnnnnnnnnnnnnnnnnnnnnnnnnnnnnnnnnnnnnnnnnnnnnnnnnnnnnnnnnnnnnnnnnnnnnnnnnnnnnnnnnnnnnnnnnnnnnnnnnnnnnnnnnnnnnnnnnnnnnnnnnnnnnnnnnnnnnnnnnnnnnnnnnnnnnnnnnaaatcatgtagggcccccagcggccccccgagacggttactaaaccccttccttttgnnnnnnnnnnnnnnnnnnnnnnnnnnnnnnnnnnnnnnnnnnnnnnnnnnnnnnnnnnnnnnnnnnnnnnnnnnnnnnnnnnnnnnnnnnnnnnnnnnnnnnnnnnnnnnnnnnnnnnnnnnnnnnnnnnnnnnnnnnnnnnnnnnnnnnnnnnnnnnnnnnnnnnnnnnnnnnnnnnnnnnnnnnnnnnnnnnnnnnnnnnnnnnnnnnnnnnnnnnnnnnnnnnaacacactctccacatctacatctttccctccccccaccaccctaatctcttttatctatcacccacactttacctcctaaccttcatttcacttcattcctctcttacctcaaaacacatataaaa

SEQ ID NO: 231938 - DNA, 715 bp, Homo Sapiens
  misc_feature (44)..(135): n is a, c, g, or t
  misc_feature (158)..(176): n is a, c, g, or t
  misc_feature (230)..(278): n is a, c, g, or t
  misc_feature (371)..(384): n is a, c, g, or t
  misc_feature (487)..(655): n is a, c, g, or t
ggctgcagaatgcgtccagaaataaattctgtgtctgtgtgtgnnnnnnnnnnnnnnnnnnnnnnnnnnnnnnnnnnnnnnnnnnnnnnnnnnnnnnnnnnnnnnnnnnnnnnnnnnnnnnnnnnnnnnnnnnnnccataatattacgaacataaacnnnnnnnnnnnnnnnnnnntgaacaaacctagaacctaaaaaaccccgataatgactactgttagaatcctannnnnnnnnnnnnnnnnnnnnnnnnnnnnnnnnnnnnnnnnnnnnnnnngggccttactaaagcaattactgaaacaatcaacaaggagtcaaagggaacctaataaacaaaatcacgcccccgcctagaccactaataacnnnnnnnnnnnnnngataaattaagccatccatccaaaaatgaaaagaatacccacaaggagcaccataaaaccataaattagtacaactaaaccccccatttttgtcacaatgcgnnnnnnnnnnnnnnnnnnnnnnnnnnnnnnnnnnnnnnnnnnnnnnnnnnnnnnnnnnnnnnnnnnnnnnnnnnnnnnnnnnnnnnnnnnnnnnnnnnnnnnnnnnnnnnnnnnnnnnnnnnnnnnnnnnnnnnnnnnnnnnnnnnnnnnnnnnnnnnnnnnnnnnnnngcgacaagcattaaccaccaaataacacccaataaaaccaacaaacaaaaaaacaagcac

SEQ ID NO: 231939 - DNA, 435 bp, Homo Sapiens
  misc_feature (46)..(207): n is a, c, g, or t
  misc_feature (214)..(385): n is a, c, g, or t
ggtgtccctacccactctttgctacaataaatgctgaatgaatccnnnnnnnnnnnnnnnnnnnnnnnnnnnnnnnnnnnnnnnnnnnnnnnnnnnnnnnnnnnnnnnnnnnnnnnnnnnnnnnnnnnnnnnnnnnnnnnnnnnnnnnnnnnnnnnnnnnnnnnnnnnnnnnnnnnnnnnnnnnnnnnnnnnnnnnnnnnnnnnnnntttgggnnnnnnnnnnnnnnnnnnnnnnnnnnnnnnnnnnnnnnnnnnnnnnnnnnnnnnnnnnnnnnnnnnnnnnnnnnnnnnnnnnnnnnnnnnnnnnnnnnnnnnnnnnnnnnnnnnnnnnnnnnnnnnnnnnnnnnnnnnnnnnnnnnnnnnnnnnnnnnnnnnnnnnnnnnnngggattttgggggctttttggggattttaaaagggggtcccaggaaattc

SEQ ID NO: 231940 - DNA, 626 bp, Homo Sapiens
  misc_feature (283)..(326): n is a, c, g, or t
  misc_feature (385)..(443): n is a, c, g, or t
  misc_feature (530)..(530): n is a, c, g, or t
  misc_feature (584)..(584): n is a, c, g, or t
tataatcacacactcctcacccctccctccccaccccttatcaacatccccatcctcaccaaacttctcctctcctccctatattcccccataaagatccccatcactcctccaacactccttacctcctttttatctcactcctcccatttccctccccacataatcttccactagtcatcctcttatcccccctcttaatcacactccgcctactcttccgtcacctcatccccctcactcacctcgctcgccacaccccaccctctctcatccttgacannnnnnnnnnnnnnnnnnnnnnnnnnnnnnnnnnnnnnnnnnnnacttatttaccactctccataccacccactagagttcccactccctcctctccttatgnnnnnnnnnnnnnnnnnnnnnnnnnnnnnnnnnnnnnnnnnnnnnnnnnnnnnnnnnnntttacattccaccattactactcccctatctctttaccccaccatttatgcctccacataaatctccaccccgtatatatcccattnctattcccctattatatacccccactcatctcatgttcttccggcgaacgtatntctatagcgtctaatgatctggagcatgccttgagtgcgccg

SEQ ID NO: 231941 - DNA, 833 bp, Homo Sapiens; identical to SEQ ID NO: 33176

SEQ ID NO: 231942 - DNA, 902 bp, Homo Sapiens; identical to SEQ ID NO: 94618

SEQ ID NO: 231943 - DNA, 936 bp, Homo Sapiens
ggggctggtgcagagcctgagcttccgctggttcgtgcaggactacacgggcggcgggctgggcgccgtggaggggctcaccagccggggcccccccatgatgggggccggctacgtccacggcgcggcccgcggtggcccaggcgtgagggtctcccacacgccgggggcgcatcgcctgtgtcgcctctccgtgtggatctggcagtcggtcatccacctgctgcagatgcggcacgtgtggagctctaactgaaccacatgacgcctcagccctgaaatgacggtgttctgaggtcttctgatttctgactataaggaccgccattcttcctctcgtcacggcctcgtacacactgccgggtcccttcctatgcaccattttgtataccaccttcgaactccccgcaatcacgttcctgcacccgctctcctactaactgcctttggctgcatcgctacccataccatctacccgcgcctcatttgtccccccttgctgtcccccttcccttcaccccgttcgccaccctagcgcctaataaccgccaccaccctactcacttcctttccacacactcaacctataatcggcctggacacgcttatgagactctcccacatactttcacgccgagtgtcacacactcttctgtatccccaaaaatctcaacacgcagaatatccctcacacatatattttgagctatatctctctattcaccaaaacctacgcgggccaggttgtttcgctacccacaaacaccctgcattaccacacccttttagcacgcagtatgtcacaattgtcgcaccctcacacatctgcacactatgctcgattaccccctttgtctttaagattattccgtccctcacatgcgagattcctatgatcaccacgcgtgctgcgacgcatcctacacaccacgcgtg

SEQ ID NO: 231944 - DNA, 1098 bp, Homo Sapiens
  misc_feature (78)..(188): n is a, c, g, or t
  misc_feature (193)..(193): n is a, c, g, or t
  misc_feature (600)..(608): n is a, c, g, or t
  misc_feature (699)..(699): n is a, c, g, or t
  misc_feature (729)..(729): n is a, c, g, or t
gggggccaggtgccagggacactctccttcagggaaaatgttatgtggaggaggacgaataaatttattttgttttcnnnnnnnnnnnnnnnnnnnnnnnnnnnnnnnnnnnnnnnnnnnnnnnnnnnnnnnnnnnnnnnnnnnnnnnnnnnnnnnnnnnnnnnnnnnnnnnnnnnnnnnnnnnnnnnccaancgccacacgaaccaagaaaaaaaaccgaaccccggcacccccacgatagcataggaaaacacgtccggcggcaggcgcttgggattgctcgcagtacaaacaccacttcggggtgttcgccaccgctctttatttagtccagaaccccccgcccggaatgcccatcaacgggaaagaattcggcctccaaaaaaaacagccggtttgccattaaaaattgaagggcaccacccccggccgcgaaaaatgaagtggcgtgggaaatccccaattttagactcaccccgtcgaccatgtgattgtctccccccctccgctataggtctaacaacccagcctgggagaaacgagcgctggcccccgcctagccctgcgacccccccagaacattctatagaccaatgggnnnnnnnnngagtgtcccctaacaaagcgtggagatttctatcatgaccccttgggctaggtatacccacaaacccgaggtgcgaatgttcaaactcctntcaaacaccacgtcgagcgtcagcatccanaacaatacataatatgtagcccgcccacacggagagatatacaggtgcggcacggggaggaaacaaccactacgcacacatctggatacaaaacaagcaattctcatcattagtcgctgcgcggctactagtataccacgcgccacctgatgtgggggtgtgatgaccacctaacgggtgtaagtttgtattgtctgcctagaacagagacacacttaatgtcttggtctgatacaacaactcgccgtcgtgtgatagatgcgacacactgtgagagcacgtactgcatgttgtcgagtgccagaggacaccaaccgtctccagtatgtatcatacatatatagacgatgcagtctaattccaaccgcg

SEQ ID NO: 231945 - DNA, 1002 bp, Homo Sapiens
  misc_feature (959)..(959): n is a, c, g, or t
ggggcccggcggccgcgctgtggggccgcccggcgctcgccacttccggcgcgttggggctgttggtcgggggcggccgcgcggtactagcgggcggctccagggcgggcgcgcgcaaggatgctctagggggcggcggcagtggccgtgtggattaaggctgagaagaccgcgcgggcgcccgggcctctccactgaacagggcgccactatcatccagacgctgaggacaccatgggtgtggcgaacgagcccatcgcgcccacgaaatgccggaggatgaggagaaggggaatcagctggtaacgtgagcccccgaggcggaactgcggatccaccaaaggccgggacccaagtcgtgcggctcggctacctgccgcgtagaggggcacctaccgacacccagcgtcaggagcgcacgcggtaacacggcgaccttgagcttccgggcgccatcgcggcccctattcctttccggcaaggagtgagtgagagcgatgttcgcccagagcagcttgttgcgatgagtatcaccatgaatacacgaaggggaacggggtgtaacatccatgcggctgcgtgccagagaggtcactggcgccttatagaatgtggcgaggacgaggaccaggcggaccgtgacgcgaggggattggcgaggcgaacccactcgaaatagcagcgcgacccgcgctgacgagccagagacctgatgacctggcgcgcctaccgacaccgcgtcgagcatgatgattctgaccggctcccgagcacacgctacctccgcgctagacgccacgtaaatacacgcgcgcgtacacgaaaagtaatgtgacagaacgcgcgtgcgagctgaacgtactaccacgtgaggacgaaaagtgcaactctgtgcgcagagagcggcgataggatagagggcgagagcgcgaaggcgatggaactaggtgtgatcgatngcgcgacgcttgctctaaactgcgaccgtggagcgctgccggg

SEQ ID NO: 231946 - DNA, 641 bp, Homo Sapiens
  misc_feature (140)..(259): n is a, c, g, or t
  misc_feature (391)..(399): n is a, c, g, or t
  misc_feature (500)..(509): n is a, c, g, or t
gggacgtaggaagagtcccggggccctatgaaatcttcggggttccaggaaagactcgtttactctcgccgttggagagcggccccccaagatgccacaatcctaggattttgctattgcttataaactgtaaagactgnnnnnnnnnnnnnnnnnnnnnnnnnnnnnnnnnnnnnnnnnnnnnnnnnnnnnnnnnnnnnnnnnnnnnnnnnnnnnnnnnnnnnnnnnnnnnnnnnnnnnnnnnnnnnnnnnnnnnnnnttgtgggcccccccggcccccaaaaaattttttaaaccattctttgggggcggggccccaaaaggaaaaggaaaaggggcatatctgtttccaaggaaacccgggccaggacaaggggtgggattccccccnnnnnnnnncccccggggggaaccgagggttttaaaaaaatccaaaggggattcggggggcttttggggatttttcaccggggggccgcgggagctcctaatcaatttannnnnnnnnngggccctttttggaagaaggggggaaaatttttttaaaatttttgcgcccacaggggagcccctcctaaaagggggtgggagggaacccggaaatcccccggggggctttccacccccctgtgggcgccctt

SEQ ID NO: 231947 - DNA, 1221 bp, Homo Sapiens
  misc_feature (60)..(175): n is a, c, g, or t
  misc_feature (1089)..(1089): n is a, c, g, or t
  misc_feature (1111)..(1111): n is a, c, g, or t
gggccaactaagcctcccaaatagctgggactggaggtatgcgccaccacacctagctannnnnnnnnnnnnnnnnnnnnnnnnnnnnnnnnnnnnnnnnnnnnnnnnnnnnnnnnnnnnnnnnnnnnnnnnnnnnnnnnnnnnnnnnnnnnnnnnnnnnnnnnnnnnnnnnnnnaagagcggagcgcgctgcgagtgagcgacggagacaatgagcgccgcgcgtactcgtgcactgtgaggtacctactgcaagatggtactaggcacgtccgagcgagaaagggaacgcacagccgaggcagagcagtggaacaaaagagtggaacagggcaggtacaaagagcgaggacgagataagcagtcgcgaggagaggagcgcacggcgaaatgggtgggaccggggcgacccaagagagaagcgacgcggacgcaccggagcatggccgcaccagcgcggcgcaagacaagctcgagggcgccgtgctggcacgcgttgcaagaggatctatcctcggcggagtgaaacacagaaaggcgtgcgcgggaggcggagcacaacgaagacccgtcggcgccgcgcagaaatcggaaaagttaccgcccgccggaagagcgggggcggaacccggcggagcgcgggccagggggacacgagaagcgagaggaagagcgatgctccgcggcgacttgtcagaccacacggggaggttggactcagacgacacacgaggacctcaccgcgcgaactgtcattcatgtaggcgtagcgcgcgcgcgcgtgacgaacggagcgagccgagggcgtcgaacgtggcgagggcacacagctccgccgacgtcacataatcatgatccatatccacgcgcatgccagggagcgctaagacagtacacgcgagccgcacaatgagcgcgcagacgctcgcgctgaagaggcgaataaatacattcccaacgataagcctgcgcaatgtcgcagacactgtaataaactgccggccagcacgcgcgacgcgtgacgattcccgttgtcgcgtcgagactgagcggcagatgaaggagacacgacaggcgtcatacgtgagnagtgcccacgaggaggtgcctnagcggagcgcagagggcccagcgaacgagaatgtatccgatgaataacgatgcgaccggaatcgcagagtcggcgcgctgctgaaacgactcgatgagcagacgcgcgcg

SEQ ID NO: 231948 - DNA, 336 bp, Homo Sapiens
  misc_feature (115)..(271): n is a, c, g, or t
  misc_feature (279)..(293): n is a, c, g, or t
gggcagatacctggaaccacctaaagaacttccatttatggaggatttttttgccccttgtgtttggaattataaaatataggtaaaagtacgtaattaaataatgtttttggtnnnnnnnnnnnnnnnnnnnnnnnnnnnnnnnnnnnnnnnnnnnnnnnnnnnnnnnnnnnnnnnnnnnnnnnnnnnnnnnnnnnnnnnnnnnnnnnnnnnnnnnnnnnnnnnnnnnnnnnnnnnnnnnnnnnnnnnnnnnnnnnnnnnnnnnnnnnnnttgtgggnnnnnnnnnnnnnnnaaaaattttttaaaaacttttttgggggggcgggcccccaagg

SEQ ID NO: 231949 - DNA, 460 bp, Homo Sapiens
  misc_feature (54)..(73): n is a, c, g, or t
  misc_feature (96)..(332): n is a, c, g, or t
gggtgggttgtcttttcattttcttgataatatcctttaatgcacaaacattcnnnnnnnnnnnnnnnnnnnngagacggagtcttgctctgtcgnnnnnnnnnnnnnnnnnnnnnnnnnnnnnnnnnnnnnnnnnnnnnnnnnnnnnnnnnnnnnnnnnnnnnnnnnnnnnnnnnnnnnnnnnnnnnnnnnnnnnnnnnnnnnnnnnnnnnnnnnnnnnnnnnnnnnnnnnnnnnnnnnnnnnnnnnnnnnnnnnnnnnnnnnnnnnnnnnnnnnnnnnnnnnnnnnnnnnnnnnnnnnnnnnnnnnnnnnnnnnnnnnnnnnnnnnnnnnatgagccaccgcgcctggcctacacaaaaattcttaattttgagaaagtccagttcatcctgtttttttctttcattgcttatgcttttggtgtcatatgaaataaattattgcaaaatgccaaataa

SEQ ID NO: 231950 - DNA, 463 bp, Homo Sapiens
  misc_feature (47)..(203): n is a, c, g, or t
  misc_feature (258)..(376): n is a, c, g, or t
  misc_feature (396)..(416): n is a, c, g, or t
gggccagtggtatcaaccagagtgcccatacggccggggggggatgnnnnnnnnnnnnnnnnnnnnnnnnnnnnnnnnnnnnnnnnnnnnnnnnnnnnnnnnnnnnnnnnnnnnnnnnnnnnnnnnnnnnnnnnnnnnnnnnnnnnnnnnnnnnnnnnnnnnnnnnnnnnnnnnnnnnnnnnnnnnnnnnnnnnnnnnnnnnntttaaaaaccatagcaaaggcccccccaacacaaaagaacaacacaaaagccttnnnnnnnnnnnnnnnnnnnnnnnnnnnnnnnnnnnnnnnnnnnnnnnnnnnnnnnnnnnnnnnnnnnnnnnnnnnnnnnnnnnnnnnnnnnnnnnnnnnnnnnnnnnnnnnnnnnnnnntgcttccggggatttaaagnnnnnnnnnnnnnnnnnnnnntccacaaattccccctggaaaactaagaccgagacccgccagagggg

SEQ ID NO: 231951 - DNA, 294 bp, Homo Sapiens
  misc_feature (150)..(172): n is a, c, g, or t
aaaaattttgcgggcccccctcgcccctccaaaaatttttttaaaaccttttcttttgggcccccggggccccatagggaaaaggaaaagtgggccaaaacttttttcccaagaaaaactccgggcaaaagacaaagggctttgggattnnnnnnnnnnnnnnnnnnnnnnngggggggaaacccgaggggtttttgaaaaaacccccaaaggtggggttttcaggaggctttttcgggggatcttctccacccggggggcccccaccccgcaccctccaaatttcaaatttta

SEQ ID NO: 231952 - DNA, 937 bp, Homo Sapiens
  misc_feature (55)..(71): n is a, c, g, or t
  misc_feature (452)..(462): n is a, c, g, or t
  misc_feature (529)..(529): n is a, c, g, or t
  misc_feature (791)..(791): n is a, c, g, or t
ggcacttcaaaacaggctcagccgactgggagatcctttgtactttgcacagttnnnnnnnnnnnnnnnnncctatcccaagtgtttttgttagacacaaatgtcagcgtgtgattttggaagacttgtcagtgatgacaaaccatgatgcctgtgtttctgagtctttaaataaaaatgaacatggcaagcaagaaatcacataatggcaacatggagactggaaattttttaatcccatggaatgggtttgataccggatataacatgtgctgaataagagaggtcctgctacatcgaacaaggacaatccctctcacccaaccttgttgtgtgaaggtaacagccgcccccgcgcgcaaaaatgtccaacatggccccattggaactcttggtggggccccctaccggtgcccccaagaaaatatttctacaaaaaccatttggttgcnnnnnnnnnnnccccccattgacgaactccaacaacgccggacctacactggtatccctaccaaaaaagccccggcancaatgcaccccagggcgtggtaactcctcccacccaaacaaaaaagaaacccctcgcgtgacaacgcacctacgtggttctttctaaacagacacttcctcattaggggcgatggtttcaagcggactaatccaaccaaaaattcctatcgagcaaatgggcgtcctattgcagccgagactaattatagaaaataaataagagcccctgccctctgggtggtggcattatcatggaaaagaaacgtgccgccaccacttgnctattaacaaagcccaccgccgcccacccatcttccaagaaccattttcacaaagtacgcgggaacccactaaaaccaatagcaaactccccgccagcgcggcgacaacatcccaccctttccttccctcgcgttcactcgcggag

SEQ ID NO: 231953 - DNA, 430 bp, Homo Sapiens
  misc_feature (69)..(253): n is a, c, g, or t
gtgtgagccaccgcgcctggctggttccatgatgtaattttcaataaacatcattaacttgacccctgnnnnnnnnnnnnnnnnnnnnnnnnnnnnnnnnnnnnnnnnnnnnnnnnnnnnnnnnnnnnnnnnnnnnnnnnnnnnnnnnnnnnnnnnnnnnnnnnnnnnnnnnnnnnnnnnnnnnnnnnnnnnnnnnnnnnnnnnnnnnnnnnnnnnnnnnnnnnnnnnnnnnnnnnnnnnnnnnnnnnnnnnnggcgccaggacagccgcacgccaggaagagcaagccgccaagaacagacaatggggcccccccggcgcccccgcaaaattttgcgacgatcaccttctgggggcgggccccccccggctgaaatggtaccgccaccccggttcccacaagacatgtatgatagatcgcgtgttcctc

SEQ ID NO: 231954 - DNA, 1025 bp, Homo Sapiens
  misc_feature (573)..(581): n is a, c, g, or t
  misc_feature (977)..(985): n is a, c, g, or t
gggttcctaagggcgcctgcggcccggcaattaccccctgggtcctctcacacttagcagtgggtgtcagatggtggaagggaacgctcagggaggccccgggcggtgagttgtccctcgggcggggacgccctcgtgggcagtgcggcgtggacggcgcaaggaataacccggagagatcccaagccacgagggaccgcttccggcgcattgtgaggtcccacctttcccgccgcctgaggtcgcggcggctgctctttcccggagcaccgtccctggaggccctgccagggggggaggcacccacgcgtgcaccgcatgtaccccccagcgcggcgcttagaacgactcgcatggagtcgctgccttgggttggaaccggggtactccggccgcttcggactgggactggcgaagtaacaagtaccttcccccgggggcagcggtgggccgacccccggggtggctacggacgcagagggtgccttaagcccttagaagcccgagcgaaaaaaccttggtccccccagggaacctccccctttgtcccgctcgcccagagcctggcggtgnnnnnnnnnaggaatgggggaggccgttgtccgcggggcctgggggttgtagagaccccacgccacccggctgattttccccttgcgaagtgcccctgggcacctccaagggccggcgctgggacaaacgattccttgggctgcggacgcggaaattcaagagtggtggccaggagcgattaaggggaagtgggccgcaaccacctctcccccccgaaacttccctcgggaacacccggggcttggaactttccaccctcttggaacgacaatggaccgcgcgcccgggaaacctccgccggacctaaaccttgaccctgtgctgataaggagccaccccattgggcccggccaccggttgggccatttttgaggacagggggtgggcccggggggcataaagtnnnnnnnnnggaagtggggcgtccccgcccgctaagtctatcatccggg

SEQ ID NO: 231955 - DNA, 1137 bp, Homo Sapiens
  misc_feature (674)..(674): n is a, c, g, or t
ggccttttcaatggcgaaactgtcggcattagcagttttgggtaagctggcggtactataacacgtactggaaacctgttcctcatcaccacctaccagattctggaaatgccgtcttctagaaaacgatggcgtttgtggtggtcttcttttgaaaggaacagtaatttgtgtggatattggctaaagtggttaaagaatattttgacaattaagtttacattttacaattgctttattttttattaaaatagttgtatataaatattaccctatttcactgttgctcaagtaaatcctaaaccttgtagaccacggagtcatctgatatgtatacaacctgggatatatagagcaccatttatgtgcggtaaactcgggcatgaatataattgttcctgtggccttacaaggtgggggatattttgggggttttaccgcgcaccaacatttatcggcccttaaactgggtcgttcatggacacaaaaaatccacccccaaacatagctgaaagggatcttaaaacataatcgtactaattgaactcccatggtctaaaatcggtaacacaacacttggttcggcgaagccgccagttggaggagttccccaagctcaaacattttctccccccctgtgttgcgctgccgcgcaggcggcccgtgatgccccncgtagcagatcagcgcttacctttgggccccccacccctgggcacaaggacagagcagcgcagcgcgagcgccagaggaagagccgggtcccgtactgaacaggtcccccccgactgtgcgccggagatctactgccgcgccacttcgcccgtcggcgccgcttgtcgctggctcccgcgttattcgcacccactacctccccgccccagcctatttccctgcccgcgcatttgtgcgcggcgtctcggcctcgtgagtttacgcgtggtgcgcggcgcccggtgccccccccgcccagggtgtcgccggcgccacgccgcggccgcgtactccgcccccacggccgctgacgcgacgacgaccctcgctcgcgcctgcctgtactcgcctgggtgttcacgccgcggaggtgggacgctcgacccctactagcacatccgccaacctcaccctcgtgaccct

SEQ ID NO: 231956 - DNA, 1016 bp, Homo Sapiens
  misc_feature (530)..(530): n is a, c, g, or t
  misc_feature (610)..(610): n is a, c, g, or t
aacaacaaaaacagcagaccattcaaaatagggagactttgcataatccagatttctgccttcacttaaaactttggacggcctggagagagtcggccagttttcggtggggggtggggagctggaacaggacagtagcctttcctactgaggcatttgttctcccatctgccccagtcgctgccatccctggctgtctcaccctagcaccttctccagcctgctggctttagaccactgcatcaaccccagctggaactgaagcctgcggtggaccatggaagccctggttgggacccccagggaagtcaaacggctggcgggccccaagagggccagaaggtcgccttgcagcctggggcgggggcacgggtgggatcctaagggggggcatggaatttggccggccttcccccaaccctctaaagtttgggtcccccttcttggtcggacaaaaaggggcagcacgcaagcggacggcagggcaaacaatcccgtctaataataggcacctttctcccaagatctcnctaaattgcgccggggcgcggggctttcggacgggtcctctggccagacagtctctccctaaggccaaacttcctcgggngggcacggagcccgcgcaatggccaaaggggtggcggagattcactcccttggaaggggtccacgggaacgtctttcccacggaaactaccaccgccctggtactcccaagaacagttcaggtggggagagggcccccccttgttcgctcgctacgttcacaaggacatccgccacaaagctttaccgctctgggggggcggaatggagggggcgcgcctgtgtcgcctccctggtaaaactcacccccaaatacatacactttgtgggcaaaggctccttataggccaacgcgcaaaacatctccccctcagcgaaacccccgtggcagaggaggcgccaaggcttagctcaattggaggcccctgccgacgagacgaactcaatctggtggaccacccgaggcc

SEQ ID NO: 231957 - DNA, 931 bp, Homo Sapiens
  misc_feature (359)..(377): n is a, c, g, or t
  misc_feature (449)..(506): n is a, c, g, or t
  misc_feature (519)..(597): n is a, c, g, or t
gggctcatgccctgtctaaacaaactgggaaaactcattttcttcagaagttatttcaagaaaggctcagcgactctgtttctcatctttccaatttgcaggataatttttggttttgaattttgatttttcatagatgtatattattttgaagtatcaaataaaaataatttattttactattactgattattgcagtagtatcacctagcagaggggacactagttgaaaactagagagctgctgtcctctgtattctgcaggagcttttcctgctggtgccactgggttccagtagactcatcactgcagcctcagcagggcaggccagggatctggacaatggggactgtttagnnnnnnnnnnnnnnnnnnngccagccagaacttttaaaaaagtaaacatccatgtagaatgattaaatggaaagttgcttcttaaaaaaannnnnnnnnnnnnnnnnnnnnnnnnnnnnnnnnnnnnnnnnnnnnnnnnnnnnnnnnngccggtttcgagnnnnnnnnnnnnnnnnnnnnnnnnnnnnnnnnnnnnnnnnnnnnnnnnnnnnnnnnnnnnnnnnnnnnnnnnnnnnnnngcgcggcccggccccccacaaaggaaaagggaaaccgggggcaataagtgcgtttccccaaggaaaaccccggcgacatgcacaaggtgccttgggaatctccccccaacacaaaaaaaccgccccgcggcggcccacccgaaagcggttcctggaaaccaaattcccagaagggggagtttttgtgaggggtcgctttactgggagatcttttccacacaggggaggcccacaaggcggagagccccacaataaacaaaattattaggccccgcccccccgcggccaccattacatttgagaagagaagggggtggggaaaactcccactaca

SEQ ID NO: 231958 - DNA, 884 bp, Homo Sapiens; identical to SEQ ID NO: 33180

SEQ ID NO: 231959 - DNA, 1051 bp, Homo Sapiens
  misc_feature (481)..(489): n is a, c, g, or t
ggggtggagggcccgggcgctcgggcctcaccagcccgagccaacttgcgctagagtcgggcccgccccctaaggggttaatccttttctcatgttaccgagcggcttataaggagggggaggccaagcctccgccttattgggagcctttgggggtttattctcttcccttctaacttgattaagaatgacccaaaataaattaaagctttgttccaaagccaatgtgtatactgaagtgcctgatggaggatggggctgggcggtagctgtttcatttttcttcgttgaagtcttcacctacggcatcatcaagacatttggtgtcttctttaatgacttaatggacagttttaatgaatccaatatcaggatctcatggataatctcaatctgggtgtttgtcttaacattttcagctcccctcgcccccggcctggagcaaatccttttcggaccccgtccgcgtagttgaatgttnnnnnnnnnctacttggtcagaaccggggatgggggggcccgccctcccttcctcccgaagaagggtttcctccttatggcaacgttccggcccatccggggccatcaatccccctcggggacctggaggaataactgtggcttttaacagtctcttccctcccccacaacgttggcttaatacccaatccccctaatgtccacaaactaatatttctctgcgcgcgaaaacaaggacaggggttttccccattaagctcccaccccggtccagaattcgtgccttttcccccccaagaggagaaacatggcggtcttccgcctggggcggtcttgggcctttttcacgcacaccccagcccgatatctatgtgggattttcttaaagcggagacaggcgcattgtggggcttggaaagaaattaacagagcacctccgcttcattatcggagtgagggcgctcaaacctaacaagggtttacaggcaatctgtgcccccttctctcccgccaccgtccatctgcccctccgacacacctccttctcttttgttcccgagaagggggcccg

SEQ ID NO: 231960 - DNA, 739 bp, Homo Sapiens
  misc_feature (66)..(182): n is a, c, g, or t
gctctccagcgatcatcccacctcagcctcttggatagctgggaccacaggcacgagctaccatgnnnnnnnnnnnnnnnnnnnnnnnnnnnnnnnnnnnnnnnnnnnnnnnnnnnnnnnnnnnnnnnnnnnnnnnnnnnnnnnnnnnnnnnnnnnnnnnnnnnnnnnnnnnnnnnnnnnnnatgagtcactgcacccagcccgcagcctcttttataagggcattaatccccttcatgagggatattctctcatgacttaatcacctgccaaagaccccacctcttaatactacatcagtgatgggttcaatgtatcaattgggtgggagggggcacattccgaacatagcatcctagtcttctgggttttattaagatttattaagacctggaggcatgaaacactaacactactggaatgggaacttcacccatcggatgaagttgccctttaggaaatacctggttcattaaaaaagccccttaaactatggcgcggacaaaacctcgccgcggagagggattacccttcccttgtttgggccgggccctcgggccccctgaagaaaacgctttctcttagaaaccactttccttttgggcgccccacgggccccccccttaacgctcaagtgtgcaacattgggccctataagcttgtggttcccctcaggagagaccccccggggccatagggacacaaaggggcttttggggactttctctcaccccacacc

SEQ ID NO: 231961 - DNA, 980 bp, Homo Sapiens; identical to SEQ ID NO: 33184

SEQ ID NO: 231962 - DNA, 477 bp, Homo Sapiens
  misc_feature (84)..(345): n is a, c, g, or t
  misc_feature (373)..(383): n is a, c, g, or t
ggggtttttttaaaattatcccaggtcaagcatgagtatctctaatctcgacctaagagccagttaaaatgaaggagaaagtgnnnnnnnnnnnnnnnnnnnnnnnnnnnnnnnnnnnnnnnnnnnnnnnnnnnnnnnnnnnnnnnnnnnnnnnnnnnnnnnnnnnnnnnnnnnnnnnnnnnnnnnnnnnnnnnnnnnnnnnnnnnnnnnnnnnnnnnnnnnnnnnnnnnnnnnnnnnnnnnnnnnnnnnnnnnnnnnnnnnnnnnnnnnnnnnnnnnnnnnnnnnnnnnnnnnnnnnnnnnnnnnnnnnnnnnnnnnnnnnnnnnnnnnnnnnnnnnnnnnnnntaagaagagcgaaactccttctcaaggnnnnnnnnnnnggagaaagtacagttttgttggtttattctcattataaaagatacgtggtatgcatttgttctggaaaatatggaggaaatagaatagtgtggt

SEQ ID NO: 231963 - DNA, 998 bp, Homo Sapiens
  misc_feature (102)..(158): n is a, c, g, or t
  misc_feature (189)..(189): n is a, c, g, or t
  misc_feature (195)..(195): n is a, c, g, or t
ggggatgcagcgaggaggcggcggcggcggcgcgctccggaggtctgaagccactgctggctgccacgggccggcggtgcgatgagctgggcagccgccccnnnnnnnnnnnnnnnnnnnnnnnnnnnnnnnnnnnnnnnnnnnnnnnnnnnnnnnnncgacgctcctcttcggcggcggcggaataanaaccanaaaagccacccccactgataagagatggccatattaccccttttcagccccatgtatctccgcaccccatggagccgccctaagcaaatatgaattggtttcccgcctgaggccgtcacaccctctggcagatggcctaacctgtctcacctgcacgtaaacgccctgggtctaattcacaatgctccttttctcctcactcccatccaagtgcccctccccagaggccgcccacccggatcaccacgcgggggggactccagaacccctaccctcttctcgcagcccgcgattaacactcccctgtctcctgctgccccggttcgatttttctccccgccctccccacattactccatcgctagggcgctgcgttcttcctcctttcgcacgtccaggctgtcagccacaccccgcccctcagaaacattttccctcgcgcccccgtcccgtctctctgtgcccccctctcatagcataacccttctcgcctagagaacgccgtcgctccctgcggggcgcaggcggccgcccgcctctcaccggactaaagccggataataggagacccctcaaactccgtggcttgcccgaagaagaacgaaacccgcggcgatatccgcaccaaaaggcggcctggggccttctccccccgccgataacaaaaataggccccccgaccccgggacgtccagcgagtcagttcgtgtccgcccaacccgcggtagacgcggcaaactctggtgcggccgcgatttacgctggagggtcccggttcccccgcgcgggactcctccacccac

SEQ ID NO: 231964 - DNA, 904 bp, Homo Sapiens
  misc_feature (94)..(104): n is a, c, g, or t
  misc_feature (130)..(132): n is a, c, g, or t
  misc_feature (135)..(136): n is a, c, g, or t
  misc_feature (138)..(138): n is a, c, g, or t
  misc_feature (140)..(141): n is a, c, g, or t
  misc_feature (143)..(143): n is a, c, g, or t
  misc_feature (145)..(148): n is a, c, g, or t
  misc_feature (151)..(151): n is a, c, g, or t
  misc_feature (153)..(153): n is a, c, g, or t
  misc_feature (155)..(156): n is a, c, g, or t
  misc_feature (160)..(160): n is a, c, g, or t
  misc_feature (165)..(165): n is a, c, g, or t
  misc_feature (172)..(172): n is a, c, g, or t
  misc_feature (181)..(181): n is a, c, g, or t
  misc_feature (190)..(317): n is a, c, g, or t
  misc_feature (883)..(883): n is a, c, g, or t
ggcgcacagccatgctcatacatttacatattatttacatattgtctgtggctgtagagttaaccaacagagaccatctgctccacagtgccannnnnnnnnnnaaagggagtcttgctgtgttgcccannntgnnangnnangnnnngancncnnctcnctacnacccccncctccggcncttcaccannnnnnnnnnnnnnnnnnnnnnnnnnnnnnnnnnnnnnnnnnnnnnnnnnnnnnnnnnnnnnnnnnnnnnnnnnnnnnnnnnnnnnnnnnnnnnnnnnnnnnnnnnnnnnnnnnnnnnnnnnnnnnnnttattacccacccactgaccggcactctacgtgccgggcatagcgcgcgcgagcccccgcaccccacaaggtgataattagtgtcagcccgctactatcttttaaccgcactctccacaaccctaattagatgggtcgcccaaccgttttccgtcccaatcacctaacgagcccgacgggagaacgaactagactaaccgacattcccaccccctcccaagttctgggcgggacaaaacctcacacctatcccctgggaaacccccctcatccccaaataaacacctgccacacttcccctaatacgcgatccctcgccaccagcactcaccttttctacaccccaccatttacgccccgccaccgcaccataacccctgattcctctccgtacttcttgtcccgtaaaccctcatctttattaccataattgaagcaagaattgtccataccccggcaccttacagcaattgtgtgccagtctagcgatccggaccgccccaacgaaaatggtttttgcccgaacacactctctcccctgttataaatatgatgccacacatttncacgccaatataagggacatg

SEQ ID NO: 231965 - DNA, 963 bp, Homo Sapiens
  misc_feature (583)..(629): n is a, c, g, or t
gcttcgtggtgagtctctgatcctgaccccaatctttcctttgttctttgtgtttctacacctggaagtgtcaatatctgcagcaagtcccacttcttgtgccccctgccctctctcccctagaaagaaagatggataagacccaggagaaagatctctggctataactagtgtgggaagggacagggagcctcagccctgggaagctggacaaggcagatctgtgtggagtggtggtggctgcagctgctgtctgcgtggagtcttacagttggcagcagcctgtggccagcaatggctaaggagaaaggctggggttgcaggcagggggtgcttgcgcccaagccttcccacatgctctaccttgggagggtactcacgaggtgtctctgaatacccttcctgattccttccttccaagcacgaaaacaaaccaagggggagcttattctgattatttcactcaggcagtcctggcttacttgacggcttgtttcctaaaatcacccacctccgctccatttcattcttggtattccaaccatggggttaaataacagtaagctattttggttctagcacnnnnnnnnnnnnnnnnnnnnnnnnnnnnnnnnnnnnnnnnnnnnnnntccgtttcctccccccaagatctctacaggaccccccataactcccaaatattccaacttcccccccctatgtattccaccgcaatcccctatatccccttcgtacccctcgccccacgtcactgtcaactctcccaccatatccacccgccactgatcactccgtcgcctcattaataccgactgcccccctccacacgctcaccatcactcaccatctaatacttatacccccctcccgccacagacttgcgaccacccccatctctcctccctcccaccctctttttcctactatccgccgctgtgacgcgctctaggcattagcgctcag

SEQ ID NO: 231966 - DNA, 813 bp, Homo Sapiens
  misc_feature (210)..(347): n is a, c, g, or t
  misc_feature (457)..(762): n is a, c, g, or t
gggccaggtttgaatccagacaggattcacatggtctcctgactccaaagacagtgctgttgggactgtctggggctcctcatctgtccaacccaggaactgcttaccatgccaatcaggaagagggaagccagggaggagttggggaggacggcaaaggcctggacatccacggcagggtagaaggtgataacacagcctgcatcgcgnnnnnnnnnnnnnnnnnnnnnnnnnnnnnnnnnnnnnnnnnnnnnnnnnnnnnnnnnnnnnnnnnnnnnnnnnnnnnnnnnnnnnnnnnnnnnnnnnnnnnnnnnnnnnnnnnnnnnnnnnnnnnnnnnnnnnnnnnnaaatgggatgcccggaagaagccttgcatctggatatcagccacagacacggagatactcaaagaagcattgtgcacctggagagaaaccagatcgccattaacaatcgnnnnnnnnnnnnnnnnnnnnnnnnnnnnnnnnnnnnnnnnnnnnnnnnnnnnnnnnnnnnnnnnnnnnnnnnnnnnnnnnnnnnnnnnnnnnnnnnnnnnnnnnnnnnnnnnnnnnnnnnnnnnnnnnnnnnnnnnnnnnnnnnnnnnnnnnnnnnnnnnnnnnnnnnnnnnnnnnnnnnnnnnnnnnnnnnnnnnnnnnnnnnnnnnnnnnnnnnnnnnnnnnnnnnnnnnnnnnnnnnnnnnnnnnnnnnnnnnnnnnnnnnnnnnnnnnnnnnnnnnnnnnnnnnnnnnnnnnnnnnnnnnnnaaatagaaacgttgttaacatgaagatgatcatatgctataccagcagcct

SEQ ID NO: 231967 - DNA, 819 bp, Homo Sapiens
  misc_feature (410)..(703): n is a, c, g, or t
  misc_feature (705)..(705): n is a, c, g, or t
  misc_feature (707)..(708): n is a, c, g, or t
  misc_feature (710)..(711): n is a, c, g, or t
  misc_feature (713)..(713): n is a, c, g, or t
  misc_feature (717)..(719): n is a, c, g, or t
  misc_feature (721)..(721): n is a, c, g, or t
gggctaatgactttgtaaatgcttttaactctggagtagatgtcttgctaactcccaccaccttgagtgaggcagtaccatacttggagttcatcaaagaggacaacagaacccgaagtgcccaggatgatatttttacacaagctgtaaatatggcaggattgccagcagtgagtatccctgttgcactctcaaaccaagggttgccaataggactgcagtttattggacgtgcgttttgtgaccagcagcttcttacagtagccaaatggtttgaaaaacaagtacagtttcctgttattcaacttcaagaactcatggatgattgttcagcagtccttgaaaatgaaaagttagcctctgtctctctaaaacagtaaacatatcttacaaattaaaatgacttttannnnnnnnnnnnnnnnnnnnnnnnnnnnnnnnnnnnnnnnnnnnnnnnnnnnnnnnnnnnnnnnnnnnnnnnnnnnnnnnnnnnnnnnnnnnnnnnnnnnnnnnnnnnnnnnnnnnnnnnnnnnnnnnnnnnnnnnnnnnnnnnnnnnnnnnnnnnnnnnnnnnnnnnnnnnnnnnnnnnnnnnnnnnnnnnnnnnnnnnnnnnnnnnnnnnnnnnnnnnnnnnnnnnnnnnnnnnnnnnnnnnnnnnnnnnnnnnnnnnnnnnnnnnnnnnnnnnnnnnnnnnnnnnnnnnnnanannannanaaannnanaaacatgttcggccgccctcgggccctccgagagcttttctagacccattcgttttgggcgcgcggggcccacgtaggtaaggtggaacatgggtccc

SEQ ID NO: 231968 - DNA, 1027 bp, Homo Sapiens
  misc_feature (152)..(169): n is a, c, g, or t
  misc_feature (193)..(244): n is a, c, g, or t
  misc_feature (319)..(336): n is a, c, g, or t
  misc_feature (347)..(441): n is a, c, g, or t
  misc_feature (881)..(889): n is a, c, g, or t
ggtcagaggcaccagctaaggagcaaaagtcaactttgaattctgtgttttgactactgcacagctctatttgcctcattttttatttttaaagcagcaaatcttagaataggagtttaaatccatcacttggagaaaagaaagactaaatnnnnnnnnnnnnnnnnnnggagacacgatcttgctttgtcannnnnnnnnnnnnnnnnnnnnnnnnnnnnnnnnnnnnnnnnnnnnnnnnnnntggactcaagcgatcctctcatctcagcctcctgagtagctgacactacaggcatgtgccaccatgccaagcttnnnnnnnnnnnnnnnnnngatagacactnnnnnnnnnnnnnnnnnnnnnnnnnnnnnnnnnnnnnnnnnnnnnnnnnnnnnnnnnnnnnnnnnnnnnnnnnnnnnnnnnnnnnnnnnnnnnnnaaccactgttgcatggcccaaaagaggaaaccttgaaaatcctgaggcgaaatgacctttgatttggtgagcttcaaggggaacctagggaaatccaaacctggggtaatctcctaagattgggtggccctcctaacccagggcatttcccccatgggggaaccccttgggcaccaatggttccatttgggaaatgggcttcggcctaagcggacactaccggggctctcacttttaaattcccgatggaaaaaagagggggcctcgggacaaattttccttcccttctctagcccccacgaacccgaataagggtgcgcggacaaatgcgagaatattaccgccgggcaacagtcgcccgccgcgcgccccaaagggcaccccccctcggctgcacccgcggggggacacaaaacctcggaaacctctattctctgttnnnnnnnnnaaataatccggggggccggccctttgcaattgggggacatgggagaatcggggcgcccccaaaggacactgtcgcctttgccattcaacacccccgttgctcccgcacatgctccccacgacattcccgtggggtaaa

SEQ ID NO: 231969 - DNA, 552 bp, Homo Sapiens
  misc_feature (144)..(144): n is a, c, g, or t
  misc_feature (260)..(260): n is a, c, g, or t
  misc_feature (326)..(326): n is a, c, g, or t
cgttctgcccgagaagctactttcccacttcaaataaaaaacttttcccaccttcatttctttccaagcccccaccggtggttgaatcccaaatttccttttccccggtgacaacccaaagggttcctccggcctttgttggtntttccacccaggggcttggggggttggcaaaattggcgccttattttccacaagagggcgttacccaatttgtgaataaagactttcacaccttggcccaagccccctttgggganaaacctctccccttggggggaaaccttcccataggggcgggagaattccccctctccccccttggncccccttctcagaggccttggggcgcgaaacctaaaaacccaggcgttggcctctcggggtataaatgtgggagttggggtaattaaacactctgggggaccaaggcctctgggaacccccgggtgcccaaaaaattctcttttttattgggaaagagggggtctttatacaaaaacccatctaaacaacgtttttttggcccaatctctacaaaagggtcgctcc

SEQ ID NO: 231970 - DNA, 922 bp, Homo Sapiens
  misc_feature (236)..(575): n is a, c, g, or t
ggcacatacgtaacaccaccctggggctggaggcatttgagtagctgacttatagagatacagtataagaggggcagaattagagaactggaaaatagattggaaccagattatggagggaattgaatgccgttgtaaaatacttgtattttattctgtgactggtacagagctaataaaagttcttagcaaaggaaggagtgatgattgggactgaagaagaatagcactcctannnnnnnnnnnnnnnnnnnnnnnnnnnnnnnnnnnnnnnnnnnnnnnnnnnnnnnnnnnnnnnnnnnnnnnnnnnnnnnnnnnnnnnnnnnnnnnnnnnnnnnnnnnnnnnnnnnnnnnnnnnnnnnnnnnnnnnnnnnnnnnnnnnnnnnnnnnnnnnnnnnnnnnnnnnnnnnnnnnnnnnnnnnnnnnnnnnnnnnnnnnnnnnnnnnnnnnnnnnnnnnnnnnnnnnnnnnnnnnnnnnnnnnnnnnnnnnnnnnnnnnnnnnnnnnnnnnnnnnnnnnnnnnnnnnnnnnnnnnnnnnnnnnnnnnnnnnnnnnnnnnnnnnnnnnnnnnnnnnngaatagcactcccttggccggggggcggtgggctcacgcccgggtaaatcccagccacttttgggaaggttttaggccgggtgggattcccgaagggccaggagtttcgaagacaaggttttggcccaacaatgggtgaaaaccccccatttcctacttttgggagagagggctagcgctcggcccgggcataattccattgtgttgggccgccccttcggggcccctcgcgagaaaaaacttttttcctaaaaaccacttttccctgttttgtggcggcgccccggggggccccccacctttagggggcaaaaaggggggaaaccaattgggggccacatttagaa

SEQ ID NO: 231971 - DNA, 1280 bp, Homo Sapiens
  misc_feature (763)..(771): n is a, c, g, or t
ggggaagactcggcgcctgggtccgcgctctctgggtaagctttccgggaagctttcccgggagctcgctggtcctggccccagaagcctgcggacccgcccagggaggataagcagctgaaagaccgcgcggtgccgctcccaggccccgggacgtgggcccatggtcggcctggcgccacctttcccggcgaagccacgcgcaccaggcatcgcacgcggctctgcacccgcgccgccggacctgaaacccggcggccggccacacggggtctgccgcccgcgggaacccggaccaaccccctgcttactcccggagcctgaaacagcgcgccgacgggagcggaaccatccctgcggcggggacgccccagccggggcttcatgctgcaagggcgggggccctacctccacccgcggcggccgcggtcccctggagcagacgggttaattcttggcacgccgaaccggggacggcgtccgccgggcttgcgggacccgtggggtaaccaatgacgcccgacactgcgcggggaacaccccccacacccgcggctgcggttgtggccttaataacgcccggcgggcgtcgagtaacgggccccctatccacgatcgaagatggaccaccccgaggttgcccccgagaagatcgccgccccccacgcatgaagacgcgcgaggaatcacgttgggggggccccggatagaagtatatgtccctcgcgcgctggaggagaacagccaagctggccaccacagnnnnnnnnngatcccccgggagaggtccgcccgacaccggatttttccccgcccgtgccggagccgcacaaacgctccctactgcgtggggcacgcccccgatagtatcgcacattgctgcggtctccgcgagagtgggggcagtcgcgcagaagcgcgtacagctacggacgcgcggggtaggtgtccatgacgtgagtgctggcgggccgcgacagctctcccgcgcgatgaagaacccccccgttgtcgtctccgcgcgcgcgtactaggcagggaccagcttttccacgacgtcgcgcgccccccttcttctcgctcacggcccgcgatctgatgccgcgcgatacgtagatgtccgctggcgcgagaaggggaggacggaatgggccgtctcacacggccatgaagacggtctggagatgaggagccattacttacctaccgtgcgacggggatgcgtcgccccctctttcgtgcgcaagaggagtcacgcgcctctcgctgtgcgcctgaat

SEQ ID NO: 231972 - DNA, 913 bp, Homo Sapiens
  misc_feature (483)..(491): n is a, c, g, or t
ggtcattattaggatgtgggacacttttgtcagggacagggatttttcagcctaccttttttcttcaccttttgccaccactctcagcctgtggtctcaattgccagcctttacacttgctacccccattgtctgggtagttcataccagtccctcaagactagcctcaggcattgcctcttctgggaatacatcctcttacaggccaggatatgactcatgggtgcattcctaatagcacttcacttatttctactgtcaccacactgatctgtaattacttgatttgtctgactcttctgggggcttgtaagcattctggcacagagaactatgacttactggggcttacatctcttggctaaaacacagtacctaaaatttagtaggcattccctcataaacatgaatgaatgaatccaagaatgaataaacatttaggaaatgacacacaacccgcgcccgcgagcaaagaccgccagnnnnnnnnnggcacccggcccgaaacacaggagcacacggcgcccaggccccgccagaacccagccgccatggcccgggagcgcccgaacgcgcccgcagcgcccgccgagcagccctacaacacggccggcccgcccgccaccgggccccgcccgaggacgtagcccagcggggccctcatcatagccgcggcgctccagcagcgtgaagtggaggttcggggtccggtcccgcccgcgtgagacccggtgtcgccctccgccgcccctcctgttggcccccctccgcccccgcgcgtacggagggtggcgccggcacccggctccgtttgtcgccccttgcgggagccagggaccgggcgggccgcgtactggagaccgcgcgcgtgttttggctcgggcctcccccgccgggacacgcgcgctggaga

SEQ ID NO: 231973 - DNA, 612 bp, Homo Sapiens
  misc_feature (170)..(183): n is a, c, g, or t
  misc_feature (186)..(214): n is a, c, g, or t
  misc_feature (317)..(334): n is a, c, g, or t
ataaattaatttaaaaaagaaagaaagtgtggtattggggtccaggtaaaccaagggatcaatggcaacagaatacagttccgaaatgtggagccaattatttttttcgcaaaaaatgcaaagtgccacttcccccgggagaaaagggaaaatgggctttccgggccccnnnnnnnnnnnnnnctnnnnnnnnnnnnnnnnnnnnnnnnnnnnntttttggggaattcgccccagacgggggccccacaaatgggcctttcaaagggcaaaaggggagctcgtaaatatgccccagggggggaaaaccccaagggannnnnnnnnnnnnnnnnnaaaaaagaaagtttatattcttcctcccccctacaaaaagtggagcggtgggggacaaaaccattgcggggagaaaacccccgcttaaaaggatgcgggcggggggcccttcttacaaaacaacaatggggtgtgtgccgggggtctacaatttatgtggaatatattccccccaggaatcgcgcttgtgggcccgggcgcaatgccttatgctcccaacgcgtgaaaatagccatggggaccctcgttctgtggcggtggcgcgcactctctccgcg

SEQ ID NO: 231974 - DNA, 1217 bp, Homo Sapiens
  misc_feature (69)..(112): n is a, c, g, or t
  misc_feature (396)..(410): n is a, c, g, or t
  misc_feature (720)..(720): n is a, c, g, or t
  misc_feature (906)..(906): n is a, c, g, or t
  misc_feature (1010)..(1010): n is a, c, g, or t
  misc_feature (1026)..(1026): n is a, c, g, or t
gggacgcgcgcagccagcccttccccctccggctcccgcaccgccggccgcctcccctcgccctcctannnnnnnnnnnnnnnnnnnnnnnnnnnnnnnnnnnnnnnnnnnncggccccggctgccagcaccatgtccgcagggggagattttgggaatccactgagaaaattcaagttggtgttcttgggggagcagagcgtcgggaagacgtctccgattacgaggctcatgtacgacagcttcgacaacacataccaggcaaccattgggattgacttcttggcaaaaaccatgtacttggacgaccgcacggtgcgactgcagctctgggacacagctgggtcggagagggtccgcagccctgatccccagctacatccggggactccaacnnnnnnnnnnnnnnntgtaccgacatccacaaatctccaacctccgttccaaccggaccctcctaacgtgggatcccacggacctccagggcccagagagagggggcaagcggatggtgcatccattcaattggccgcggggggggcgaaccagcgaagcggacgccgcgggctgggaatacgcgagggccggaataaagcccatggcgggggcgaaagggggggcaagcgcagtctgtctgtgtcccacaagaaaaaacatcgcgaggcagtgcgctccatcggtcttctcatgctggggacggtacaccagaggctggcgcanagaagagaactgtggcgatgtatatacccgaccgccgtcgcgcacaaagtgcaaagcgcttttcttccttctaccaacatgcgaggtgtgctggtcgtgtccgcgcacgctttctatccgccgcgggtgattatgtggcctagcgaatagtggctcccgcctgtgcaggcaagactactcctatcnacggagacggtgcaagctggaaccctcacgactctctaaatggtgctgtgtgtgatcacgacgcctgcctgtgagagcgcgccccctcgcgtgtcctatcacgntgagcggccgccgggncggcgctcgccgggtggtaagcgcgaccaagcgccgccccacccccgtcgttgtcgcttctccgcagggggacacgcgcttagttacgaattgggccgaggggacggctctgtctgctgaacaggcggcgatgaccgccttctccccaggcggggcagtggggtcacgcgccggcgcccccatagagtggc

SEQ ID NO: 231975 - DNA, 1022 bp, Homo Sapiens
  misc_feature (585)..(594): n is a, c, g, or t
  misc_feature (990)..(990): n is a, c, g, or t
gggcaggtgggctatggttgcttggagagtgcatccggcccggtacttgtgatcggaggagagccggatcgtccttccttgaaccctctgggtagggctgtgctgaggggctgggcggggagcacaggccgtgtccgctcgcttgcaccttttcagactgccgtgtcaggcctcgagccgggcccacctggagccctcccctgcccacccgcccccagcgcccgatatccgcccccggcccagaagggccgggctcggtcatccccagtcccgtcgcggccactgacccttgagatcagcccctcccctccccaccttcccgtcccaggcccagcccagggccccgaagccccacccactcgcggtctctagcagccggctcttgtcctctgggtacggctcccggggagtggttggttaccatggcggaagctggccagccaaaaggcctctctgggaagggagaccccaccagggggggcaaaacccggccctgggaaccacaatcttcccgcgattggatgggaccccccttttcccgggaagaagcttccccccccgagcaatagaggaaatggtaatttnnnnnnnnnnacacgacacggtggcgccggtttcctgggaacaccggagagaaacacttgcggggaaaacttcctttctcttttttttggcacccctgggctggggccaaagggaaacctgggttttttcccgaaacgaggcctgggaatacaatttggggcggggaaaagccccccaaggggcctatagggcctccggccacacgcccgggggccccacggtacggaaatccctctaacgccactgttctgtaaaggtggccctggacaataaggcgccgcgtgtccacaggcgcgcccgtgcccgccctttctctccgaaggggtgttgtcttgtccgtgggacaaccgatgcccacccctggtgtcggctcgccgcccctacgctcaggggtactcctccctntgtcgcgccccgcggcgactggtcgctctttg

SEQ ID NO: 231976 - DNA, 890 bp, Homo Sapiens
  misc_feature (302)..(350): n is a, c, g, or t
  misc_feature (386)..(468): n is a, c, g, or t
  misc_feature (567)..(673): n is a, c, g, or t
  misc_feature (728)..(728): n is a, c, g, or t
  misc_feature (749)..(749): n is a, c, g, or t
  misc_feature (754)..(754): n is a, c, g, or t
  misc_feature (756)..(756): n is a, c, g, or t
ggtataccctgggtccttttaaaaattcctatttcagactctgggcctgtggtccttcctaaaatgtacaactaaagcaattctctaagggttgaagtttttttagagggacattaaatggtttttcttcaaaaatttgactcaaagaaggaagggaccaaagatatacacatattctttggtaccgttacttgcacttagaatctgcatgaaaatgtttaaatagctaccccaggcttacagcttgtgggctgagctttttatccctatctcctggtgctcacctctttgtctaattcctnnnnnnnnnnnnnnnnnnnnnnnnnnnnnnnnnnnnnnnnnnnnnnnnncagcaaaaagagtgggccattgttcccatggttctnnnnnnnnnnnnnnnnnnnnnnnnnnnnnnnnnnnnnnnnnnnnnnnnnnnnnnnnnnnnnnnnnnnnnnnnnnnnnnnnnnntatgtggcatgggttaacaggcagcctctaggagctaaggacagcctcccaacatcagaaagaagccagggcctcattctcacaacctcaaagaaatannnnnnnnnnnnnnnnnnnnnnnnnnnnnnnnnnnnnnnnnnnnnnnnnnnnnnnnnnnnnnnnnnnnnnnnnnnnnnnnnnnnnnnnnnnnnnnnnnnnnnnnnnncccctggagcacaagcacccacgtaaagttgggggcccagaattccctaactaanggaccagccaaggcaacgtanaaaanangaaaaattggtggggccgccctcgggcccccttcgagaaaccttctcttataaaccaattcccttttggggcggcgcccggggcccccgctaggggaaaggtgggaacactgggcgccataagcctgtggttcc

SEQ ID NO: 231977 - DNA, 930 bp, Homo Sapiens
  misc_feature (546)..(546): n is a, c, g, or t
  misc_feature (552)..(552): n is a, c, g, or t
gggaaacagaacaagtatcaacaagcggaagagctgtacaaagaaatcctccacaaggaggacctacccgcccctctcggtgcccccaacacaggcacagctggtgacgcagaacaggcccttcgccgcagcagctcactctccaagatccgtgagtctatcaggcgaggaagtgagaagctggtctcccggctccgaggcgaggcggcggcaggagcagccgggaatgaagagagccatgtcactcaacacactgaacgtggatgctccaagggctcctgggactcagtttccccagctggcacctggacaacggcccctcggaccctcagcgccagcacccaggacctgagcccccactaacgtccagtgaactgcgctggccgcagctttcttgggaacagtgcaggaggggatgggctggctggggtggagaagggggtctatcatctccctggccccccccttgccttctggggtaacttggggggataacctgcctttctccctgcgaattaaagggctgggggacgttggaccccaacnccacanagccacgcggttaaacgcgcacagcccctggtcgggcccgccctcccggcccctcgaaaaaagcttttcctaaaaccatttcctttttgggtgccgccgggccccatgaagggaaagcggaactctgggcccaaaccctggttcccccaagaaaaaacctggggcaatgaaacaagggctttggaattcccccaccaaaaaaacaaccgcccgcggggaaactcaaaccggtttttaaacaaaccccaaaggggagtctcgggggtcgttacttggaatccaaccaacagggaatcccacgcgggtctcaaaatcaaatatagtgcccgcccccgtccattttttgcgaggagtggggcacaccccataaacctcccg

SEQ ID NO: 231978 - DNA, 1065 bp, Homo Sapiens
  misc_feature (681)..(681): n is a, c, g, or t
  misc_feature (690)..(690): n is a, c, g, or t
  misc_feature (902)..(902): n is a, c, g, or t
gtggtcccgagcggcagagcgtgatccagttcagcccacccttccccggcgcccaggctcctctctgacacgcctttaggcgaaacatgccccaagacacagggaccgtttctcccctaggagcagcggtggggagcagggccaaggtcccctgaccactgctcagaggagccctaggccctggccgcagtgccttcagcgcccgacccgggcccccacctggtcagccctggcggggcccactcaggacagctgggggccggggcgtggcacggccctcactgtgcctctcctcccaagcaggaaggggctccgggtggactgcgcctgagactcgccaccccaccagggcgtcacagggcaccgacctcttggaaatcagcagcaaagcgttgccggaccccccagcagctgcgaaagcgtcgggagaaaccgcccagggtcgcctgcacgggcccgccagacggtgatccgccgcgagcctgcccgcgggcgcgcaacgataccaggccgggcctgcagctgaaagagggcgcaggacctactcacgccggtgcgcccgccacagcaaccacccgtctcactcccgccaatgggcaccgaccccacatcaaggaggagaaggcggaaaccgcaggggggacaacacggggtttctcaggggcgcggaacacgcagccngtctagganaaagcccccgcacctagagacgaggcggggaggggcacttccacgccctgtcgcgcggcggagctatggagctaggcatggggtaccccccctagaagtggaagcatactaagagcggggagggcctcgtctctcacatcggcagcggcagccacaacattctgtaggcccgcgacgaacgcaggggggatgtatggcacgagttcagttcnacccccgtcccctatagcttcaacacacatcggagagaggcgaggtaagaggagtcgcgcagcagcgggcgacggaggagaccgagaggaagaccccagccaggcgcagtaggctcggcgcggagaggcgtcgacggcaagtgagaccctctatgatggaggg

SEQ ID NO: 231979 - DNA, 695 bp, Homo Sapiens
  misc_feature (611)..(619): n is a, c, g, or t
tccggggctggccggttgcgggcgcgtggggcggagggtcctgttcgatggggcgcccagctttgtctgcggaggccgcgccgcccacttgccatcgatggctgggcccccggcctgccttcccaagctagcgtccgggaccggggcggggggccgccccgcaggggtgtggggtggcccctgcggatctgtcccgtggcaccgcgtcggggctggcccggcggaggcggaggccgaggcccggggtcgcgggccctgccccaagtccggcctggcacccaagggggcaccgccaaaaggcaagggccaagggccgggtccggccgccttccgggaaaaaagggcctgaatagggtggtggaaaccttctttcccaaggccccccttcggcccgaggttttttttggtttaaaggcagggggtttaaacccccctgtgccaacctaaggaggggttggaaaaaccccctcacccaaagggaaaaaatgggggaaaatatttccccccgggttgggccgccttcccgggcacaagagaaaaaaccccaggcccccctggttgaaaaatttggtgggggggcgcgccccgcgttataaacccttggttctttnnnnnnnnnatagaagattgcgaacttttttagagagggggctttttcttccaccacccacggtggtgccctggcgaacaccccc

SEQ ID NO: 231980 - DNA, 929 bp, Homo Sapiens
  misc_feature (338)..(338): n is a, c, g, or t
  misc_feature (852)..(852): n is a, c, g, or t
gggggcctccctcccgcccccagccgcccggtctggccccagccctgtcccgacccccggcctggcccactccgaccctacccggccgaagggttccgctggacacgcaggcggcctccggagcagcccaagcccatgagggccgcgcgcccggccgccggtgctgacgagaaggagctcctggcccccgaggaggagcagaggatcaatgcggttcaagaatcgattccagcggttcatgaaccatcgagctccagccaatggccgctacaagccaacttgctatgaacatgctgctaactgttacacacacgcattcctcattgttccggccatcntgggcagtgccctcctccatcggctgtctgatgactgctgggaaaagataacagcatggattttatggaatgggggactctgtggccctccttcatccgttcctacagtattgaacattgggatcatgggaaaaacagcccccttaagggaaaggggaagaaattgtttttcacatgggggtgaaacaaaatgcggtaatccatttcacttccttggcctgctttccttaaggcctcccaaggaggtccttcccaacattagggggttttgataaagaaattcttggctccccgaaattaacatgggcgcagaaaaatttaaagggagtcaaggcccgagttctgaacacccccttctcggtcctaaaaacaggggacaaatatccctccccgcggaatttggggaaacccctggggccttccccacttatacgctttggggtatataaactcggcgtcccctgggcccccctggggaggcaaccccgccttctggctcttcatcccaccgccnaggggcgaagacaataccgggggaccccgaaacccctcttctacttattttgcaatataggagaatctctccccacg

SEQ ID NO: 231981 - DNA, 1348 bp, Homo Sapiens
  misc_feature (545)..(545): n is a, c, g, or t
  misc_feature (680)..(680): n is a, c, g, or t
  misc_feature (683)..(683): n is a, c, g, or t
  misc_feature (793)..(793): n is a, c, g, or t
  misc_feature (806)..(806): n is a, c, g, or t
  misc_feature (818)..(818): n is a, c, g, or t
  misc_feature (845)..(845): n is a, c, g, or t
  misc_feature (915)..(915): n is a, c, g, or t
  misc_feature (947)..(947): n is a, c, g, or t
  misc_feature (950)..(950): n is a, c, g, or t
  misc_feature (1021)..(1022): n is a, c, g, or t
  misc_feature (1104)..(1105): n is a, c, g, or t
  misc_feature (1167)..(1167): n is a, c, g, or t
  misc_feature (1205)..(1205): n is a, c, g, or t
  misc_feature (1251)..(1251): n is a, c, g, or t
  misc_feature (1282)..(1283): n is a, c, g, or t
  misc_feature (1286)..(1286): n is a, c, g, or t
  misc_feature (1337)..(1337): n is a, c, g, or t
ggggaaaatcatctattacaatgataaccttcaagtgacttccattatggctggacaggcggtgagctcagtggattgcagtggtgtgctggtgattttgcacagtgagctctgcggaaggggtcaggctcaactgctgatgtgtctcacacgtagcagacaaggggtggctgactggcttctttggcctcaacatggtgtatgtcgggagtgacgcaatccgctgtctgcgtctcacggccccacccggccggctttgagaatcactgatgtgccctaattacccgccgcgggttcgctcagagccccggtatggcggaagacacgttccgcggataacgtgcgatcgacgtgggtgcagggggtagtggagaggcagtgagcacgcgggaagacggctggaagcgcacggcgccgcggtgcggcccgcggcgaggtgaggcgcggtatcccctactccaccgacgttgaataaaattatagtagatagctgatgggaggcgggcacctcccgccgtaaagacgtgcgtcccagcacgggtatntctcgtaagtgtaccccgcggccccgctgagcgatagggcggacgccaccgcgcatggtaagagaagaaacaagatgtgacggcacgcggcatcacgcaaatatgtttgccccgaagaccggagaaccgcacggncgngatgtaactctctcaatctcgtcacaccaccatcaactgtctgactcagctctcatgacacacaatacgtgagaaggcgatgtccgaatagtgtcacgcgtcggtatggngtggatgtggtgnagccgagcgcgnatgcacgcgacacgccactgaagacgntgcagcgaagaaagaaccagcccgcgacgatgtctttcgagggcagcccaagctgacggacgggagctangcagtgctagatgcggccgcgtagcgtcgagntangtgtctttacataggtcgtcacatgtcacgcacggcgctcgtagacggtgggacgcagcagtcatggtgcnntgtccagcgcgccgttctcgagtcacttccgagtggtgatatatgtgtgaggaagacggacggcggcggacgcacgagcaannccgcagcccgtaagtgaggagtagagagatgagccgcagatactcggtggtgagaggaagancagcggcggccctcgcggtgctgatcatggccgctggnacaatgtcgatgcacgtgacgtcggcggttccgggacgatgatggncggagggtttcgcctgcgcgccgctcgaganntantagatcgagctacgagtatcgtgccgctcggcagcggtaggcggggcgtanctgacgagacg

SEQ ID NO: 231982 - DNA, 1250 bp, Homo Sapiens
  misc_feature (664)..(664): n is a, c, g, or t
  misc_feature (1205)..(1205): n is a, c, g, or t
ggggctcgtccctcgccgctgccgggccaccagtgccagcctgcctcaggagactccatttgcgcttagtgtggtctgggcgccgcgcaggcggtcccagggcgatgcccggggccggcggactggcgttccctgtgccaagcggccgcccgctggctggctggctgcagcagtgacatcctggtcgccggcgtccaggcggaatccgggctccctccgcgggaggaaagacgtcccgcgctctgaagctcgcccagcggggagaggccctcgctaacacggcttctccctgacctcttaatttcaggagggttcgtagccctccgagtatctataccagcccccacaggaactgcttctgttggtccatcgaggaacgtcttttcaccaggattattgtaacatcatctttcgcggagcctggcacccccataacctcctaccgtgggggccctcatttcccacccgaatgcaaggttttttttcgacgacctccccttaaagaaatcggggcaccattagaaatgggcccccctatgccgttgggttttcccgggcgtggccgaaaatctctcaactgagccgtgtttcaaagctgccgccctcttttacataaggacgagaacgctccgttcctccgcgccccttgctacgaaccacgagncaatacagacccatctatcggttatgactaataacttatctctgatagagccacacatagcaagagttctagactacacccgcacgacctgtcccagttattgtaccccgcactctgctgtctacgtgcggcgggatgcgtcattcgaccgaccgagacatctacgcgcgttagctgacatggaggtgtcgcggcgcggcagtgacggatctcggcgcgggccgcattcagatacaacccccacgccttccccatgtgcagtcaagacgcctcacgcacacttaacacaccgcaaacacaccaccaggctcggcgacgtgtaatcaactggggacgagctacccacacctaggcgtgagcgaccaccgcctaacacgcgcgacgatacgtgactcgcatactcgcacccgaccccgctcaccgccgcaatgacacgccccgcgctagcgctagtaagtcatgatgcgaccacgtgcgacgagacgcgcgactatatcgtgtcacgcaacgctcacaggagaatcgccggatgagacgacantgtattacaactcatagccgccaccgcctttggtgcccccccacc

SEQ ID NO: 231983 - DNA, 977 bp, Homo Sapiens
  misc_feature (640)..(649): n is a, c, g, or t
ggaagccaggaaagcttggtgttttctctgggtacaccccaagcagcgtctccttttggatacagttattgatgaggcttggccactggatgttttcactaactacactctacaagtgaactccttgcccaggccagttagaaaatcccttggggaactgtgatgaatattccatctttgattaaaaaagtgaaatagtctccataattttggacgatgaagtgagtttttcaaagaattccatatttaaagacacattttatttaactaataacaaaatgtattgcttttgtatatatttagttctccacacttggaaaatcttttcctacatcctcgaaaaacataaactcctctgggagtgacaaggctttgtacgaagctctgccaacacgtttcggagggttacttcattttcccccccagcaacaaaggcctggttgaaaccaatttgccctgctggaattctaaatgggggaaatcaaacttttaagattggacccacccggaagctttttgcaatttcgtgtttcccaccttaccctgcgtacttccccagtttggataattaaaccccccgtgttccaaaacaacacccccaccccccgtcctcgttcccgcccctaaaccgccccttttnnnnnnnnnnttaccctcgttggggggcaccgattacgtctgctctacgcgttatcgcccccccctaccgtgtttcgctagagggcccccggtgcttcgttcgggtcgcgccccctggacccccgcgaaaaaagatattttttaaagaacaccctttttgtcctcggctactcgagtgtgccacccgccgccactttgttttgaacaccccccccgcggacgaacctcgcactatccctagagaaacgactatgcggcggcgtgtaacccaaaccgcgccgccgcgcggcttctcccacccgcgccactataccaggcgccgtcgcccttgtcgcgcc

SEQ ID NO: 231984 - DNA, 499 bp, Homo Sapiens
  misc_feature (163)..(256): n is a, c, g, or t
  misc_feature (260)..(260): n is a, c, g, or t
  misc_feature (263)..(264): n is a, c, g, or t
  misc_feature (281)..(297): n is a, c, g, or t
  misc_feature (300)..(301): n is a, c, g, or t
gccgggggctgcccttcccgggcctcgtctgtctgggtcctttggtcaatgttgcacagtttttattgctcccatccctttttgtagtgggctgggttttaagttataaatgttaactgcctctgggtgaaaaagtttttaataaacacctattacctcttgnnnnnnnnnnnnnnnnnnnnnnnnnnnnnnnnnnnnnnnnnnnnnnnnnnnnnnnnnnnnnnnnnnnnnnnnnnnnnnnnnnnnnnnnnnnnnncatntcnntagcgcccccggacccnnnnnnnnnnnnnnnnnganngttggggggcccccaggaccaccagggcacagggaaaacgcttgtattttgggcaatagaaaaacgcggggagggaaaccaagtcttgcataataaaacccagaagggccccccgagggacaaataaggggttttttatcacaaggcagtacaagaggggccctggaaattaaatttgggccctaaacccttgcagtt

SEQ ID NO: 231985 - DNA, 996 bp, Homo Sapiens
gggtagcaacagaataccaagaaaacaaggctccagggaagaaaaagaaacgggctctggccagcaacaccagcttcttctctggctgctcccctatcgaagaagaggcccactgaagttggagtcatcatctctacccccagtctggcttgggagatgctttcaggttgcagccacaaggggttttttaaatgacttctctggatttcaggtttcttgctgctgaaaaaaggaacaaagcgttactgaaaacaacgcaaccctttgttggatgtgggccttagcctccagggccagactactactctatgttctccagaagggtgctacgtcacctactgaaaagagaccccactgactttcctattgactccattcggaacccaccccctcaaggcgcgccaaaagatgtttccttatttggggagccagttccaggctaatccctccctgatgggggatgagggccaaggccctccccctacctttccgcttgccctcccgcctcaaatgggagggacccccggcgccctctaggaatggagggccctggaccttaaaatctctgtaatttccaacgcctccacggaaagaaaggctcggagggactcacttttccggagccctcggaacccctgccgcctgaactttatcgctttctccccactacgccgacccccctcgaacctcgccacctcgcaccacgcgtcgcttttcaagccgccatgggactcccattcctccacgaccgcgtttgcccgccaacggcaccaattctctcccctttacggccccccctcctccacccctctttcaacactcctcacccgtctcccggcgaggatagagccctttggctatcgcggcaccccaccatcccgcgcccccctccaagacaaaactttctttcctgagcaagcaacacctcatacatatcggacgacgcccccctaccccccgccggttcacgggtagtcagcggtcaaaaacagtgtg

SEQ ID NO: 231986 - DNA, 897 bp, Homo Sapiens
  misc_feature (313)..(384): n is a, c, g, or t
  misc_feature (408)..(408): n is a, c, g, or t
  misc_feature (410)..(462): n is a, c, g, or t
  misc_feature (481)..(573): n is a, c, g, or t
  misc_feature (824)..(824): n is a, c, g, or t
  misc_feature (842)..(842): n is a, c, g, or t
  misc_feature (853)..(854): n is a, c, g, or t
gggactgttgactgcctgtagcagcaccaggccaccgaatctggcctgaggagacacaggctgctgattttccaaccccagtgaaatttcttgaaatttcacacaggtttcaacaaatggccgtgcgcacagagcagccttctgagtagctggggttactcctggaaggctgctctgtgcccacagtcacagcattcccagagtggctaatgtttccccaaggtgtacttcctcctggaccctggggttcactggagataggagaggcaacatgttcattggaaaggtctgtgactcaataggaaatcagatnnnnnnnnnnnnnnnnnnnnnnnnnnnnnnnnnnnnnnnnnnnnnnnnnnnnnnnnnnnnnnnnnnnnnnnnccaataaaaatcttctggaaaaanannnnnnnnnnnnnnnnnnnnnnnnnnnnnnnnnnnnnnnnnnnnnnnnnnnnnagttcccgtgacatccggnnnnnnnnnnnnnnnnnnnnnnnnnnnnnnnnnnnnnnnnnnnnnnnnnnnnnnnnnnnnnnnnnnnnnnnnnnnnnnnnnnnnnnnnnnnnngacccgctacgcgggggcagccgggccggtggtggcaccgcctgcgccgcgccccccggcgtgtagggacgaatcacctggtgcgctggggggcgggcgccgggggcgggaccgagtcacgcggggcggtgacagcaccgtgtgttgtgccggcgcggcccggccccacccggcttaggcggcgggcaagggcgaacctcggagggtcgtggcgcggcgagccccggcgctcgccgtgggccttgtgttgnaaggcgggatcagacagntccgcagcgtnnaaagcgcagcccgcccgccggcgaccgacaagagcagacggac

SEQ ID NO: 231987 - DNA, 1071 bp, Homo Sapiens; identical to SEQ ID NO: 9299
  misc_feature (160)..(161): n is a, c, g, or t
  misc_feature (165)..(165): n is a, c, g, or t
  misc_feature (170)..(170): n is a, c, g, or t
  misc_feature (272)..(291): n is a, c, g, or t
  misc_feature (315)..(357): n is a, c, g, or t
  misc_feature (773)..(832): n is a, c, g, or t
  misc_feature (897)..(960): n is a, c, g, or t
  misc_feature (989)..(989): n is a, c, g, or t

SEQ ID NO: 231988 - DNA, 971 bp, Homo Sapiens
  misc_feature (159)..(159): n is a, c, g, or t
  misc_feature (161)..(162): n is a, c, g, or t
  misc_feature (416)..(430): n is a, c, g, or t
  misc_feature (451)..(481): n is a, c, g, or t
  misc_feature (504)..(507): n is a, c, g, or t
  misc_feature (509)..(510): n is a, c, g, or t
  misc_feature (513)..(513): n is a, c, g, or t
  misc_feature (515)..(523): n is a, c, g, or t
  misc_feature (530)..(549): n is a, c, g, or t
  misc_feature (789)..(789): n is a, c, g, or t
gggagacaggggtagtgcgaggccgggcacagccttcctgtgtggttttaccgcccagagagcgtcatggacctggggaaaccaatgaaaagcgtgctggtggtggctctccttgtcattttccaggtatgcctgtgtcaagatgaggtcacggacgantnntaccactcggggaagaacaaacaccaccaggtggactacactttgttcgagtctttgtgctccaagaaggacgtgcggaacttttaaagcctggttccctccctatcatggactcccatcattttggttcggggggccctaactgggggaaatggggcctgggtccgcgggttgaccccttaattttcttatattttccacaaaaaggtgagaaaaaccctggagccgataaaccttccgtgggtctaaccccnnnnnnnnnnnnnnnagaaaaaaaaccctccttttnnnnnnnnnnnnnnnnnnnnnnnnnnnnnnnttttaagtagcgggcagaggagnnnngnnctncnnnnnnnnntctcgannnnnnnnnnnnnnnnnnnntaaccctctttctgttgggagagggcccctttttttggtgtggcgcctcccgatcaaaccaaaaaaacagaagatctttctcttcggtggggggagcgcagagctcccccccacaccctttcctttggtgtgggggtaggaccacaatagagtccccaccggcgacgccgaggaagcccgcagactagaggggggtggcgggccgtcgacttctcacgtagttcgcagcccgcagccacncccaagagtgcggcggagacagtaggggtcgctaccctatgttccgaaaagacagccgaccaccataccgctctcgttgtggaggaggagcgcgcgcgccggccgctgtgtcttactagatagtcaaataagagagtgagaggcggggaagttgttcgctctgtctcaccagatcaaggccg

SEQ ID NO: 231989 - DNA, 908 bp, Homo Sapiens
gggggggagcgccggggcagggaggcgggcaccaggcgcgggtccctccgggcaggggaggtaggcctgggcctgacgccgaacacgcatcggcgggagagtgagcactcgggcggcggcgtcctggagacccgcgagagatggaagcggcggcgacgccggcggctgccggggcggcgaggcgcgaggagctagatatggatgtaatgaggcccttgataaatgaccagaattttgatgggacatcagatgaagaacatgagcaagagccttctgcctggtcagaagcattaccaccttgatgatcaagagggcatttcatctgtacaagctcttatgcccccttctgagaggaaagattggaaaccgggccttttaggactgccattgccgataaaaaaatgcacgcatagtggcttggcaccaatcagcgcctgccggcgataggaaattatctctcgttcacccggtatggccataattgggttgataagagagcccacttctaggtccgtcggctggacctcttgtgtaccctgtcgctattgcgaagtggacgcacttgagaaatttggccttccaccaatgctagccgccctaggggggcgcgccaacgtgttgtctgggttgttgttttcccgggcgacaacacccgcgccgcggcgcatttctgcgtaatgggcggaataacggcgtcttcacttccgcgaggaaacaaggttataaacttaggtggagcgactgttctttcttcccgccgcacgggcgagatcggagggattcggtgctgagaggtcgccccacaggcgggcgcgggctcgcaacaataaattgccgacgcgacggggaacagctcccacagaatccgaaatgtatcgggaacacgtacccgttccccgtgatgcatt

SEQ ID NO: 231990 - DNA, 403 bp, Homo Sapiens; identical to SEQ ID NO: 33199

SEQ ID NO: 231991 - DNA, 967 bp, Homo Sapiens
ggggcggcgtcactgagccgcgccagctgagccaggtagggccctaccctcttctgttgctttctccctgtggctcgcgccgtcccccgccgcccgtcgaccccgcttccatgtccctggcggacacagctccccaggaacctccaccgcccatggccactatggcagagggaatcctctatcacctcctgctgttccacctcgagctgcgacgcagacgacgagggcgtgcgcggtacctgccgaagatggctttcccctgtgcaagaggtttgcactaagcattggctactggcctgaccccttacataaagcactttggtggagactgtctaaagagaggaacgcccctgaaatcaaccgaggatattttgctccagtccatggggtaaatcactttaataaaaggcatttcctacccgaacaacagaatggcattggcaaattgtccaaccttgggggaacggccatggaatacccccccttccgggagatcgaagggcgggaaggacctattctcccggagaggagatatctcgggagggtcggaattttcccacggaatcggtcggcggggaaaagcgtcgcacaagctgcccaaagtgcgcgcacccatcccctgaatagcgctcaaagggcggggctgggcctcacctctggcgtcctcagagcgagcgcccggcgacccccggccactgacagtgcgggccgcccacccgcggcattcccgacaaaaaaagcaccttgggtgcccttgagcccctcaaggaaaaaacacgtgtacaccacgcggggagcgaggcccggcctagggcgtccacactgcacgccgactgtggacacaccctcgccactgaatacctcccgcagaaggattggatcacttgcacgagtggaaggcggtctagaatcctggtagcgactgtatgtgtagagaggcgcccgatgcgcaatcgacgccgcggcc

SEQ ID NO: 231992 - DNA, 1037 bp, Homo Sapiens
  misc_feature (109)..(383): n is a, c, g, or t
gggggcccgcgcttgcagctcccagaagttgacaggcatcctccggtgaccgggtgaggtgggcagggttgggctgcatagtcctcccgggcaatttaaagttacagcnnnnnnnnnnnnnnnnnnnnnnnnnnnnnnnnnnnnnnnnnnnnnnnnnnnnnnnnnnnnnnnnnnnnnnnnnnnnnnnnnnnnnnnnnnnnnnnnnnnnnnnnnnnnnnnnnnnnnnnnnnnnnnnnnnnnnnnnnnnnnnnnnnnnnnnnnnnnnnnnnnnnnnnnnnnnnnnnnnnnnnnnnnnnnnnnnnnnnnnnnnnnnnnnnnnnnnnnnnnnnnnnnnnnnnnnnnnnnnnnnnnnnnnnnnnnnnnnnnnnnnnnnnnnnnnnnnntaaaaataaattttaaaatcaagatagagttaaaattaagacacttcccgggggacgggacgcatcatggagcgaaaatggttcctcgtgggggaagggttcccaacctccacggtcttaaatcaactgaacccctttaacccggaagctcctcctatccacaatggggcaggccccagcagagaaaccttccgggggtataccttcgggttgttcctggcagccccccacgcttaaaaaggggaaacttgggaaatctccttcccccggaagtatattttgtcgccggaaatttggcacatggctcacgaacggatttccgggaagtttttgaggtcggacttcttgtgcaaattggaaaaacccccccgaaatttcccttagaggctctgtggggccttcggtgcgcaccctatcgttggaacaccccaaaattttaacctaaggggacgccccggggagcgctccgcgttggactcaagtcgacattacgagtgggaggttacaaaaatggggtacccttccctgtggtaacaaaaagggctcgaggaagaatattgaaaccagacgggggtcttcgttgggggggagcgccgcaaaaacctttgctaggcgccatggtgcgttctcaacgatcacgatgcgcggggggcg

SEQ ID NO: 231993 - DNA, 1259 bp, Homo Sapiens
  misc_feature (481)..(544): n is a, c, g, or t
  misc_feature (588)..(596): n is a, c, g, or t
  misc_feature (724)..(724): n is a, c, g, or t
  misc_feature (936)..(936): n is a, c, g, or t
  misc_feature (958)..(958): n is a, c, g, or t
  misc_feature (1103)..(1103): n is a, c, g, or t
  misc_feature (1111)..(1111): n is a, c, g, or t
  misc_feature (1153)..(1153): n is a, c, g, or t
  misc_feature (1167)..(1167): n is a, c, g, or t
  misc_feature (1223)..(1223): n is a, c, g, or t
gggtggttgggggccgctgagggcagcacggagcctggggacctgggttcctggctcagggagagctgtggcttctcatgggcctcgcaggcgtgtactgttaccgtgtcaaccggcgcctgttcccggtgcctgtggatcccggtaccccctgccgcctgtgcaggacaccgcgagaccagcagggccctgggaccctggcgcagccagcgcacgtcagggtgagcatcccgctgtcgatcctggagcccccgcaccggtaccacatccaccggcgaaagagctttgacgcctctgacacactggccctgccccggcactgcctgctgggctgggacatttttcctccgaagtctgagaaaagctcagcccccaggaacctggacctctggtcctctgtctccgctgaggcccagcaccagaagctgtccggcagccagccagctccttttcagccgggcctcaccatggcaaaatgctnnnnnnnnnnnnnnnnnnnnnnnnnnnnnnnnnnnnnnnnnnnnnnnnnnnnnnnnnnnnnnnnccacggggaggaaaagcccctggaagaaacttggaactcccttnnnnnnnnnaacaatacaaggccattttgccccggcccattcgcgtccgcaggcacttcgctccacccccttctgtggggtgcaggaggcggcgcaaacccccacgccggaaagaaaagggggcaaaactctgcgcncctgtgggcccgccgcggcgccctcaaaacacttttctcagagggcgccccccacagggcgtggggctccgcccaaacgggggtatgggcgagccccaagatagttggggggggtgcggggcaccccccccaaaaagacccttgtggctccacttgtccctcctgcgcccctcgaaaaagatgctccccgcgcaaaaccaacgggggcgagnggggacaccactcctcgggggngggatgagagaaaaggggggcccgccaaaaaggtggcatactacttctgtgtgttgacggacaaaaccatagttttggtcagaaaaggataaaaaagacgggcctttatcaagagtgggggttggtcatttgtcgcgcccccctntatagagntaagagcgccccgccgcgctagggcggcgcaactgaccctgntggggtaggacagngttgttggttgggggcgtagtgaaatctacggaccgccgcgcaaacaacactagtnggagtggggttattcgcccggcatctctggcgggag

SEQ ID NO: 231994 - DNA, 1280 bp, Homo Sapiens
  misc_feature (540)..(540): n is a, c, g, or t
  misc_feature (707)..(707): n is a, c, g, or t
  misc_feature (748)..(748): n is a, c, g, or t
  misc_feature (1050)..(1050): n is a, c, g, or t
  misc_feature (1134)..(1134): n is a, c, g, or t
  misc_feature (1232)..(1232): n is a, c, g, or t
gggggggtcggaaggtctaggccgggcgcggagcgaggaagcgggtggcgctgggacgcatgctctgggggagatgagtataatgacccgcgtttgtccgccgcccgtgccccgctcaatccccgcatcaatcccgtgaggccgtttctcccgttggctccactgtaccgggggctgacgcccatggaggtctcgcggctccctaggctatccagctagtaagaggcgaagctggaattctcactgtgggcccattccatggattttgccagagcgccagggacacactcagttcatcttcctagcaggcaagacccacaagatgcgcgccccctggcagccaccgccgtcagaaccccggcgaatttcctaagtggtcccaccatccaccctccctcccactgcccttctccgcgatggccctctggtttggggcaacgcgcttgaggtttccctccttcgcaaagtaatccgcattttccctctgggtcccattaaggcgttgctacaaataagcgaatctcctaccttccccacgcnccttcttgttccctgtgccttgtgtgtgccgctacccggtcattaaccccccttattgttctggcggcaaggagggtactcataagaagcgctcttgagggagcgaccatcgccgcggggagatccccaagttttatcaccaacaatttcggggtgtgccaggaggnggctcacacaaatctcctctctcgccacacgactccacgcnagagtctgtgcgcggtggcgtcatacggcggggacaatcaccgtggtacatagacgctaggtgggccacccgcctggtcgcggctcttcacatcgggcgatatttataaaggaacagcccgctctcgttttgcacgccgcagcccccctgttggctgacctttgggcgcagcgcacgtgcggccctctcccccttggtggtgtcataatagggcgagacacctccagatgcgcgcatatttgcgacagcccatgctccgtttatcagcgtccgcaacaagatacgaagagcgcaggtgcgtncttctgtgccgcgtgggcggcccgcacgctcctctatatctccgcggccagatactcctcggcgctcagcccggcgcgtgaaanatgatctgcatcgcctccggacccgagctatctgaggatgtgggtgcgtcgcgtcccttgcgcctagatgcgcggaatagcgtgtttcttcctcacgncacccactcttcgttcatactccgatcgcccgcgcgacccccacacgt

SEQ ID NO: 231995 - DNA, 216 bp, Homo Sapiens
  misc_feature (42)..(42): n is a, c, g, or t
  misc_feature (53)..(54): n is a, c, g, or t
aacggacacagaaagacaacgggaaattccccccgcgcccancgaaaaaagannccttggtgggcccgcctcggcccctcaaaaaaactttctaaaccatttccgtttgggcggccggggcccccgtaggtaaaggggaacctgggccataacctggtttcctaaggaaaatcccggggccatggacctaggggctttggaattccccacccaaat

SEQ ID NO: 231996 - DNA, 1024 bp, Homo Sapiens
  misc_feature (547)..(587): n is a, c, g, or t
  misc_feature (719)..(719): n is a, c, g, or t
  misc_feature (826)..(826): n is a, c, g, or t
  misc_feature (951)..(960): n is a, c, g, or t
gggaacgtgacggggaagtggttcgggcggccgcggcttactaccccagggcgaacggacggacgacggaggcgggagccggtagccgagccgggcgacctagagaacgagcgggtcaggctcagcgtcggccactctgtcggtccgctgaatgaagtgcccgcccctctgagcccggagcccggcgctttccccgcaagatggacggtttcgccggcagtctcgatgatagtatttctgctgcaagtacttctgatgttcaagatcgcctgtcagctcttgagtcacgagttcagcaacaagaagatgaaatcactgtgctaaaggcggctttggctgatgttttgaggcgtcttgcaatctctgaagatcatgtggcctcagggaaaaaatcagtctcaagtaaaggcccaccaagccctcgagcagttattcccatgtcctgtataaccaatgggaagggggtgcaaaacgaaaaacccaagtcataccagtggctgtcttcaattggcaaggaaaaagaaacttcctttcattctggctggcnnnnnnnnnnnnnnnnnnnnnnnnnnnnnnnnnnnnnnnnnccctcctatggggccccggaggaagaaaaaaaacaaagggagggaattctccccgtctccttaaatgggatccaaacggtccccaccaaaagtttccgaagagcaagtcaaccctttgtctccccgccgagngccctcccttttccacacaaccctttcttcccaaaattaacccccaggtaccccacaccctccccgggtagcaggcgccgcagattccgcttggcgggtctcaccancactgcgctccgaacgtccctctgggtgttgggggcgcgcctccttgtggcgcccctctttgaggaaaagattttgtttttaaagaacaccctttccgctcttgttggcgggcggcgcgcgcggnnnnnnnnnntgtaggggggacaaatgggcagacacccacgggcgcccacataaaacccggggggttttgtcca

SEQ ID NO: 231997 - DNA, 871 bp, Homo Sapiens
  misc_feature (197)..(223): n is a, c, g, or t
  misc_feature (353)..(670): n is a, c, g, or t
  misc_feature (679)..(682): n is a, c, g, or t
  misc_feature (704)..(704): n is a, c, g, or t
ggggtttcaagagcaggcatgatgttaccacattttgtactggctagtcacagtacttttcttaacagcgaagcaattatatattcaagctcattgtccgctgcatacttttgattcaagtgaggagatcaatggttgcaggaacatttgtcaacttaagccctgggattataaaatgccttttttgatggcatttnnnnnnnnnnnnnnnnnnnnnnnnnnncatttactgcctggttctccagtgtgccagagatgtcttcaaggtattaattaagctcttcaatatgtttttctctgtatccttttccacatctttagaagcatctctgaaaaggcaatgaaatatgtgnnnnnnnnnnnnnnnnnnnnnnnnnnnnnnnnnnnnnnnnnnnnnnnnnnnnnnnnnnnnnnnnnnnnnnnnnnnnnnnnnnnnnnnnnnnnnnnnnnnnnnnnnnnnnnnnnnnnnnnnnnnnnnnnnnnnnnnnnnnnnnnnnnnnnnnnnnnnnnnnnnnnnnnnnnnnnnnnnnnnnnnnnnnnnnnnnnnnnnnnnnnnnnnnnnnnnnnnnnnnnnnnnnnnnnnnnnnnnnnnnnnnnnnnnnnnnnnnnnnnnnnnnnnnnnnnnnnnnnnnnnnnnnnnnnnnnnnnnnnnnnnnnnnnnnnnnnnnnnccctaaaannnnagccaccgtaccacacaaaacnctccttgtggggcccgccttccggcccctccaaaaaaactttttttaaaaacccatttccgtttgggggcccccgggggcccccgagtagggttaaaggggaaacactgggggcccctataagcgtggtgtttctcccaaagggagagaaatcccccggggggcacc

SEQ ID NO: 231998 - DNA, 1022 bp, Homo Sapiens
  misc_feature (594)..(602): n is a, c, g, or t
gggattgtttgtcaaacttccagaaattcttggaaaaatgtcctttactgagaagaatctgaaggctttattgaagcactttgatctctttgtgaggttcttagcacaataccacgatgacttcttcccagagtcagcttacgtcgctgcctctgaggtgcattacagcaccaggaacccccaggcagtcaataagtgttgatggttctgtaagaacaactgctccatctagcatggtgttctgagttccaggtaaaaaattaacaaggcggtgggttcttatccagagcacaaaacaaattgcccaccagggggctttgacagaggtgtgccctgttgtttgagttccccatgtactgtagctactctgtttagaattatttcctaggtgcctgaaagtgttccgacctgacacttgccaccgcgtacgccatctgtgatggcaggtaaaaagcaactgttcccagtgacaatggtcccggaaagtgtacctaagggttagggcatctccacccacacctttgcagtttagtccagcaaaaaaaccacacttggcttccgttctattttgctaacgaatctaaaccaacaccnnnnnnnnngccaacattgggcgttctaattttcttcttgggatggaaagcttgaccgccaaccgccttttcaacccgaaggtattaacgttttggaaccttgtgaaaagttggcaaaagctaaaccctttccatacgtaactccttaaaagagaggaattcccccccactgggatggggccaacaccgcaacattttatgcgcacgcgtttaacgttctgtgtattctataatacagccgcctcttctctttcttgaggaaaaaccctataattcttgttgggggtggagctcacaaagcacaagagcgctgtctgcccttatatcctttggatttgaccaaaattatataccaccccaacaacacctgtatatattgacggggaaaaggggaaaatgggggatcccccacttgcccttgggaaataa

SEQ ID NO: 231999 - DNA, 950 bp, Homo Sapiens
  misc_feature (41)..(111): n is a, c, g, or t
gggagtctctgagcagccattgaaggggaaggaactgcggnnnnnnnnnnnnnnnnnnnnnnnnnnnnnnnnnnnnnnnnnnnnnnnnnnnnnnnnnnnnnnnnnnnnnnngacaaggaggtgggggcagctgagttagagtcccaactcttggactccatttgctattctcttctttctcccccacacctatctggtggtggtagtgggcgtttatatttgcgttccttttcattcatttctaaatctcttaaaaattttgggttgggggtattggggaaggcaggaaagggaaaaggagagtagtagctgaagagcaagaggaggacatggagatgaagaagaacattaacctggagttaaggaacagatccccggaggaggtgacagagttagtccttgataattgcctgtgcgtcaatggggaaattgaaggcctgaacgatactttcaaagaactacaatttctgagcatggcctaatggggaacctaagctcgctgggccgggcttcccaggcttaaataaaatttcggaaaactgcgagcctttagaggataaatataattttcccgagagggcttggcaaactccctgggccagaagaaaattgttccaaaattcctttaccctaaccttccaatcctggagggtgggaaaaccaatgttttaagacggctccctccagttacccggtaggaagactttctggccgaaaattctttgaaaaaatacttggaaaaaggtccctctcgccccccgcttttaaactggtgggaggagtcccccaaaccccctggtgaaacgatcctctagccattaaaacgttcatttcttctgaaaacttcacctggccggcccattatttgccaataacctcttaagagtggtgaatcttttgggcacccagggagcggggaataaattgtgaaggaccgcctcgcgggtaaa

SEQ ID NO: 232000 - DNA, 527 bp, Homo Sapiens
gtcagacatttaaaccagagcaactccatctggaataggagctgaataaaatgaggctgagacctactgggctgcattctcagacagtggaagtattccaagtcacaggatgagacaggaggttcccaccagatacacggtctaaagacttttgctgataaaaacccattgcagcaaaagaaatttaacccaaatccccacccaaaaacccaagtttgcgccaaagaagaagtgaaccctcctgggtccggtccctcaactgagttacaacttccttgaacaaccacccattgcacacgttttaaaaaatggccactgggcaaacatttgggaaactttcccccgtatcaggatcccaaaaagggggggagagaatgacattatcccccccttttttgttttccccacctaagtcagagaaaataccccctaaaagtggcggcgaaaccaccaaaattctaaggggcccttctttttggtccactggcactaatcccattcccctttggtgccctctacctcctcct

SEQ ID NO: 232001 - DNA, 1057 bp, Homo Sapiens
  misc_feature (175)..(177): n is a, c, g, or t
  misc_feature (232)..(242): n is a, c, g, or t
  misc_feature (268)..(276): n is a, c, g, or t
  misc_feature (638)..(650): n is a, c, g, or t
  misc_feature (950)..(950): n is a, c, g, or t
  misc_feature (1032)..(1032): n is a, c, g, or t
gggttccgcctccgggtggcgcttcccggtgtcgtgttctggaagcttagcggtcaccatggagctgctgggagagtacgtcgggcaggaagggaagccgcagaagctgcgggtgtcctgtgaggcgccgggtgacggcgaccctttccagggcctgttgtctggcgtggcccannnaatgaaagtgacatgggtaaccggaaatttatttccaccccctctggggtaaacnnnnnnnnnnntagttttggtctgccacctcgtcatnnnnnnnnngctttcttccgttttcccccccgcggcgcttttccctgtgtttactcccccgccccgcgttaatccatccttgcccgttttcctcttaccctcccgttcctcccgccctactttttttggcgggggctccccccccggccgcttctactcgggcgcggcgggcctttctccctattttacgcgcgggtcgtattcccacccctatccccggcggggtcgtcttattcccctcgtcgccgctttccgccccctgttcggtcgacgcctatttacgctgctcccctttttccccactgtcttagctccccccagctttccgccccctctcccgcccccgctcgcctgcatctttttcgtctctnnnnnnnnnnnnngcggcgcctgtctctaccgggcggggcgcgttgttcgaccgccggccccgcgctctagttctcccggcccgcgttcgttttcttcccgccgccgcgccccgccgggggcggctacgcagactcttatcattcggctacgtgcggcgcgcccatctatttatgttttccccgctccttatcttttcttttcacccgcctcccgatacgcctatattctccgtggtgttggggacgccgcttctactctgtactgtccgcacaccgcgcgccagtggtcgttatgtgcggtgtcctatatcnttctttggcccgccgccctacttctccttcgccgccctcacgtggtccagcacacacttattgggtgtgtggtgccgacctntccgtcgccgtccgcgccattgtgt

SEQ ID NO: 232002 - DNA, 1236 bp, Homo Sapiens
  misc_feature (566)..(566): n is a, c, g, or t
  misc_feature (1098)..(1098): n is a, c, g, or t
gggtcctcctcctcctcttctcgccattgcagttggacccagcagcccggagcgcaccgcgtggcttttgggggcagaccccggcgggctgtggcaggagggcggcggcggcggctgcggccgaagaaggggacgccgacaagagttgaagtattgataacaccaaggaactctatcacaatttgaaaagataaccaaaagtctgatttccagacactacagaacaagtaaaaatgcgtccaatgcgaatttttgtgaatgatgaccgtcatgtgatggcaaaccattcttccgtttatccaacaccagaggagctggaggcagacccagaacatggtgtcccacactgagcgggcgctccaagctgcgcccgacctggatagaccaaccatgaatccggcaccatttgagtaagcacagcttcgatcacatgggacgcgcccccccgagggacgatatgtaaaagataaggggcctgggcccatctatcaatgatccgcaccatcatgctacttttgcagcccttgagtaatgcaccgcgattgtcgccgccggggccctcgtgntgtgcccacaggtgtccgcttcattaagtttgagaggggcgcggggataccgtggcgcactctctggagagatctcggtgttgcggcttgagccgtgaggcggtttaaaggaaggagcgcaacatcgcacgtaacggcggactctgtatccccccctgttcccccgcggggtgaaacacaaaatagggctggggggacgtcttacgacagcccccgcaccttctgagatcatccccaatccctacacagcaccttttgtcctcgtatgccttcggttcaacacccagctttatatggacccccacgcccccccgcgccgccagaacataaccgctgtgggcacaactctgctcttgttttgcgacacgcctaatatgcgcccggcgcccgcccctatgtgtttccaatgaaacagagggaaacccgccgctgtgatgacacgagagcccctctacaattatgcggcgccccccattgaagccccatcccccctcgcgcatgcagaacccttctccactcgcggcagcgggcnttaacacacagcgagtttatagttgcgcgcgactcaccagggttatattacggccctggcgttcccaaaaacgcgccctagtgtatacatgagaccctatccacgccccctcgaataggtgttattcgggtaaaagga

SEQ ID NO: 232003 - DNA, 1026 bp, Homo Sapiens
  misc_feature (452)..(461): n is a, c, g, or t
  misc_feature (493)..(515): n is a, c, g, or t
  misc_feature (617)..(617): n is a, c, g, or t
  misc_feature (619)..(619): n is a, c, g, or t
gggggcacgcggcgcggtaggcgagcgccgaggcccagcggccgggggaggacgacctcgtatcccgcgtccccgccgcgctggatccggactgagtggccgggcctgcggactggatgtgcggggcctggacttgcctaggatttcccgaccccgtacaaaccaagttgccctctccgagctaggcccggccgagagcgccttagctcgagtcggatccgtgttggggcgggcgttgggtttgggggggacgggccccccagcccaggatccggccctcaggtgaacccgacactggccccggggcggccgggaaaaaacctcgcgtggctccccggcccccgggaaccctaattttaaaaggcccccgggaacccacccgccgggcaaatacgccggcccctgcccccgtataggtgtggggcggggaggttttttctcccccaaaaaannnnnnnnnntcctttttaagatctttaataggcggtcgggnnnnnnnnnnnnnnnnnnnnnnngctatttttcgctcttcccccccaggaaacaaacttatagagggggtgggccgcaccctcttctctcttttttcgggcggcgccgcataaacaataatactntnctccctcctcgcggcctttagtcgtgcggtctcgggctggggtggtggtggtgttgaggcgctattactctctccgccccgccgccttcttttttctccgcactcttctgtgggtgtgtgttggcgcccccgctccccgcccgccgtggtcctccgcctgaccctctatcacttaatgcggtgcgccggtctacgttgctattccgccgccctcttttgtccgttccccccctcccgtatgtgtgtatttcgggatggcgccgcccctcttttcgttcagcgggccagccggatttgccctttgggcgcaacccaatattttgggccccacccctcccagccggccccgcgctgcccttcccctattttctggttaggtacctcgcgccacgcctcgcccgcggttg

SEQ ID NO: 232004 - DNA, 1332 bp, Homo Sapiens; identical to SEQ ID NO: 9708
  misc_feature (395)..(440): n is a, c, g, or t
  misc_feature (750)..(750): n is a, c, g, or t
  misc_feature (1260)..(1260): n is a, c, g, or t

SEQ ID NO: 232005 - DNA, 1324 bp, Homo Sapiens
  misc_feature (627)..(627): n is a, c, g, or t
  misc_feature (819)..(819): n is a, c, g, or t
  misc_feature (1117)..(1117): n is a, c, g, or t
ggagagtcgccgcgcggccgccggtgagccgcatggagccccgggcggcggacggctgcttcctgggcgacgtgggtttctgggtggagcggacccctgtgcacgaggcagcccagcggggtgagagcctgcagctgcaacagctgatcgagagcggcgcctgcgtgaaccaggtcaccgtggactccatcacgcccctgcacgcagccagtctgcaaggccaggcgcggtgtgtgcacctgctgctggcggctggggcccacgtggatgctcgtcacatcgaccgcagccacccgctctgcgatccccgcgcccccgggcaacatcgagcgtgtgaagctcttggctgtcctacgcgggccaacggtcaatcccctccccttggacacgaccggtccccccctgcatccacggccctgcatctgaacgggtgagctcccacccctggggtggaacgtcttcccttacccggaccttagaggcgccccatacccttacgaaatgtgtcccccaatgtgtcccacctctatggagggcatccccacttcggtctggcgtcctgccccactgcagcgccccaggccaaatacctatttctctcgcacgcagacatcgatacaccccacntgtgtcactgcccctccaaagctggcgcatccagggctgttcatccacacccgccgcgacacaagttggtgcggagtaatagaaggagcgtctatgtgcccagcgcggaaaacactcggtgccacacgccccgtgtcgacattgtagatgcgggtggcgcgagcggccccgagagaggcgggtatacaatgngtaagataatctgcgcgctgcgaaagtacactatgtcccaccccgcagagaaagaaagtatgcctcctctcacgcccccggcaccagtattattggggggagcggatgcgcaagaaccatcatcgaataaccgcattctctctgcgcgatgatcatagatacagcgccggaggcggacacagccacataaacgcacggggcaatttgttgaaagtttcacggcggaatggcgacaaagctcatcactagtcgctcccttccccactgtgtgcaaccgcgttgcgccctcccctacgantgcaccaaccctcgcttcacttttggatacccctctcttggtcgatcttttttggtttgcaccccgccttctcttttcgtgcgctcgcagatacgtctccgccgcgaaatagcgagcctgtgctcgccggcgatacgaagcttgcaaggcggttcacaccggaatctagtgccgatcataatcgagtcgacctggatcacctgtggt

SEQ ID NO: 232006 - DNA, 1040 bp, Homo Sapiens
  misc_feature (809)..(809): n is a, c, g, or t
  misc_feature (837)..(837): n is a, c, g, or t
ggaaccttcagaaagaggaagtcagatagaaatagtccctgagagcacactgtgtagctaagcctgctggggctgggtgaagaaattggcgctgagatccaggctggatccattgcttttgtttacaataggcactctctctaccccacctctcagtacttgagacttaaagtgctacaggcagctggatctgtttgcatgcaggatgaagagggttaaaacactgtttatataagatccaatctctcaccatctctaaagcagccgttggcctgtcatcagtgagatacaatccagtcttctcatgcacgggaacacacacaccctgcgtttctccctcccaggctaggaacctctctgccaccaaaggctgccatccatcgcctagtaaccacggcaacccaacctactctaaaacccaaacccaaaaaaataaaataacacatccctctttgcatgacacatttttttcttctcccccttttttggtacaccttttatttgcaatggcgttttctaaccaacttcgaaggcccacggaatcacagtggactttaggggtgggtcctaaccttggaaggcaccaaggggaataagttagcttgggggaaatctggttctcccctgtttccgggagattaaagttttcgagccagccctctccgggaaatttatacctttcggcgaaggccaccccccgcctaccccaacccgctcgtttggagaaattcacccgcttacactcaaattcgcttaacaatatgtcaccgagtttcccccccgcatggaaaactctgaaggattttggntctatttttaaagaggggcaaagaatangccggctcttcccaacatgggggcagatggcctcacacttggaaccggggctacttccccatagttcccctcccccaattacacccacacgcccactggatcccacaacctctggggttgtgcgctcttataccgccaactatgtgtggctacaacgccctcccgtgtctctcatttcttggggggtggcggcagaaacacgg

SEQ ID NO: 232007 - DNA, 1331 bp, Homo Sapiens
  misc_feature (784)..(784): n is a, c, g, or t
  misc_feature (932)..(940): n is a, c, g, or t
  misc_feature (1187)..(1187): n is a, c, g, or t
ggggagctgaaccggtctcttcctcggaaaggcagggccgaggggcctgcggggcagccatggaggcgacgcggaggcggcagcacctgggagcgacgggcggcccaggcgcgcagctgggcgcctccttcctgcaggccaggcatggctctgtgagcgctgatgaggctgcccgcacggctcccttccacctcgacctctggttctacttcacactgcagaactgggttctggactttgggcgtcccattgccatgctggtattccctctcgagtggtttccactcaaccagcccagcgttggggactacttccacatggccctacaacgccatcacgccctttctctttgctcaaggtacctgccccagggccccccactctctacctggctatcccccgttcctttggcaccacttgcgcagagacaggtggatgccctaaagccctgggtgtccctgaactccaaggcacggtctccccgcccctgcctgccctgggtgcgctgtaaaggtttgccgaacaacacccatccctgatcccccggcgccctgtcgtgtctccgcgggaaaatgggcggaatacttgccccggttggagccttggcacaggtgaataggcaaagacatatgtggctccactcatagtaacaagggggctctttttatgagagttctggggagcgacaccactaaagaacacttgggagtgagtctggactcccacaccatgagggagagggttacaacacaacgccccaatgagagagaaatgggaggccgtngcttatcctaacaggcgcggatcacgacaccacaccagtcgaaaccctctgtttaatactatgtcccccgtatggcggggcttcttgggtatggcgcccctctgcggcgatcagaacaacacgcgcagtttgtataaaaaccacctannnnnnnnngtgagccgccacagaccctctcgctagacgtgccgcatgatataaatctggttatcgacctctgggcgcaggtggtattcccacacccgggttaaagagacagcgttttccccccatggggcgccacccccccttctttcgggccgataacagtccgcccccgcgtcaacttttttatttttctatagtccccgccgccacacggtggacaccaagtctttatgcccgccccacccagttgaaaacntgagtgaaacgaatcttcttatttgccccgcttgtggcgaaccgcggcgtaaactatgacacgtcatgtgtagtaccaggcctcccccccgtgtatgggaaaatatccaggcaccgctctttggacaacctcatgtcgctgccg

SEQ ID NO: 232008 - DNA, 1243 bp, Homo Sapiens
  misc_feature (73)..(150): n is a, c, g, or t
  misc_feature (287)..(388): n is a, c, g, or t
  misc_feature (727)..(735): n is a, c, g, or t
  misc_feature (889)..(889): n is a, c, g, or t
  misc_feature (923)..(923): n is a, c, g, or t
gaaataagaaaatgggaagcaatatttgacatagttctttttagtcaaatctacttgttaaaaaaagggtagnnnnnnnnnnnnnnnnnnnnnnnnnnnnnnnnnnnnnnnnnnnnnnnnnnnnnnnnnnnnnnnnnnnnnnnnnnnnnnttcctgctgtaaatatgaactcccatcctaatacccttttacctctcagtgggcttgtcttgacctgcaaatttgggctaaaacttacaaaaaattctgacatgataactcaatgatgcttactcatacgttttggnnnnnnnnnnnnnnnnnnnnnnnnnnnnnnnnnnnnnnnnnnnnnnnnnnnnnnnnnnnnnnnnnnnnnnnnnnnnnnnnnnnnnnnnnnnnnnnnnnnnnngaaggccgagaaccacccatgacccacgctggaagccacccccgttcttctatctaagaactttccccacttttatgcttgggccgcggggtgggcttacaacgcccggttaatttcccaaggataacctcgggggaaagccctgcatgggccgagggagaaaaatcccgcctgttgtcaaactcccaagcgaaatgtgcgggtaaagtgctcttggggcgctcgccacacctggaatcacatttctctttcgcgcacacattggggtatacttccccacaaggccctgccggggggggcgcccacgtttctcaggggcaagacgtgcaagcaataagnnnnnnnnnggggggtattatgctccgcccgacggcgagagcaacactcgagagggataaatatagacgcgcgcgagaatataagcgacgcctcttgtgcatccccgttttgtccctcaccggccgcccaaggatctctcccgggggtggccccctctctttncgcacgaataaaatcgcctctttctctttaaagnaagatttgcctgtcgctcgcgctctattagtgcacgcgtccgccctgcgatgtagcacccgccactatattaggcgacaagagccgcgggcaataatactgtgggggttctagtaaaaaaggtgtcgagttccccacgccaaaggcgatatatttttccgcgcgggctattaataaccaagccaatattggcgtatatgtgcacaattctcctcgtggcgccaaaattaaaatgatataaccacctcccggcccatagtggaatatacgacgaacgtctgttctcctacagaaaccacaactgtcgattctttatggccg

SEQ ID NO: 232009 - DNA, 1304 bp, Homo Sapiens
  misc_feature (43)..(57): n is a, c, g, or t
  misc_feature (1040)..(1040): n is a, c, g, or t
  misc_feature (1264)..(1264): n is a, c, g, or t
gggtagctctctacatcttgaattggaagctggaataaagagnnnnnnnnnnnnnnnaccctcatcgaatgctgcttactttgtcaaaagactggctatgaccaaggtgaggatatttctggaaaactgggcaaaaagggaaagcccacagtattcttccttggcagtcaaccacaggtttactttacaatgatgtattaaaaacttgcagcttgacaaatggaatgcaaataaaaggttctctttgggtttgtcttaatggagttaaactggagcagcctataaaacatttttagggggatgtcctctgggtccttctgttctgcacacccactcagtcttctctcccagcccccttgactgcacacaccccctctttggcctgaagatcctcctgacttggtcgcccagccaatagaagggttccaaaagcttcggggttgggaaagctataacggcaatggcataagaacctggtcaggcccccgcccacccttaaatgaggccctaacacgttaacataatctttgttccgggcccgcccctcccggctcccttccagaaaaaaccctttttcttcaagaaccccatttccgctgttgtgggccgcccgctcgtgggcccccctattcaacgacggacaacacactgcacacacattgtggtggtccacaacagtattggtgtgtcttcgccacaaaggcgaggaaagcaccctatgtggggctcccaaagatataacactcaacgcggcggtcctatggagagacactcctccgcccctcccgcggatatgagaaaaaagaacaatcgcgcgcccccgcgcggcgggtgggacaaagcctcggggacagcgcgcgtattctctgtcagaaataacacaaaatgccccaactaaataccgtcgagaaaacgtcctctgctgaggagagtagcttatactctgcacgcggcggaaatcactcttactcacatgtttggggagaatcccccccatactgaactaacgctctctctaacgctattccgccaatttgtanccacgcgccctcttatatccatttgtgtccaccatctcacacctcgcggtagagaatattccgcgtgtgtcgtgaggccgtctcccattttatcaacccccagcctctctgtggtttcgctagaacctttggtgagagtaccgcacgctgtctctctacaccaccgagtcggtagatacgaatgtaaagaaacacgtgtagacattgtggagtcgtcggagggncgccccccgcgtatgaccaccccttccttttcaccccacc

SEQ ID NO: 232010 - DNA, 762 bp, Homo Sapiens
gggggggccgggccggggcggcgcgagcggctggagcaaggggccccgcggcagctgcgggcgacgcggtcgatggacatgggcacccagggatcggggcgcaagcggctccccaaccgggagcggctcacggcggaggacgacgcgctcaaccagatcgcgcgggaggcggaagcccggctcgctgcaaaacgggcggcccgcgcggaggctcgcgagatccgcatgaaggagctggagcggcagcagaaggaggtagaagagagaccagaaaaagattttactgagaaggggtctcgtaacatgccgggcctgtctgcagccacgctggcctctctgggtgggacttcctctcggagaggcagcggagacacctccattctccatcgacaccgaggcatccatcagggaaatcaaggactctcctagcagaagttgaagagaaattataagaaggctaatggtttcccaatggcttccgctagacaatgaaacagacaaaacttcattgtaccccgtttgatacccctaaaaagatatgttggctgggaccttggaaaaaacagcttggctgaaacctagggcggccagtacgaaagagaaaaaaccaacgaattttgaaaagggataaaacaccgcccacccattatacctggccaatttcccagcttggctggaaaccccagggaggccccttgaaacccaaagaagagggaaaatgcctcccagaaaaacctgggaataaaatccctaaaaatttcc

SEQ ID NO: 232011 - DNA, 516 bp, Homo Sapiens
  misc_feature (67)..(276): n is a, c, g, or t
tttacaaaggtataccgaggaagcagggaagcagcctcattctaaaatctatcattgccggctgcgnnnnnnnnnnnnnnnnnnnnnnnnnnnnnnnnnnnnnnnnnnnnnnnnnnnnnnnnnnnnnnnnnnnnnnnnnnnnnnnnnnnnnnnnnnnnnnnnnnnnnnnnnnnnnnnnnnnnnnnnnnnnnnnnnnnnnnnnnnnnnnnnnnnnnnnnnnnnnnnnnnnnnnnnnnnnnnnnnnnnnnnnnnnnnnnnnnnnnnnnnnnnnnnnnnaagatttgatgaccagccctgacccaacactgggaaaaaacccccatcctccccctaattaatcccgcgccatgggtgtgcgccttgccttgtgcaatccgcaagaccaaccccggagaaggcttgcagggtagtgaagaaactgcctcacaatacctaggaaggctctaaagttccccgtcgaaaacctaaaacccgccaaaatttgtgcacctttcacgcctcggcgccacacaagac

SEQ ID NO: 232012 - DNA, 1012 bp, Homo Sapiens
  misc_feature (108)..(216): n is a, c, g, or t
  misc_feature (346)..(359): n is a, c, g, or t
  misc_feature (391)..(399): n is a, c, g, or t
  misc_feature (430)..(464): n is a, c, g, or t
  misc_feature (588)..(596): n is a, c, g, or t
ggtacttagtgaaaataattctaagagatttcaccactgtagagtgaataaatgaatatgtgggattcatcaatgaataagtaaaaggatgccaactggcaaaagaannnnnnnnnnnnnnnnnnnnnnnnnnnnnnnnnnnnnnnnnnnnnnnnnnnnnnnnnnnnnnnnnnnnnnnnnnnnnnnnnnnnnnnnnnnnnnnnnnnnnnnnnnnnnttaaataaataaataaatacccagcacctgaaacttctataaccaagaaaagaaaaataaaaataccaacctcgccaaattacccccaacgcgggaggatagcgcgccacgaatataattaaacccacannnnnnnnnnnnnnattttccagcgacaaacccgttgtgaggaaannnnnnnnnacctgctaacgaatatttgttgggtgggcgnnnnnnnnnnnnnnnnnnnnnnnnnnnnnnnnnnncttttctttgtgggggccgccgcccccctaaaggaaaacacgaaacaagggggatcatatctcttctcccccacagaaaaaatcgcggcactaatacaagtgtggggtgggtttcacccacacnnnnnnnnncaacccgccgctgggggaaacagctgtggttttcaaaaaataactccacgggcggggctgctttaggaggcctctatcatggggcacattacatgcggggcgcccccccgggagagccccctatatatttaaagatctatgccccgccagttcgttttatttctccatacggagaagcgggggtaatcatttccatctataccctctcctcgccacacatgttggaaaagcctcccacaccccagggctgggagatgtgatcaatcgattcaacacgcaccccggagataacaacatcccatactggtagccccgccgcgggcgacacaaacatcatcccgcctccggggggcttaaccgctgggagccacaataaaatatgtgtgatatgtatgatgggcacagcagaacaaaag

SEQ ID NO: 232013 - DNA, 1142 bp, Homo Sapiens
gggcgcggcgggagcggaggctgctgctggcaggtggggcgcgggccggcgcgagctgaccgagcactcggcgggcgcggcgggactgcggcccgtggcgggcgtgcgcggggacctgcgctgactaggtccggggaagtttcctgactttctgagaagcccctggttttcccccaaagaagtgatttcctgataaaaaatcctggaaggtcatctcccagaaaacaagagatctagtatagtccaatgaaattaaaggacaagaaggttttccaattcaatcccctgcctatgggggatattttggtaaccaatggacctgatgtggaaaaactacatattgcagatttttattggctttccgggaaagaaacaggtagaaaagaaaattgccaatacattgaatatcccctgggttttccctctgccaagtgggccaaccagccaaatgcaacttacccccttgaaaattcaaacaggggcccttgaatatccaaccaagtaacaggataggctgaaaggaaaggatggccacaaaccgaaaggcttccttacagcaaaccacgtggtgggggggtatccccccaggcgaacaaaaaccagccaacaaatccttgacaaagtcttaaaacacccccccacctttttggaaccccctccgcaagccatcctcctctgtggaataaatgggtcctcctcagaaccactccccacagaagagatattccatggggctaaatggcctactttgtgtcttcttccatttggaagctgggaaatacaggaccggcaaacaaaaggcaaataaatgggggcttcgggcgcgtggcctattttgcccagggaaaaccccttgcgcctccattttacttacatagggttaaacaacaaactgtaaggtggccatcatgagtctttgtgggtgctgaacaaacgcctccacacactttttttctccaccttcaaccctctgtcgtgtcctctctatagatccaatatggcggtatgggcaaactactacatgtgtggtgcgactttggggggggctttgagcggggacgcgcagacaccgctatcgtaggtaaaaggggagaatacgcgtagtctcgcaacctgtgggacagcccatcttagtcggacag

SEQ ID NO: 232014 - DNA, 881 bp, Homo Sapiens
  misc_feature (268)..(278): n is a, c, g, or t
acaggatctcactatgttgccttgcatggactggaactccttggctcaagaaatcttcttgcctcagcctcccaaatagctaggactatatgcacatgctactacacctagtggaaaatgaagcacagagaagttcagtgatggacctcagatactaccagcagaaagcagaagagctaggatttcaccttaggatgtctggatccacagtctgcactcctacccactatgctacactgcctcctaacttatgaggaagcaagggcannnnnnnnnnnctggtgactaaaaagataagagttcacggatgggggcgttcctgaaaatctaaaccttatacagccctgggaaaaatgaatagttcctatattcccagactgttctcatttaaattaaacaggtttcctccgagtaatccttcccaaggggaacctggccgaaattatgtaatcggggatccaactttaacaaaacctacggcccaaagacattttttatgaggggggggcgaatccttttccctggggtggttcccgaaattatttggagcgtacccccaaaataacatttcccatttgtttattttcccgaccgggaggcgggctctcccttaacaaagataccaggggaggagcggtatagaacaattatatctagtggtgcggggcggccccttcgcggccccctccgaggataggctttctcgcttaagaacccatttttcgcttttggacgcggccacgggccccctctggatagtgtaaacagcggtcaacaatggcggtccattcaggcttgggcttccccaaagggcaaaattcccgtgggccgcactgcactacatgcgcgcttaggattactccgcgcccacaaacatataa

SEQ ID NO: 232015 - DNA, 1101 bp, Homo Sapiens
  misc_feature (225)..(319): n is a, c, g, or t
  misc_feature (353)..(437): n is a, c, g, or t
  misc_feature (593)..(593): n is a, c, g, or t
  misc_feature (952)..(952): n is a, c, g, or t
gggggcagctgagcggccgccgagcgggtgcgggtgcgggcgcatcggccatcaccgcgcggccgcgcagcggacaccgcggaacccgaggccatgtcccatgaaaagagttttttggtgtctggggacaactatcctccccccaaccctggatatccgggggggccccagccacccatgcccccctatgctcagcctccctaccctggggccccttacccacannnnnnnnnnnnnnnnnnnnnnnnnnnnnnnnnnnnnnnnnnnnnnnnnnnnnnnnnnnnnnnnnnnnnnnnnnnnnnnnnnnnnnnnnnnnnnnaagggggctacccacagggcccctacccacaagnnnnnnnnnnnnnnnnnnnnnnnnnnnnnnnnnnnnnnnnnnnnnnnnnnnnnnnnnnnnnnnnnnnnnnnnnnnnnnnnnnnnnttatggacagcccacagggtctttcccagggacaagaacccctgacttccccccaagtaatgggaaacctaccacaggagggaggggtcccccccattccctacttatggaccaaaccaagggaacttctccccttggcccaacccaaacctgggngaatgggaacaaaggaagccattctccgaaacaggggtcctctttccgatgccgcgccaaaagggggcgagttttcacctaaagtggcggcttgaaaccctttaggcaaagccttgggttccgcgtggaacccccctggttccccaccgcggcgcgggtcttcggcggttctcgaccttttttctggtctcacgcgggaagaggtcagacaacgggcactaccttgcgtcctcggcagaaaaatacagtgttcgttagggagcccccacgcatagtgtggcgggccctacatggcccgcgcgcgcctcctcttacaacaccttggaccccaagagtgcgcccccctcacaccaccgctntagttgcggagggggcaccattctctcaactcagtaaaaacagcacccaccccgctggagaactcagatctagttagccaactgactcactcggactcacccgtcgcccccatactagcgactcgtgcgtcgaaaaagacgggcgtggg

SEQ ID NO: 232016 - DNA, 913 bp, Homo Sapiens
gggagttcggcccaatggcggcaccgctgcttcacacgcgtttgccgggagatgcggccgcttcgtcctctgcagttaagaagctgggcgcgtcgaggactgggatctcaaatatgcgtgcattagagaatgactttttcaattctcccccaagaaaaactgttcggtttggtggaactgcgacagcagtcttgctgaagtaccaaaagggtgacacaaatgactccgagctgtcgaagaaccagccgttacatccagacataaagagattgccttggccgaatagacacgtcccacagtactggaagagtatttggctttcccggcaatcttgtatcagcacacactgccttccctcagacccgcgtctcagcatgatcgcttcccatcttgttgcctccccccgagtgactattaaggaaggcgacgtacatgtttcagattctgatgatgaacatggatacttccttcctgcaaatttttggaaaaggtcacagaagcccttgccaactaattagcctagatatgtaccccccgaacccccggggccttctccttggccaaataccgggtggaaaaaaatttcccatttggtttcgaaaccctccacagaagaacaccggcacactgttcccccctcccccaaccttaacccaacgggaattaagggtattctcttttcacccccccgtaagggaattggaaacttccggggaggccttcattaattcggaaaacaacccaacctccaaagcttggtgctcggggaaagtgccattccccggggcacggcgcatatcgtgaagcactgccttgatattaaaaaccgcgcaccctcaaaaactttggtgaggggggaaaatagaaatcccacccccaaaaagggaattcggctctcatataatggcagaga

SEQ ID NO: 232017 - DNA, 885 bp, Homo Sapiens
  misc_feature (306)..(353): n is a, c, g, or t
  misc_feature (812)..(812): n is a, c, g, or t
  misc_feature (841)..(841): n is a, c, g, or t
cttgctgccgccgtgctccccacccagggtggcatccttacgagcaccgggccctcctgaggccgagattatacccctgccacccgtccatgccaccgcccacaacatccccccgaactacctgacagctcctctcggcactgcccccttcttccgccccccccaccactgcatccccgcgcgacttgtggcgccgcatgtcgccgggcgggccaggaaccaaccgccttggtaccgtcttccccgcacgcacacggtcctctcagcctacccccgcatcttgccccttttcatgcggccacgcgnnnnnnnnnnnnnnnnnnnnnnnnnnnnnnnnnnnnnnnnnnnnnnnnagctaccgacgagaaccgcgaggggtcgtccgccctcgcccagcagcccactacaacgaggtttgacctcccgcgcgccgcgccgcccctctctgctgcttcgcgctcgggggcaggaccgtcgcctgaccaccgccctcagagctctgctcactgcctcgatactccggccctatgcgagacgcctcccgcaccactgacttctcttctcctggccccccgtcgtcggtacacctcatgtcccgatctcggccggctacggccgcctccgctgccgcccaacggacgcagctcccgtctcgtctccgcgcactccagggccacgaccgcgatccgccagcgccaccctccctcttacgatcaccgccgcacctcttctgtactgcctcgctatacatacagtctgcgcacccctcctcgctccgcgccttgcgctgtctcacctcacgtcgcgcggcnccggttgcgaagttcatagtcacctctcnggctctcgctacgccgacatatagcgctcccatacgttgacgcg

SEQ ID NO: 232018 - DNA, 882 bp, Homo Sapiens
  misc_feature (332)..(501): n is a, c, g, or t
gggagtgaaaacgagatgctgtctcttagggactaaggaagctgtctttcctcttccgacatttgctgactggtcgatgctagatgatcttgagaccctgtgctgaggactggagaactacaggaaaggagtagtatctctgaattatcgtgtggaaggtcgcttgtctagcccctgatgactgtgagcctcttcctcctgcttgccacctctcagtcacaagacggctgctgcgactcaggctcatgtcccaattcaaggcagcaagaaggccatggagcggcacctgccagcagatgcccctgcaggccatctctccaggctcaggaacnnnnnnnnnnnnnnnnnnnnnnnnnnnnnnnnnnnnnnnnnnnnnnnnnnnnnnnnnnnnnnnnnnnnnnnnnnnnnnnnnnnnnnnnnnnnnnnnnnnnnnnnnnnnnnnnnnnnnnnnnnnnnnnnnnnnnnnnnnnnnnnnnnnnnnnnnnnnnnnnnnnnnnnnnnttggctggctggggggctgcccatttggaataccagcctactctcaaaggctgagggctggagggatccctttgcgccccgaggagtgagcttttgaacactccccattgggtttgtccggcctcaggggaacgaagcaagggccctggccctccgtacactacgcgacctagcaggcaggggacttccgcctgcgcaaatgcccggacccgctattcatcttttgttcttgtgcggggcgcgcctgttgcgcccttcgggaaatctcttcttaaatacctattcctgtttgggcgcgccccggcctctcagcagggaacagtggagcccgcgggtcacagactccggtattctccaacgcacaccctgggatctcggcgg

SEQ ID NO: 232019 - DNA, 728 bp, Homo Sapiens
  misc_feature (147)..(560): n is a, c, g, or t
gacttttggtggtggtggggaccatgcccaggattgggctctctccatactgatgaggattcttcttgttttgatgaccaacccccaagcagaagctttatttattaacatcacttcaaaaataacgtatcaaaggggcaccctagnnnnnnnnnnnnnnnnnnnnnnnnnnnnnnnnnnnnnnnnnnnnnnnnnnnnnnnnnnnnnnnnnnnnnnnnnnnnnnnnnnnnnnnnnnnnnnnnnnnnnnnnnnnnnnnnnnnnnnnnnnnnnnnnnnnnnnnnnnnnnnnnnnnnnnnnnnnnnnnnnnnnnnnnnnnnnnnnnnnnnnnnnnnnnnnnnnnnnnnnnnnnnnnnnnnnnnnnnnnnnnnnnnnnnnnnnnnnnnnnnnnnnnnnnnnnnnnnnnnnnnnnnnnnnnnnnnnnnnnnnnnnnnnnnnnnnnnnnnnnnnnnnnnnnnnnnnnnnnnnnnnnnnnnnnnnnnnnnnnnnnnnnnnnnnnnnnnnnnnnnnnnnnnnnnnnnnnnnnnnnnnnnnnnnnnnnnnnnnnnnnnnnnnnnnnnnntattaagggaaaaggagtacttgtgggatgaaagcaccagctaaccggtcgtgggatttccttaaaacctaaaattttggggccatttccttgcccctcaaatccttttttctgtaaccccctttaaagaacccgaaaaacaacctctgaaagtcccctttggggttt

SEQ ID NO: 232020 - DNA, 598 bp, Homo Sapiens
  misc_feature (55)..(356): n is a, c, g, or t
  misc_feature (417)..(529): n is a, c, g, or t
ggatacagttgaacagccaaatggaaaagatgtgtagggcaagtcatggtggaannnnnnnnnnnnnnnnnnnnnnnnnnnnnnnnnnnnnnnnnnnnnnnnnnnnnnnnnnnnnnnnnnnnnnnnnnnnnnnnnnnnnnnnnnnnnnnnnnnnnnnnnnnnnnnnnnnnnnnnnnnnnnnnnnnnnnnnnnnnnnnnnnnnnnnnnnnnnnnnnnnnnnnnnnnnnnnnnnnnnnnnnnnnnnnnnnnnnnnnnnnnnnnnnnnnnnnnnnnnnnnnnnnnnnnnnnnnnnnnnnnnnnnnnnnnnnnnnnnnnnnnnnnnnnnnnnnnnnnnnnnnnnnnnnnnnnnnnnnnnngcatatgaaaagataccacaataggggataaagaccaaatatatattttacaatatcacannnnnnnnnnnnnnnnnnnnnnnnnnnnnnnnnnnnnnnnnnnnnnnnnnnnnnnnnnnnnnnnnnnnnnnnnnnnnnnnnnnnnnnnnnnnnnnnnnnnnnnnnnnnnnnnnatcctttgaggaaataatttaaaaaaagttattgaaaggaattggcttggcctttctccttggatggga

SEQ ID NO: 232021 - DNA, 945 bp, Homo Sapiens
  misc_feature (636)..(636): n is a, c, g, or t
gggggcgtccgcagctggggcttggcctgcgggcggccagcgaaggtggcgaaggctcccactggatccagagtttgccgtccaagcagcctcgtctcggcgcgcagtgtctgtgtccgtcctctaccagcgccttggctgagcggagtcgtgcggttggtgggggagccctgccctcctggttcgccctccccgcgcactacaacgagcaagggaggagcgagttactatgagtctgctaaactgtgaaaagagctgcggatccagccgccctgagactgactgctgtgtggcgatggccggctcctggacggctgcaagcacagatcagagggggggtcgaagcgcgagcgcgagcgaagcgcggccggctgagtgggggccgcggagccaccggggactcggctacgccgtgtgaccgcacgctcggggacggccgtctggcaaccgccgcaagcacggtcgacgcgctctctcgggacgggcgcccggtcatacttgctgtccgtcgctcgttcggcttcgtgcgcaccgccttgctggcgcgcgtgcggtcggagcgcgcgcgggcagcgggtcggggcgcccgtaaagttggttgcggacgcacactgggggcgtgtcggaatatcgatngccccccgacggcgaggggtgcgacgccacaaaccgcccaacactctgtgtcttgtggcgcggtctcgtgcgaacgtgcaggcccccggtggcgctgacgcacagccgctgcagaggttcacgtgggcgtcgcgcaggaaggccgttgcgtgacgggtgatgtccgcgcgcagccgctgcctgtagaggtccggcaccgcggtggtggccgcgtgcggcggccgctcgcgggactgcccgcgaccaagaatctcgacgcgcgcgcgctggagcggagggagcgcagcgttagcagcgcgcggccgcccc

SEQ ID NO: 232022 - DNA, 792 bp, Homo Sapiens
  misc_feature (55)..(108): n is a, c, g, or t
  misc_feature (377)..(418): n is a, c, g, or t
  misc_feature (601)..(688): n is a, c, g, or t
acccactgctcctcccaccagagcccccgcgcggccccgggtctcccgggcagcnnnnnnnnnnnnnnnnnnnnnnnnnnnnnnnnnnnnnnnnnnnnnnnnnnnnnnaaaggtcccaggaaggtggcgtcagcatctgcagccgcgtcgacgttgtcggagcctccgcggaggacccacgagagccggactaggaccagcgccccggggcccccccacactccccatggagacgccgcccggcctgccaccagagccccacagggcctccgccgggtccgggcccgtgcagagctgcccaagaggtccggaacgcccaggggctcttgcaggctcccccgcgacgcgcgcggcccgctgcccggggcgcccgcgannnnnnnnnnnnnnnnnnnnnnnnnnnnnnnnnnnnnnnnnntctgcgtcgccacggagctggtccgctagctgagccctccgcgcggcgcccgcgccgccctggcagcgccgcgcggaactatcctccctcccccccgtcccgcgcccacgatattcatcgcccgtgtggcggcaggaccccgccattccccgcgccgggaggtgaatgcccgggacaccgacnnnnnnnnnnnnnnnnnnnnnnnnnnnnnnnnnnnnnnnnnnnnnnnnnnnnnnnnnnnnnnnnnnnnnnnnnnnnnnnnnnnnnnnngtcgcacccgccgcggctcgttgcgccgccctcggcggcccctcttactctccgggcggtgcgccgccccccgccggtcccgcaccttcttcccccctccgccc

SEQ ID NO: 232023 - DNA, 773 bp, Homo Sapiens
  misc_feature (49)..(295): n is a, c, g, or t
  misc_feature (323)..(364): n is a, c, g, or t
ggaagcagtggtacaacgcacagtgcccattacggccggggaaaacggnnnnnnnnnnnnnnnnnnnnnnnnnnnnnnnnnnnnnnnnnnnnnnnnnnnnnnnnnnnnnnnnnnnnnnnnnnnnnnnnnnnnnnnnnnnnnnnnnnnnnnnnnnnnnnnnnnnnnnnnnnnnnnnnnnnnnnnnnnnnnnnnnnnnnnnnnnnnnnnnnnnnnnnnnnnnnnnnnnnnnnnnnnnnnnnnnnnnnnnnnnnnnnnnnnnnnnnnnnnnnnnnnnnnnnnnnnnnnnnnnnnnnnngtgtgagccgccgcgcccggcctatgcnnnnnnnnnnnnnnnnnnnnnnnnnnnnnnnnnnnnnnnnnntcgtttaaggatatttattattgtccctggactcccggagtgcctccaaaggacaggggagtgcatatgtgatttcgattccttcctcacttcccggatttgatgtcagagaagtctgacatcagtctgaagtcggcccttggtgggtcagccttatcgcttggtccaactccccctgtctttgtgcttaatgaaaaatgacccccgtattttataaaatattccacatttcctttaagcctctgggctcttggggcgaattttggggtagaaacttacaagctccctcctttggggttccccttaaggggtttggtccccgggtaatttaaagcctcccccttcacccctgggaattaacaagccaaggtgggtttaatttggccccctccccaggcccaatttttgg

SEQ ID NO: 232024 - DNA, 767 bp, Homo Sapiens
  misc_feature (271)..(312): n is a, c, g, or t
  misc_feature (408)..(505): n is a, c, g, or t
catttatgaagtagggacctggaattgaagagactcctaaaggagagacagaagtttgaaagagcaagaagagtggatgtggatccagacagaaaaagagaacagcaaatatttgaaagagcttaagacgtactcctcaaggtaccacagatagaagccttgagaagcttactttggtcagaaattttgcctttgtctgcaggcttctaccagttcgattccatctgtgggtcttaggtttcagttacctgaagtcaaatgtggtccaatnnnnnnnnnnnnnnnnnnnnnnnnnnnnnnnnnnnnnnnnnngcagaatattttctggtagactgatatatttctcctaaaaaatttggaaaaattttgtgatgaagaagctacctgggcctgaagatatcttttctnnnnnnnnnnnnnnnnnnnnnnnnnnnnnnnnnnnnnnnnnnnnnnnnnnnnnnnnnnnnnnnnnnnnnnnnnnnnnnnnnnnnnnnnnnnnnnnnnncttgtttctgatctgcgtgggaaagaattcagtatttctccatttaatatgacattagctatagattttttatatgatattagctatagattttttataaaaggccttgccttaaagggaagaagctttctttttcttcctaatattctggatttttttatcatagaaaatgttctcatctaaatttattcgaaaaaataatttccaaaaatgtgggggccaggccccggtggctctccacctgcaaaaccccagcaacttt

SEQ ID NO: 232025 - DNA, 796 bp, Homo Sapiens
  misc_feature (331)..(373): n is a, c, g, or t
ggggtcctttttcatttgtctgcttctcgctcccttccgtgttctgttccctcttcctccctcttccctgggcctgtttctcgctgtccctgtcttttatccttctcatctgcctcttttttgctcaccctgtttctcactgccctcccctccgcctttctcacccctctgtccttttgagctcttttttgctctgtctcttcatttgccttttgcactctcaaactctttcatcttcccattcgctgtctgtatttctccataactatatctttcttcctctgtctccgcccacccacatttttctctttccctttctctctttggggannnnnnnnnnnnnnnnnnnnnnnnnnnnnnnnnnnnnnnnnnngtcttctcatccctccattcccatctttccccagcaattaccagctctggctgggtcgccacaacttgtttgacgacgaaaacacagcccagtttgttcatgtcagtgagagcttcccacaccctggcttcaacatgagcctcctggagaaccacacccgccaagcagacgaggactacagccacgacctcatgctgctccgcctgacagagcctgctgataccatcacagacgctgtgaaggtcgtggagttgcccacccaggaacccgaagtggggagcacctgtttggcttccggctggggcagcatcgaaccagaaaatttctcatttccagatgatctccagtgtgtggacctcaaaatctgcctaatgatgagtgcgaaaaagcccacgtccagaaggtgacagacttcatgctgtg

SEQ ID NO: 232026 - DNA, 1191 bp, Homo Sapiens
  misc_feature (173)..(282): n is a, c, g, or t
  misc_feature (340)..(348): n is a, c, g, or t
  misc_feature (353)..(416): n is a, c, g, or t
  misc_feature (933)..(1001): n is a, c, g, or t
  misc_feature (1027)..(1027): n is a, c, g, or t
ggcaagctaatcttgtagctaagctacctaatcctctgaaaactgttttctctgatttgtatttagattcctccccccattattcacaatcatattgtattgtcggaaacccccccaatgggccagaagcaggtttggctttggaaaaataggtggtttttaaaagcttaatnnnnnnnnnnnnnnnnnnnnnnnnnnnnnnnnnnnnnnnnnnnnnnnnnnnnnnnnnnnnnnnnnnnnnnnnnnnnnnnnnnnnnnnnnnnnnnnnnnnnnnnnnnnnnnattacttcccccgcggggccgcacccgaccgctagcacggggggcccaactccagggnnnnnnnnnggtannnnnnnnnnnnnnnnnnnnnnnnnnnnnnnnnnnnnnnnnnnnnnnnnnnnnnnnnnnnnnnnaggcccgcgcgccccggggctgggccccgccgcgccaatctggggcccgatgacgcgccggggcccgccgcgagtcaccccacacccgcccacgaacgcagcgacccagatccacgcacgtcccgcacccgacccgcacgtcccggccccggcgtagattgaactatagcccacaccgtcggggcgcatgatcgcctccctgtggtcgctcgcccccggcgccgccgactctcgagtgccagacgcgcagccccgcccgctagtgtatcacgcaggtcgaccgaccggcccgctcgcccgtagccgtatccgcccgcgctcgctcacgacacgccagtcgggccgcgatgcgagggcggcgcctgccgcggggaggcacgcccccccgggcgtgtgccgcggcgcgccgccccccacgtaaccgcgtatcgcacagcgcgcgcaccgggggtcgcgctattgattgtgtgcgcccgcaccgcgccccggagccccgcggaccgggggcgcggcggtnnnnnnnnnnnnnnnnnnnnnnnnnnnnnnnnnnnnnnnnnnnnnnnnnnnnnnnnnnnnnnnnnnnnnttgtctctgatcccgcgccccatctntactcccgacgctgcggggcatcttccgcgcatccctgtcctctgcatcattcgcggcgacatccgccgagtgatgacacctcgcgcccgccgccttcgcgtttcccgcgcaatctatctccggtccgccgcaccgccgcccccgcccggaccatgccgtgcgc

SEQ ID NO: 232027 - DNA, 1062 bp, Homo Sapiens
  misc_feature (77)..(126): n is a, c, g, or t
  misc_feature (199)..(252): n is a, c, g, or t
ggggcttccggtcgtcgtcgtcgccgctgctgccgctgctgttgctcctgaggctgctggctgaggccggaggatcnnnnnnnnnnnnnnnnnnnnnnnnnnnnnnnnnnnnnnnnnnnnnnnnnngacgagggaacgggaggaagcgagcgaggaccgcgcagagcgcgcttttccgtccgcctgaggagccgaagcnnnnnnnnnnnnnnnnnnnnnnnnnnnnnnnnnnnnnnnnnnnnnnnnnnnnnngtccaccgacatgtcctcggcagccggccgcgggcgccagccccaggcagagccgcgccatccccaccggcaccgtggccatcagcgacccccgcgccggctaccttcatgacctattggcaccacgccccgggggggaccactcgttcttccaccacacgcggtaggaaacgtcgaatcccttctatgaccggaacggtttccggggggggattcgtgcaccaaattcctccccatgggggcctcacgaaccccgcacccgcctggcacctgctggccgcaacattatggccccaggggaggtcaactctatggccccccggcgccaccccctttacaatttggcaaggcgagcttccccgtcacggtatcgggaagccgacagacccgccctttttttggacagcgaaagcctgggtaggaagtacaaatctcaccctgcgaccgagcgcgaacaaaaacagctgggccaaacgctcgggcgggccgaatggaaatggccccccgcgcgggggtcggcaactgctggggcggaacgtgtccttggggaattgcgcttgtcccggggcacaggcgggcatttctcaataacgccagacgaggtcctacgtcccacgaccccctctttgcgctaccccttgggacgcaggggtccccgccccccagagatgttggtgcgggcgcatcctagagcggaagtgccataccctagtgggggagagaacggtgagcggcgcgacgcggcgcgtggctcttctcgtcccgcgaggcacgaccgcccgcctcgtggtaacacagcctcccccccct

SEQ ID NO: 232028 - DNA, 825 bp, Homo Sapiens
  misc_feature (196)..(298): n is a, c, g, or t
  misc_feature (387)..(531): n is a, c, g, or t
  misc_feature (567)..(640): n is a, c, g, or t
  misc_feature (718)..(727): n is a, c, g, or t
gggaacgccttttagggatgtttctgggggaaaggcctgaggttctccaggagggtctgcagctagggtcggccgtgggggctcgcagcccgcgggaccaccggacctgcaagcgtccccctgccccgcccccgcctcggcgctctgagcaattggactctgccagctctaactccggcgggactctgaaactcannnnnnnnnnnnnnnnnnnnnnnnnnnnnnnnnnnnnnnnnnnnnnnnnnnnnnnnnnnnnnnnnnnnnnnnnnnnnnnnnnnnnnnnnnnnnnnnnnnnnnnaccatgccctgcctgcagcttcttcttgaagtgttctggacttggaagatttgttgaattactatgaagtcacatctaaagtttgaaannnnnnnnnnnnnnnnnnnnnnnnnnnnnnnnnnnnnnnnnnnnnnnnnnnnnnnnnnnnnnnnnnnnnnnnnnnnnnnnnnnnnnnnnnnnnnnnnnnnnnnnnnnnnnnnnnnnnnnnnnnnnnnnnnnnnnnnnnnnnnnnntcttactggaacctctgcctcccggattcagccggnnnnnnnnnnnnnnnnnnnnnnnnnnnnnnnnnnnnnnnnnnnnnnnnnnnnnnnnnnnnnnnnnnnnnnnnnnttaacccggaaatgctggtttcaccccgggtggcccagcgctgggcccttgaatccccctgccccttcctggatcaannnnnnnnnntcggcctttccccaaaagtcggcatgcgggacattattggggcgctttaatacgcaaaagacagcgcttcctgggggcccctttccaaacattttctt

SEQ ID NO: 232029 - DNA, 767 bp, Homo Sapiens
  misc_feature (52)..(309): n is a, c, g, or t
  misc_feature (374)..(388): n is a, c, g, or t
  misc_feature (413)..(648): n is a, c, g, or t
ggaatttatagtagtatatttacatttttgttgttgttgttctgagatggannnnnnnnnnnnnnnnnnnnnnnnnnnnnnnnnnnnnnnnnnnnnnnnnnnnnnnnnnnnnnnnnnnnnnnnnnnnnnnnnnnnnnnnnnnnnnnnnnnnnnnnnnnnnnnnnnnnnnnnnnnnnnnnnnnnnnnnnnnnnnnnnnnnnnnnnnnnnnnnnnnnnnnnnnnnnnnnnnnnnnnnnnnnnnnnnnnnnnnnnnnnnnnnnnnnnnnnnnnnnnnnnnnnnnnnnnnnnnnnnnnnnnnnnnnnnnnnnnatgagccactgcacctggctatatttacatttaatagaaacatatctagcatatgtatatgtgannnnnnnnnnnnnnngagaccgagtctcactctgtcaccnnnnnnnnnnnnnnnnnnnnnnnnnnnnnnnnnnnnnnnnnnnnnnnnnnnnnnnnnnnnnnnnnnnnnnnnnnnnnnnnnnnnnnnnnnnnnnnnnnnnnnnnnnnnnnnnnnnnnnnnnnnnnnnnnnnnnnnnnnnnnnnnnnnnnnnnnnnnnnnnnnnnnnnnnnnnnnnnnnnnnnnnnnnnnnnnnnnnnnnnnnnnnnnnnnnnnnnnnnnnnnnnnnnnnnnnnnnnatgagccaccgcgccctggcctgtatatgtgatttcctaaaaaatagatgcctgcctatggttaacattgaatagtccaatcacttaaatgaaagaggcttcctctaaccaggggttta

SEQ ID NO: 232030 - DNA, 254 bp, Homo Sapiens
atgaaccaccatgcctggactattgccattttcagtgttgtgtccagtgatgtttccttcacacccaagaagtcctcaggggattcatatatgggattgtgaaaatcctctagtgacatggaaaaggttctggtgtcatggagaaaagaagaaaattgggatgccctggatagccctgaagggttttttgggaatggaagggactttggcatttggccaaagaaattgggaaaactgtggtaaatccccggatt

SEQ ID NO: 232031 - DNA, 783 bp, Homo Sapiens
  misc_feature (349)..(662): n is a, c, g, or t
  misc_feature (689)..(689): n is a, c, g, or t
  misc_feature (700)..(700): n is a, c, g, or t
  misc_feature (704)..(706): n is a, c, g, or t
ggggcgcactctcggaggagcagatgcgggagaccagcctggggctgctgacgggctacctggggcccatcgtggacgccatcgtgggctccgtggggcgctgcccgcccgccatgcgcctcgccttcaagcagctgcaccggcgagtggaggagcgcttcccccaggccgagcaccaggtgcgccaggatgggaggctgaggctggggacaggccggagcttgtccggggtcactcggaggagtcaggacagaactgtgaccagaacctaggctgccggcactagagcattctgtcctggcagaagtggggacagcgttcctggcagggtccgggtcccaagaatgannnnnnnnnnnnnnnnnnnnnnnnnnnnnnnnnnnnnnnnnnnnnnnnnnnnnnnnnnnnnnnnnnnnnnnnnnnnnnnnnnnnnnnnnnnnnnnnnnnnnnnnnnnnnnnnnnnnnnnnnnnnnnnnnnnnnnnnnnnnnnnnnnnnnnnnnnnnnnnnnnnnnnnnnnnnnnnnnnnnnnnnnnnnnnnnnnnnnnnnnnnnnnnnnnnnnnnnnnnnnnnnnnnnnnnnnnnnnnnnnnnnnnnnnnnnnnnnnnnnnnnnnnnnnnnnnnnnnnnnnnnnnnnnnnnnnnnnnnnnnnnnnnnnnnnnnncaaataaatacccataattaaaaaacnaggtaagcagngggnnngttttccttgtcggggccgccctcggcccctccaaaaaacttttctaaaaccatttcggttggggcgcccggggccc

SEQ ID NO: 232032 - DNA, 196 bp, Homo Sapiens
  misc_feature (124)..(135): n is a, c, g, or t
tgccctaccacgcttccttaaaaatgcaagggctttctcctaaaattacccccaactggaactggccttgaacctggccttacccctttgggaaagaagtgtttcccaatcccccgtgttttcnnnnnnnnnnnnggggtttttattttccccccaccaaagaaaacccaaccccaagggtaaaaattttgggggg

SEQ ID NO: 232033 - DNA, 1026 bp, Homo Sapiens
  misc_feature (498)..(510): n is a, c, g, or t
  misc_feature (867)..(916): n is a, c, g, or t
gggattccactggccagaggcagtcttgggaggatttgtgttctggtttattcaactctggcaaatggtcaccgagccggcagtcagctttctgggagtgggagatgatggggaaagaggaaagaatcgtccgctcgccggaccctggcttggagaagttctgcgctccgctgggactctgcgggccctttgcgtctacagacctatccctgccccgactaccccttcactcagacccagaaagatccgctatgccgccacccaccactccccctgcgtgacacttaggagtatgtaattattatggttattatttttgctgtttccttatctccaagcctaatattcatggctgctgtaccccataaatcgctcacactaatgagtcaccgaaagatgctgcccaaggtctctcactttacaattggctgccggcgccgccgaggacctctctctccgcgtttttgggcggctcgcttggctcccctcgctcgcccnnnnnnnnnnnnnatcttatggaaccccccgcgaaatatttgaatcaatagcccggccctgtcccccgtctcttggtggggtaattcctttttgggcagggccttttatccccctgcgtcgggcggcgaatctctcctgtaaaaccctattccaccccccccacccttggtcccctagggcggaccaatttccccggggctcccccaaccttttcccttccacgtcccaaacaggtccccgtaggaaatagcgcggagacccgggccagaaaaaaatacccccctagagctctaccgaacaaaatctcaccgcgttgtttcccacgcccggtaaaggaccgggccactcctccttccccacttggagaannnnnnnnnnnnnnnnnnnnnnnnnnnnnnnnnnnnnnnnnnnnnnnnnngcaaaatccctgagtgcggggggggccctggcaccagacttcttaatatcctcccgcagggccacagcgacctctcccaccccgcggactcgtccgcgaaagcggtgtgt

SEQ ID NO: 232034 - DNA, 967 bp, Homo Sapiens
  misc_feature (280)..(337): n is a, c, g, or t
  misc_feature (352)..(404): n is a, c, g, or t
gggtccactcctttcacatctcacgttcctagatagcatcatctactcccatggttctaactgcctcttaggaccccaaagtctgtacttccagtttctcccttactattgatcttcagaatgtctctcttgctagctgtgaaaatgagtccatctggatgtcccctagaccttgtctacccaacaagtccaatgatatcacttagttgttcaaggtgaaaaatccaatcagacacccactctgtcaccgatactccacttgaaagccccaaggggtgannnnnnnnnnnnnnnnnnnnnnnnnnnnnnnnnnnnnnnnnnnnnnnnnnnnnnnnnntatctactcaatcannnnnnnnnnnnnnnnnnnnnnnnnnnnnnnnnnnnnnnnnnnnnnnnnnnnntatctactcaatcactcattgaatggattaatctgccctctcccccttgctgacatacatgtaggccaaaccttattacctctttgggaaatcatggtcctaccctccaacccaacccctttcctgccctctagaaagcccccaggcttccccttggcccttcgtcttccgggtccaatcctaaatacactgggcgttacccactggaaacctaaaaatgggtggaaaattctttctgggaccctcgtatacgcacgagcccatatcttgccgtgtgccctgcccggggggccacctagcagacgtatatagtccacataccacgtggaagaaagcattaatgttttccactctcctgtaggccgtccccccaggccctgtgggcagagcccccagtgggaagcgtgaaacatacccagcgatctaccatgggtagaacctatgatacacccttccctggggggggtccacagacgggcgatatttgcgcggtggccgctcgtgcgggacgcccccccgcacgcaaaaccccgggggccataaaaccccgcgccccgtgtctg

SEQ ID NO: 232035 - DNA, 327 bp, Homo Sapiens
  misc_feature (250)..(250): n is a, c, g, or t
atgggggagaactccggtcctcccacctaaaaataccgaggaacaaattagcttggggcgaggctgggtaacgcccccttgggaattcccaaacgtactttggggaaggcctggagggcaccaagaaatcacttttgaacccccgggaaggcacaagggttccccagcccagacccgcaaatttgtgccccccttgggattcccaagcccctggggacgaataataccccaagaaacccggcgccctctngtaagacccccagcccggaaccaagtaaacttttgctataaagggtttcccgcagccgcacccacccccctgatatt

SEQ ID NO: 232036 - DNA, 1017 bp, Homo Sapiens
  misc_feature (666)..(674): n is a, c, g, or t
  misc_feature (726)..(738): n is a, c, g, or t
  misc_feature (976)..(976): n is a, c, g, or t
ggggtccctcttcctaggatagcgttgcgcgcatgcgccttgacgagtgagccggggagccatggacaactgtttggcggccgcagcgctgaatggggtggaccgacgttccctgcagcgttcagcaaggctggctctagaagtgctgaagagggccaagaggagggcggtggactggcatgccctggagcgtcccaaaggctgcatgggggtccttgcccgggaggcgccccacctagagaaacagccggcagccggcccgcagcgcgttctcccgggagagaaatattattcatctgtgccagaggaaggaggggcaacccatgtctatcgttatcacagagggcgagtcgaagctgcacatgtgcctggacatagggaatggtccagagaaaagacagaacaaagacctccccttggtcccctggaggcagctatcaaatatcagagcatgctccagaggcatcccagccctgcttgaaaacatctctaaaggaccctctacataggaagtattatccaggggaccctatttctgtcccttgtggggcctccaaatggacttttaacccaagcaaggacctccctggtggggtaagccagctttggattttccttgggaaccaaaaggccggtggggaaccctgggggcccttttcccccgtnnnnnnnnnaattggtatggaacccattttaccctgtgccaattccacgcatgccccaccnnnnnnnnnnnnncagggctccgcgaaccaaattccaaagcccccctgggaaatggaatttcccctttaagtttcccccagccactagagagtcggcagtacggaacagagccattgcccttggttgcggcccggccctctccggcacctccccagaaaaagtttttcctctaaaaacactttccccttttggcgccccgcgcggggcccccacgtaaagggaaaaatggcaacactgggggcccctaaanatgcggttcccccagaggaaaaaaccctgggtcacacagaa

SEQ ID NO: 232037 - DNA, 1018 bp, Homo Sapiens
  misc_feature (619)..(628): n is a, c, g, or t
gggggctgtgacagccacacgccccaaggcctccaagatgagctacacgttggactcgctgggcaacccgtccgcctaccggcgggtaaccgagacccgctcgagcttcagccgcgtcagcggctccccgtccagtggcttccgctcgcagtcgtggtcccgcggctcgcccagcaccgtgtcctcctcctataagcgcagcatgctcgccccgcgcctcgcttacagctcggccatgctcagctccgccgagagcagccttgacttcagccagtcctcgtccctgctcaacggcggctccggacccggcggcgactacaagctgtcccgcctcccaacgaagaaggagcagcctgcaggggcctgaacgaccgctttggcccgggctacatagaggaaggtgcacctaccctggaggcaccagaataaaggagattgaggccgggagatccaaggcggctgcgggcaaaaaaccaggccctccgccacgcccccaggctgggggcggacgccgctaccgacccaagggaggaatcccggcgaaaggcttgggggccggcccaacccccttggggaagaattgggttgaaaaccccacggcagggaagggggcttccannnnnnnnnncaagactttggggaaacttccggtgaacccccacccccctgggggaaggggaaaaagaaaaatttccccaacccgggggttctcacaaaggggaagccggcctttttttaaagagaaaggaaaaggccccccgcgctttggccggcccaaaccgaacccttttgaaggggcggggcccattccccggcgtcagccttgggcgccaaaagaaacatctcccagggagggcccgtctccctggggtccaaggggcgaaactcgggaacaaaaaaagggggccaatccccttgcaaacaatagaagggggcccctttcctggcggagacaacctactaaggaaggaagggggcccgaaccttctgggcccagaaacccaggcttcgaacatta

SEQ ID NO: 232038 - DNA, 1142 bp, Homo Sapiens
  misc_feature (255)..(290): n is a, c, g, or t
  misc_feature (961)..(1004): n is a, c, g, or t
gggggggactaggagcgctctgccgacgtcagcttttgtctccagtattttcgggggctggtggacgcgtgggcgatagggtgctgtccttggggtgctgtgtatatgggatgatgacgcttatcagcattatctagtcctttccaccccgaaattcgccccgattaaagactgtgttgcattatcaggtaatgagatgtgagggagggtctttgaaagtggaaaacctgggcgtcgaggccactgtgccatctnnnnnnnnnnnnnnnnnnnnnnnnnnnnnnnnnnnnatgtaaagctgctatgtaaaatgtaaagctctacataaaccactctctgcattactttggatatatgagaatattaacgtttgacgtctacgagactagatcccattcgagcatcacctcccataaccttacagactaacccccgtcttttaaatctcagtgggtccgtaatccttacagacctaaccccctccttttaatggtctcaagggggttccttggcagcctgggcttttttggttttccatttaagcttcctccaattttcctgtgcaactgggctgccttttggtcctttttaattttaaggggaaacctccttttaaatgggggaattagggccttttttgggggggtttctcttccttaagcttttggcccaggggatcgccttggaaaaaaacaccaatggggcccttggctggcgaaattttttgcgcttggggccttttttccccggcgaacgccttttcatttctccttaataaagggagaaaccacggggggtaaacctctccccaaaaacacgctgtccgaggttggggggttttttacccacgcgtccaccacagtaaaagagcttttttaattttttccctcccacattccccacggcgttggagaactctgggggcgcgagaatcctgtggcggagaaaaaaagggggcctnnnnnnnnnnnnnnnnnnnnnnnnnnnnnnnnnnnnnnnnnnnnaaactttttctctcgtcctgcggatatcgctaaagggggagatctccccccggggccctttttttccgcggcgtgggggttagtaattcccacacgaatcgcagcatctttgtttggggacaagaaaaaacagacaac

SEQ ID NO: 232039 - DNA, 1080 bp, Homo Sapiens
  misc_feature (506)..(516): n is a, c, g, or t
gggacacttcaagtagcacggagttaggaaatacaggagtgggaggggaaagaatctaactataggcctttccttctgctttcaccgaccttctcttgcacccccaaagtaacgcttcaaaattctgtagtaaagagccccatctaagcggccggacaccacagtaaccgtatgctggttttgtttctctctccccaccccagtccttcccgcctgcacagctcccagactcgcccgcccgccccgaagctgttcggcctcctttctagcccgctttccagcctcggaaggttcttctctcaccttctccggcgaccccctcccgaggctccccggaggggcctggacttctcccccctggtttccgccctgccgggccgcccggctctcgaaggggcaccaaggagcctgccgggcccgccttctcccttcctgcctcggggccggcgcctggcacctgccccgggcccgaaccctacggggagggtctccccccgctgcaaggnnnnnnnnnnntcccgggtaggcccaagcccccagggggagagagaagaaacgccccacccgcttgtggacacaaaagcccacggcccttaatggcccggggggtctcctttttggccatcggaaaaccacaacccacccaatccgtggggcggcttaattcctcacagctggcgacaaccaattcgcaacggcgccccctaacaaccttgggaaacatgcatatgagcgggcccggagaccccctcttgtaaaacacctcccacacctccgaacctcgtgggcttggaccccccttctctaacaaacagtgcgaaggcgcgtctacaaaatccttttcatggagaagacaaccccgcacgcgtcgaagtgcccccatataaagagggcgggaaaaatacaacaaggggtcacacagattggggcgcccgcatgagacacacgccccccgcgggcagttttgggcggggttgcgtcgcgtgggtgtttgtcgcatctgccccagcggtctgggcgcgctagacaagcgcaggggggccgcggttggaaagaaaaatacttctatgcccctcgctc

SEQ ID NO: 232040 - DNA, 922 bp, Homo Sapiens
ggccttccagcaggcctaataggatggcatctaatatttttggaccaacagaagaacctcagaacatacccaagaggacaaatcccccagggggtaaaggaagtggtatctttgacgaatcaacccccgtgcagactcgacagcacctgaacccacctggagggaagaccagcgacatttttgggtctccggtcactgccacttcacgcttggcacacccaaacaaacccaaggatcatgttttcttatgtgaaggagaagaaccaaaatcggatcttaaagctgcaaggagcatcccggctggagcagagccaggcattatgtggattcagggtaaacttctcagactgtgagcctgagagttcctctctaggaggctccacaccattctgcctgctagatcggggccagatgagatgaaagtcaacgcttgagaaagaaaaccaccatgcattaactgtacccaaagccccgaaccaaacaaaaatgaatcttggtcggccggcctcggcccctcgaacaagctttcctaaaccattccgtttgggggccccgggccccagcaaggaaaagggaaccctggcccaatacgctgtttcccaaacgaagatccctggcccatgaaataagtgccttgggatttcttcacccacaataaaaaaccgcccccgggcgccacaccggaacgtttcctgaaacaatatcccagaatggggggttcctgacgggcccattacctggcgccctattcccacccgcggagtcccaggcggcgccccggacctctaatattaggcccccggccccgggcccctcattgtgaggcaatgggtggataattcatttaccccctttccgctcccctttgtaaacccctctccccacaaccgccttgatataacccttgatattactccgcccc

SEQ ID NO: 232041 - DNA, 932 bp, Homo Sapiens
  misc_feature (212)..(352): n is a, c, g, or t
  misc_feature (617)..(626): n is a, c, g, or t
  misc_feature (742)..(752): n is a, c, g, or t
  misc_feature (822)..(831): n is a, c, g, or t
ggggctagagcaacgaccgagagccggagaaaggcgaaaggcgcggtgagcaatcgccgacgtagagagggcagccctccgcgctgcaatattgagaaggcacccgcgggacgcatgcgcacggcggacggaggcgagccggccggggcttcctccccggccggcagggtggacggcgggctcggtctttgcatgcaccaccacatctggcnnnnnnnnnnnnnnnnnnnnnnnnnnnnnnnnnnnnnnnnnnnnnnnnnnnnnnnnnnnnnnnnnnnnnnnnnnnnnnnnnnnnnnnnnnnnnnnnnnnnnnnnnnnnnnnnnnnnnnnnnnnnnnnnnnnnnnnnnnnnngcttctgttgccaccgaggctgccagaacacgcaaggaataatcctcccctagagccttcccaggccgatgtctggccctcgcgacgcgtggggcctgaacttttactcggccgcccatgtggccccctcggtcgcgctgtgttttctgccccctctgtgtttcgcttccgtccgcctaggcgccgcgcttaggtaccccccacgcccggccgtcccggatgccgtttttcctttcccggccgcagtgccaagattaccctccgnnnnnnnnnngccttttatccccacggattatcctttcccttgctgccccgtttcccccaccacccccgtttcgcgcgcgggcaccattgatggttcccccgcgcgccttttcttttgctattttnnnnnnnnnnntcctttgcgtgggttgctcccccctccctgtctcttcccttactattccccctgttttccctaccggcgnnnnnnnnnngctaatagtcacccaatgtctttttgcacccggactttcacgttcccccgcccgttatagggcccgctgggttcctcgcgcccataattagcgtgagtacc

SEQ ID NO: 232042 - DNA, 781 bp, Homo Sapiens
  misc_feature (101)..(341): n is a, c, g, or t
  misc_feature (387)..(683): n is a, c, g, or t
gggctcgcgcgtccggaggaaccttggcttggcgccccatcctggtagcctcaaacttcatagcactttgtggtttttcttaaaactctgagcctgtgccnnnnnnnnnnnnnnnnnnnnnnnnnnnnnnnnnnnnnnnnnnnnnnnnnnnnnnnnnnnnnnnnnnnnnnnnnnnnnnnnnnnnnnnnnnnnnnnnnnnnnnnnnnnnnnnnnnnnnnnnnnnnnnnnnnnnnnnnnnnnnnnnnnnnnnnnnnnnnnnnnnnnnnnnnnnnnnnnnnnnnnnnnnnnnnnnnnnnnnnnnnnnnnnnnnnnnnnnnnnnnnnnnnnnnnnnnnnnnnnnngcaaacaaacaacttgggcctgtgccgaagggtctgggcagatctnnnnnnnnnnnnnnnnnnnnnnnnnnnnnnnnnnnnnnnnnnnnnnnnnnnnnnnnnnnnnnnnnnnnnnnnnnnnnnnnnnnnnnnnnnnnnnnnnnnnnnnnnnnnnnnnnnnnnnnnnnnnnnnnnnnnnnnnnnnnnnnnnnnnnnnnnnnnnnnnnnnnnnnnnnnnnnnnnnnnnnnnnnnnnnnnnnnnnnnnnnnnnnnnnnnnnnnnnnnnnnnnnnnnnnnnnnnnnnnnnnnnnnnnnnnnnnnnnnnnnnnnnnnnnnnnnnnnnnnnnnnnnnnnnnnnnnnnngcaaagacgcaaacagatgcctgtgcaccaaagttcacggcagcatcctttcgccatagtggccagcatccgttcgtcacagcgggcatcatccttta

SEQ ID NO: 232043 - DNA, 512 bp, Homo Sapiens
  misc_feature (42)..(114): n is a, c, g, or t
  misc_feature (133)..(195): n is a, c, g, or t
  misc_feature (246)..(367): n is a, c, g, or t
  misc_feature (370)..(455): n is a, c, g, or t
gtccatcttgtttcatttgcttgccccgcccccgagacggannnnnnnnnnnnnnnnnnnnnnnnnnnnnnnnnnnnnnnnnnnnnnnnnnnnnnnnnnnnnnnnnnnnnnnnnaagcttgtccaggttgatnnnnnnnnnnnnnnnnnnnnnnnnnnnnnnnnnnnnnnnnnnnnnnnnnnnnnnnnnnnnnnntgagccaccgtggccccaacctcactttgccttctttatcccttaccactnnnnnnnnnnnnnnnnnnnnnnnnnnnnnnnnnnnnnnnnnnnnnnnnnnnnnnnnnnnnnnnnnnnnnnnnnnnnnnnnnnnnnnnnnnnnnnnnnnnnnnnnnnnnnnnnnnnnnnnnnnaannnnnnnnnnnnnnnnnnnnnnnnnnnnnnnnnnnnnnnnnnnnnnnnnnnnnnnnnnnnnnnnnnnnnnnnnnnnnnnnnnnnnngccaaacaacacaatttaaccaccggggggggctcccccctgggggttttaataaaa

SEQ ID NO: 232044 - DNA, 338 bp, Homo Sapiens
tctccgatgcccgtttgctgagaggacgcgtatagtggtgggcggcctggaccctggaaagatttcctaaacatttcgttgggggccgggccccagttggttatttaacaatgatcaactggttcctagagatctggaaaggcaaggttggttcccaccataataaaacccccggggaaaccaggggttcggaacacccccgaaggagtttcggagggcattacccgggatcaaaaaaccgggggccccaagcggagcctcaaaaatcaaattttacgcccgcggcccttggtctttttatattggaaggaatttggtgttggaaaaatccccaattt

SEQ ID NO: 232045 - DNA, 856 bp, Homo Sapiens
  misc_feature (136)..(136): n is a, c, g, or t
  misc_feature (138)..(139): n is a, c, g, or t
  misc_feature (143)..(144): n is a, c, g, or t
  misc_feature (222)..(222): n is a, c, g, or t
  misc_feature (274)..(282): n is a, c, g, or t
  misc_feature (302)..(312): n is a, c, g, or t
  misc_feature (425)..(460): n is a, c, g, or t
  misc_feature (564)..(605): n is a, c, g, or t
ggggccattggcctggcaggcaggatcgaggaggaagtggctgattactgagcggttcttcctcacctggcttgggccactgtgcacagctgtgccgctggctcagccccgccccctgcggccctccgccgtggcntnntccnncccttcccctacagagagatgctgtcccgtgggtggtttcaccgagacctcagtgggctggatgcagagaccctgctncagggccgaggtgtccacggtagctttcctgggctccgggcccagtcccccnnnnnnnnncccggggggggagttttttnnnnnnnnnnnacccaccggaagaaagaaacaccaatatttataaccccccatagtaatttttaaacccactaaccacacccccactccctctccttttccgcgctccacgtccagcgagcttnnnnnnnnnnnnnnnnnnnnnnnnnnnnnnnnnnnntcaagaagacccaccctcgcgccacgcacaaaacacccacacagtccccccctacagtagaaattccgacgctgttcttcccccgttattcccttcatcatttnnnnnnnnnnnnnnnnnnnnnnnnnnnnnnnnnnnnnnnnnntcagcagacaaaatgacaagccagccacacccccccagagcggtgtcgtggcgtctccccgccggcctctactcccgccgcagttgtcgaccaccccccaaaacgccaaccaacccgcctggcccccagctccttttagcttagccactctctcaatttttatccctcagaagaagaagtccaacctccaactcaccccaaccgacagccccgccccccgcgccgcttccagagctcacgctcacgatctt

SEQ ID NO: 232046 - DNA, 297 bp, Homo Sapiens
  misc_feature (95)..(95): n is a, c, g, or t
  misc_feature (97)..(97): n is a, c, g, or t
  misc_feature (99)..(100): n is a, c, g, or t
  misc_feature (123)..(123): n is a, c, g, or t
  misc_feature (211)..(211): n is a, c, g, or t
tcctccggcggcagcgggctgctcgtggacgtgttctcagactcggcctctgtggtcgcgcctctcgctcctggctccgaaagacactttgccangntnntgttgtaaaaacatgggtgtggntgttgaaaaacagctgcttccaatttggacttaagtctgaatttccggagaattttaggtccggatggttatcttttatggtaaatanaaccctcccccccgttccctaaactttttacccccacacctaattttggtttaaaagaaaccttttaagcctaaaccctgaaacct

SEQ ID NO: 232047 - DNA, 852 bp, Homo Sapiens
  misc_feature (119)..(231): n is a, c, g, or t
  misc_feature (241)..(241): n is a, c, g, or t
  misc_feature (365)..(373): n is a, c, g, or t
  misc_feature (774)..(812): n is a, c, g, or t
ggtggattcaagttcttgtatctgtctgttctgggacctggggattgtgagggttccctcacagccagcacgacccccagaaagaggcgtcccacaataaacacgtcacctgctcttgnnnnnnnnnnnnnnnnnnnnnnnnnnnnnnnnnnnnnnnnnnnnnnnnnnnnnnnnnnnnnnnnnnnnnnnnnnnnnnnnnnnnnnnnnnnnnnnnnnnnnnnnnnnnnnnnnggaagtctcntttggccctcggcaaaactttttaaaccaataaggttgggggccgggccccaaaaagaattggaacaggataaaggttggttctcgggccattttgtcacggcaaagggttggcatttcttccnnnnnnnnncccccgggggaaaagagggggtttggaaaccttcaaaaggaatttcgaggggcttcattgtttttttacaaccggacttgcgcctcgcggaattactgtgtccccccaccaggcactcccccgactttttgttctaattaaaagggtttttgaccctaatgaaaccccggaaataaggaatttgtaaccctggaatggaaaaggtgcgcaaaaacatgggccctgtgcaaataaatttgtcccatggggcaaaccccgggggccaaaaagttgaaaattttcgcccggtttgattgagaactgggagaaaatcccccaagggttccttataaaacaaaagaaggtttatcaaaaaaccctttgcggaaataggcgaaaaattgttgcggaaaaggcccccnnnnnnnnnnnnnnnnnnnnnnnnnnnnnnnnnnnnnnngacgcgggggatacctctccgggagcggtaaaaccaggtg

SEQ ID NO: 232048 - DNA, 753 bp, Homo Sapiens
  misc_feature (345)..(496): n is a, c, g, or t
  misc_feature (552)..(586): n is a, c, g, or t
  misc_feature (665)..(665): n is a, c, g, or t
  misc_feature (710)..(710): n is a, c, g, or t
ggggctgcgcagcggggttttggccaaattgggcgagggcacaaaataaccacttaccccttctcaccgaggaagagcgggagaaagggtatggcacagtcacaagggtgggtgaaaagatacatcaaggccttttgtaaaggcttctttgtggcggtgcctgtggcagtgactttcttggatcgggtcgcctgtgtggcaagagtagaaggagcatcgatgcagccttctttgaatcctggggggagccagtcatctgatgtggtgcttttgaaccactggaaagtgaggaattttgaagtacaccgtggtgacattgtatcattggtacggagtttcgctctnnnnnnnnnnnnnnnnnnnnnnnnnnnnnnnnnnnnnnnnnnnnnnnnnnnnnnnnnnnnnnnnnnnnnnnnnnnnnnnnnnnnnnnnnnnnnnnnnnnnnnnnnnnnnnnnnnnnnnnnnnnnnnnnnnnnnnnnnnnnnnnnnnnnnnnnctgggtttctccatgttggtcaggctggccttgaactcctgacctcaggtgatctnnnnnnnnnnnnnnnnnnnnnnnnnnnnnnnnnnngcgtgagccactgtccaaggccatcaatgtggaattttatacctagtggaaatatctttcaaaaataaagatgaaatanaaacttgtttagatgaagtaaagatgaaaaaaattagtcactggncagaccggtactgaaagatatgcctaaaaaaagttcttcagac

SEQ ID NO: 232049 - DNA, 893 bp, Homo Sapiens
  misc_feature (161)..(239): n is a, c, g, or t
  misc_feature (555)..(555): n is a, c, g, or t
ggggaagccggcgagcggtgaggaggaggcgccctcgcgtgtggagagcggactccgcctggactccaccgcccacggccgcatcccatcgccgcacaagatcgccggagtcatattatcgacgtagttaaagcccactagcctaaagccgggcggactgnnnnnnnnnnnnnnnnnnnnnnnnnnnnnnnnnnnnnnnnnnnnnnnnnnnnnnnnnnnnnnnnnnnnnnnnnnnnnnncaagaaactggacaccctccaccggtaacatattttggcgagccagccaggagaaggtgtggtccctgatccctacggtggtggtggtaactcacacttgtttcagtgacaaccatgagtggaaaaaactaattatggttcagcactggcctgagacagtatgcgagaaaattcaaaacgactgtagagacccctccggattactgggacaatacatgggactatggccccgataaaaagtgaaggatgtaataagatccgtggccccttcaattttaagaagaagaataaaggaacctttttgccagaaaatgangggcatacctgggcctgaacgtaaattcactccgttttcccaatcgcaaccgctttctggaaggcatggagggggaaaaagcaggggaacctgcgcccgcccagggtgggatgccgctccactccccagaagaaagtactttgggcagaaagactgggaaactctaccggggaagctgggacctccaccagtgggggcttctaaaattggggggataaaaacattccctccaaattacttaccagtttggcagaattttaaaagatggccctcgcccgaagtatatggggagggaacccccaaaatccccgggccctttcaccccaacccgggatgac
